United States Patent Application Publication US 2018/0305689 A1 - sequence listing, part 127

SEQ ID NO: 1867510 - RNA, 19 nt, Artificial Sequence
  Description of Artificial Sequence: Synthetic oligonucleotide
  Antisense strand to SEQ ID NO: 1867509
uugaccacaagccaucaga

SEQ ID NO: 1867511 - RNA, 19 nt, Artificial Sequence
  Description of Artificial Sequence: Synthetic oligonucleotide
  Sense strand starting at position 204 of SEQ ID NO: 1564270
gauggcuuguggucaaguu

SEQ ID NO: 1867512 - RNA, 19 nt, Artificial Sequence
  Description of Artificial Sequence: Synthetic oligonucleotide
  Antisense strand to SEQ ID NO: 1867511
aacuugaccacaagccauc

SEQ ID NO: 1867513 - RNA, 19 nt, Artificial Sequence
  Description of Artificial Sequence: Synthetic oligonucleotide
  Sense strand starting at position 205 of SEQ ID NO: 1564270
auggcuuguggucaaguua

SEQ ID NO: 1867514 - RNA, 19 nt, Artificial Sequence
  Description of Artificial Sequence: Synthetic oligonucleotide
  Antisense strand to SEQ ID NO: 1867513
uaacuugaccacaagccau

SEQ ID NO: 1867515 - RNA, 19 nt, Artificial Sequence
  Description of Artificial Sequence: Synthetic oligonucleotide
  Sense strand starting at position 217 of SEQ ID NO: 1564270
caaguuaugccaugugucu

SEQ ID NO: 1867516 - RNA, 19 nt, Artificial Sequence
  Description of Artificial Sequence: Synthetic oligonucleotide
  Antisense strand to SEQ ID NO: 1867515
agacacauggcauaacuug

SEQ ID NO: 1867517 - RNA, 19 nt, Artificial Sequence
  Description of Artificial Sequence: Synthetic oligonucleotide
  Sense strand starting at position 243 of SEQ ID NO: 1564270
gaggaccuguggucacaua

SEQ ID NO: 1867518 - RNA, 19 nt, Artificial Sequence
  Description of Artificial Sequence: Synthetic oligonucleotide
  Antisense strand to SEQ ID NO: 1867517
uaugugaccacagguccuc

SEQ ID NO: 1867519 - RNA, 19 nt, Artificial Sequence
  Description of Artificial Sequence: Synthetic oligonucleotide
  Sense strand starting at position 280 of SEQ ID NO: 1564270
gagguccuaugucuaaaug

SEQ ID NO: 1867520 - RNA, 19 nt, Artificial Sequence
  Description of Artificial Sequence: Synthetic oligonucleotide
  Antisense strand to SEQ ID NO: 1867519
cauuuagacauaggaccuc

SEQ ID NO: 1867521 - RNA, 19 nt, Artificial Sequence
  Description of Artificial Sequence: Synthetic oligonucleotide
  Sense strand starting at position 301 of SEQ ID NO: 1564270
auuguaugccugggugcua

SEQ ID NO: 1867522 - RNA, 19 nt, Artificial Sequence
  Description of Artificial Sequence: Synthetic oligonucleotide
  Antisense strand to SEQ ID NO: 1867521
uagcacccaggcauacaau

SEQ ID NO: 1867523 - RNA, 19 nt, Artificial Sequence
  Description of Artificial Sequence: Synthetic oligonucleotide
  Sense strand starting at position 340 of SEQ ID NO: 1564270
guuucauaugagggcuaag

SEQ ID NO: 1867524 - RNA, 19 nt, Artificial Sequence
  Description of Artificial Sequence: Synthetic oligonucleotide
  Antisense strand to SEQ ID NO: 1867523
cuuagcccucauaugaaac

SEQ ID NO: 1867525 - RNA, 19 nt, Artificial Sequence
  Description of Artificial Sequence: Synthetic oligonucleotide
  Sense strand starting at position 356 of SEQ ID NO: 1564270
aagggucuguauccacaua

SEQ ID NO: 1867526 - RNA, 19 nt, Artificial Sequence
  Description of Artificial Sequence: Synthetic oligonucleotide
  Antisense strand to SEQ ID NO: 1867525
uauguggauacagacccuu

SEQ ID NO: 1867527 - RNA, 19 nt, Artificial Sequence
  Description of Artificial Sequence: Synthetic oligonucleotide
  Sense strand starting at position 370 of SEQ ID NO: 1564270
acauaauucuauuaggaug

SEQ ID NO: 1867528 - RNA, 19 nt, Artificial Sequence
  Description of Artificial Sequence: Synthetic oligonucleotide
  Antisense strand to SEQ ID NO: 1867527
cauccuaauagaauuaugu

SEQ ID NO: 1867529 - RNA, 19 nt, Artificial Sequence
  Description of Artificial Sequence: Synthetic oligonucleotide
  Sense strand starting at position 375 of SEQ ID NO: 1564270
auucuauuaggauguucga

SEQ ID NO: 1867530 - RNA, 19 nt, Artificial Sequence
  Description of Artificial Sequence: Synthetic oligonucleotide
  Antisense strand to SEQ ID NO: 1867529
ucgaacauccuaauagaau

SEQ ID NO: 1867531 - RNA, 19 nt, Artificial Sequence
  Description of Artificial Sequence: Synthetic oligonucleotide
  Sense strand starting at position 384 of SEQ ID NO: 1564270
ggauguucgacucauguuc

SEQ ID NO: 1867532 - RNA, 19 nt, Artificial Sequence
  Description of Artificial Sequence: Synthetic oligonucleotide
  Antisense strand to SEQ ID NO: 1867531
gaacaugagucgaacaucc

SEQ ID NO: 1867533 - RNA, 19 nt, Artificial Sequence
  Description of Artificial Sequence: Synthetic oligonucleotide
  Sense strand starting at position 391 of SEQ ID NO: 1564270
cgacucauguuccuaacau

SEQ ID NO: 1867534 - RNA, 19 nt, Artificial Sequence
  Description of Artificial Sequence: Synthetic oligonucleotide
  Antisense strand to SEQ ID NO: 1867533
auguuaggaacaugagucg

SEQ ID NO: 1867535 - RNA, 19 nt, Artificial Sequence
  Description of Artificial Sequence: Synthetic oligonucleotide
  Sense strand starting at position 395 of SEQ ID NO: 1564270
ucauguuccuaacauguua

SEQ ID NO: 1867536 - RNA, 19 nt, Artificial Sequence
  Description of Artificial Sequence: Synthetic oligonucleotide
  Antisense strand to SEQ ID NO: 1867535
uaacauguuaggaacauga

SEQ ID NO: 1867537 - RNA, 19 nt, Artificial Sequence
  Description of Artificial Sequence: Synthetic oligonucleotide
  Sense strand starting at position 408 of SEQ ID NO: 1564270
auguuacauguauguguau

SEQ ID NO: 1867538 - RNA, 19 nt, Artificial Sequence
  Description of Artificial Sequence: Synthetic oligonucleotide
  Antisense strand to SEQ ID NO: 1867537
auacacauacauguaacau

SEQ ID NO: 1867539 - RNA, 19 nt, Artificial Sequence
  Description of Artificial Sequence: Synthetic oligonucleotide
  Sense strand starting at position 654 of SEQ ID NO: 1564270
caaggucucugagucaguu

SEQ ID NO: 1867540 - RNA, 19 nt, Artificial Sequence
  Description of Artificial Sequence: Synthetic oligonucleotide
  Antisense strand to SEQ ID NO: 1867539
aacugacucagagaccuug

SEQ ID NO: 1867541 - RNA, 19 nt, Artificial Sequence
  Description of Artificial Sequence: Synthetic oligonucleotide
  Sense strand starting at position 758 of SEQ ID NO: 1564270
uuuaucaucugugauccuu

SEQ ID NO: 1867542 - RNA, 19 nt, Artificial Sequence
  Description of Artificial Sequence: Synthetic oligonucleotide
  Antisense strand to SEQ ID NO: 1867541
aaggaucacagaugauaaa

SEQ ID NO: 1867543 - RNA, 19 nt, Artificial Sequence
  Description of Artificial Sequence: Synthetic oligonucleotide
  Sense strand starting at position 920 of SEQ ID NO: 1564270
ucuaguccgucuuccgaua

SEQ ID NO: 1867544 - RNA, 19 nt, Artificial Sequence
  Description of Artificial Sequence: Synthetic oligonucleotide
  Antisense strand to SEQ ID NO: 1867543
uaucggaagacggacuaga

SEQ ID NO: 1867545 - RNA, 19 nt, Artificial Sequence
  Description of Artificial Sequence: Synthetic oligonucleotide
  Sense strand starting at position 1021 of SEQ ID NO: 1564270
gcuucugaccuacggagua

SEQ ID NO: 1867546 - RNA, 19 nt, Artificial Sequence
  Description of Artificial Sequence: Synthetic oligonucleotide
  Antisense strand to SEQ ID NO: 1867545
uacuccguaggucagaagc

SEQ ID NO: 1867547 - RNA, 19 nt, Artificial Sequence
  Description of Artificial Sequence: Synthetic oligonucleotide
  Sense strand starting at position 1033 of SEQ ID NO: 1564270
cggaguaucgauuagaagg

SEQ ID NO: 1867548 - RNA, 19 nt, Artificial Sequence
  Description of Artificial Sequence: Synthetic oligonucleotide
  Antisense strand to SEQ ID NO: 1867547
ccuucuaaucgauacuccg

SEQ ID NO: 1867549 - RNA, 19 nt, Artificial Sequence
  Description of Artificial Sequence: Synthetic oligonucleotide
  Sense strand starting at position 1035 of SEQ ID NO: 1564270
gaguaucgauuagaaggau

SEQ ID NO: 1867550 - RNA, 19 nt, Artificial Sequence
  Description of Artificial Sequence: Synthetic oligonucleotide
  Antisense strand to SEQ ID NO: 1867549
auccuucuaaucgauacuc

SEQ ID NO: 1867551 - RNA, 19 nt, Artificial Sequence
  Description of Artificial Sequence: Synthetic oligonucleotide
  Sense strand starting at position 1038 of SEQ ID NO: 1564270
uaucgauuagaaggauacu

SEQ ID NO: 1867552 - RNA, 19 nt, Artificial Sequence
  Description of Artificial Sequence: Synthetic oligonucleotide
  Antisense strand to SEQ ID NO: 1867551
aguauccuucuaaucgaua

SEQ ID NO: 1867553 - RNA, 19 nt, Artificial Sequence
  Description of Artificial Sequence: Synthetic oligonucleotide
  Sense strand starting at position 2248 of SEQ ID NO: 1564270
ggcgauuggcugcgaggaa

SEQ ID NO: 1867554 - RNA, 19 nt, Artificial Sequence
  Description of Artificial Sequence: Synthetic oligonucleotide
  Antisense strand to SEQ ID NO: 1867553
uuccucgcagccaaucgcc

SEQ ID NO: 1867555 - RNA, 19 nt, Artificial Sequence
  Description of Artificial Sequence: Synthetic oligonucleotide
  Sense strand starting at position 2249 of SEQ ID NO: 1564270
gcgauuggcugcgaggaaa

SEQ ID NO: 1867556 - RNA, 19 nt, Artificial Sequence
  Description of Artificial Sequence: Synthetic oligonucleotide
  Antisense strand to SEQ ID NO: 1867555
uuuccucgcagccaaucgc

SEQ ID NO: 1867557 - RNA, 19 nt, Artificial Sequence
  Description of Artificial Sequence: Synthetic oligonucleotide
  Sense strand starting at position 2399 of SEQ ID NO: 1564270
uuggaagagccucguuauc

SEQ ID NO: 1867558 - RNA, 19 nt, Artificial Sequence
  Description of Artificial Sequence: Synthetic oligonucleotide
  Antisense strand to SEQ ID NO: 1867557
gauaacgaggcucuuccaa

SEQ ID NO: 1867559 - RNA, 19 nt, Artificial Sequence
  Description of Artificial Sequence: Synthetic oligonucleotide
  Sense strand starting at position 2401 of SEQ ID NO: 1564270
ggaagagccucguuaucgu

SEQ ID NO: 1867560 - RNA, 19 nt, Artificial Sequence
  Description of Artificial Sequence: Synthetic oligonucleotide
  Antisense strand to SEQ ID NO: 1867559
acgauaacgaggcucuucc

SEQ ID NO: 1867561 - RNA, 19 nt, Artificial Sequence
  Description of Artificial Sequence: Synthetic oligonucleotide
  Sense strand starting at position 3083 of SEQ ID NO: 1564270
cugggugaacucugcugua

SEQ ID NO: 1867562 - RNA, 19 nt, Artificial Sequence
  Description of Artificial Sequence: Synthetic oligonucleotide
  Antisense strand to SEQ ID NO: 1867561
uacagcagaguucacccag

SEQ ID NO: 1867563 - RNA, 19 nt, Artificial Sequence
  Description of Artificial Sequence: Synthetic oligonucleotide
  Sense strand starting at position 3244 of SEQ ID NO: 1564270
guaacuuccucugcgucau

SEQ ID NO: 1867564 - RNA, 19 nt, Artificial Sequence
  Description of Artificial Sequence: Synthetic oligonucleotide
  Antisense strand to SEQ ID NO: 1867563
augacgcagaggaaguuac

SEQ ID NO: 1867565 - RNA, 19 nt, Artificial Sequence
  Description of Artificial Sequence: Synthetic oligonucleotide
  Sense strand starting at position 3355 of SEQ ID NO: 1564270
cccaguguaugcuguauuu

SEQ ID NO: 1867566 - RNA, 19 nt, Artificial Sequence
  Description of Artificial Sequence: Synthetic oligonucleotide
  Antisense strand to SEQ ID NO: 1867565
aaauacagcauacacuggg

SEQ ID NO: 1867567 - RNA, 19 nt, Artificial Sequence
  Description of Artificial Sequence: Synthetic oligonucleotide
  Sense strand starting at position 3392 of SEQ ID NO: 1564270
accagagauggauggucuu

SEQ ID NO: 1867568 - RNA, 19 nt, Artificial Sequence
  Description of Artificial Sequence: Synthetic oligonucleotide
  Antisense strand to SEQ ID NO: 1867567
aagaccauccaucucuggu

SEQ ID NO: 1867569 - RNA, 19 nt, Artificial Sequence
  Description of Artificial Sequence: Synthetic oligonucleotide
  Sense strand starting at position 3576 of SEQ ID NO: 1564270
agccuugucgcggagcaga

SEQ ID NO: 1867570 - RNA, 19 nt, Artificial Sequence
  Description of Artificial Sequence: Synthetic oligonucleotide
  Antisense strand to SEQ ID NO: 1867569
ucugcuccgcgacaaggcu

SEQ ID NO: 1867571 - RNA, 19 nt, Artificial Sequence
  Description of Artificial Sequence: Synthetic oligonucleotide
  Sense strand starting at position 19 of SEQ ID NO: 1564271
ggguuccucuacuccgaga

SEQ ID NO: 1867572 - RNA, 19 nt, Artificial Sequence
  Description of Artificial Sequence: Synthetic oligonucleotide
  Antisense strand to SEQ ID NO: 1867571
ucucggaguagaggaaccc

SEQ ID NO: 1867573 - RNA, 19 nt, Artificial Sequence
  Description of Artificial Sequence: Synthetic oligonucleotide
  Sense strand starting at position 21 of SEQ ID NO: 1564271
guuccucuacuccgagaaa

SEQ ID NO: 1867574 - RNA, 19 nt, Artificial Sequence
  Description of Artificial Sequence: Synthetic oligonucleotide
  Antisense strand to SEQ ID NO: 1867573
uuucucggaguagaggaac

SEQ ID NO: 1867575 - RNA, 19 nt, Artificial Sequence
  Description of Artificial Sequence: Synthetic oligonucleotide
  Sense strand starting at position 172 of SEQ ID NO: 1564271
ccucaucaguuucuagaca

SEQ ID NO: 1867576 - RNA, 19 nt, Artificial Sequence
  Description of Artificial Sequence: Synthetic oligonucleotide
  Antisense strand to SEQ ID NO: 1867575
ugucuagaaacugaugagg

SEQ ID NO: 1867577 - RNA, 19 nt, Artificial Sequence
  Description of Artificial Sequence: Synthetic oligonucleotide
  Sense strand starting at position 195 of SEQ ID NO: 1564271
cagcguucucaucagucuu

SEQ ID NO: 1867578 - RNA, 19 nt, Artificial Sequence
  Description of Artificial Sequence: Synthetic oligonucleotide
  Antisense strand to SEQ ID NO: 1867577
aagacugaugagaacgcug

SEQ ID NO: 1867579 - RNA, 19 nt, Artificial Sequence
  Description of Artificial Sequence: Synthetic oligonucleotide
  Sense strand starting at position 250 of SEQ ID NO: 1564271
ugaacuuucuagccagcaa

SEQ ID NO: 1867580 - RNA, 19 nt, Artificial Sequence
  Description of Artificial Sequence: Synthetic oligonucleotide
  Antisense strand to SEQ ID NO: 1867579
uugcuggcuagaaaguuca

SEQ ID NO: 1867581 - RNA, 19 nt, Artificial Sequence
  Description of Artificial Sequence: Synthetic oligonucleotide
  Sense strand starting at position 332 of SEQ ID NO: 1564271
acaguuugccuuugagaaa

SEQ ID NO: 1867582 - RNA, 19 nt, Artificial Sequence
  Description of Artificial Sequence: Synthetic oligonucleotide
  Antisense strand to SEQ ID NO: 1867581
uuucucaaaggcaaacugu

SEQ ID NO: 1867583 - RNA, 19 nt, Artificial Sequence
  Description of Artificial Sequence: Synthetic oligonucleotide
  Sense strand starting at position 354 of SEQ ID NO: 1564271
cuguucugcugggucuuaa

SEQ ID NO: 1867584 - RNA, 19 nt, Artificial Sequence
  Description of Artificial Sequence: Synthetic oligonucleotide
  Antisense strand to SEQ ID NO: 1867583
uuaagacccagcagaacag

SEQ ID NO: 1867585 - RNA, 19 nt, Artificial Sequence
  Description of Artificial Sequence: Synthetic oligonucleotide
  Sense strand starting at position 385 of SEQ ID NO: 1564271
auagaaagcuaaugagaaa

SEQ ID NO: 1867586 - RNA, 19 nt, Artificial Sequence
  Description of Artificial Sequence: Synthetic oligonucleotide
  Antisense strand to SEQ ID NO: 1867585
uuucucauuagcuuucuau

SEQ ID NO: 1867587 - RNA, 19 nt, Artificial Sequence
  Description of Artificial Sequence: Synthetic oligonucleotide
  Sense strand starting at position 547 of SEQ ID NO: 1564271
cagaacuaguuagcaugaa

SEQ ID NO: 1867588 - RNA, 19 nt, Artificial Sequence
  Description of Artificial Sequence: Synthetic oligonucleotide
  Antisense strand to SEQ ID NO: 1867587
uucaugcuaacuaguucug

SEQ ID NO: 1867589 - RNA, 19 nt, Artificial Sequence
  Description of Artificial Sequence: Synthetic oligonucleotide
  Sense strand starting at position 548 of SEQ ID NO: 1564271
agaacuaguuagcaugaau

SEQ ID NO: 1867590 - RNA, 19 nt, Artificial Sequence
  Description of Artificial Sequence: Synthetic oligonucleotide
  Antisense strand to SEQ ID NO: 1867589
auucaugcuaacuaguucu

SEQ ID NO: 1867591 - RNA, 19 nt, Artificial Sequence
  Description of Artificial Sequence: Synthetic oligonucleotide
  Sense strand starting at position 570 of SEQ ID NO: 1564271
ggcaaacacuggccuaaau

SEQ ID NO: 1867592 - RNA, 19 nt, Artificial Sequence
  Description of Artificial Sequence: Synthetic oligonucleotide
  Antisense strand to SEQ ID NO: 1867591
auuuaggccaguguuugcc

SEQ ID NO: 1867593 - RNA, 19 nt, Artificial Sequence
  Description of Artificial Sequence: Synthetic oligonucleotide
  Sense strand starting at position 755 of SEQ ID NO: 1564271
gccacagaacuugaguguu

SEQ ID NO: 1867594 - RNA, 19 nt, Artificial Sequence
  Description of Artificial Sequence: Synthetic oligonucleotide
  Antisense strand to SEQ ID NO: 1867593
aacacucaaguucuguggc

SEQ ID NO: 1867595 - RNA, 19 nt, Artificial Sequence
  Description of Artificial Sequence: Synthetic oligonucleotide
  Sense strand starting at position 880 of SEQ ID NO: 1564271
ugagcuccucuuuaucaga

SEQ ID NO: 1867596 - RNA, 19 nt, Artificial Sequence
  Description of Artificial Sequence: Synthetic oligonucleotide
  Antisense strand to SEQ ID NO: 1867595
ucugauaaagaggagcuca

SEQ ID NO: 1867597 - RNA, 19 nt, Artificial Sequence
  Description of Artificial Sequence: Synthetic oligonucleotide
  Sense strand starting at position 917 of SEQ ID NO: 1564271
acuauuuacguguguggau

SEQ ID NO: 1867598 - RNA, 19 nt, Artificial Sequence
  Description of Artificial Sequence: Synthetic oligonucleotide
  Antisense strand to SEQ ID NO: 1867597
auccacacacguaaauagu

SEQ ID NO: 1867599 - RNA, 19 nt, Artificial Sequence
  Description of Artificial Sequence: Synthetic oligonucleotide
  Sense strand starting at position 945 of SEQ ID NO: 1564271
auaguauacuuucuugaga

SEQ ID NO: 1867600 - RNA, 19 nt, Artificial Sequence
  Description of Artificial Sequence: Synthetic oligonucleotide
  Antisense strand to SEQ ID NO: 1867599
ucucaagaaaguauacuau

SEQ ID NO: 1867601 - RNA, 19 nt, Artificial Sequence
  Description of Artificial Sequence: Synthetic oligonucleotide
  Sense strand starting at position 946 of SEQ ID NO: 1564271
uaguauacuuucuugagag

SEQ ID NO: 1867602 - RNA, 19 nt, Artificial Sequence
  Description of Artificial Sequence: Synthetic oligonucleotide
  Antisense strand to SEQ ID NO: 1867601
cucucaagaaaguauacua

SEQ ID NO: 1867603 - RNA, 19 nt, Artificial Sequence
  Description of Artificial Sequence: Synthetic oligonucleotide
  Sense strand starting at position 962 of SEQ ID NO: 1564271
gagagaugacucugccuaa

SEQ ID NO: 1867604 - RNA, 19 nt, Artificial Sequence
  Description of Artificial Sequence: Synthetic oligonucleotide
  Antisense strand to SEQ ID NO: 1867603
uuaggcagagucaucucuc

SEQ ID NO: 1867605 - RNA, 19 nt, Artificial Sequence
  Description of Artificial Sequence: Synthetic oligonucleotide
  Sense strand starting at position 963 of SEQ ID NO: 1564271
agagaugacucugccuaau

SEQ ID NO: 1867606 - RNA, 19 nt, Artificial Sequence
  Description of Artificial Sequence: Synthetic oligonucleotide
  Antisense strand to SEQ ID NO: 1867605
auuaggcagagucaucucu

SEQ ID NO: 1867607 - RNA, 19 nt, Artificial Sequence
  Description of Artificial Sequence: Synthetic oligonucleotide
  Sense strand starting at position 965 of SEQ ID NO: 1564271
agaugacucugccuaaugu

SEQ ID NO: 1867608 - RNA, 19 nt, Artificial Sequence
  Description of Artificial Sequence: Synthetic oligonucleotide
  Antisense strand to SEQ ID NO: 1867607
acauuaggcagagucaucu

SEQ ID NO: 1867609 - RNA, 19 nt, Artificial Sequence
  Description of Artificial Sequence: Synthetic oligonucleotide
  Sense strand starting at position 1052 of SEQ ID NO: 1564271
ggccucuuguucuuguaua

SEQ ID NO: 1867610 - RNA, 19 nt, Artificial Sequence
  Description of Artificial Sequence: Synthetic oligonucleotide
  Antisense strand to SEQ ID NO: 1867609
uauacaagaacaagaggcc

SEQ ID NO: 1867611 - RNA, 19 nt, Artificial Sequence
  Description of Artificial Sequence: Synthetic oligonucleotide
  Sense strand starting at position 1152 of SEQ ID NO: 1564271
gccaaaucgaaaugugcua

SEQ ID NO: 1867612 - RNA, 19 nt, Artificial Sequence
  Description of Artificial Sequence: Synthetic oligonucleotide
  Antisense strand to SEQ ID NO: 1867611
uagcacauuucgauuuggc

SEQ ID NO: 1867613 - RNA, 19 nt, Artificial Sequence
  Description of Artificial Sequence: Synthetic oligonucleotide
  Sense strand starting at position 1304 of SEQ ID NO: 1564271
uuauuaaaguggcuacuaa

SEQ ID NO: 1867614 - RNA, 19 nt, Artificial Sequence
  Description of Artificial Sequence: Synthetic oligonucleotide
  Antisense strand to SEQ ID NO: 1867613
uuaguagccacuuuaauaa

SEQ ID NO: 1867615 - RNA, 19 nt, Artificial Sequence
  Description of Artificial Sequence: Synthetic oligonucleotide
  Sense strand starting at position 1333 of SEQ ID NO: 1564271
auuauaugugacuagcaua

SEQ ID NO: 1867616 - RNA, 19 nt, Artificial Sequence
  Description of Artificial Sequence: Synthetic oligonucleotide
  Antisense strand to SEQ ID NO: 1867615
uaugcuagucacauauaau

SEQ ID NO: 1867617 - RNA, 19 nt, Artificial Sequence
  Description of Artificial Sequence: Synthetic oligonucleotide
  Sense strand starting at position 1338 of SEQ ID NO: 1564271
augugacuagcauaauauu

SEQ ID NO: 1867618 - RNA, 19 nt, Artificial Sequence
  Description of Artificial Sequence: Synthetic oligonucleotide
  Antisense strand to SEQ ID NO: 1867617
aauauuaugcuagucacau

SEQ ID NO: 1867619 - RNA, 19 nt, Artificial Sequence
  Description of Artificial Sequence: Synthetic oligonucleotide
  Sense strand starting at position 1432 of SEQ ID NO: 1564271
cugccuuguccagaguaau

SEQ ID NO: 1867620 - RNA, 19 nt, Artificial Sequence
  Description of Artificial Sequence: Synthetic oligonucleotide
  Antisense strand to SEQ ID NO: 1867619
auuacucuggacaaggcag

SEQ ID NO: 1867621 - RNA, 19 nt, Artificial Sequence
  Description of Artificial Sequence: Synthetic oligonucleotide
  Sense strand starting at position 1443 of SEQ ID NO: 1564271
agaguaaucccacgaguca

SEQ ID NO: 1867622 - RNA, 19 nt, Artificial Sequence
  Description of Artificial Sequence: Synthetic oligonucleotide
  Antisense strand to SEQ ID NO: 1867621
ugacucgugggauuacucu

SEQ ID NO: 1867623 - RNA, 19 nt, Artificial Sequence
  Description of Artificial Sequence: Synthetic oligonucleotide
  Sense strand starting at position 1444 of SEQ ID NO: 1564271
gaguaaucccacgagucag

SEQ ID NO: 1867624 - RNA, 19 nt, Artificial Sequence
  Description of Artificial Sequence: Synthetic oligonucleotide
  Antisense strand to SEQ ID NO: 1867623
cugacucgugggauuacuc

SEQ ID NO: 1867625 - RNA, 19 nt, Artificial Sequence
  Description of Artificial Sequence: Synthetic oligonucleotide
  Sense strand starting at position 2141 of SEQ ID NO: 1564271
aucugucagagcgaucgau

SEQ ID NO: 1867626 - RNA, 19 nt, Artificial Sequence
  Description of Artificial Sequence: Synthetic oligonucleotide
  Antisense strand to SEQ ID NO: 1867625
aucgaucgcucugacagau

SEQ ID NO: 1867627 - RNA, 19 nt, Artificial Sequence
  Description of Artificial Sequence: Synthetic oligonucleotide
  Sense strand starting at position 2238 of SEQ ID NO: 1564271
ggguacugcggaggaaaua

SEQ ID NO: 1867628 - RNA, 19 nt, Artificial Sequence
  Description of Artificial Sequence: Synthetic oligonucleotide
  Antisense strand to SEQ ID NO: 1867627
uauuuccuccgcaguaccc

SEQ ID NO: 1867629 - RNA, 19 nt, Artificial Sequence
  Description of Artificial Sequence: Synthetic oligonucleotide
  Sense strand starting at position 2239 of SEQ ID NO: 1564271
gguacugcggaggaaauau

SEQ ID NO: 1867630 - RNA, 19 nt, Artificial Sequence
  Description of Artificial Sequence: Synthetic oligonucleotide
  Antisense strand to SEQ ID NO: 1867629
auauuuccuccgcaguacc

SEQ ID NO: 1867631 - RNA, 19 nt, Artificial Sequence
  Description of Artificial Sequence: Synthetic oligonucleotide
  Sense strand starting at position 2307 of SEQ ID NO: 1564271
cagugaguauagccuuaaa

SEQ ID NO: 1867632 - RNA, 19 nt, Artificial Sequence
  Description of Artificial Sequence: Synthetic oligonucleotide
  Antisense strand to SEQ ID NO: 1867631
uuuaaggcuauacucacug

SEQ ID NO: 1867633 - RNA, 19 nt, Artificial Sequence
  Description of Artificial Sequence: Synthetic oligonucleotide
  Sense strand starting at position 2416 of SEQ ID NO: 1564271
guccacguccgugaauuca

SEQ ID NO: 1867634 - RNA, 19 nt, Artificial Sequence
  Description of Artificial Sequence: Synthetic oligonucleotide
  Antisense strand to SEQ ID NO: 1867633
ugaauucacggacguggac

SEQ ID NO: 1867635 - RNA, 19 nt, Artificial Sequence
  Description of Artificial Sequence: Synthetic oligonucleotide
  Sense strand starting at position 2468 of SEQ ID NO: 1564271
uugcaucugcauugaacau

SEQ ID NO: 1867636 - RNA, 19 nt, Artificial Sequence
  Description of Artificial Sequence: Synthetic oligonucleotide
  Antisense strand to SEQ ID NO: 1867635
auguucaaugcagaugcaa

SEQ ID NO: 1867637 - RNA, 19 nt, Artificial Sequence
  Description of Artificial Sequence: Synthetic oligonucleotide
  Sense strand starting at position 2478 of SEQ ID NO: 1564271
auugaacauguguauacuu

SEQ ID NO: 1867638 - RNA, 19 nt, Artificial Sequence
  Description of Artificial Sequence: Synthetic oligonucleotide
  Antisense strand to SEQ ID NO: 1867637
aaguauacacauguucaau

SEQ ID NO: 1867639 - RNA, 19 nt, Artificial Sequence
  Description of Artificial Sequence: Synthetic oligonucleotide
  Sense strand starting at position 2810 of SEQ ID NO: 1564271
ucgaacuccuggguuuaau

SEQ ID NO: 1867640 - RNA, 19 nt, Artificial Sequence
  Description of Artificial Sequence: Synthetic oligonucleotide
  Antisense strand to SEQ ID NO: 1867639
auuaaacccaggaguucga

SEQ ID NO: 1867641 - RNA, 19 nt, Artificial Sequence
  Description of Artificial Sequence: Synthetic oligonucleotide
  Sense strand starting at position 3017 of SEQ ID NO: 1564271
gggauaacuguacauguuu

SEQ ID NO: 1867642 - RNA, 19 nt, Artificial Sequence
  Description of Artificial Sequence: Synthetic oligonucleotide
  Antisense strand to SEQ ID NO: 1867641
aaacauguacaguuauccc

SEQ ID NO: 1867643 - RNA, 19 nt, Artificial Sequence
  Description of Artificial Sequence: Synthetic oligonucleotide
  Sense strand starting at position 3086 of SEQ ID NO: 1564271
acaguaggccuccauagau

SEQ ID NO: 1867644 - RNA, 19 nt, Artificial Sequence
  Description of Artificial Sequence: Synthetic oligonucleotide
  Antisense strand to SEQ ID NO: 1867643
aucuauggaggccuacugu

SEQ ID NO: 1867645 - RNA, 19 nt, Artificial Sequence
  Description of Artificial Sequence: Synthetic oligonucleotide
  Sense strand starting at position 3124 of SEQ ID NO: 1564271
aaaguauguugucugacca

SEQ ID NO: 1867646 - RNA, 19 nt, Artificial Sequence
  Description of Artificial Sequence: Synthetic oligonucleotide
  Antisense strand to SEQ ID NO: 1867645
uggucagacaacauacuuu

SEQ ID NO: 1867647 - RNA, 19 nt, Artificial Sequence
  Description of Artificial Sequence: Synthetic oligonucleotide
  Sense strand starting at position 3329 of SEQ ID NO: 1564271
gagggaaaucuuuagcugu

SEQ ID NO: 1867648 - RNA, 19 nt, Artificial Sequence
  Description of Artificial Sequence: Synthetic oligonucleotide
  Antisense strand to SEQ ID NO: 1867647
acagcuaaagauuucccuc

SEQ ID NO: 1867649 - RNA, 19 nt, Artificial Sequence
  Description of Artificial Sequence: Synthetic oligonucleotide
  Sense strand starting at position 3897 of SEQ ID NO: 1564271
cagcauggucaauaugaac

SEQ ID NO: 1867650 - RNA, 19 nt, Artificial Sequence
  Description of Artificial Sequence: Synthetic oligonucleotide
  Antisense strand to SEQ ID NO: 1867649
guucauauugaccaugcug

SEQ ID NO: 1867651 - RNA, 19 nt, Artificial Sequence
  Description of Artificial Sequence: Synthetic oligonucleotide
  Sense strand starting at position 127 of SEQ ID NO: 1564272
accuccuaucuugguuauu

SEQ ID NO: 1867652 - RNA, 19 nt, Artificial Sequence
  Description of Artificial Sequence: Synthetic oligonucleotide
  Antisense strand to SEQ ID NO: 1867651
aauaaccaagauaggaggu

SEQ ID NO: 1867653 - RNA, 19 nt, Artificial Sequence
  Description of Artificial Sequence: Synthetic oligonucleotide
  Sense strand starting at position 194 of SEQ ID NO: 1564272
uccuuaucccagugucaua

SEQ ID NO: 1867654 - RNA, 19 nt, Artificial Sequence
  Description of Artificial Sequence: Synthetic oligonucleotide
  Antisense strand to SEQ ID NO: 1867653
uaugacacugggauaagga

SEQ ID NO: 1867655 - RNA, 19 nt, Artificial Sequence
  Description of Artificial Sequence: Synthetic oligonucleotide
  Sense strand starting at position 319 of SEQ ID NO: 1564272
aagugaaguguccaaagug

SEQ ID NO: 1867656 - RNA, 19 nt, Artificial Sequence
  Description of Artificial Sequence: Synthetic oligonucleotide
  Antisense strand to SEQ ID NO: 1867655
cacuuuggacacuucacuu

SEQ ID NO: 1867657 - RNA, 19 nt, Artificial Sequence
  Description of Artificial Sequence: Synthetic oligonucleotide
  Sense strand starting at position 340 of SEQ ID NO: 1564272
gguguugaaucccuuacag

SEQ ID NO: 1867658 - RNA, 19 nt, Artificial Sequence
  Description of Artificial Sequence: Synthetic oligonucleotide
  Antisense strand to SEQ ID NO: 1867657
cuguaagggauucaacacc

SEQ ID NO: 1867659 - RNA, 19 nt, Artificial Sequence
  Description of Artificial Sequence: Synthetic oligonucleotide
  Sense strand starting at position 441 of SEQ ID NO: 1564272
agagguaauugagaaguag

SEQ ID NO: 1867660 - RNA, 19 nt, Artificial Sequence
  Description of Artificial Sequence: Synthetic oligonucleotide
  Antisense strand to SEQ ID NO: 1867659
cuacuucucaauuaccucu

SEQ ID NO: 1867661 - RNA, 19 nt, Artificial Sequence
  Description of Artificial Sequence: Synthetic oligonucleotide
  Sense strand starting at position 549 of SEQ ID NO: 1564272
ggaccuuuguucucccauu

SEQ ID NO: 1867662 - RNA, 19 nt, Artificial Sequence
  Description of Artificial Sequence: Synthetic oligonucleotide
  Antisense strand to SEQ ID NO: 1867661
aaugggagaacaaaggucc

SEQ ID NO: 1867663 - RNA, 19 nt, Artificial Sequence
  Description of Artificial Sequence: Synthetic oligonucleotide
  Sense strand starting at position 572 of SEQ ID NO: 1564272
guuuaugaauugcauuaga

SEQ ID NO: 1867664 - RNA, 19 nt, Artificial Sequence
  Description of Artificial Sequence: Synthetic oligonucleotide
  Antisense strand to SEQ ID NO: 1867663
ucuaaugcaauucauaaac

SEQ ID NO: 1867665 - RNA, 19 nt, Artificial Sequence
  Description of Artificial Sequence: Synthetic oligonucleotide
  Sense strand starting at position 616 of SEQ ID NO: 1564272
aggaguuaagaguguucaa

SEQ ID NO: 1867666 - RNA, 19 nt, Artificial Sequence
  Description of Artificial Sequence: Synthetic oligonucleotide
  Antisense strand to SEQ ID NO: 1867665
uugaacacucuuaacuccu

SEQ ID NO: 1867667 - RNA, 19 nt, Artificial Sequence
  Description of Artificial Sequence: Synthetic oligonucleotide
  Sense strand starting at position 653 of SEQ ID NO: 1564272
uuaaauagcccucggugau

SEQ ID NO: 1867668 - RNA, 19 nt, Artificial Sequence
  Description of Artificial Sequence: Synthetic oligonucleotide
  Antisense strand to SEQ ID NO: 1867667
aucaccgagggcuauuuaa

SEQ ID NO: 1867669 - RNA, 19 nt, Artificial Sequence
  Description of Artificial Sequence: Synthetic oligonucleotide
  Sense strand starting at position 654 of SEQ ID NO: 1564272
uaaauagcccucggugauc

SEQ ID NO: 1867670 - RNA, 19 nt, Artificial Sequence
  Description of Artificial Sequence: Synthetic oligonucleotide
  Antisense strand to SEQ ID NO: 1867669
gaucaccgagggcuauuua

SEQ ID NO: 1867671 - RNA, 19 nt, Artificial Sequence
  Description of Artificial Sequence: Synthetic oligonucleotide
  Sense strand starting at position 692 of SEQ ID NO: 1564272
ucgaacguuucaguauguu

SEQ ID NO: 1867672 - RNA, 19 nt, Artificial Sequence
  Description of Artificial Sequence: Synthetic oligonucleotide
  Antisense strand to SEQ ID NO: 1867671
aacauacugaaacguucga

SEQ ID NO: 1867673 - RNA, 19 nt, Artificial Sequence
  Description of Artificial Sequence: Synthetic oligonucleotide
  Sense strand starting at position 887 of SEQ ID NO: 1564272
uccuguaucuagggaggga

SEQ ID NO: 1867674 - RNA, 19 nt, Artificial Sequence
  Description of Artificial Sequence: Synthetic oligonucleotide
  Antisense strand to SEQ ID NO: 1867673
ucccucccuagauacagga

SEQ ID NO: 1867675 - RNA, 19 nt, Artificial Sequence
  Description of Artificial Sequence: Synthetic oligonucleotide
  Sense strand starting at position 912 of SEQ ID NO: 1564272
acuccuugacgugagucaa

SEQ ID NO: 1867676 - RNA, 19 nt, Artificial Sequence
  Description of Artificial Sequence: Synthetic oligonucleotide
  Antisense strand to SEQ ID NO: 1867675
uugacucacgucaaggagu

SEQ ID NO: 1867677 - RNA, 19 nt, Artificial Sequence
  Description of Artificial Sequence: Synthetic oligonucleotide
  Sense strand starting at position 916 of SEQ ID NO: 1564272
cuugacgugagucaaguaa

SEQ ID NO: 1867678 - RNA, 19 nt, Artificial Sequence
  Description of Artificial Sequence: Synthetic oligonucleotide
  Antisense strand to SEQ ID NO: 1867677
uuacuugacucacgucaag

SEQ ID NO: 1867679 - RNA, 19 nt, Artificial Sequence
  Description of Artificial Sequence: Synthetic oligonucleotide
  Sense strand starting at position 953 of SEQ ID NO: 1564272
gccuguuucccagauuaag

SEQ ID NO: 1867680 - RNA, 19 nt, Artificial Sequence
  Description of Artificial Sequence: Synthetic oligonucleotide
  Antisense strand to SEQ ID NO: 1867679
cuuaaucugggaaacaggc

SEQ ID NO: 1867681 - RNA, 19 nt, Artificial Sequence
  Description of Artificial Sequence: Synthetic oligonucleotide
  Sense strand starting at position 1096 of SEQ ID NO: 1564272
gcuaucaugcgauauccca

SEQ ID NO: 1867682 - RNA, 19 nt, Artificial Sequence
  Description of Artificial Sequence: Synthetic oligonucleotide
  Antisense strand to SEQ ID NO: 1867681
ugggauaucgcaugauagc

SEQ ID NO: 1867683 - RNA, 19 nt, Artificial Sequence
  Description of Artificial Sequence: Synthetic oligonucleotide
  Sense strand starting at position 1333 of SEQ ID NO: 1564272
guuaucuuacugcgcaaca

SEQ ID NO: 1867684 - RNA, 19 nt, Artificial Sequence
  Description of Artificial Sequence: Synthetic oligonucleotide
  Antisense strand to SEQ ID NO: 1867683
uguugcgcaguaagauaac

SEQ ID NO: 1867685 - RNA, 19 nt, Artificial Sequence
  Description of Artificial Sequence: Synthetic oligonucleotide
  Sense strand starting at position 2030 of SEQ ID NO: 1564272
gaccaaucgccgcauguga

SEQ ID NO: 1867686 - RNA, 19 nt, Artificial Sequence
  Description of Artificial Sequence: Synthetic oligonucleotide
  Antisense strand to SEQ ID NO: 1867685
ucacaugcggcgauugguc

SEQ ID NO: 1867687 - RNA, 19 nt, Artificial Sequence
  Description of Artificial Sequence: Synthetic oligonucleotide
  Sense strand starting at position 2151 of SEQ ID NO: 1564272
agauagaggccgugugagu

SEQ ID NO: 1867688 - RNA, 19 nt, Artificial Sequence
  Description of Artificial Sequence: Synthetic oligonucleotide
  Antisense strand to SEQ ID NO: 1867687
acucacacggccucuaucu

SEQ ID NO: 1867689 - RNA, 19 nt, Artificial Sequence
  Description of Artificial Sequence: Synthetic oligonucleotide
  Sense strand starting at position 2356 of SEQ ID NO: 1564272
auaggaagguacucguuau

SEQ ID NO: 1867690 - RNA, 19 nt, Artificial Sequence
  Description of Artificial Sequence: Synthetic oligonucleotide
  Antisense strand to SEQ ID NO: 1867689
auaacgaguaccuuccuau

SEQ ID NO: 1867691 - RNA, 19 nt, Artificial Sequence
  Description of Artificial Sequence: Synthetic oligonucleotide
  Sense strand starting at position 2357 of SEQ ID NO: 1564272
uaggaagguacucguuaug

SEQ ID NO: 1867692 - RNA, 19 nt, Artificial Sequence
  Description of Artificial Sequence: Synthetic oligonucleotide
  Antisense strand to SEQ ID NO: 1867691
cauaacgaguaccuuccua

SEQ ID NO: 1867693 - RNA, 19 nt, Artificial Sequence
  Description of Artificial Sequence: Synthetic oligonucleotide
  Sense strand starting at position 2360 of SEQ ID NO: 1564272
gaagguacucguuaugauc

SEQ ID NO: 1867694 - RNA, 19 nt, Artificial Sequence
  Description of Artificial Sequence: Synthetic oligonucleotide
  Antisense strand to SEQ ID NO: 1867693
gaucauaacgaguaccuuc

SEQ ID NO: 1867695 - RNA, 19 nt, Artificial Sequence
  Description of Artificial Sequence: Synthetic oligonucleotide
  Sense strand starting at position 2369 of SEQ ID NO: 1564272
cguuaugaucuuucgcgga

SEQ ID NO: 1867696 - RNA, 19 nt, Artificial Sequence
  Description of Artificial Sequence: Synthetic oligonucleotide
  Antisense strand to SEQ ID NO: 1867695
uccgcgaaagaucauaacg

SEQ ID NO: 1867697 - RNA, 19 nt, Artificial Sequence
  Description of Artificial Sequence: Synthetic oligonucleotide
  Sense strand starting at position 2371 of SEQ ID NO: 1564272
uuaugaucuuucgcggaaa

SEQ ID NO: 1867698 - RNA, 19 nt, Artificial Sequence
  Description of Artificial Sequence: Synthetic oligonucleotide
  Antisense strand to SEQ ID NO: 1867697
uuuccgcgaaagaucauaa

SEQ ID NO: 1867699 - RNA, 19 nt, Artificial Sequence
  Description of Artificial Sequence: Synthetic oligonucleotide
  Sense strand starting at position 2373 of SEQ ID NO: 1564272
augaucuuucgcggaaagu

SEQ ID NO: 1867700 - RNA, 19 nt, Artificial Sequence
  Description of Artificial Sequence: Synthetic oligonucleotide
  Antisense strand to SEQ ID NO: 1867699
acuuuccgcgaaagaucau

SEQ ID NO: 1867701 - RNA, 19 nt, Artificial Sequence
  Description of Artificial Sequence: Synthetic oligonucleotide
  Sense strand starting at position 2374 of SEQ ID NO: 1564272
ugaucuuucgcggaaaguu

SEQ ID NO: 1867702 - RNA, 19 nt, Artificial Sequence
  Description of Artificial Sequence: Synthetic oligonucleotide
  Antisense strand to SEQ ID NO: 1867701
aacuuuccgcgaaagauca

SEQ ID NO: 1867703 - RNA, 19 nt, Artificial Sequence
  Description of Artificial Sequence: Synthetic oligonucleotide
  Sense strand starting at position 2383 of SEQ ID NO: 1564272
gcggaaaguuuagaaauau

SEQ ID NO: 1867704 - RNA, 19 nt, Artificial Sequence
  Description of Artificial Sequence: Synthetic oligonucleotide
  Antisense strand to SEQ ID NO: 1867703
auauuucuaaacuuuccgc

SEQ ID NO: 1867705 - RNA, 19 nt, Artificial Sequence
  Description of Artificial Sequence: Synthetic oligonucleotide
  Sense strand starting at position 2466 of SEQ ID NO: 1564272
uuaggaauugggcgcgaau

SEQ ID NO: 1867706 - RNA, 19 nt, Artificial Sequence
  Description of Artificial Sequence: Synthetic oligonucleotide
  Antisense strand to SEQ ID NO: 1867705
auucgcgcccaauuccuaa

SEQ ID NO: 1867707 - RNA, 19 nt, Artificial Sequence
  Description of Artificial Sequence: Synthetic oligonucleotide
  Sense strand starting at position 2468 of SEQ ID NO: 1564272
aggaauugggcgcgaauga

SEQ ID NO: 1867708 - RNA, 19 nt, Artificial Sequence
  Description of Artificial Sequence: Synthetic oligonucleotide
  Antisense strand to SEQ ID NO: 1867707
ucauucgcgcccaauuccu

SEQ ID NO: 1867709 - RNA, 19 nt, Artificial Sequence
  Description of Artificial Sequence: Synthetic oligonucleotide
  Sense strand starting at position 2469 of SEQ ID NO: 1564272
ggaauugggcgcgaaugau

SEQ ID NO: 1867710 - RNA, 19 nt, Artificial Sequence
  Description of Artificial Sequence: Synthetic oligonucleotide
  Antisense strand to SEQ ID NO: 1867709
aucauucgcgcccaauucc

SEQ ID NO: 1867711 - RNA, 19 nt, Artificial Sequence
  Description of Artificial Sequence: Synthetic oligonucleotide
  Sense strand starting at position 2526 of SEQ ID NO: 1564272
gaagguguauuggcucuua

SEQ ID NO: 1867712 - RNA, 19 nt, Artificial Sequence
  Description of Artificial Sequence: Synthetic oligonucleotide
  Antisense strand to SEQ ID NO: 1867711
uaagagccaauacaccuuc

SEQ ID NO: 1867713 - RNA, 19 nt, Artificial Sequence
  Description of Artificial Sequence: Synthetic oligonucleotide
  Sense strand starting at position 2539 of SEQ ID NO: 1564272
cucuuagaauuugaaguuu

SEQ ID NO: 1867714 - RNA, 19 nt, Artificial Sequence
  Description of Artificial Sequence: Synthetic oligonucleotide
  Antisense strand to SEQ ID NO: 1867713
aaacuucaaauucuaagag

SEQ ID NO: 1867715 - RNA, 19 nt, Artificial Sequence
  Description of Artificial Sequence: Synthetic oligonucleotide
  Sense strand starting at position 2632 of SEQ ID NO: 1564272
gcgggauaggugccgcauu

SEQ ID NO: 1867716 - RNA, 19 nt, Artificial Sequence
  Description of Artificial Sequence: Synthetic oligonucleotide
  Antisense strand to SEQ ID NO: 1867715
aaugcggcaccuaucccgc

SEQ ID NO: 1867717 - RNA, 19 nt, Artificial Sequence
  Description of Artificial Sequence: Synthetic oligonucleotide
  Sense strand starting at position 2708 of SEQ ID NO: 1564272
uguugaauguauccugcuu

SEQ ID NO: 1867718 - RNA, 19 nt, Artificial Sequence
  Description of Artificial Sequence: Synthetic oligonucleotide
  Antisense strand to SEQ ID NO: 1867717
aagcaggauacauucaaca

SEQ ID NO: 1867719 - RNA, 19 nt, Artificial Sequence
  Description of Artificial Sequence: Synthetic oligonucleotide
  Sense strand starting at position 2853 of SEQ ID NO: 1564272
cuauuuccaucugauggaa

SEQ ID NO: 1867720 - RNA, 19 nt, Artificial Sequence
  Description of Artificial Sequence: Synthetic oligonucleotide
  Antisense strand to SEQ ID NO: 1867719
uuccaucagauggaaauag

SEQ ID NO: 1867721 - RNA, 19 nt, Artificial Sequence
  Description of Artificial Sequence: Synthetic oligonucleotide
  Sense strand starting at position 2914 of SEQ ID NO: 1564272
augaaauccugauauauug

SEQ ID NO: 1867722 - RNA, 19 nt, Artificial Sequence
  Description of Artificial Sequence: Synthetic oligonucleotide
  Antisense strand to SEQ ID NO: 1867721
caauauaucaggauuucau

SEQ ID NO: 1867723 - RNA, 19 nt, Artificial Sequence
  Description of Artificial Sequence: Synthetic oligonucleotide
  Sense strand starting at position 3441 of SEQ ID NO: 1564272
ccagcuauuugggaucuga

SEQ ID NO: 1867724 - RNA, 19 nt, Artificial Sequence
  Description of Artificial Sequence: Synthetic oligonucleotide
  Antisense strand to SEQ ID NO: 1867723
ucagaucccaaauagcugg

SEQ ID NO: 1867725 - RNA, 19 nt, Artificial Sequence
  Description of Artificial Sequence: Synthetic oligonucleotide
  Sense strand starting at position 3658 of SEQ ID NO: 1564272
uuguuuaaguauguaugga

SEQ ID NO: 1867726 - RNA, 19 nt, Artificial Sequence
  Description of Artificial Sequence: Synthetic oligonucleotide
  Antisense strand to SEQ ID NO: 1867725
uccauacauacuuaaacaa

SEQ ID NO: 1867727 - RNA, 19 nt, Artificial Sequence
  Description of Artificial Sequence: Synthetic oligonucleotide
  Sense strand starting at position 3659 of SEQ ID NO: 1564272
uguuuaaguauguauggaa

SEQ ID NO: 1867728 - RNA, 19 nt, Artificial Sequence
  Description of Artificial Sequence: Synthetic oligonucleotide
  Antisense strand to SEQ ID NO: 1867727
uuccauacauacuuaaaca

SEQ ID NO: 1867729 - RNA, 19 nt, Artificial Sequence
  Description of Artificial Sequence: Synthetic oligonucleotide
  Sense strand starting at position 3662 of SEQ ID NO: 1564272
uuaaguauguauggaauga

SEQ ID NO: 1867730 - RNA, 19 nt, Artificial Sequence
  Description of Artificial Sequence: Synthetic oligonucleotide
  Antisense strand to SEQ ID NO: 1867729
ucauuccauacauacuuaa

SEQ ID NO: 1867731 - RNA, 19 nt, Artificial Sequence
  Description of Artificial Sequence: Synthetic oligonucleotide
  Sense strand starting at position 41 of SEQ ID NO: 1564273
ggacaugcuagguaucaca

SEQ ID NO: 1867732 - RNA, 19 nt, Artificial Sequence
  Description of Artificial Sequence: Synthetic oligonucleotide
  Antisense strand to SEQ ID NO: 1867731
ugugauaccuagcaugucc

SEQ ID NO: 1867733 - RNA, 19 nt, Artificial Sequence
  Description of Artificial Sequence: Synthetic oligonucleotide
  Sense strand starting at position 157 of SEQ ID NO: 1564273
ggguuucucugaccaauua

SEQ ID NO: 1867734 - RNA, 19 nt, Artificial Sequence
  Description of Artificial Sequence: Synthetic oligonucleotide
  Antisense strand to SEQ ID NO: 1867733
uaauuggucagagaaaccc

SEQ ID NO: 1867735 - RNA, 19 nt, Artificial Sequence
  Description of Artificial Sequence: Synthetic oligonucleotide
  Sense strand starting at position 158 of SEQ ID NO: 1564273
gguuucucugaccaauuau

SEQ ID NO: 1867736 - RNA, 19 nt, Artificial Sequence
  Description of Artificial Sequence: Synthetic oligonucleotide
  Antisense strand to SEQ ID NO: 1867735
auaauuggucagagaaacc

SEQ ID NO: 1867737 - RNA, 19 nt, Artificial Sequence
  Description of Artificial Sequence: Synthetic oligonucleotide
  Sense strand starting at position 584 of SEQ ID NO: 1564273
agggacaucugacaaugau

SEQ ID NO: 1867738 - RNA, 19 nt, Artificial Sequence
  Description of Artificial Sequence: Synthetic oligonucleotide
  Antisense strand to SEQ ID NO: 1867737
aucauugucagaugucccu

SEQ ID NO: 1867739 - RNA, 19 nt, Artificial Sequence
  Description of Artificial Sequence: Synthetic oligonucleotide
  Sense strand starting at position 668 of SEQ ID NO: 1564273
aaacgaucugagggcagau

SEQ ID NO: 1867740 - RNA, 19 nt, Artificial Sequence
  Description of Artificial Sequence: Synthetic oligonucleotide
  Antisense strand to SEQ ID NO: 1867739
aucugcccucagaucguuu

SEQ ID NO: 1867741 - RNA, 19 nt, Artificial Sequence
  Description of Artificial Sequence: Synthetic oligonucleotide
  Sense strand starting at position 847 of SEQ ID NO: 1564273
gggcucuuugauggaggau

SEQ ID NO: 1867742 - RNA, 19 nt, Artificial Sequence
  Description of Artificial Sequence: Synthetic oligonucleotide
  Antisense strand to SEQ ID NO: 1867741
auccuccaucaaagagccc

SEQ ID NO: 1867743 - RNA, 19 nt, Artificial Sequence
  Description of Artificial Sequence: Synthetic oligonucleotide
  Sense strand starting at position 848 of SEQ ID NO: 1564273
ggcucuuugauggaggauu

SEQ ID NO: 1867744 - RNA, 19 nt, Artificial Sequence
  Description of Artificial Sequence: Synthetic oligonucleotide
  Antisense strand to SEQ ID NO: 1867743
aauccuccaucaaagagcc

SEQ ID NO: 1867745 - RNA, 19 nt, Artificial Sequence
  Description of Artificial Sequence: Synthetic oligonucleotide
  Sense strand starting at position 954 of SEQ ID NO: 1564273
cucaguagucucugaauac

SEQ ID NO: 1867746 - RNA, 19 nt, Artificial Sequence
  Description of Artificial Sequence: Synthetic oligonucleotide
  Antisense strand to SEQ ID NO: 1867745
guauucagagacuacugag

SEQ ID NO: 1867747 - RNA, 19 nt, Artificial Sequence
  Description of Artificial Sequence: Synthetic oligonucleotide
  Sense strand starting at position 958 of SEQ ID NO: 1564273
guagucucugaauacugga

SEQ ID NO: 1867748 - RNA, 19 nt, Artificial Sequence
  Description of Artificial Sequence: Synthetic oligonucleotide
  Antisense strand to SEQ ID NO: 1867747
uccaguauucagagacuac

SEQ ID NO: 1867749 - RNA, 19 nt, Artificial Sequence
  Description of Artificial Sequence: Synthetic oligonucleotide
  Sense strand starting at position 1042 of SEQ ID NO: 1564273
agagucucucaaggcagau

SEQ ID NO: 1867750 - RNA, 19 nt, Artificial Sequence
  Description of Artificial Sequence: Synthetic oligonucleotide
  Antisense strand to SEQ ID NO: 1867749
aucugccuugagagacucu

SEQ ID NO: 1867751 - RNA, 19 nt, Artificial Sequence
  Description of Artificial Sequence: Synthetic oligonucleotide
  Sense strand starting at position 1078 of SEQ ID NO: 1564273
aguagaaauacugggcaga

SEQ ID NO: 1867752 - RNA, 19 nt, Artificial Sequence
  Description of Artificial Sequence: Synthetic oligonucleotide
  Antisense strand to SEQ ID NO: 1867751
ucugcccaguauuucuacu

SEQ ID NO: 1867753 - RNA, 19 nt, Artificial Sequence
  Description of Artificial Sequence: Synthetic oligonucleotide
  Sense strand starting at position 1080 of SEQ ID NO: 1564273
uagaaauacugggcagagu

SEQ ID NO: 1867754 - RNA, 19 nt, Artificial Sequence
  Description of Artificial Sequence: Synthetic oligonucleotide
  Antisense strand to SEQ ID NO: 1867753
acucugcccaguauuucua

SEQ ID NO: 1867755 - RNA, 19 nt, Artificial Sequence
  Description of Artificial Sequence: Synthetic oligonucleotide
  Sense strand starting at position 1415 of SEQ ID NO: 1564273
aggagcucugaucagcaau

SEQ ID NO: 1867756 - RNA, 19 nt, Artificial Sequence
  Description of Artificial Sequence: Synthetic oligonucleotide
  Antisense strand to SEQ ID NO: 1867755
auugcugaucagagcuccu

SEQ ID NO: 1867757 - RNA, 19 nt, Artificial Sequence
  Description of Artificial Sequence: Synthetic oligonucleotide
  Sense strand starting at position 1431 of SEQ ID NO: 1564273
aaugcugauccacguaaau

SEQ ID NO: 1867758 - RNA, 19 nt, Artificial Sequence
  Description of Artificial Sequence: Synthetic oligonucleotide
  Antisense strand to SEQ ID NO: 1867757
auuuacguggaucagcauu

SEQ ID NO: 1867759 - RNA, 19 nt, Artificial Sequence
  Description of Artificial Sequence: Synthetic oligonucleotide
  Sense strand starting at position 1441 of SEQ ID NO: 1564273
cacguaaaucucuauugga

SEQ ID NO: 1867760 - RNA, 19 nt, Artificial Sequence
  Description of Artificial Sequence: Synthetic oligonucleotide
  Antisense strand to SEQ ID NO: 1867759
uccaauagagauuuacgug

SEQ ID NO: 1867761 - RNA, 19 nt, Artificial Sequence
  Description of Artificial Sequence: Synthetic oligonucleotide
  Sense strand starting at position 1469 of SEQ ID NO: 1564273
agaguucugaucugagaua

SEQ ID NO: 1867762 - RNA, 19 nt, Artificial Sequence
  Description of Artificial Sequence: Synthetic oligonucleotide
  Antisense strand to SEQ ID NO: 1867761
uaucucagaucagaacucu

SEQ ID NO: 1867763 - RNA, 19 nt, Artificial Sequence
  Description of Artificial Sequence: Synthetic oligonucleotide
  Sense strand starting at position 2095 of SEQ ID NO: 1564273
uucgguuagaaguggaaca

SEQ ID NO: 1867764 - RNA, 19 nt, Artificial Sequence
  Description of Artificial Sequence: Synthetic oligonucleotide
  Antisense strand to SEQ ID NO: 1867763
uguuccacuucuaaccgaa

SEQ ID NO: 1867765 - RNA, 19 nt, Artificial Sequence
  Description of Artificial Sequence: Synthetic oligonucleotide
  Sense strand starting at position 2241 of SEQ ID NO: 1564273
aggccaugcuuccugauua

SEQ ID NO: 1867766 - RNA, 19 nt, Artificial Sequence
  Description of Artificial Sequence: Synthetic oligonucleotide
  Antisense strand to SEQ ID NO: 1867765
uaaucaggaagcauggccu

SEQ ID NO: 1867767 - RNA, 19 nt, Artificial Sequence
  Description of Artificial Sequence: Synthetic oligonucleotide
  Sense strand starting at position 2246 of SEQ ID NO: 1564273
augcuuccugauuauaagu

SEQ ID NO: 1867768 - RNA, 19 nt, Artificial Sequence
  Description of Artificial Sequence: Synthetic oligonucleotide
  Antisense strand to SEQ ID NO: 1867767
acuuauaaucaggaagcau

SEQ ID NO: 1867769 - RNA, 19 nt, Artificial Sequence
  Description of Artificial Sequence: Synthetic oligonucleotide
  Sense strand starting at position 2259 of SEQ ID NO: 1564273
auaaguuaugcaugaaguu

SEQ ID NO: 1867770 - RNA, 19 nt, Artificial Sequence
  Description of Artificial Sequence: Synthetic oligonucleotide
  Antisense strand to SEQ ID NO: 1867769
aacuucaugcauaacuuau

SEQ ID NO: 1867771 - RNA, 19 nt, Artificial Sequence
  Description of Artificial Sequence: Synthetic oligonucleotide
  Sense strand starting at position 2426 of SEQ ID NO: 1564273
ggcccaguggguuggaaua

SEQ ID NO: 1867772 - RNA, 19 nt, Artificial Sequence
  Description of Artificial Sequence: Synthetic oligonucleotide
  Antisense strand to SEQ ID NO: 1867771
uauuccaacccacugggcc

SEQ ID NO: 1867773 - RNA, 19 nt, Artificial Sequence
  Description of Artificial Sequence: Synthetic oligonucleotide
  Sense strand starting at position 2457 of SEQ ID NO: 1564273
ccgccuauugcugcaucua

SEQ ID NO: 1867774 - RNA, 19 nt, Artificial Sequence
  Description of Artificial Sequence: Synthetic oligonucleotide
  Antisense strand to SEQ ID NO: 1867773
uagaugcagcaauaggcgg

SEQ ID NO: 1867775 - RNA, 19 nt, Artificial Sequence
  Description of Artificial Sequence: Synthetic oligonucleotide
  Sense strand starting at position 2522 of SEQ ID NO: 1564273
cucccagguccugaauaau

SEQ ID NO: 1867776 - RNA, 19 nt, Artificial Sequence
  Description of Artificial Sequence: Synthetic oligonucleotide
  Antisense strand to SEQ ID NO: 1867775
auuauucaggaccugggag

SEQ ID NO: 1867777 - RNA, 19 nt, Artificial Sequence
  Description of Artificial Sequence: Synthetic oligonucleotide
  Sense strand starting at position 2613 of SEQ ID NO: 1564273
uaugcauaaggcgaagaaa

SEQ ID NO: 1867778 - RNA, 19 nt, Artificial Sequence
  Description of Artificial Sequence: Synthetic oligonucleotide
  Antisense strand to SEQ ID NO: 1867777
uuucuucgccuuaugcaua

SEQ ID NO: 1867779 - RNA, 19 nt, Artificial Sequence
  Description of Artificial Sequence: Synthetic oligonucleotide
  Sense strand starting at position 2658 of SEQ ID NO: 1564273
uagggauuacgaugcuaua

SEQ ID NO: 1867780 - RNA, 19 nt, Artificial Sequence
  Description of Artificial Sequence: Synthetic oligonucleotide
  Antisense strand to SEQ ID NO: 1867779
uauagcaucguaaucccua

SEQ ID NO: 1867781 - RNA, 19 nt, Artificial Sequence
  Description of Artificial Sequence: Synthetic oligonucleotide
  Sense strand starting at position 2717 of SEQ ID NO: 1564273
gaaagaugucacugcagug

SEQ ID NO: 1867782 - RNA, 19 nt, Artificial Sequence
  Description of Artificial Sequence: Synthetic oligonucleotide
  Antisense strand to SEQ ID NO: 1867781
cacugcagugacaucuuuc

SEQ ID NO: 1867783 - RNA, 19 nt, Artificial Sequence
  Description of Artificial Sequence: Synthetic oligonucleotide
  Sense strand starting at position 2823 of SEQ ID NO: 1564273
gcugccuugguccaaucaa

SEQ ID NO: 1867784 - RNA, 19 nt, Artificial Sequence
  Description of Artificial Sequence: Synthetic oligonucleotide
  Antisense strand to SEQ ID NO: 1867783
uugauuggaccaaggcagc

SEQ ID NO: 1867785 - RNA, 19 nt, Artificial Sequence
  Description of Artificial Sequence: Synthetic oligonucleotide
  Sense strand starting at position 2898 of SEQ ID NO: 1564273
aggauaguaauguguuauu

SEQ ID NO: 1867786 - RNA, 19 nt, Artificial Sequence
  Description of Artificial Sequence: Synthetic oligonucleotide
  Antisense strand to SEQ ID NO: 1867785
aauaacacauuacuauccu

SEQ ID NO: 1867787 - RNA, 19 nt, Artificial Sequence
  Description of Artificial Sequence: Synthetic oligonucleotide
  Sense strand starting at position 3250 of SEQ ID NO: 1564273
ggcacaaggcacuguuaaa

SEQ ID NO: 1867788 - RNA, 19 nt, Artificial Sequence
  Description of Artificial Sequence: Synthetic oligonucleotide
  Antisense strand to SEQ ID NO: 1867787
uuuaacagugccuugugcc

SEQ ID NO: 1867789 - RNA, 19 nt, Artificial Sequence
  Description of Artificial Sequence: Synthetic oligonucleotide
  Sense strand starting at position 3431 of SEQ ID NO: 1564273
ugcgauggaguuuaaauga

SEQ ID NO: 1867790 - RNA, 19 nt, Artificial Sequence
  Description of Artificial Sequence: Synthetic oligonucleotide
  Antisense strand to SEQ ID NO: 1867789
ucauuuaaacuccaucgca

SEQ ID NO: 1867791 - RNA, 19 nt, Artificial Sequence
  Description of Artificial Sequence: Synthetic oligonucleotide
  Sense strand starting at position 3559 of SEQ ID NO: 1564273
auggcaucugguuaagacu

SEQ ID NO: 1867792 - RNA, 19 nt, Artificial Sequence
  Description of Artificial Sequence: Synthetic oligonucleotide
  Antisense strand to SEQ ID NO: 1867791
agucuuaaccagaugccau

SEQ ID NO: 1867793 - RNA, 19 nt, Artificial Sequence
  Description of Artificial Sequence: Synthetic oligonucleotide
  Sense strand starting at position 3710 of SEQ ID NO: 1564273
cuccuaggauugucgugaa

SEQ ID NO: 1867794 - RNA, 19 nt, Artificial Sequence
  Description of Artificial Sequence: Synthetic oligonucleotide
  Antisense strand to SEQ ID NO: 1867793
uucacgacaauccuaggag

SEQ ID NO: 1867795 - RNA, 19 nt, Artificial Sequence
  Description of Artificial Sequence: Synthetic oligonucleotide
  Sense strand starting at position 3714 of SEQ ID NO: 1564273
uaggauugucgugaagauu

SEQ ID NO: 1867796 - RNA, 19 nt, Artificial Sequence
  Description of Artificial Sequence: Synthetic oligonucleotide
  Antisense strand to SEQ ID NO: 1867795
aaucuucacgacaauccua

SEQ ID NO: 1867797 - RNA, 19 nt, Artificial Sequence
  Description of Artificial Sequence: Synthetic oligonucleotide
  Sense strand starting at position 3727 of SEQ ID NO: 1564273
aagauuaaaugcgcuaagu

SEQ ID NO: 1867798 - RNA, 19 nt, Artificial Sequence
  Description of Artificial Sequence: Synthetic oligonucleotide
  Antisense strand to SEQ ID NO: 1867797
acuuagcgcauuuaaucuu

SEQ ID NO: 1867799 - RNA, 19 nt, Artificial Sequence
  Description of Artificial Sequence: Synthetic oligonucleotide
  Sense strand starting at position 3729 of SEQ ID NO: 1564273
gauuaaaugcgcuaaguag

SEQ ID NO: 1867800 - RNA, 19 nt, Artificial Sequence
  Description of Artificial Sequence: Synthetic oligonucleotide
  Antisense strand to SEQ ID NO: 1867799
cuacuuagcgcauuuaauc

SEQ ID NO: 1867801 - RNA, 19 nt, Artificial Sequence
  Description of Artificial Sequence: Synthetic oligonucleotide
  Sense strand starting at position 3747 of SEQ ID NO: 1564273
gcuaaacgaguguaagcua

SEQ ID NO: 1867802 - RNA, 19 nt, Artificial Sequence
  Description of Artificial Sequence: Synthetic oligonucleotide
  Antisense strand to SEQ ID NO: 1867801
uagcuuacacucguuuagc

SEQ ID NO: 1867803 - RNA, 19 nt, Artificial Sequence
  Description of Artificial Sequence: Synthetic oligonucleotide
  Sense strand starting at position 3752 of SEQ ID NO: 1564273
acgaguguaagcuaaucuu

SEQ ID NO: 1867804 - RNA, 19 nt, Artificial Sequence
  Description of Artificial Sequence: Synthetic oligonucleotide
  Antisense strand to SEQ ID NO: 1867803
aagauuagcuuacacucgu

SEQ ID NO: 1867805 - RNA, 19 nt, Artificial Sequence
  Description of Artificial Sequence: Synthetic oligonucleotide
  Sense strand starting at position 3755 of SEQ ID NO: 1564273
aguguaagcuaaucuuauc

SEQ ID NO: 1867806 - RNA, 19 nt, Artificial Sequence
  Description of Artificial Sequence: Synthetic oligonucleotide
  Antisense strand to SEQ ID NO: 1867805
gauaagauuagcuuacacu

SEQ ID NO: 1867807 - RNA, 19 nt, Artificial Sequence
  Description of Artificial Sequence: Synthetic oligonucleotide
  Sense strand starting at position 3865 of SEQ ID NO: 1564273
gcugauuaucugggauuac

SEQ ID NO: 1867808 - RNA, 19 nt, Artificial Sequence
  Description of Artificial Sequence: Synthetic oligonucleotide
  Antisense strand to SEQ ID NO: 1867807
guaaucccagauaaucagc

SEQ ID NO: 1867809 - RNA, 19 nt, Artificial Sequence
  Description of Artificial Sequence: Synthetic oligonucleotide
  Sense strand starting at position 3874 of SEQ ID NO: 1564273
cugggauuaccaggccaua

SEQ ID NO: 1867810 - RNA, 19 nt, Artificial Sequence
  Description of Artificial Sequence: Synthetic oligonucleotide
  Antisense strand to SEQ ID NO: 1867809
uauggccugguaaucccag

SEQ ID NO: 1867811 - RNA, 19 nt, Artificial Sequence
  Description of Artificial Sequence: Synthetic oligonucleotide
  Sense strand starting at position 212 of SEQ ID NO: 1564274
gaauauaaauuaugggaug

SEQ ID NO: 1867812 - RNA, 19 nt, Artificial Sequence
  Description of Artificial Sequence: Synthetic oligonucleotide
  Antisense strand to SEQ ID NO: 1867811
caucccauaauuuauauuc

SEQ ID NO: 1867813 - RNA, 19 nt, Artificial Sequence
  Description of Artificial Sequence: Synthetic oligonucleotide
  Sense strand starting at position 248 of SEQ ID NO: 1564274
ggcacaaggcacuguuaaa

SEQ ID NO: 1867814 - RNA, 19 nt, Artificial Sequence
  Description of Artificial Sequence: Synthetic oligonucleotide
  Antisense strand to SEQ ID NO: 1867813
uuuaacagugccuugugcc

SEQ ID NO: 1867815 - RNA, 19 nt, Artificial Sequence
  Description of Artificial Sequence: Synthetic oligonucleotide
  Sense strand starting at position 423 of SEQ ID NO: 1564274
uuaccuugcgauggaguuu

SEQ ID NO: 1867816 - RNA, 19 nt, Artificial Sequence
  Description of Artificial Sequence: Synthetic oligonucleotide
  Antisense strand to SEQ ID NO: 1867815
aaacuccaucgcaagguaa

SEQ ID NO: 1867817 - RNA, 19 nt, Artificial Sequence
  Description of Artificial Sequence: Synthetic oligonucleotide
  Sense strand starting at position 429 of SEQ ID NO: 1564274
ugcgauggaguuuaaauga

SEQ ID NO: 1867818 - RNA, 19 nt, Artificial Sequence
  Description of Artificial Sequence: Synthetic oligonucleotide
  Antisense strand to SEQ ID NO: 1867817
ucauuuaaacuccaucgca

SEQ ID NO: 1867819 - RNA, 19 nt, Artificial Sequence
  Description of Artificial Sequence: Synthetic oligonucleotide
  Sense strand starting at position 557 of SEQ ID NO: 1564274
auggcaucugguuaagacu

SEQ ID NO: 1867820 - RNA, 19 nt, Artificial Sequence
  Description of Artificial Sequence: Synthetic oligonucleotide
  Antisense strand to SEQ ID NO: 1867819
agucuuaaccagaugccau

SEQ ID NO: 1867821 - RNA, 19 nt, Artificial Sequence
  Description of Artificial Sequence: Synthetic oligonucleotide
  Sense strand starting at position 664 of SEQ ID NO: 1564274
gucccaguuuccuuaucua

SEQ ID NO: 1867822 - RNA, 19 nt, Artificial Sequence
  Description of Artificial Sequence: Synthetic oligonucleotide
  Antisense strand to SEQ ID NO: 1867821
uagauaaggaaacugggac

SEQ ID NO: 1867823 - RNA, 19 nt, Artificial Sequence
  Description of Artificial Sequence: Synthetic oligonucleotide
  Sense strand starting at position 708 of SEQ ID NO: 1564274
cuccuaggauugucgugaa

SEQ ID NO: 1867824 - RNA, 19 nt, Artificial Sequence
  Description of Artificial Sequence: Synthetic oligonucleotide
  Antisense strand to SEQ ID NO: 1867823
uucacgacaauccuaggag

SEQ ID NO: 1867825 - RNA, 19 nt, Artificial Sequence
  Description of Artificial Sequence: Synthetic oligonucleotide
  Sense strand starting at position 712 of SEQ ID NO: 1564274
uaggauugucgugaagauu

SEQ ID NO: 1867826 - RNA, 19 nt, Artificial Sequence
  Description of Artificial Sequence: Synthetic oligonucleotide
  Antisense strand to SEQ ID NO: 1867825
aaucuucacgacaauccua

SEQ ID NO: 1867827 - RNA, 19 nt, Artificial Sequence
  Description of Artificial Sequence: Synthetic oligonucleotide
  Sense strand starting at position 725 of SEQ ID NO: 1564274
aagauuaaaugcgcuaagu

SEQ ID NO: 1867828 - RNA, 19 nt, Artificial Sequence
  Description of Artificial Sequence: Synthetic oligonucleotide
  Antisense strand to SEQ ID NO: 1867827
acuuagcgcauuuaaucuu

SEQ ID NO: 1867829 - RNA, 19 nt, Artificial Sequence
  Description of Artificial Sequence: Synthetic oligonucleotide
  Sense strand starting at position 727 of SEQ ID NO: 1564274
gauuaaaugcgcuaaguag

SEQ ID NO: 1867830 - RNA, 19 nt, Artificial Sequence
  Description of Artificial Sequence: Synthetic oligonucleotide
  Antisense strand to SEQ ID NO: 1867829
cuacuuagcgcauuuaauc

SEQ ID NO: 1867831 - RNA, 19 nt, Artificial Sequence
  Description of Artificial Sequence: Synthetic oligonucleotide
  Sense strand starting at position 745 of SEQ ID NO: 1564274
gcuaaacgaguguaagcua

SEQ ID NO: 1867832 - RNA, 19 nt, Artificial Sequence
  Description of Artificial Sequence: Synthetic oligonucleotide
  Antisense strand to SEQ ID NO: 1867831
uagcuuacacucguuuagc

SEQ ID NO: 1867833 - RNA, 19 nt, Artificial Sequence
  Description of Artificial Sequence: Synthetic oligonucleotide
  Sense strand starting at position 750 of SEQ ID NO: 1564274
acgaguguaagcuaaucuu

SEQ ID NO: 1867834 - RNA, 19 nt, Artificial Sequence
  Description of Artificial Sequence: Synthetic oligonucleotide
  Antisense strand to SEQ ID NO: 1867833
aagauuagcuuacacucgu

SEQ ID NO: 1867835 - RNA, 19 nt, Artificial Sequence
  Description of Artificial Sequence: Synthetic oligonucleotide
  Sense strand starting at position 753 of SEQ ID NO: 1564274
aguguaagcuaaucuuauc

SEQ ID NO: 1867836 - RNA, 19 nt, Artificial Sequence
  Description of Artificial Sequence: Synthetic oligonucleotide
  Antisense strand to SEQ ID NO: 1867835
gauaagauuagcuuacacu

SEQ ID NO: 1867837 - RNA, 19 nt, Artificial Sequence
  Description of Artificial Sequence: Synthetic oligonucleotide
  Sense strand starting at position 764 of SEQ ID NO: 1564274
aucuuaucguuauccucau

SEQ ID NO: 1867838 - RNA, 19 nt, Artificial Sequence
  Description of Artificial Sequence: Synthetic oligonucleotide
  Antisense strand to SEQ ID NO: 1867837
augaggauaacgauaagau

SEQ ID NO: 1867839 - RNA, 19 nt, Artificial Sequence
  Description of Artificial Sequence: Synthetic oligonucleotide
  Sense strand starting at position 765 of SEQ ID NO: 1564274
ucuuaucguuauccucaua

SEQ ID NO: 1867840 - RNA, 19 nt, Artificial Sequence
  Description of Artificial Sequence: Synthetic oligonucleotide
  Antisense strand to SEQ ID NO: 1867839
uaugaggauaacgauaaga

SEQ ID NO: 1867841 - RNA, 19 nt, Artificial Sequence
  Description of Artificial Sequence: Synthetic oligonucleotide
  Sense strand starting at position 853 of SEQ ID NO: 1564274
uccagagccggcugauuau

SEQ ID NO: 1867842 - RNA, 19 nt, Artificial Sequence
  Description of Artificial Sequence: Synthetic oligonucleotide
  Antisense strand to SEQ ID NO: 1867841
auaaucagccggcucugga

SEQ ID NO: 1867843 - RNA, 19 nt, Artificial Sequence
  Description of Artificial Sequence: Synthetic oligonucleotide
  Sense strand starting at position 863 of SEQ ID NO: 1564274
gcugauuaucugggauuac

SEQ ID NO: 1867844 - RNA, 19 nt, Artificial Sequence
  Description of Artificial Sequence: Synthetic oligonucleotide
  Antisense strand to SEQ ID NO: 1867843
guaaucccagauaaucagc

SEQ ID NO: 1867845 - RNA, 19 nt, Artificial Sequence
  Description of Artificial Sequence: Synthetic oligonucleotide
  Sense strand starting at position 872 of SEQ ID NO: 1564274
cugggauuaccaggccaua

SEQ ID NO: 1867846 - RNA, 19 nt, Artificial Sequence
  Description of Artificial Sequence: Synthetic oligonucleotide
  Antisense strand to SEQ ID NO: 1867845
uauggccugguaaucccag

SEQ ID NO: 1867847 - RNA, 19 nt, Artificial Sequence
  Description of Artificial Sequence: Synthetic oligonucleotide
  Sense strand starting at position 911 of SEQ ID NO: 1564274
gccucaucccuuugcuaga

SEQ ID NO: 1867848 - RNA, 19 nt, Artificial Sequence
  Description of Artificial Sequence: Synthetic oligonucleotide
  Antisense strand to SEQ ID NO: 1867847
ucuagcaaagggaugaggc

SEQ ID NO: 1867849 - RNA, 19 nt, Artificial Sequence
  Description of Artificial Sequence: Synthetic oligonucleotide
  Sense strand starting at position 1071 of SEQ ID NO: 1564274
gcgaaucaucaaugaacuc

SEQ ID NO: 1867850 - RNA, 19 nt, Artificial Sequence
  Description of Artificial Sequence: Synthetic oligonucleotide
  Antisense strand to SEQ ID NO: 1867849
gaguucauugaugauucgc

SEQ ID NO: 1867851 - RNA, 19 nt, Artificial Sequence
  Description of Artificial Sequence: Synthetic oligonucleotide
  Sense strand starting at position 1324 of SEQ ID NO: 1564274
aggcuccucucccuagaaa

SEQ ID NO: 1867852 - RNA, 19 nt, Artificial Sequence
  Description of Artificial Sequence: Synthetic oligonucleotide
  Antisense strand to SEQ ID NO: 1867851
uuucuagggagaggagccu

SEQ ID NO: 1867853 - RNA, 19 nt, Artificial Sequence
  Description of Artificial Sequence: Synthetic oligonucleotide
  Sense strand starting at position 1458 of SEQ ID NO: 1564274
cccgauuguucugucacca

SEQ ID NO: 1867854 - RNA, 19 nt, Artificial Sequence
  Description of Artificial Sequence: Synthetic oligonucleotide
  Antisense strand to SEQ ID NO: 1867853
uggugacagaacaaucggg

SEQ ID NO: 1867855 - RNA, 19 nt, Artificial Sequence
  Description of Artificial Sequence: Synthetic oligonucleotide
  Sense strand starting at position 1999 of SEQ ID NO: 1564274
ggauguaccacagaugcuu

SEQ ID NO: 1867856 - RNA, 19 nt, Artificial Sequence
  Description of Artificial Sequence: Synthetic oligonucleotide
  Antisense strand to SEQ ID NO: 1867855
aagcaucugugguacaucc

SEQ ID NO: 1867857 - RNA, 19 nt, Artificial Sequence
  Description of Artificial Sequence: Synthetic oligonucleotide
  Sense strand starting at position 2192 of SEQ ID NO: 1564274
aagccugagcuguggaauu

SEQ ID NO: 1867858 - RNA, 19 nt, Artificial Sequence
  Description of Artificial Sequence: Synthetic oligonucleotide
  Antisense strand to SEQ ID NO: 1867857
aauuccacagcucaggcuu

SEQ ID NO: 1867859 - RNA, 19 nt, Artificial Sequence
  Description of Artificial Sequence: Synthetic oligonucleotide
  Sense strand starting at position 2338 of SEQ ID NO: 1564274
gggccaggugcuggaaauu

SEQ ID NO: 1867860 - RNA, 19 nt, Artificial Sequence
  Description of Artificial Sequence: Synthetic oligonucleotide
  Antisense strand to SEQ ID NO: 1867859
aauuuccagcaccuggccc

SEQ ID NO: 1867861 - RNA, 19 nt, Artificial Sequence
  Description of Artificial Sequence: Synthetic oligonucleotide
  Sense strand starting at position 2350 of SEQ ID NO: 1564274
ggaaauucuuccuugggcu

SEQ ID NO: 1867862 - RNA, 19 nt, Artificial Sequence
  Description of Artificial Sequence: Synthetic oligonucleotide
  Antisense strand to SEQ ID NO: 1867861
agcccaaggaagaauuucc

SEQ ID NO: 1867863 - RNA, 19 nt, Artificial Sequence
  Description of Artificial Sequence: Synthetic oligonucleotide
  Sense strand starting at position 2365 of SEQ ID NO: 1564274
ggcucauggagcugacauu

SEQ ID NO: 1867864 - RNA, 19 nt, Artificial Sequence
  Description of Artificial Sequence: Synthetic oligonucleotide
  Antisense strand to SEQ ID NO: 1867863
aaugucagcuccaugagcc

SEQ ID NO: 1867865 - RNA, 19 nt, Artificial Sequence
  Description of Artificial Sequence: Synthetic oligonucleotide
  Sense strand starting at position 2457 of SEQ ID NO: 1564274
agauaucugugacuauaua

SEQ ID NO: 1867866 - RNA, 19 nt, Artificial Sequence
  Description of Artificial Sequence: Synthetic oligonucleotide
  Antisense strand to SEQ ID NO: 1867865
uauauagucacagauaucu

SEQ ID NO: 1867867 - RNA, 19 nt, Artificial Sequence
  Description of Artificial Sequence: Synthetic oligonucleotide
  Sense strand starting at position 2572 of SEQ ID NO: 1564274
guuuacauguuaccauagu

SEQ ID NO: 1867868 - RNA, 19 nt, Artificial Sequence
  Description of Artificial Sequence: Synthetic oligonucleotide
  Antisense strand to SEQ ID NO: 1867867
acuaugguaacauguaaac

SEQ ID NO: 1867869 - RNA, 19 nt, Artificial Sequence
  Description of Artificial Sequence: Synthetic oligonucleotide
  Sense strand starting at position 3007 of SEQ ID NO: 1564274
ggaagagaggguuguacua

SEQ ID NO: 1867870 - RNA, 19 nt, Artificial Sequence
  Description of Artificial Sequence: Synthetic oligonucleotide
  Antisense strand to SEQ ID NO: 1867869
uaguacaacccucucuucc

SEQ ID NO: 1867871 - RNA, 19 nt, Artificial Sequence
  Description of Artificial Sequence: Synthetic oligonucleotide
  Sense strand starting at position 3036 of SEQ ID NO: 1564274
ccuccagcgauguaugaga

SEQ ID NO: 1867872 - RNA, 19 nt, Artificial Sequence
  Description of Artificial Sequence: Synthetic oligonucleotide
  Antisense strand to SEQ ID NO: 1867871
ucucauacaucgcuggagg

SEQ ID NO: 1867873 - RNA, 19 nt, Artificial Sequence
  Description of Artificial Sequence: Synthetic oligonucleotide
  Sense strand starting at position 3044 of SEQ ID NO: 1564274
gauguaugagagugccucu

SEQ ID NO: 1867874 - RNA, 19 nt, Artificial Sequence
  Description of Artificial Sequence: Synthetic oligonucleotide
  Antisense strand to SEQ ID NO: 1867873
agaggcacucucauacauc

SEQ ID NO: 1867875 - RNA, 19 nt, Artificial Sequence
  Description of Artificial Sequence: Synthetic oligonucleotide
  Sense strand starting at position 3177 of SEQ ID NO: 1564274
gggaguuugguagaaugcu

SEQ ID NO: 1867876 - RNA, 19 nt, Artificial Sequence
  Description of Artificial Sequence: Synthetic oligonucleotide
  Antisense strand to SEQ ID NO: 1867875
agcauucuaccaaacuccc

SEQ ID NO: 1867877 - RNA, 19 nt, Artificial Sequence
  Description of Artificial Sequence: Synthetic oligonucleotide
  Sense strand starting at position 3183 of SEQ ID NO: 1564274
uugguagaaugcucuuaua

SEQ ID NO: 1867878 - RNA, 19 nt, Artificial Sequence
  Description of Artificial Sequence: Synthetic oligonucleotide
  Antisense strand to SEQ ID NO: 1867877
uauaagagcauucuaccaa

SEQ ID NO: 1867879 - RNA, 19 nt, Artificial Sequence
  Description of Artificial Sequence: Synthetic oligonucleotide
  Sense strand starting at position 3571 of SEQ ID NO: 1564274
aagggaagaucuugacaac

SEQ ID NO: 1867880 - RNA, 19 nt, Artificial Sequence
  Description of Artificial Sequence: Synthetic oligonucleotide
  Antisense strand to SEQ ID NO: 1867879
guugucaagaucuucccuu

SEQ ID NO: 1867881 - RNA, 19 nt, Artificial Sequence
  Description of Artificial Sequence: Synthetic oligonucleotide
  Sense strand starting at position 3574 of SEQ ID NO: 1564274
ggaagaucuugacaaccau

SEQ ID NO: 1867882 - RNA, 19 nt, Artificial Sequence
  Description of Artificial Sequence: Synthetic oligonucleotide
  Antisense strand to SEQ ID NO: 1867881
augguugucaagaucuucc

SEQ ID NO: 1867883 - RNA, 19 nt, Artificial Sequence
  Description of Artificial Sequence: Synthetic oligonucleotide
  Sense strand starting at position 3612 of SEQ ID NO: 1564274
auugcuccauuugaguaau

SEQ ID NO: 1867884 - RNA, 19 nt, Artificial Sequence
  Description of Artificial Sequence: Synthetic oligonucleotide
  Antisense strand to SEQ ID NO: 1867883
auuacucaaauggagcaau

SEQ ID NO: 1867885 - RNA, 19 nt, Artificial Sequence
  Description of Artificial Sequence: Synthetic oligonucleotide
  Sense strand starting at position 3630 of SEQ ID NO: 1564274
ucaguuucuccauggaaca

SEQ ID NO: 1867886 - RNA, 19 nt, Artificial Sequence
  Description of Artificial Sequence: Synthetic oligonucleotide
  Antisense strand to SEQ ID NO: 1867885
uguuccauggagaaacuga

SEQ ID NO: 1867887 - RNA, 19 nt, Artificial Sequence
  Description of Artificial Sequence: Synthetic oligonucleotide
  Sense strand starting at position 3815 of SEQ ID NO: 1564274
gguuucuauuaaucuguca

SEQ ID NO: 1867888 - RNA, 19 nt, Artificial Sequence
  Description of Artificial Sequence: Synthetic oligonucleotide
  Antisense strand to SEQ ID NO: 1867887
ugacagauuaauagaaacc

SEQ ID NO: 1867889 - RNA, 19 nt, Artificial Sequence
  Description of Artificial Sequence: Synthetic oligonucleotide
  Sense strand starting at position 3955 of SEQ ID NO: 1564274
aguuauacagcuuguugga

SEQ ID NO: 1867890 - RNA, 19 nt, Artificial Sequence
  Description of Artificial Sequence: Synthetic oligonucleotide
  Antisense strand to SEQ ID NO: 1867889
uccaacaagcuguauaacu

SEQ ID NO: 1867891 - RNA, 19 nt, Artificial Sequence
  Description of Artificial Sequence: Synthetic oligonucleotide
  Sense strand starting at position 121 of SEQ ID NO: 1564275
cacacaacugaguguagaa

SEQ ID NO: 1867892 - RNA, 19 nt, Artificial Sequence
  Description of Artificial Sequence: Synthetic oligonucleotide
  Antisense strand to SEQ ID NO: 1867891
uucuacacucaguugugug

SEQ ID NO: 1867893 - RNA, 19 nt, Artificial Sequence
  Description of Artificial Sequence: Synthetic oligonucleotide
  Sense strand starting at position 134 of SEQ ID NO: 1564275
guagaacuaucagugucau

SEQ ID NO: 1867894 - RNA, 19 nt, Artificial Sequence
  Description of Artificial Sequence: Synthetic oligonucleotide
  Antisense strand to SEQ ID NO: 1867893
augacacugauaguucuac

SEQ ID NO: 1867895 - RNA, 19 nt, Artificial Sequence
  Description of Artificial Sequence: Synthetic oligonucleotide
  Sense strand starting at position 162 of SEQ ID NO: 1564275
ugugauagggucuagucau

SEQ ID NO: 1867896 - RNA, 19 nt, Artificial Sequence
  Description of Artificial Sequence: Synthetic oligonucleotide
  Antisense strand to SEQ ID NO: 1867895
augacuagacccuaucaca

SEQ ID NO: 1867897 - RNA, 19 nt, Artificial Sequence
  Description of Artificial Sequence: Synthetic oligonucleotide
  Sense strand starting at position 230 of SEQ ID NO: 1564275
uauaaagggugucucuauu

SEQ ID NO: 1867898 - RNA, 19 nt, Artificial Sequence
  Description of Artificial Sequence: Synthetic oligonucleotide
  Antisense strand to SEQ ID NO: 1867897
aauagagacacccuuuaua

SEQ ID NO: 1867899 - RNA, 19 nt, Artificial Sequence
  Description of Artificial Sequence: Synthetic oligonucleotide
  Sense strand starting at position 253 of SEQ ID NO: 1564275
cuugcaacugcauaugaau

SEQ ID NO: 1867900 - RNA, 19 nt, Artificial Sequence
  Description of Artificial Sequence: Synthetic oligonucleotide
  Antisense strand to SEQ ID NO: 1867899
auucauaugcaguugcaag

SEQ ID NO: 1867901 - RNA, 19 nt, Artificial Sequence
  Description of Artificial Sequence: Synthetic oligonucleotide
  Sense strand starting at position 456 of SEQ ID NO: 1564275
ucauaacgucuugaugaaa

SEQ ID NO: 1867902 - RNA, 19 nt, Artificial Sequence
  Description of Artificial Sequence: Synthetic oligonucleotide
  Antisense strand to SEQ ID NO: 1867901
uuucaucaagacguuauga

SEQ ID NO: 1867903 - RNA, 19 nt, Artificial Sequence
  Description of Artificial Sequence: Synthetic oligonucleotide
  Sense strand starting at position 459 of SEQ ID NO: 1564275
uaacgucuugaugaaagca

SEQ ID NO: 1867904 - RNA, 19 nt, Artificial Sequence
  Description of Artificial Sequence: Synthetic oligonucleotide
  Antisense strand to SEQ ID NO: 1867903
ugcuuucaucaagacguua

SEQ ID NO: 1867905 - RNA, 19 nt, Artificial Sequence
  Description of Artificial Sequence: Synthetic oligonucleotide
  Sense strand starting at position 591 of SEQ ID NO: 1564275
gacaguuguacgcaaggga

SEQ ID NO: 1867906 - RNA, 19 nt, Artificial Sequence
  Description of Artificial Sequence: Synthetic oligonucleotide
  Antisense strand to SEQ ID NO: 1867905
ucccuugcguacaacuguc

SEQ ID NO: 1867907 - RNA, 19 nt, Artificial Sequence
  Description of Artificial Sequence: Synthetic oligonucleotide
  Sense strand starting at position 728 of SEQ ID NO: 1564275
acugguuggguuuauacua

SEQ ID NO: 1867908 - RNA, 19 nt, Artificial Sequence
  Description of Artificial Sequence: Synthetic oligonucleotide
  Antisense strand to SEQ ID NO: 1867907
uaguauaaacccaaccagu

SEQ ID NO: 1867909 - RNA, 19 nt, Artificial Sequence
  Description of Artificial Sequence: Synthetic oligonucleotide
  Sense strand starting at position 1201 of SEQ ID NO: 1564275
gucggaagccacuacaaau

SEQ ID NO: 1867910 - RNA, 19 nt, Artificial Sequence
  Description of Artificial Sequence: Synthetic oligonucleotide
  Antisense strand to SEQ ID NO: 1867909
auuuguaguggcuuccgac

SEQ ID NO: 1867911 - RNA, 19 nt, Artificial Sequence
  Description of Artificial Sequence: Synthetic oligonucleotide
  Sense strand starting at position 2024 of SEQ ID NO: 1564275
gaggaaaguugcuuauguc

SEQ ID NO: 1867912 - RNA, 19 nt, Artificial Sequence
  Description of Artificial Sequence: Synthetic oligonucleotide
  Antisense strand to SEQ ID NO: 1867911
gacauaagcaacuuuccuc

SEQ ID NO: 1867913 - RNA, 19 nt, Artificial Sequence
  Description of Artificial Sequence: Synthetic oligonucleotide
  Sense strand starting at position 2025 of SEQ ID NO: 1564275
aggaaaguugcuuauguca

SEQ ID NO: 1867914 - RNA, 19 nt, Artificial Sequence
  Description of Artificial Sequence: Synthetic oligonucleotide
  Antisense strand to SEQ ID NO: 1867913
ugacauaagcaacuuuccu

SEQ ID NO: 1867915 - RNA, 19 nt, Artificial Sequence
  Description of Artificial Sequence: Synthetic oligonucleotide
  Sense strand starting at position 2413 of SEQ ID NO: 1564275
ggagaggagugauugguua

SEQ ID NO: 1867916 - RNA, 19 nt, Artificial Sequence
  Description of Artificial Sequence: Synthetic oligonucleotide
  Antisense strand to SEQ ID NO: 1867915
uaaccaaucacuccucucc

SEQ ID NO: 1867917 - RNA, 19 nt, Artificial Sequence
  Description of Artificial Sequence: Synthetic oligonucleotide
  Sense strand starting at position 2415 of SEQ ID NO: 1564275
agaggagugauugguuaaa

SEQ ID NO: 1867918 - RNA, 19 nt, Artificial Sequence
  Description of Artificial Sequence: Synthetic oligonucleotide
  Antisense strand to SEQ ID NO: 1867917
uuuaaccaaucacuccucu

SEQ ID NO: 1867919 - RNA, 19 nt, Artificial Sequence
  Description of Artificial Sequence: Synthetic oligonucleotide
  Sense strand starting at position 2449 of SEQ ID NO: 1564275
aagaauaaaucggccuuga

SEQ ID NO: 1867920 - RNA, 19 nt, Artificial Sequence
  Description of Artificial Sequence: Synthetic oligonucleotide
  Antisense strand to SEQ ID NO: 1867919
ucaaggccgauuuauucuu

SEQ ID NO: 1867921 - RNA, 19 nt, Artificial Sequence
  Description of Artificial Sequence: Synthetic oligonucleotide
  Sense strand starting at position 2453 of SEQ ID NO: 1564275
auaaaucggccuugacuau

SEQ ID NO: 1867922 - RNA, 19 nt, Artificial Sequence
  Description of Artificial Sequence: Synthetic oligonucleotide
  Antisense strand to SEQ ID NO: 1867921
auagucaaggccgauuuau

SEQ ID NO: 1867923 - RNA, 19 nt, Artificial Sequence
  Description of Artificial Sequence: Synthetic oligonucleotide
  Sense strand starting at position 2521 of SEQ ID NO: 1564275
caacguuuaggccaaugau

SEQ ID NO: 1867924 - RNA, 19 nt, Artificial Sequence
  Description of Artificial Sequence: Synthetic oligonucleotide
  Antisense strand to SEQ ID NO: 1867923
aucauuggccuaaacguug

SEQ ID NO: 1867925 - RNA, 19 nt, Artificial Sequence
  Description of Artificial Sequence: Synthetic oligonucleotide
  Sense strand starting at position 2548 of SEQ ID NO: 1564275
ggcagaaugaaauaguguu

SEQ ID NO: 1867926 - RNA, 19 nt, Artificial Sequence
  Description of Artificial Sequence: Synthetic oligonucleotide
  Antisense strand to SEQ ID NO: 1867925
aacacuauuucauucugcc

SEQ ID NO: 1867927 - RNA, 19 nt, Artificial Sequence
  Description of Artificial Sequence: Synthetic oligonucleotide
  Sense strand starting at position 2688 of SEQ ID NO: 1564275
aagccaagcggcuauuuau

SEQ ID NO: 1867928 - RNA, 19 nt, Artificial Sequence
  Description of Artificial Sequence: Synthetic oligonucleotide
  Antisense strand to SEQ ID NO: 1867927
auaaauagccgcuuggcuu

SEQ ID NO: 1867929 - RNA, 19 nt, Artificial Sequence
  Description of Artificial Sequence: Synthetic oligonucleotide
  Sense strand starting at position 2695 of SEQ ID NO: 1564275
gcggcuauuuauguucaga

SEQ ID NO: 1867930 - RNA, 19 nt, Artificial Sequence
  Description of Artificial Sequence: Synthetic oligonucleotide
  Antisense strand to SEQ ID NO: 1867929
ucugaacauaaauagccgc

SEQ ID NO: 1867931 - RNA, 19 nt, Artificial Sequence
  Description of Artificial Sequence: Synthetic oligonucleotide
  Sense strand starting at position 2940 of SEQ ID NO: 1564275
uggguuaagucaucaagag

SEQ ID NO: 1867932 - RNA, 19 nt, Artificial Sequence
  Description of Artificial Sequence: Synthetic oligonucleotide
  Antisense strand to SEQ ID NO: 1867931
cucuugaugacuuaaccca

SEQ ID NO: 1867933 - RNA, 19 nt, Artificial Sequence
  Description of Artificial Sequence: Synthetic oligonucleotide
  Sense strand starting at position 2941 of SEQ ID NO: 1564275
ggguuaagucaucaagagu

SEQ ID NO: 1867934 - RNA, 19 nt, Artificial Sequence
  Description of Artificial Sequence: Synthetic oligonucleotide
  Antisense strand to SEQ ID NO: 1867933
acucuugaugacuuaaccc

SEQ ID NO: 1867935 - RNA, 19 nt, Artificial Sequence
  Description of Artificial Sequence: Synthetic oligonucleotide
  Sense strand starting at position 2972 of SEQ ID NO: 1564275
gcuaauggauuccuuggaa

SEQ ID NO: 1867936 - RNA, 19 nt, Artificial Sequence
  Description of Artificial Sequence: Synthetic oligonucleotide
  Antisense strand to SEQ ID NO: 1867935
uuccaaggaauccauuagc

SEQ ID NO: 1867937 - RNA, 19 nt, Artificial Sequence
  Description of Artificial Sequence: Synthetic oligonucleotide
  Sense strand starting at position 3006 of SEQ ID NO: 1564275
aagugacaucauuagagcu

SEQ ID NO: 1867938 - RNA, 19 nt, Artificial Sequence
  Description of Artificial Sequence: Synthetic oligonucleotide
  Antisense strand to SEQ ID NO: 1867937
agcucuaaugaugucacuu

SEQ ID NO: 1867939 - RNA, 19 nt, Artificial Sequence
  Description of Artificial Sequence: Synthetic oligonucleotide
  Sense strand starting at position 3018 of SEQ ID NO: 1564275
uagagcuguccuuaucaga

SEQ ID NO: 1867940 - RNA, 19 nt, Artificial Sequence
  Description of Artificial Sequence: Synthetic oligonucleotide
  Antisense strand to SEQ ID NO: 1867939
ucugauaaggacagcucua

SEQ ID NO: 1867941 - RNA, 19 nt, Artificial Sequence
  Description of Artificial Sequence: Synthetic oligonucleotide
  Sense strand starting at position 3025 of SEQ ID NO: 1564275
guccuuaucagagauuggu

SEQ ID NO: 1867942 - RNA, 19 nt, Artificial Sequence
  Description of Artificial Sequence: Synthetic oligonucleotide
  Antisense strand to SEQ ID NO: 1867941
accaaucucugauaaggac

SEQ ID NO: 1867943 - RNA, 19 nt, Artificial Sequence
  Description of Artificial Sequence: Synthetic oligonucleotide
  Sense strand starting at position 3031 of SEQ ID NO: 1564275
aucagagauuggucucaag

SEQ ID NO: 1867944 - RNA, 19 nt, Artificial Sequence
  Description of Artificial Sequence: Synthetic oligonucleotide
  Antisense strand to SEQ ID NO: 1867943
cuugagaccaaucucugau

SEQ ID NO: 1867945 - RNA, 19 nt, Artificial Sequence
  Description of Artificial Sequence: Synthetic oligonucleotide
  Sense strand starting at position 3293 of SEQ ID NO: 1564275
gggacuuacugaguucaug

SEQ ID NO: 1867946 - RNA, 19 nt, Artificial Sequence
  Description of Artificial Sequence: Synthetic oligonucleotide
  Antisense strand to SEQ ID NO: 1867945
caugaacucaguaaguccc

SEQ ID NO: 1867947 - RNA, 19 nt, Artificial Sequence
  Description of Artificial Sequence: Synthetic oligonucleotide
  Sense strand starting at position 3305 of SEQ ID NO: 1564275
guucaugggacuggugaga

SEQ ID NO: 1867948 - RNA, 19 nt, Artificial Sequence
  Description of Artificial Sequence: Synthetic oligonucleotide
  Antisense strand to SEQ ID NO: 1867947
ucucaccagucccaugaac

SEQ ID NO: 1867949 - RNA, 19 nt, Artificial Sequence
  Description of Artificial Sequence: Synthetic oligonucleotide
  Sense strand starting at position 3329 of SEQ ID NO: 1564275
ccgugaagauguccagaag

SEQ ID NO: 1867950 - RNA, 19 nt, Artificial Sequence
  Description of Artificial Sequence: Synthetic oligonucleotide
  Antisense strand to SEQ ID NO: 1867949
cuucuggacaucuucacgg

SEQ ID NO: 1867951 - RNA, 19 nt, Artificial Sequence
  Description of Artificial Sequence: Synthetic oligonucleotide
  Sense strand starting at position 3330 of SEQ ID NO: 1564275
cgugaagauguccagaaga

SEQ ID NO: 1867952 - RNA, 19 nt, Artificial Sequence
  Description of Artificial Sequence: Synthetic oligonucleotide
  Antisense strand to SEQ ID NO: 1867951
ucuucuggacaucuucacg

SEQ ID NO: 1867953 - RNA, 19 nt, Artificial Sequence
  Description of Artificial Sequence: Synthetic oligonucleotide
  Sense strand starting at position 3362 of SEQ ID NO: 1564275
ggaauuuguuucuaacaug

SEQ ID NO: 1867954 - RNA, 19 nt, Artificial Sequence
  Description of Artificial Sequence: Synthetic oligonucleotide
  Antisense strand to SEQ ID NO: 1867953
cauguuagaaacaaauucc

SEQ ID NO: 1867955 - RNA, 19 nt, Artificial Sequence
  Description of Artificial Sequence: Synthetic oligonucleotide
  Sense strand starting at position 3365 of SEQ ID NO: 1564275
auuuguuucuaacaugaga

SEQ ID NO: 1867956 - RNA, 19 nt, Artificial Sequence
  Description of Artificial Sequence: Synthetic oligonucleotide
  Antisense strand to SEQ ID NO: 1867955
ucucauguuagaaacaaau

SEQ ID NO: 1867957 - RNA, 19 nt, Artificial Sequence
  Description of Artificial Sequence: Synthetic oligonucleotide
  Sense strand starting at position 3385 of SEQ ID NO: 1564275
gcaggaggcacuugacaau

SEQ ID NO: 1867958 - RNA, 19 nt, Artificial Sequence
  Description of Artificial Sequence: Synthetic oligonucleotide
  Antisense strand to SEQ ID NO: 1867957
auugucaagugccuccugc

SEQ ID NO: 1867959 - RNA, 19 nt, Artificial Sequence
  Description of Artificial Sequence: Synthetic oligonucleotide
  Sense strand starting at position 3391 of SEQ ID NO: 1564275
ggcacuugacaaugguagu

SEQ ID NO: 1867960 - RNA, 19 nt, Artificial Sequence
  Description of Artificial Sequence: Synthetic oligonucleotide
  Antisense strand to SEQ ID NO: 1867959
acuaccauugucaagugcc

SEQ ID NO: 1867961 - RNA, 19 nt, Artificial Sequence
  Description of Artificial Sequence: Synthetic oligonucleotide
  Sense strand starting at position 3488 of SEQ ID NO: 1564275
aggcaagucucccuaauag

SEQ ID NO: 1867962 - RNA, 19 nt, Artificial Sequence
  Description of Artificial Sequence: Synthetic oligonucleotide
  Antisense strand to SEQ ID NO: 1867961
cuauuagggagacuugccu

SEQ ID NO: 1867963 - RNA, 19 nt, Artificial Sequence
  Description of Artificial Sequence: Synthetic oligonucleotide
  Sense strand starting at position 3714 of SEQ ID NO: 1564275
guaggacuuuggucccuau

SEQ ID NO: 1867964 - RNA, 19 nt, Artificial Sequence
  Description of Artificial Sequence: Synthetic oligonucleotide
  Antisense strand to SEQ ID NO: 1867963
auagggaccaaaguccuac

SEQ ID NO: 1867965 - RNA, 19 nt, Artificial Sequence
  Description of Artificial Sequence: Synthetic oligonucleotide
  Sense strand starting at position 3884 of SEQ ID NO: 1564275
agcacagucuacuuuaaag

SEQ ID NO: 1867966 - RNA, 19 nt, Artificial Sequence
  Description of Artificial Sequence: Synthetic oligonucleotide
  Antisense strand to SEQ ID NO: 1867965
cuuuaaaguagacugugcu

SEQ ID NO: 1867967 - RNA, 19 nt, Artificial Sequence
  Description of Artificial Sequence: Synthetic oligonucleotide
  Sense strand starting at position 3896 of SEQ ID NO: 1564275
uuuaaaggcuuaucagauu

SEQ ID NO: 1867968 - RNA, 19 nt, Artificial Sequence
  Description of Artificial Sequence: Synthetic oligonucleotide
  Antisense strand to SEQ ID NO: 1867967
aaucugauaagccuuuaaa

SEQ ID NO: 1867969 - RNA, 19 nt, Artificial Sequence
  Description of Artificial Sequence: Synthetic oligonucleotide
  Sense strand starting at position 3902 of SEQ ID NO: 1564275
ggcuuaucagauuauguca

SEQ ID NO: 1867970 - RNA, 19 nt, Artificial Sequence
  Description of Artificial Sequence: Synthetic oligonucleotide
  Antisense strand to SEQ ID NO: 1867969
ugacauaaucugauaagcc

SEQ ID NO: 1867971 - RNA, 19 nt, Artificial Sequence
  Description of Artificial Sequence: Synthetic oligonucleotide
  Sense strand starting at position 12 of SEQ ID NO: 1564276
cucuuauguuuauugucua

SEQ ID NO: 1867972 - RNA, 19 nt, Artificial Sequence
  Description of Artificial Sequence: Synthetic oligonucleotide
  Antisense strand to SEQ ID NO: 1867971
uagacaauaaacauaagag

SEQ ID NO: 1867973 - RNA, 19 nt, Artificial Sequence
  Description of Artificial Sequence: Synthetic oligonucleotide
  Sense strand starting at position 64 of SEQ ID NO: 1564276
gaaagagaucuuugucuau

SEQ ID NO: 1867974 - RNA, 19 nt, Artificial Sequence
  Description of Artificial Sequence: Synthetic oligonucleotide
  Antisense strand to SEQ ID NO: 1867973
auagacaaagaucucuuuc

SEQ ID NO: 1867975 - RNA, 19 nt, Artificial Sequence
  Description of Artificial Sequence: Synthetic oligonucleotide
  Sense strand starting at position 107 of SEQ ID NO: 1564276
aggcuaauauaugucauau

SEQ ID NO: 1867976 - RNA, 19 nt, Artificial Sequence
  Description of Artificial Sequence: Synthetic oligonucleotide
  Antisense strand to SEQ ID NO: 1867975
auaugacauauauuagccu

SEQ ID NO: 1867977 - RNA, 19 nt, Artificial Sequence
  Description of Artificial Sequence: Synthetic oligonucleotide
  Sense strand starting at position 266 of SEQ ID NO: 1564276
aguguugagagaggcauua

SEQ ID NO: 1867978 - RNA, 19 nt, Artificial Sequence
  Description of Artificial Sequence: Synthetic oligonucleotide
  Antisense strand to SEQ ID NO: 1867977
uaaugccucucucaacacu

SEQ ID NO: 1867979 - RNA, 19 nt, Artificial Sequence
  Description of Artificial Sequence: Synthetic oligonucleotide
  Sense strand starting at position 268 of SEQ ID NO: 1564276
uguugagagaggcauuauc

SEQ ID NO: 1867980 - RNA, 19 nt, Artificial Sequence
  Description of Artificial Sequence: Synthetic oligonucleotide
  Antisense strand to SEQ ID NO: 1867979
gauaaugccucucucaaca

SEQ ID NO: 1867981 - RNA, 19 nt, Artificial Sequence
  Description of Artificial Sequence: Synthetic oligonucleotide
  Sense strand starting at position 327 of SEQ ID NO: 1564276
aagaaucaggcucaguuau

SEQ ID NO: 1867982 - RNA, 19 nt, Artificial Sequence
  Description of Artificial Sequence: Synthetic oligonucleotide
  Antisense strand to SEQ ID NO: 1867981
auaacugagccugauucuu

SEQ ID NO: 1867983 - RNA, 19 nt, Artificial Sequence
  Description of Artificial Sequence: Synthetic oligonucleotide
  Sense strand starting at position 329 of SEQ ID NO: 1564276
gaaucaggcucaguuauaa

SEQ ID NO: 1867984 - RNA, 19 nt, Artificial Sequence
  Description of Artificial Sequence: Synthetic oligonucleotide
  Antisense strand to SEQ ID NO: 1867983
uuauaacugagccugauuc

SEQ ID NO: 1867985 - RNA, 19 nt, Artificial Sequence
  Description of Artificial Sequence: Synthetic oligonucleotide
  Sense strand starting at position 484 of SEQ ID NO: 1564276
ucaguuucuuaucuguaca

SEQ ID NO: 1867986 - RNA, 19 nt, Artificial Sequence
  Description of Artificial Sequence: Synthetic oligonucleotide
  Antisense strand to SEQ ID NO: 1867985
uguacagauaagaaacuga

SEQ ID NO: 1867987 - RNA, 19 nt, Artificial Sequence
  Description of Artificial Sequence: Synthetic oligonucleotide
  Sense strand starting at position 486 of SEQ ID NO: 1564276
aguuucuuaucuguacaau

SEQ ID NO: 1867988 - RNA, 19 nt, Artificial Sequence
  Description of Artificial Sequence: Synthetic oligonucleotide
  Antisense strand to SEQ ID NO: 1867987
auuguacagauaagaaacu

SEQ ID NO: 1867989 - RNA, 19 nt, Artificial Sequence
  Description of Artificial Sequence: Synthetic oligonucleotide
  Sense strand starting at position 525 of SEQ ID NO: 1564276
guuguaaagcaauauaaca

SEQ ID NO: 1867990 - RNA, 19 nt, Artificial Sequence
  Description of Artificial Sequence: Synthetic oligonucleotide
  Antisense strand to SEQ ID NO: 1867989
uguuauauugcuuuacaac

SEQ ID NO: 1867991 - RNA, 19 nt, Artificial Sequence
  Description of Artificial Sequence: Synthetic oligonucleotide
  Sense strand starting at position 541 of SEQ ID NO: 1564276
acacauguauucuuggaga

SEQ ID NO: 1867992 - RNA, 19 nt, Artificial Sequence
  Description of Artificial Sequence: Synthetic oligonucleotide
  Antisense strand to SEQ ID NO: 1867991
ucuccaagaauacaugugu

SEQ ID NO: 1867993 - RNA, 19 nt, Artificial Sequence
  Description of Artificial Sequence: Synthetic oligonucleotide
  Sense strand starting at position 543 of SEQ ID NO: 1564276
acauguauucuuggagaau

SEQ ID NO: 1867994 - RNA, 19 nt, Artificial Sequence
  Description of Artificial Sequence: Synthetic oligonucleotide
  Antisense strand to SEQ ID NO: 1867993
auucuccaagaauacaugu

SEQ ID NO: 1867995 - RNA, 19 nt, Artificial Sequence
  Description of Artificial Sequence: Synthetic oligonucleotide
  Sense strand starting at position 626 of SEQ ID NO: 1564276
cuucuauauuuguugcaua

SEQ ID NO: 1867996 - RNA, 19 nt, Artificial Sequence
  Description of Artificial Sequence: Synthetic oligonucleotide
  Antisense strand to SEQ ID NO: 1867995
uaugcaacaaauauagaag

SEQ ID NO: 1867997 - RNA, 19 nt, Artificial Sequence
  Description of Artificial Sequence: Synthetic oligonucleotide
  Sense strand starting at position 2073 of SEQ ID NO: 1564276
aauauaugugcaugggauu

SEQ ID NO: 1867998 - RNA, 19 nt, Artificial Sequence
  Description of Artificial Sequence: Synthetic oligonucleotide
  Antisense strand to SEQ ID NO: 1867997
aaucccaugcacauauauu

SEQ ID NO: 1867999 - RNA, 19 nt, Artificial Sequence
  Description of Artificial Sequence: Synthetic oligonucleotide
  Sense strand starting at position 2125 of SEQ ID NO: 1564276
accaucuuguaguuugaaa

SEQ ID NO: 1868000 - RNA, 19 nt, Artificial Sequence
  Description of Artificial Sequence: Synthetic oligonucleotide
  Antisense strand to SEQ ID NO: 1867999
uuucaaacuacaagauggu

SEQ ID NO: 1868001 - RNA, 19 nt, Artificial Sequence
  Description of Artificial Sequence: Synthetic oligonucleotide
  Sense strand starting at position 2567 of SEQ ID NO: 1564276
uagagaugauaggaacuau

SEQ ID NO: 1868002 - RNA, 19 nt, Artificial Sequence
  Description of Artificial Sequence: Synthetic oligonucleotide
  Antisense strand to SEQ ID NO: 1868001
auaguuccuaucaucucua

SEQ ID NO: 1868003 - RNA, 19 nt, Artificial Sequence
  Description of Artificial Sequence: Synthetic oligonucleotide
  Sense strand starting at position 2584 of SEQ ID NO: 1564276
auauucuuguuucucuaga

SEQ ID NO: 1868004 - RNA, 19 nt, Artificial Sequence
  Description of Artificial Sequence: Synthetic oligonucleotide
  Antisense strand to SEQ ID NO: 1868003
ucuagagaaacaagaauau

SEQ ID NO: 1868005 - RNA, 19 nt, Artificial Sequence
  Description of Artificial Sequence: Synthetic oligonucleotide
  Sense strand starting at position 2714 of SEQ ID NO: 1564276
acuauauuauaugagggau

SEQ ID NO: 1868006 - RNA, 19 nt, Artificial Sequence
  Description of Artificial Sequence: Synthetic oligonucleotide
  Antisense strand to SEQ ID NO: 1868005
aucccucauauaauauagu

SEQ ID NO: 1868007 - RNA, 19 nt, Artificial Sequence
  Description of Artificial Sequence: Synthetic oligonucleotide
  Sense strand starting at position 2716 of SEQ ID NO: 1564276
uauauuauaugagggauag

SEQ ID NO: 1868008 - RNA, 19 nt, Artificial Sequence
  Description of Artificial Sequence: Synthetic oligonucleotide
  Antisense strand to SEQ ID NO: 1868007
cuaucccucauauaauaua

SEQ ID NO: 1868009 - RNA, 19 nt, Artificial Sequence
  Description of Artificial Sequence: Synthetic oligonucleotide
  Sense strand starting at position 2748 of SEQ ID NO: 1564276
uuacauaugccucacugga

SEQ ID NO: 1868010 - RNA, 19 nt, Artificial Sequence
  Description of Artificial Sequence: Synthetic oligonucleotide
  Antisense strand to SEQ ID NO: 1868009
uccagugaggcauauguaa

SEQ ID NO: 1868011 - RNA, 19 nt, Artificial Sequence
  Description of Artificial Sequence: Synthetic oligonucleotide
  Sense strand starting at position 2868 of SEQ ID NO: 1564276
auggauugcucuuuaauua

SEQ ID NO: 1868012 - RNA, 19 nt, Artificial Sequence
  Description of Artificial Sequence: Synthetic oligonucleotide
  Antisense strand to SEQ ID NO: 1868011
uaauuaaagagcaauccau

SEQ ID NO: 1868013 - RNA, 19 nt, Artificial Sequence
  Description of Artificial Sequence: Synthetic oligonucleotide
  Sense strand starting at position 2869 of SEQ ID NO: 1564276
uggauugcucuuuaauuau

SEQ ID NO: 1868014 - RNA, 19 nt, Artificial Sequence
  Description of Artificial Sequence: Synthetic oligonucleotide
  Antisense strand to SEQ ID NO: 1868013
auaauuaaagagcaaucca

SEQ ID NO: 1868015 - RNA, 19 nt, Artificial Sequence
  Description of Artificial Sequence: Synthetic oligonucleotide
  Sense strand starting at position 2882 of SEQ ID NO: 1564276
aauuauagcucuguguuag

SEQ ID NO: 1868016 - RNA, 19 nt, Artificial Sequence
  Description of Artificial Sequence: Synthetic oligonucleotide
  Antisense strand to SEQ ID NO: 1868015
cuaacacagagcuauaauu

SEQ ID NO: 1868017 - RNA, 19 nt, Artificial Sequence
  Description of Artificial Sequence: Synthetic oligonucleotide
  Sense strand starting at position 2883 of SEQ ID NO: 1564276
auuauagcucuguguuaga

SEQ ID NO: 1868018 - RNA, 19 nt, Artificial Sequence
  Description of Artificial Sequence: Synthetic oligonucleotide
  Antisense strand to SEQ ID NO: 1868017
ucuaacacagagcuauaau

SEQ ID NO: 1868019 - RNA, 19 nt, Artificial Sequence
  Description of Artificial Sequence: Synthetic oligonucleotide
  Sense strand starting at position 2892 of SEQ ID NO: 1564276
cuguguuagaauuaguagu

SEQ ID NO: 1868020 - RNA, 19 nt, Artificial Sequence
  Description of Artificial Sequence: Synthetic oligonucleotide
  Antisense strand to SEQ ID NO: 1868019
acuacuaauucuaacacag

SEQ ID NO: 1868021 - RNA, 19 nt, Artificial Sequence
  Description of Artificial Sequence: Synthetic oligonucleotide
  Sense strand starting at position 2894 of SEQ ID NO: 1564276
guguuagaauuaguaguau

SEQ ID NO: 1868022 - RNA, 19 nt, Artificial Sequence
  Description of Artificial Sequence: Synthetic oligonucleotide
  Antisense strand to SEQ ID NO: 1868021
auacuacuaauucuaacac

SEQ ID NO: 1868023 - RNA, 19 nt, Artificial Sequence
  Description of Artificial Sequence: Synthetic oligonucleotide
  Sense strand starting at position 2925 of SEQ ID NO: 1564276
aaguauuucuguguguaga

SEQ ID NO: 1868024 - RNA, 19 nt, Artificial Sequence
  Description of Artificial Sequence: Synthetic oligonucleotide
  Antisense strand to SEQ ID NO: 1868023
ucuacacacagaaauacuu

SEQ ID NO: 1868025 - RNA, 19 nt, Artificial Sequence
  Description of Artificial Sequence: Synthetic oligonucleotide
  Sense strand starting at position 2926 of SEQ ID NO: 1564276
aguauuucuguguguagaa

SEQ ID NO: 1868026 - RNA, 19 nt, Artificial Sequence
  Description of Artificial Sequence: Synthetic oligonucleotide
  Antisense strand to SEQ ID NO: 1868025
uucuacacacagaaauacu

SEQ ID NO: 1868027 - RNA, 19 nt, Artificial Sequence
  Description of Artificial Sequence: Synthetic oligonucleotide
  Sense strand starting at position 2927 of SEQ ID NO: 1564276
guauuucuguguguagaaa

SEQ ID NO: 1868028 - RNA, 19 nt, Artificial Sequence
  Description of Artificial Sequence: Synthetic oligonucleotide
  Antisense strand to SEQ ID NO: 1868027
uuucuacacacagaaauac

SEQ ID NO: 1868029 - RNA, 19 nt, Artificial Sequence
  Description of Artificial Sequence: Synthetic oligonucleotide
  Sense strand starting at position 2986 of SEQ ID NO: 1564276
aggagauguuauguuuaca

SEQ ID NO: 1868030 - RNA, 19 nt, Artificial Sequence
  Description of Artificial Sequence: Synthetic oligonucleotide
  Antisense strand to SEQ ID NO: 1868029
uguaaacauaacaucuccu

SEQ ID NO: 1868031 - RNA, 19 nt, Artificial Sequence
  Description of Artificial Sequence: Synthetic oligonucleotide
  Sense strand starting at position 3062 of SEQ ID NO: 1564276
gggugauaauuaguuacuc

SEQ ID NO: 1868032 - RNA, 19 nt, Artificial Sequence
  Description of Artificial Sequence: Synthetic oligonucleotide
  Antisense strand to SEQ ID NO: 1868031
gaguaacuaauuaucaccc

SEQ ID NO: 1868033 - RNA, 19 nt, Artificial Sequence
  Description of Artificial Sequence: Synthetic oligonucleotide
  Sense strand starting at position 3282 of SEQ ID NO: 1564276
ugauauagcuaguuaucau

SEQ ID NO: 1868034 - RNA, 19 nt, Artificial Sequence
  Description of Artificial Sequence: Synthetic oligonucleotide
  Antisense strand to SEQ ID NO: 1868033
augauaacuagcuauauca

SEQ ID NO: 1868035 - RNA, 19 nt, Artificial Sequence
  Description of Artificial Sequence: Synthetic oligonucleotide
  Sense strand starting at position 3371 of SEQ ID NO: 1564276
cuuaucagguuuccuagaa

SEQ ID NO: 1868036 - RNA, 19 nt, Artificial Sequence
  Description of Artificial Sequence: Synthetic oligonucleotide
  Antisense strand to SEQ ID NO: 1868035
uucuaggaaaccugauaag

SEQ ID NO: 1868037 - RNA, 19 nt, Artificial Sequence
  Description of Artificial Sequence: Synthetic oligonucleotide
  Sense strand starting at position 3372 of SEQ ID NO: 1564276
uuaucagguuuccuagaaa

SEQ ID NO: 1868038 - RNA, 19 nt, Artificial Sequence
  Description of Artificial Sequence: Synthetic oligonucleotide
  Antisense strand to SEQ ID NO: 1868037
uuucuaggaaaccugauaa

SEQ ID NO: 1868039 - RNA, 19 nt, Artificial Sequence
  Description of Artificial Sequence: Synthetic oligonucleotide
  Sense strand starting at position 3571 of SEQ ID NO: 1564276
uuacuuuguagugaaguca

SEQ ID NO: 1868040 - RNA, 19 nt, Artificial Sequence
  Description of Artificial Sequence: Synthetic oligonucleotide
  Antisense strand to SEQ ID NO: 1868039
ugacuucacuacaaaguaa

SEQ ID NO: 1868041 - RNA, 19 nt, Artificial Sequence
  Description of Artificial Sequence: Synthetic oligonucleotide
  Sense strand starting at position 3580 of SEQ ID NO: 1564276
agugaagucaaaugaagcu

SEQ ID NO: 1868042 - RNA, 19 nt, Artificial Sequence
  Description of Artificial Sequence: Synthetic oligonucleotide
  Antisense strand to SEQ ID NO: 1868041
agcuucauuugacuucacu

SEQ ID NO: 1868043 - RNA, 19 nt, Artificial Sequence
  Description of Artificial Sequence: Synthetic oligonucleotide
  Sense strand starting at position 3838 of SEQ ID NO: 1564276
agcacauuauggucccaau

SEQ ID NO: 1868044 - RNA, 19 nt, Artificial Sequence
  Description of Artificial Sequence: Synthetic oligonucleotide
  Antisense strand to SEQ ID NO: 1868043
auugggaccauaaugugcu

SEQ ID NO: 1868045 - RNA, 19 nt, Artificial Sequence
  Description of Artificial Sequence: Synthetic oligonucleotide
  Sense strand starting at position 3933 of SEQ ID NO: 1564276
uugauaucuguaugccaga

SEQ ID NO: 1868046 - RNA, 19 nt, Artificial Sequence
  Description of Artificial Sequence: Synthetic oligonucleotide
  Antisense strand to SEQ ID NO: 1868045
ucuggcauacagauaucaa

SEQ ID NO: 1868047 - RNA, 19 nt, Artificial Sequence
  Description of Artificial Sequence: Synthetic oligonucleotide
  Sense strand starting at position 3934 of SEQ ID NO: 1564276
ugauaucuguaugccagaa

SEQ ID NO: 1868048 - RNA, 19 nt, Artificial Sequence
  Description of Artificial Sequence: Synthetic oligonucleotide
  Antisense strand to SEQ ID NO: 1868047
uucuggcauacagauauca

SEQ ID NO: 1868049 - RNA, 19 nt, Artificial Sequence
  Description of Artificial Sequence: Synthetic oligonucleotide
  Sense strand starting at position 3960 of SEQ ID NO: 1564276
uugcaauuagauggauaaa

SEQ ID NO: 1868050 - RNA, 19 nt, Artificial Sequence
  Description of Artificial Sequence: Synthetic oligonucleotide
  Antisense strand to SEQ ID NO: 1868049
uuuauccaucuaauugcaa

SEQ ID NO: 1868051 - RNA, 19 nt, Artificial Sequence
  Description of Artificial Sequence: Synthetic oligonucleotide
  Sense strand starting at position 71 of SEQ ID NO: 1564277
uaacgcuuccuggacgaga

SEQ ID NO: 1868052 - RNA, 19 nt, Artificial Sequence
  Description of Artificial Sequence: Synthetic oligonucleotide
  Antisense strand to SEQ ID NO: 1868051
ucucguccaggaagcguua

SEQ ID NO: 1868053 - RNA, 19 nt, Artificial Sequence
  Description of Artificial Sequence: Synthetic oligonucleotide
  Sense strand starting at position 184 of SEQ ID NO: 1564277
ucaguuuguuuacugaaca

SEQ ID NO: 1868054 - RNA, 19 nt, Artificial Sequence
  Description of Artificial Sequence: Synthetic oligonucleotide
  Antisense strand to SEQ ID NO: 1868053
uguucaguaaacaaacuga

SEQ ID NO: 1868055 - RNA, 19 nt, Artificial Sequence
  Description of Artificial Sequence: Synthetic oligonucleotide
  Sense strand starting at position 248 of SEQ ID NO: 1564277
gugaguggcccucacugua

SEQ ID NO: 1868056 - RNA, 19 nt, Artificial Sequence
  Description of Artificial Sequence: Synthetic oligonucleotide
  Antisense strand to SEQ ID NO: 1868055
uacagugagggccacucac

SEQ ID NO: 1868057 - RNA, 19 nt, Artificial Sequence
  Description of Artificial Sequence: Synthetic oligonucleotide
  Sense strand starting at position 363 of SEQ ID NO: 1564277
uuuccauuugucgaacgca

SEQ ID NO: 1868058 - RNA, 19 nt, Artificial Sequence
  Description of Artificial Sequence: Synthetic oligonucleotide
  Antisense strand to SEQ ID NO: 1868057
ugcguucgacaaauggaaa

SEQ ID NO: 1868059 - RNA, 19 nt, Artificial Sequence
  Description of Artificial Sequence: Synthetic oligonucleotide
  Sense strand starting at position 526 of SEQ ID NO: 1564277
ggagucaccugaggguaua

SEQ ID NO: 1868060 - RNA, 19 nt, Artificial Sequence
  Description of Artificial Sequence: Synthetic oligonucleotide
  Antisense strand to SEQ ID NO: 1868059
uauacccucaggugacucc

SEQ ID NO: 1868061 - RNA, 19 nt, Artificial Sequence
  Description of Artificial Sequence: Synthetic oligonucleotide
  Sense strand starting at position 527 of SEQ ID NO: 1564277
gagucaccugaggguauau

SEQ ID NO: 1868062 - RNA, 19 nt, Artificial Sequence
  Description of Artificial Sequence: Synthetic oligonucleotide
  Antisense strand to SEQ ID NO: 1868061
auauacccucaggugacuc

SEQ ID NO: 1868063 - RNA, 19 nt, Artificial Sequence
  Description of Artificial Sequence: Synthetic oligonucleotide
  Sense strand starting at position 539 of SEQ ID NO: 1564277
gguauauucucagugggcu

SEQ ID NO: 1868064 - RNA, 19 nt, Artificial Sequence
  Description of Artificial Sequence: Synthetic oligonucleotide
  Antisense strand to SEQ ID NO: 1868063
agcccacugagaauauacc

SEQ ID NO: 1868065 - RNA, 19 nt, Artificial Sequence
  Description of Artificial Sequence: Synthetic oligonucleotide
  Sense strand starting at position 540 of SEQ ID NO: 1564277
guauauucucagugggcua

SEQ ID NO: 1868066 - RNA, 19 nt, Artificial Sequence
  Description of Artificial Sequence: Synthetic oligonucleotide
  Antisense strand to SEQ ID NO: 1868065
uagcccacugagaauauac

SEQ ID NO: 1868067 - RNA, 19 nt, Artificial Sequence
  Description of Artificial Sequence: Synthetic oligonucleotide
  Sense strand starting at position 542 of SEQ ID NO: 1564277
auauucucagugggcuaaa

SEQ ID NO: 1868068 - RNA, 19 nt, Artificial Sequence
  Description of Artificial Sequence: Synthetic oligonucleotide
  Antisense strand to SEQ ID NO: 1868067
uuuagcccacugagaauau

SEQ ID NO: 1868069 - RNA, 19 nt, Artificial Sequence
  Description of Artificial Sequence: Synthetic oligonucleotide
  Sense strand starting at position 545 of SEQ ID NO: 1564277
uucucagugggcuaaacau

SEQ ID NO: 1868070 - RNA, 19 nt, Artificial Sequence
  Description of Artificial Sequence: Synthetic oligonucleotide
  Antisense strand to SEQ ID NO: 1868069
auguuuagcccacugagaa

SEQ ID NO: 1868071 - RNA, 19 nt, Artificial Sequence
  Description of Artificial Sequence: Synthetic oligonucleotide
  Sense strand starting at position 761 of SEQ ID NO: 1564277
guacaugccagcuaugaug

SEQ ID NO: 1868072 - RNA, 19 nt, Artificial Sequence
  Description of Artificial Sequence: Synthetic oligonucleotide
  Antisense strand to SEQ ID NO: 1868071
caucauagcuggcauguac

SEQ ID NO: 1868073 - RNA, 19 nt, Artificial Sequence
  Description of Artificial Sequence: Synthetic oligonucleotide
  Sense strand starting at position 863 of SEQ ID NO: 1564277
agaauucuauuuggagaag

SEQ ID NO: 1868074 - RNA, 19 nt, Artificial Sequence
  Description of Artificial Sequence: Synthetic oligonucleotide
  Antisense strand to SEQ ID NO: 1868073
cuucuccaaauagaauucu

SEQ ID NO: 1868075 - RNA, 19 nt, Artificial Sequence
  Description of Artificial Sequence: Synthetic oligonucleotide
  Sense strand starting at position 888 of SEQ ID NO: 1564277
uccauugucucagucacuu

SEQ ID NO: 1868076 - RNA, 19 nt, Artificial Sequence
  Description of Artificial Sequence: Synthetic oligonucleotide
  Antisense strand to SEQ ID NO: 1868075
aagugacugagacaaugga

SEQ ID NO: 1868077 - RNA, 19 nt, Artificial Sequence
  Description of Artificial Sequence: Synthetic oligonucleotide
  Sense strand starting at position 1151 of SEQ ID NO: 1564277
gggccaagacuuuggagau

SEQ ID NO: 1868078 - RNA, 19 nt, Artificial Sequence
  Description of Artificial Sequence: Synthetic oligonucleotide
  Antisense strand to SEQ ID NO: 1868077
aucuccaaagucuuggccc

SEQ ID NO: 1868079 - RNA, 19 nt, Artificial Sequence
  Description of Artificial Sequence: Synthetic oligonucleotide
  Sense strand starting at position 1152 of SEQ ID NO: 1564277
ggccaagacuuuggagauc

SEQ ID NO: 1868080 - RNA, 19 nt, Artificial Sequence
  Description of Artificial Sequence: Synthetic oligonucleotide
  Antisense strand to SEQ ID NO: 1868079
gaucuccaaagucuuggcc

SEQ ID NO: 1868081 - RNA, 19 nt, Artificial Sequence
  Description of Artificial Sequence: Synthetic oligonucleotide
  Sense strand starting at position 1269 of SEQ ID NO: 1564277
ggaguugggcccgaugcua

SEQ ID NO: 1868082 - RNA, 19 nt, Artificial Sequence
  Description of Artificial Sequence: Synthetic oligonucleotide
  Antisense strand to SEQ ID NO: 1868081
uagcaucgggcccaacucc

SEQ ID NO: 1868083 - RNA, 19 nt, Artificial Sequence
  Description of Artificial Sequence: Synthetic oligonucleotide
  Sense strand starting at position 1282 of SEQ ID NO: 1564277
augcuauaauccgagaguc

SEQ ID NO: 1868084 - RNA, 19 nt, Artificial Sequence
  Description of Artificial Sequence: Synthetic oligonucleotide
  Antisense strand to SEQ ID NO: 1868083
gacucucggauuauagcau

SEQ ID NO: 1868085 - RNA, 19 nt, Artificial Sequence
  Description of Artificial Sequence: Synthetic oligonucleotide
  Sense strand starting at position 1284 of SEQ ID NO: 1564277
gcuauaauccgagagucgu

SEQ ID NO: 1868086 - RNA, 19 nt, Artificial Sequence
  Description of Artificial Sequence: Synthetic oligonucleotide
  Antisense strand to SEQ ID NO: 1868085
acgacucucggauuauagc

SEQ ID NO: 1868087 - RNA, 19 nt, Artificial Sequence
  Description of Artificial Sequence: Synthetic oligonucleotide
  Sense strand starting at position 1290 of SEQ ID NO: 1564277
auccgagagucguuuccca

SEQ ID NO: 1868088 - RNA, 19 nt, Artificial Sequence
  Description of Artificial Sequence: Synthetic oligonucleotide
  Antisense strand to SEQ ID NO: 1868087
ugggaaacgacucucggau

SEQ ID NO: 1868089 - RNA, 19 nt, Artificial Sequence
  Description of Artificial Sequence: Synthetic oligonucleotide
  Sense strand starting at position 1310 of SEQ ID NO: 1564277
cugccaaagacagaucgau

SEQ ID NO: 1868090 - RNA, 19 nt, Artificial Sequence
  Description of Artificial Sequence: Synthetic oligonucleotide
  Antisense strand to SEQ ID NO: 1868089
aucgaucugucuuuggcag

SEQ ID NO: 1868091 - RNA, 19 nt, Artificial Sequence
  Description of Artificial Sequence: Synthetic oligonucleotide
  Sense strand starting at position 2769 of SEQ ID NO: 1564277
gugcauagugcaugagaac

SEQ ID NO: 1868092 - RNA, 19 nt, Artificial Sequence
  Description of Artificial Sequence: Synthetic oligonucleotide
  Antisense strand to SEQ ID NO: 1868091
guucucaugcacuaugcac

SEQ ID NO: 1868093 - RNA, 19 nt, Artificial Sequence
  Description of Artificial Sequence: Synthetic oligonucleotide
  Sense strand starting at position 2770 of SEQ ID NO: 1564277
ugcauagugcaugagaacu

SEQ ID NO: 1868094 - RNA, 19 nt, Artificial Sequence
  Description of Artificial Sequence: Synthetic oligonucleotide
  Antisense strand to SEQ ID NO: 1868093
aguucucaugcacuaugca

SEQ ID NO: 1868095 - RNA, 19 nt, Artificial Sequence
  Description of Artificial Sequence: Synthetic oligonucleotide
  Sense strand starting at position 2772 of SEQ ID NO: 1564277
cauagugcaugagaacuuu

SEQ ID NO: 1868096 - RNA, 19 nt, Artificial Sequence
  Description of Artificial Sequence: Synthetic oligonucleotide
  Antisense strand to SEQ ID NO: 1868095
aaaguucucaugcacuaug

SEQ ID NO: 1868097 - RNA, 19 nt, Artificial Sequence
  Description of Artificial Sequence: Synthetic oligonucleotide
  Sense strand starting at position 2778 of SEQ ID NO: 1564277
gcaugagaacuuuggugga

SEQ ID NO: 1868098 - RNA, 19 nt, Artificial Sequence
  Description of Artificial Sequence: Synthetic oligonucleotide
  Antisense strand to SEQ ID NO: 1868097
uccaccaaaguucucaugc

SEQ ID NO: 1868099 - RNA, 19 nt, Artificial Sequence
  Description of Artificial Sequence: Synthetic oligonucleotide
  Sense strand starting at position 2780 of SEQ ID NO: 1564277
augagaacuuugguggagu

SEQ ID NO: 1868100 - RNA, 19 nt, Artificial Sequence
  Description of Artificial Sequence: Synthetic oligonucleotide
  Antisense strand to SEQ ID NO: 1868099
acuccaccaaaguucucau

SEQ ID NO: 1868101 - RNA, 19 nt, Artificial Sequence
  Description of Artificial Sequence: Synthetic oligonucleotide
  Sense strand starting at position 2782 of SEQ ID NO: 1564277
gagaacuuugguggagugu

SEQ ID NO: 1868102 - RNA, 19 nt, Artificial Sequence
  Description of Artificial Sequence: Synthetic oligonucleotide
  Antisense strand to SEQ ID NO: 1868101
acacuccaccaaaguucuc

SEQ ID NO: 1868103 - RNA, 19 nt, Artificial Sequence
  Description of Artificial Sequence: Synthetic oligonucleotide
  Sense strand starting at position 2934 of SEQ ID NO: 1564277
gaggcauagucagcuugaa

SEQ ID NO: 1868104 - RNA, 19 nt, Artificial Sequence
  Description of Artificial Sequence: Synthetic oligonucleotide
  Antisense strand to SEQ ID NO: 1868103
uucaagcugacuaugccuc

SEQ ID NO: 1868105 - RNA, 19 nt, Artificial Sequence
  Description of Artificial Sequence: Synthetic oligonucleotide
  Sense strand starting at position 3238 of SEQ ID NO: 1564277
ggagcuuggacuugaucag

SEQ ID NO: 1868106 - RNA, 19 nt, Artificial Sequence
  Description of Artificial Sequence: Synthetic oligonucleotide
  Antisense strand to SEQ ID NO: 1868105
cugaucaaguccaagcucc

SEQ ID NO: 1868107 - RNA, 19 nt, Artificial Sequence
  Description of Artificial Sequence: Synthetic oligonucleotide
  Sense strand starting at position 3319 of SEQ ID NO: 1564277
cguggagcgucucauggau

SEQ ID NO: 1868108 - RNA, 19 nt, Artificial Sequence
  Description of Artificial Sequence: Synthetic oligonucleotide
  Antisense strand to SEQ ID NO: 1868107
auccaugagacgcuccacg

SEQ ID NO: 1868109 - RNA, 19 nt, Artificial Sequence
  Description of Artificial Sequence: Synthetic oligonucleotide
  Sense strand starting at position 3400 of SEQ ID NO: 1564277
agaggaaagucauggagau

SEQ ID NO: 1868110 - RNA, 19 nt, Artificial Sequence
  Description of Artificial Sequence: Synthetic oligonucleotide
  Antisense strand to SEQ ID NO: 1868109
aucuccaugacuuuccucu

SEQ ID NO: 1868111 - RNA, 19 nt, Artificial Sequence
  Description of Artificial Sequence: Synthetic oligonucleotide
  Sense strand starting at position 3523 of SEQ ID NO: 1564277
gcaugaagaccuuggccau

SEQ ID NO: 1868112 - RNA, 19 nt, Artificial Sequence
  Description of Artificial Sequence: Synthetic oligonucleotide
  Antisense strand to SEQ ID NO: 1868111
auggccaaggucuucaugc

SEQ ID NO: 1868113 - RNA, 19 nt, Artificial Sequence
  Description of Artificial Sequence: Synthetic oligonucleotide
  Sense strand starting at position 3529 of SEQ ID NO: 1564277
agaccuuggccaugaggaa

SEQ ID NO: 1868114 - RNA, 19 nt, Artificial Sequence
  Description of Artificial Sequence: Synthetic oligonucleotide
  Antisense strand to SEQ ID NO: 1868113
uuccucauggccaaggucu

SEQ ID NO: 1868115 - RNA, 19 nt, Artificial Sequence
  Description of Artificial Sequence: Synthetic oligonucleotide
  Sense strand starting at position 3652 of SEQ ID NO: 1564277
acgaacacuuguugacaaa

SEQ ID NO: 1868116 - RNA, 19 nt, Artificial Sequence
  Description of Artificial Sequence: Synthetic oligonucleotide
  Antisense strand to SEQ ID NO: 1868115
uuugucaacaaguguucgu

SEQ ID NO: 1868117 - RNA, 19 nt, Artificial Sequence
  Description of Artificial Sequence: Synthetic oligonucleotide
  Sense strand starting at position 3742 of SEQ ID NO: 1564277
gcgugucuucagcagguga

SEQ ID NO: 1868118 - RNA, 19 nt, Artificial Sequence
  Description of Artificial Sequence: Synthetic oligonucleotide
  Antisense strand to SEQ ID NO: 1868117
ucaccugcugaagacacgc

SEQ ID NO: 1868119 - RNA, 19 nt, Artificial Sequence
  Description of Artificial Sequence: Synthetic oligonucleotide
  Sense strand starting at position 3744 of SEQ ID NO: 1564277
gugucuucagcaggugaga

SEQ ID NO: 1868120 - RNA, 19 nt, Artificial Sequence
  Description of Artificial Sequence: Synthetic oligonucleotide
  Antisense strand to SEQ ID NO: 1868119
ucucaccugcugaagacac

SEQ ID NO: 1868121 - RNA, 19 nt, Artificial Sequence
  Description of Artificial Sequence: Synthetic oligonucleotide
  Sense strand starting at position 3757 of SEQ ID NO: 1564277
gugagaccuugaugcagaa

SEQ ID NO: 1868122 - RNA, 19 nt, Artificial Sequence
  Description of Artificial Sequence: Synthetic oligonucleotide
  Antisense strand to SEQ ID NO: 1868121
uucugcaucaaggucucac

SEQ ID NO: 1868123 - RNA, 19 nt, Artificial Sequence
  Description of Artificial Sequence: Synthetic oligonucleotide
  Sense strand starting at position 3862 of SEQ ID NO: 1564277
aguggaugcucaccacaaa

SEQ ID NO: 1868124 - RNA, 19 nt, Artificial Sequence
  Description of Artificial Sequence: Synthetic oligonucleotide
  Antisense strand to SEQ ID NO: 1868123
uuuguggugagcauccacu

SEQ ID NO: 1868125 - RNA, 19 nt, Artificial Sequence
  Description of Artificial Sequence: Synthetic oligonucleotide
  Sense strand starting at position 2079 of SEQ ID NO: 1564278
gcgccaggccuagauugau

SEQ ID NO: 1868126 - RNA, 19 nt, Artificial Sequence
  Description of Artificial Sequence: Synthetic oligonucleotide
  Antisense strand to SEQ ID NO: 1868125
aucaaucuaggccuggcgc

SEQ ID NO: 1868127 - RNA, 19 nt, Artificial Sequence
  Description of Artificial Sequence: Synthetic oligonucleotide
  Sense strand starting at position 2082 of SEQ ID NO: 1564278
ccaggccuagauugauaga

SEQ ID NO: 1868128 - RNA, 19 nt, Artificial Sequence
  Description of Artificial Sequence: Synthetic oligonucleotide
  Antisense strand to SEQ ID NO: 1868127
ucuaucaaucuaggccugg

SEQ ID NO: 1868129 - RNA, 19 nt, Artificial Sequence
  Description of Artificial Sequence: Synthetic oligonucleotide
  Sense strand starting at position 2085 of SEQ ID NO: 1564278
ggccuagauugauagauuu

SEQ ID NO: 1868130 - RNA, 19 nt, Artificial Sequence
  Description of Artificial Sequence: Synthetic oligonucleotide
  Antisense strand to SEQ ID NO: 1868129
aaaucuaucaaucuaggcc

SEQ ID NO: 1868131 - RNA, 19 nt, Artificial Sequence
  Description of Artificial Sequence: Synthetic oligonucleotide
  Sense strand starting at position 2287 of SEQ ID NO: 1564278
auuagcaaucuguaaggca

SEQ ID NO: 1868132 - RNA, 19 nt, Artificial Sequence
  Description of Artificial Sequence: Synthetic oligonucleotide
  Antisense strand to SEQ ID NO: 1868131
ugccuuacagauugcuaau

SEQ ID NO: 1868133 - RNA, 19 nt, Artificial Sequence
  Description of Artificial Sequence: Synthetic oligonucleotide
  Sense strand starting at position 2312 of SEQ ID NO: 1564278
gggugaaagccugaaucga

SEQ ID NO: 1868134 - RNA, 19 nt, Artificial Sequence
  Description of Artificial Sequence: Synthetic oligonucleotide
  Antisense strand to SEQ ID NO: 1868133
ucgauucaggcuuucaccc

SEQ ID NO: 1868135 - RNA, 19 nt, Artificial Sequence
  Description of Artificial Sequence: Synthetic oligonucleotide
  Sense strand starting at position 2458 of SEQ ID NO: 1564278
gcaaauggccaauagacau

SEQ ID NO: 1868136 - RNA, 19 nt, Artificial Sequence
  Description of Artificial Sequence: Synthetic oligonucleotide
  Antisense strand to SEQ ID NO: 1868135
augucuauuggccauuugc

SEQ ID NO: 1868137 - RNA, 19 nt, Artificial Sequence
  Description of Artificial Sequence: Synthetic oligonucleotide
  Sense strand starting at position 2575 of SEQ ID NO: 1564278
ugguaaaccuucuuguuga

SEQ ID NO: 1868138 - RNA, 19 nt, Artificial Sequence
  Description of Artificial Sequence: Synthetic oligonucleotide
  Antisense strand to SEQ ID NO: 1868137
ucaacaagaagguuuacca

SEQ ID NO: 1868139 - RNA, 19 nt, Artificial Sequence
  Description of Artificial Sequence: Synthetic oligonucleotide
  Sense strand starting at position 2627 of SEQ ID NO: 1564278
ugaagugugaauuguuaca

SEQ ID NO: 1868140 - RNA, 19 nt, Artificial Sequence
  Description of Artificial Sequence: Synthetic oligonucleotide
  Antisense strand to SEQ ID NO: 1868139
uguaacaauucacacuuca

SEQ ID NO: 1868141 - RNA, 19 nt, Artificial Sequence
  Description of Artificial Sequence: Synthetic oligonucleotide
  Sense strand starting at position 2629 of SEQ ID NO: 1564278
aagugugaauuguuacaac

SEQ ID NO: 1868142 - RNA, 19 nt, Artificial Sequence
  Description of Artificial Sequence: Synthetic oligonucleotide
  Antisense strand to SEQ ID NO: 1868141
guuguaacaauucacacuu

SEQ ID NO: 1868143 - RNA, 19 nt, Artificial Sequence
  Description of Artificial Sequence: Synthetic oligonucleotide
  Sense strand starting at position 2714 of SEQ ID NO: 1564278
ccuagacacuucgccuaau

SEQ ID NO: 1868144 - RNA, 19 nt, Artificial Sequence
  Description of Artificial Sequence: Synthetic oligonucleotide
  Antisense strand to SEQ ID NO: 1868143
auuaggcgaagugucuagg

SEQ ID NO: 1868145 - RNA, 19 nt, Artificial Sequence
  Description of Artificial Sequence: Synthetic oligonucleotide
  Sense strand starting at position 2715 of SEQ ID NO: 1564278
cuagacacuucgccuaaua

SEQ ID NO: 1868146 - RNA, 19 nt, Artificial Sequence
  Description of Artificial Sequence: Synthetic oligonucleotide
  Antisense strand to SEQ ID NO: 1868145
uauuaggcgaagugucuag

SEQ ID NO: 1868147 - RNA, 19 nt, Artificial Sequence
  Description of Artificial Sequence: Synthetic oligonucleotide
  Sense strand starting at position 2717 of SEQ ID NO: 1564278
agacacuucgccuaauaau

SEQ ID NO: 1868148 - RNA, 19 nt, Artificial Sequence
  Description of Artificial Sequence: Synthetic oligonucleotide
  Antisense strand to SEQ ID NO: 1868147
auuauuaggcgaagugucu

SEQ ID NO: 1868149 - RNA, 19 nt, Artificial Sequence
  Description of Artificial Sequence: Synthetic oligonucleotide
  Sense strand starting at position 2724 of SEQ ID NO: 1564278
ucgccuaauaaucggauga

SEQ ID NO: 1868150 - RNA, 19 nt, Artificial Sequence
  Description of Artificial Sequence: Synthetic oligonucleotide
  Antisense strand to SEQ ID NO: 1868149
ucauccgauuauuaggcga

SEQ ID NO: 1868151 - RNA, 19 nt, Artificial Sequence
  Description of Artificial Sequence: Synthetic oligonucleotide
  Sense strand starting at position 2824 of SEQ ID NO: 1564278
acaugagauuaguugagca

SEQ ID NO: 1868152 - RNA, 19 nt, Artificial Sequence
  Description of Artificial Sequence: Synthetic oligonucleotide
  Antisense strand to SEQ ID NO: 1868151
ugcucaacuaaucucaugu

SEQ ID NO: 1868153 - RNA, 19 nt, Artificial Sequence
  Description of Artificial Sequence: Synthetic oligonucleotide
  Sense strand starting at position 2828 of SEQ ID NO: 1564278
gagauuaguugagcacauu

SEQ ID NO: 1868154 - RNA, 19 nt, Artificial Sequence
  Description of Artificial Sequence: Synthetic oligonucleotide
  Antisense strand to SEQ ID NO: 1868153
aaugugcucaacuaaucuc

SEQ ID NO: 1868155 - RNA, 19 nt, Artificial Sequence
  Description of Artificial Sequence: Synthetic oligonucleotide
  Sense strand starting at position 2829 of SEQ ID NO: 1564278
agauuaguugagcacauua

SEQ ID NO: 1868156 - RNA, 19 nt, Artificial Sequence
  Description of Artificial Sequence: Synthetic oligonucleotide
  Antisense strand to SEQ ID NO: 1868155
uaaugugcucaacuaaucu

SEQ ID NO: 1868157 - RNA, 19 nt, Artificial Sequence
  Description of Artificial Sequence: Synthetic oligonucleotide
  Sense strand starting at position 2834 of SEQ ID NO: 1564278
aguugagcacauuaucaua

SEQ ID NO: 1868158 - RNA, 19 nt, Artificial Sequence
  Description of Artificial Sequence: Synthetic oligonucleotide
  Antisense strand to SEQ ID NO: 1868157
uaugauaaugugcucaacu

SEQ ID NO: 1868159 - RNA, 19 nt, Artificial Sequence
  Description of Artificial Sequence: Synthetic oligonucleotide
  Sense strand starting at position 2869 of SEQ ID NO: 1564278
uauagagugucuuuaaagg

SEQ ID NO: 1868160 - RNA, 19 nt, Artificial Sequence
  Description of Artificial Sequence: Synthetic oligonucleotide
  Antisense strand to SEQ ID NO: 1868159
ccuuuaaagacacucuaua

SEQ ID NO: 1868161 - RNA, 19 nt, Artificial Sequence
  Description of Artificial Sequence: Synthetic oligonucleotide
  Sense strand starting at position 2902 of SEQ ID NO: 1564278
acuguaguuauagggaaau

SEQ ID NO: 1868162 - RNA, 19 nt, Artificial Sequence
  Description of Artificial Sequence: Synthetic oligonucleotide
  Antisense strand to SEQ ID NO: 1868161
auuucccuauaacuacagu

SEQ ID NO: 1868163 - RNA, 19 nt, Artificial Sequence
  Description of Artificial Sequence: Synthetic oligonucleotide
  Sense strand starting at position 2941 of SEQ ID NO: 1564278
gccuuuguauauuucugua

SEQ ID NO: 1868164 - RNA, 19 nt, Artificial Sequence
  Description of Artificial Sequence: Synthetic oligonucleotide
  Antisense strand to SEQ ID NO: 1868163
uacagaaauauacaaaggc

SEQ ID NO: 1868165 - RNA, 19 nt, Artificial Sequence
  Description of Artificial Sequence: Synthetic oligonucleotide
  Sense strand starting at position 2945 of SEQ ID NO: 1564278
uuguauauuucuguacagu

SEQ ID NO: 1868166 - RNA, 19 nt, Artificial Sequence
  Description of Artificial Sequence: Synthetic oligonucleotide
  Antisense strand to SEQ ID NO: 1868165
acuguacagaaauauacaa

SEQ ID NO: 1868167 - RNA, 19 nt, Artificial Sequence
  Description of Artificial Sequence: Synthetic oligonucleotide
  Sense strand starting at position 3035 of SEQ ID NO: 1564278
uuugaacaguuuguuguau

SEQ ID NO: 1868168 - RNA, 19 nt, Artificial Sequence
  Description of Artificial Sequence: Synthetic oligonucleotide
  Antisense strand to SEQ ID NO: 1868167
auacaacaaacuguucaaa

SEQ ID NO: 1868169 - RNA, 19 nt, Artificial Sequence
  Description of Artificial Sequence: Synthetic oligonucleotide
  Sense strand starting at position 3036 of SEQ ID NO: 1564278
uugaacaguuuguuguaua

SEQ ID NO: 1868170 - RNA, 19 nt, Artificial Sequence
  Description of Artificial Sequence: Synthetic oligonucleotide
  Antisense strand to SEQ ID NO: 1868169
uauacaacaaacuguucaa

SEQ ID NO: 1868171 - RNA, 19 nt, Artificial Sequence
  Description of Artificial Sequence: Synthetic oligonucleotide
  Sense strand starting at position 3041 of SEQ ID NO: 1564278
caguuuguuguauauguaa

SEQ ID NO: 1868172 - RNA, 19 nt, Artificial Sequence
  Description of Artificial Sequence: Synthetic oligonucleotide
  Antisense strand to SEQ ID NO: 1868171
uuacauauacaacaaacug

SEQ ID NO: 1868173 - RNA, 19 nt, Artificial Sequence
  Description of Artificial Sequence: Synthetic oligonucleotide
  Sense strand starting at position 3043 of SEQ ID NO: 1564278
guuuguuguauauguaaac

SEQ ID NO: 1868174 - RNA, 19 nt, Artificial Sequence
  Description of Artificial Sequence: Synthetic oligonucleotide
  Antisense strand to SEQ ID NO: 1868173
guuuacauauacaacaaac

SEQ ID NO: 1868175 - RNA, 19 nt, Artificial Sequence
  Description of Artificial Sequence: Synthetic oligonucleotide
  Sense strand starting at position 3052 of SEQ ID NO: 1564278
auauguaaaccguaugugu

SEQ ID NO: 1868176 - RNA, 19 nt, Artificial Sequence
  Description of Artificial Sequence: Synthetic oligonucleotide
  Antisense strand to SEQ ID NO: 1868175
acacauacgguuuacauau

SEQ ID NO: 1868177 - RNA, 19 nt, Artificial Sequence
  Description of Artificial Sequence: Synthetic oligonucleotide
  Sense strand starting at position 3054 of SEQ ID NO: 1564278
auguaaaccguauguguaa

SEQ ID NO: 1868178 - RNA, 19 nt, Artificial Sequence
  Description of Artificial Sequence: Synthetic oligonucleotide
  Antisense strand to SEQ ID NO: 1868177
uuacacauacgguuuacau

SEQ ID NO: 1868179 - RNA, 19 nt, Artificial Sequence
  Description of Artificial Sequence: Synthetic oligonucleotide
  Sense strand starting at position 3055 of SEQ ID NO: 1564278
uguaaaccguauguguaaa

SEQ ID NO: 1868180 - RNA, 19 nt, Artificial Sequence
  Description of Artificial Sequence: Synthetic oligonucleotide
  Antisense strand to SEQ ID NO: 1868179
uuuacacauacgguuuaca

SEQ ID NO: 1868181 - RNA, 19 nt, Artificial Sequence
  Description of Artificial Sequence: Synthetic oligonucleotide
  Sense strand starting at position 3098 of SEQ ID NO: 1564278
uaaguuaauggcuguuagu

SEQ ID NO: 1868182 - RNA, 19 nt, Artificial Sequence
  Description of Artificial Sequence: Synthetic oligonucleotide
  Antisense strand to SEQ ID NO: 1868181
acuaacagccauuaacuua

SEQ ID NO: 1868183 - RNA, 19 nt, Artificial Sequence
  Description of Artificial Sequence: Synthetic oligonucleotide
  Sense strand starting at position 3111 of SEQ ID NO: 1564278
guuaguacuguuugcugaa

SEQ ID NO: 1868184 - RNA, 19 nt, Artificial Sequence
  Description of Artificial Sequence: Synthetic oligonucleotide
  Antisense strand to SEQ ID NO: 1868183
uucagcaaacaguacuaac

SEQ ID NO: 1868185 - RNA, 19 nt, Artificial Sequence
  Description of Artificial Sequence: Synthetic oligonucleotide
  Sense strand starting at position 3112 of SEQ ID NO: 1564278
uuaguacuguuugcugaaa

SEQ ID NO: 1868186 - RNA, 19 nt, Artificial Sequence
  Description of Artificial Sequence: Synthetic oligonucleotide
  Antisense strand to SEQ ID NO: 1868185
uuucagcaaacaguacuaa

SEQ ID NO: 1868187 - RNA, 19 nt, Artificial Sequence
  Description of Artificial Sequence: Synthetic oligonucleotide
  Sense strand starting at position 3113 of SEQ ID NO: 1564278
uaguacuguuugcugaaau

SEQ ID NO: 1868188 - RNA, 19 nt, Artificial Sequence
  Description of Artificial Sequence: Synthetic oligonucleotide
  Antisense strand to SEQ ID NO: 1868187
auuucagcaaacaguacua

SEQ ID NO: 1868189 - RNA, 19 nt, Artificial Sequence
  Description of Artificial Sequence: Synthetic oligonucleotide
  Sense strand starting at position 3188 of SEQ ID NO: 1564278
guaaguaugcacuacagaa

SEQ ID NO: 1868190 - RNA, 19 nt, Artificial Sequence
  Description of Artificial Sequence: Synthetic oligonucleotide
  Antisense strand to SEQ ID NO: 1868189
uucuguagugcauacuuac

SEQ ID NO: 1868191 - RNA, 19 nt, Artificial Sequence
  Description of Artificial Sequence: Synthetic oligonucleotide
  Sense strand starting at position 3256 of SEQ ID NO: 1564278
aguggcaaacauugacaua

SEQ ID NO: 1868192 - RNA, 19 nt, Artificial Sequence
  Description of Artificial Sequence: Synthetic oligonucleotide
  Antisense strand to SEQ ID NO: 1868191
uaugucaauguuugccacu

SEQ ID NO: 1868193 - RNA, 19 nt, Artificial Sequence
  Description of Artificial Sequence: Synthetic oligonucleotide
  Sense strand starting at position 3259 of SEQ ID NO: 1564278
ggcaaacauugacauauuu

SEQ ID NO: 1868194 - RNA, 19 nt, Artificial Sequence
  Description of Artificial Sequence: Synthetic oligonucleotide
  Antisense strand to SEQ ID NO: 1868193
aaauaugucaauguuugcc

SEQ ID NO: 1868195 - RNA, 19 nt, Artificial Sequence
  Description of Artificial Sequence: Synthetic oligonucleotide
  Sense strand starting at position 3546 of SEQ ID NO: 1564278
uguuauauccaucgaugga

SEQ ID NO: 1868196 - RNA, 19 nt, Artificial Sequence
  Description of Artificial Sequence: Synthetic oligonucleotide
  Antisense strand to SEQ ID NO: 1868195
uccaucgauggauauaaca

SEQ ID NO: 1868197 - RNA, 19 nt, Artificial Sequence
  Description of Artificial Sequence: Synthetic oligonucleotide
  Sense strand starting at position 3547 of SEQ ID NO: 1564278
guuauauccaucgauggag

SEQ ID NO: 1868198 - RNA, 19 nt, Artificial Sequence
  Description of Artificial Sequence: Synthetic oligonucleotide
  Antisense strand to SEQ ID NO: 1868197
cuccaucgauggauauaac

SEQ ID NO: 1868199 - RNA, 19 nt, Artificial Sequence
  Description of Artificial Sequence: Synthetic oligonucleotide
  Sense strand starting at position 3549 of SEQ ID NO: 1564278
uauauccaucgauggagaa

SEQ ID NO: 1868200 - RNA, 19 nt, Artificial Sequence
  Description of Artificial Sequence: Synthetic oligonucleotide
  Antisense strand to SEQ ID NO: 1868199
uucuccaucgauggauaua

SEQ ID NO: 1868201 - RNA, 19 nt, Artificial Sequence
  Description of Artificial Sequence: Synthetic oligonucleotide
  Sense strand starting at position 3724 of SEQ ID NO: 1564278
ugccauugaaaguaacgaa

SEQ ID NO: 1868202 - RNA, 19 nt, Artificial Sequence
  Description of Artificial Sequence: Synthetic oligonucleotide
  Antisense strand to SEQ ID NO: 1868201
uucguuacuuucaauggca

SEQ ID NO: 1868203 - RNA, 19 nt, Artificial Sequence
  Description of Artificial Sequence: Synthetic oligonucleotide
  Sense strand starting at position 3734 of SEQ ID NO: 1564278
aguaacgaauuguuacuau

SEQ ID NO: 1868204 - RNA, 19 nt, Artificial Sequence
  Description of Artificial Sequence: Synthetic oligonucleotide
  Antisense strand to SEQ ID NO: 1868203
auaguaacaauucguuacu

SEQ ID NO: 1868205 - RNA, 19 nt, Artificial Sequence
  Description of Artificial Sequence: Synthetic oligonucleotide
  Sense strand starting at position 2 of SEQ ID NO: 1564279
acaccaggccgagauguau

SEQ ID NO: 1868206 - RNA, 19 nt, Artificial Sequence
  Description of Artificial Sequence: Synthetic oligonucleotide
  Antisense strand to SEQ ID NO: 1868205
auacaucucggccuggugu

SEQ ID NO: 1868207 - RNA, 19 nt, Artificial Sequence
  Description of Artificial Sequence: Synthetic oligonucleotide
  Sense strand starting at position 60 of SEQ ID NO: 1564279
guuaaacaguaucccaauu

SEQ ID NO: 1868208 - RNA, 19 nt, Artificial Sequence
  Description of Artificial Sequence: Synthetic oligonucleotide
  Antisense strand to SEQ ID NO: 1868207
aauugggauacuguuuaac

SEQ ID NO: 1868209 - RNA, 19 nt, Artificial Sequence
  Description of Artificial Sequence: Synthetic oligonucleotide
  Sense strand starting at position 77 of SEQ ID NO: 1564279
uugggaacuguuggcuuaa

SEQ ID NO: 1868210 - RNA, 19 nt, Artificial Sequence
  Description of Artificial Sequence: Synthetic oligonucleotide
  Antisense strand to SEQ ID NO: 1868209
uuaagccaacaguucccaa

SEQ ID NO: 1868211 - RNA, 19 nt, Artificial Sequence
  Description of Artificial Sequence: Synthetic oligonucleotide
  Sense strand starting at position 109 of SEQ ID NO: 1564279
aauaaauguuuguccucga

SEQ ID NO: 1868212 - RNA, 19 nt, Artificial Sequence
  Description of Artificial Sequence: Synthetic oligonucleotide
  Antisense strand to SEQ ID NO: 1868211
ucgaggacaaacauuuauu

SEQ ID NO: 1868213 - RNA, 19 nt, Artificial Sequence
  Description of Artificial Sequence: Synthetic oligonucleotide
  Sense strand starting at position 110 of SEQ ID NO: 1564279
auaaauguuuguccucgaa

SEQ ID NO: 1868214 - RNA, 19 nt, Artificial Sequence
  Description of Artificial Sequence: Synthetic oligonucleotide
  Antisense strand to SEQ ID NO: 1868213
uucgaggacaaacauuuau

SEQ ID NO: 1868215 - RNA, 19 nt, Artificial Sequence
  Description of Artificial Sequence: Synthetic oligonucleotide
  Sense strand starting at position 114 of SEQ ID NO: 1564279
auguuuguccucgaagcaa

SEQ ID NO: 1868216 - RNA, 19 nt, Artificial Sequence
  Description of Artificial Sequence: Synthetic oligonucleotide
  Antisense strand to SEQ ID NO: 1868215
uugcuucgaggacaaacau

SEQ ID NO: 1868217 - RNA, 19 nt, Artificial Sequence
  Description of Artificial Sequence: Synthetic oligonucleotide
  Sense strand starting at position 167 of SEQ ID NO: 1564279
guuuaagagucacuuauca

SEQ ID NO: 1868218 - RNA, 19 nt, Artificial Sequence
  Description of Artificial Sequence: Synthetic oligonucleotide
  Antisense strand to SEQ ID NO: 1868217
ugauaagugacucuuaaac

SEQ ID NO: 1868219 - RNA, 19 nt, Artificial Sequence
  Description of Artificial Sequence: Synthetic oligonucleotide
  Sense strand starting at position 194 of SEQ ID NO: 1564279
gcugaaauucuacagucaa

SEQ ID NO: 1868220 - RNA, 19 nt, Artificial Sequence
  Description of Artificial Sequence: Synthetic oligonucleotide
  Antisense strand to SEQ ID NO: 1868219
uugacuguagaauuucagc

SEQ ID NO: 1868221 - RNA, 19 nt, Artificial Sequence
  Description of Artificial Sequence: Synthetic oligonucleotide
  Sense strand starting at position 219 of SEQ ID NO: 1564279
agguuuaagccagggcaaa

SEQ ID NO: 1868222 - RNA, 19 nt, Artificial Sequence
  Description of Artificial Sequence: Synthetic oligonucleotide
  Antisense strand to SEQ ID NO: 1868221
uuugcccuggcuuaaaccu

SEQ ID NO: 1868223 - RNA, 19 nt, Artificial Sequence
  Description of Artificial Sequence: Synthetic oligonucleotide
  Sense strand starting at position 339 of SEQ ID NO: 1564279
gucuauuuauaagacugca

SEQ ID NO: 1868224 - RNA, 19 nt, Artificial Sequence
  Description of Artificial Sequence: Synthetic oligonucleotide
  Antisense strand to SEQ ID NO: 1868223
ugcagucuuauaaauagac

SEQ ID NO: 1868225 - RNA, 19 nt, Artificial Sequence
  Description of Artificial Sequence: Synthetic oligonucleotide
  Sense strand starting at position 347 of SEQ ID NO: 1564279
auaagacugcaauaagcuu

SEQ ID NO: 1868226 - RNA, 19 nt, Artificial Sequence
  Description of Artificial Sequence: Synthetic oligonucleotide
  Antisense strand to SEQ ID NO: 1868225
aagcuuauugcagucuuau

SEQ ID NO: 1868227 - RNA, 19 nt, Artificial Sequence
  Description of Artificial Sequence: Synthetic oligonucleotide
  Sense strand starting at position 355 of SEQ ID NO: 1564279
gcaauaagcuuauuaaaug

SEQ ID NO: 1868228 - RNA, 19 nt, Artificial Sequence
  Description of Artificial Sequence: Synthetic oligonucleotide
  Antisense strand to SEQ ID NO: 1868227
cauuuaauaagcuuauugc

SEQ ID NO: 1868229 - RNA, 19 nt, Artificial Sequence
  Description of Artificial Sequence: Synthetic oligonucleotide
  Sense strand starting at position 463 of SEQ ID NO: 1564279
ucaccuuuauugucaagga

SEQ ID NO: 1868230 - RNA, 19 nt, Artificial Sequence
  Description of Artificial Sequence: Synthetic oligonucleotide
  Antisense strand to SEQ ID NO: 1868229
uccuugacaauaaagguga

SEQ ID NO: 1868231 - RNA, 19 nt, Artificial Sequence
  Description of Artificial Sequence: Synthetic oligonucleotide
  Sense strand starting at position 467 of SEQ ID NO: 1564279
cuuuauugucaaggaauac

SEQ ID NO: 1868232 - RNA, 19 nt, Artificial Sequence
  Description of Artificial Sequence: Synthetic oligonucleotide
  Antisense strand to SEQ ID NO: 1868231
guauuccuugacaauaaag

SEQ ID NO: 1868233 - RNA, 19 nt, Artificial Sequence
  Description of Artificial Sequence: Synthetic oligonucleotide
  Sense strand starting at position 550 of SEQ ID NO: 1564279
cuggcauacauaugaggau

SEQ ID NO: 1868234 - RNA, 19 nt, Artificial Sequence
  Description of Artificial Sequence: Synthetic oligonucleotide
  Antisense strand to SEQ ID NO: 1868233
auccucauauguaugccag

SEQ ID NO: 1868235 - RNA, 19 nt, Artificial Sequence
  Description of Artificial Sequence: Synthetic oligonucleotide
  Sense strand starting at position 775 of SEQ ID NO: 1564279
ucaggcauagguugaagau

SEQ ID NO: 1868236 - RNA, 19 nt, Artificial Sequence
  Description of Artificial Sequence: Synthetic oligonucleotide
  Antisense strand to SEQ ID NO: 1868235
aucuucaaccuaugccuga

SEQ ID NO: 1868237 - RNA, 19 nt, Artificial Sequence
  Description of Artificial Sequence: Synthetic oligonucleotide
  Sense strand starting at position 784 of SEQ ID NO: 1564279
gguugaagauguuccugaa

SEQ ID NO: 1868238 - RNA, 19 nt, Artificial Sequence
  Description of Artificial Sequence: Synthetic oligonucleotide
  Antisense strand to SEQ ID NO: 1868237
uucaggaacaucuucaacc

SEQ ID NO: 1868239 - RNA, 19 nt, Artificial Sequence
  Description of Artificial Sequence: Synthetic oligonucleotide
  Sense strand starting at position 788 of SEQ ID NO: 1564279
gaagauguuccugaagcug

SEQ ID NO: 1868240 - RNA, 19 nt, Artificial Sequence
  Description of Artificial Sequence: Synthetic oligonucleotide
  Antisense strand to SEQ ID NO: 1868239
cagcuucaggaacaucuuc

SEQ ID NO: 1868241 - RNA, 19 nt, Artificial Sequence
  Description of Artificial Sequence: Synthetic oligonucleotide
  Sense strand starting at position 823 of SEQ ID NO: 1564279
ggagguaaucuucgaauua

SEQ ID NO: 1868242 - RNA, 19 nt, Artificial Sequence
  Description of Artificial Sequence: Synthetic oligonucleotide
  Antisense strand to SEQ ID NO: 1868241
uaauucgaagauuaccucc

SEQ ID NO: 1868243 - RNA, 19 nt, Artificial Sequence
  Description of Artificial Sequence: Synthetic oligonucleotide
  Sense strand starting at position 906 of SEQ ID NO: 1564279
gaaucacaguuccugaaga

SEQ ID NO: 1868244 - RNA, 19 nt, Artificial Sequence
  Description of Artificial Sequence: Synthetic oligonucleotide
  Antisense strand to SEQ ID NO: 1868243
ucuucaggaacugugauuc

SEQ ID NO: 1868245 - RNA, 19 nt, Artificial Sequence
  Description of Artificial Sequence: Synthetic oligonucleotide
  Sense strand starting at position 919 of SEQ ID NO: 1564279
ugaagaaggcugggcuuua

SEQ ID NO: 1868246 - RNA, 19 nt, Artificial Sequence
  Description of Artificial Sequence: Synthetic oligonucleotide
  Antisense strand to SEQ ID NO: 1868245
uaaagcccagccuucuuca

SEQ ID NO: 1868247 - RNA, 19 nt, Artificial Sequence
  Description of Artificial Sequence: Synthetic oligonucleotide
  Sense strand starting at position 920 of SEQ ID NO: 1564279
gaagaaggcugggcuuuaa

SEQ ID NO: 1868248 - RNA, 19 nt, Artificial Sequence
  Description of Artificial Sequence: Synthetic oligonucleotide
  Antisense strand to SEQ ID NO: 1868247
uuaaagcccagccuucuuc

SEQ ID NO: 1868249 - RNA, 19 nt, Artificial Sequence
  Description of Artificial Sequence: Synthetic oligonucleotide
  Sense strand starting at position 1154 of SEQ ID NO: 1564279
guggcaauaacuuaguaag

SEQ ID NO: 1868250 - RNA, 19 nt, Artificial Sequence
  Description of Artificial Sequence: Synthetic oligonucleotide
  Antisense strand to SEQ ID NO: 1868249
cuuacuaaguuauugccac

SEQ ID NO: 1868251 - RNA, 19 nt, Artificial Sequence
  Description of Artificial Sequence: Synthetic oligonucleotide
  Sense strand starting at position 1375 of SEQ ID NO: 1564279
ccaacucgccuccaugaau

SEQ ID NO: 1868252 - RNA, 19 nt, Artificial Sequence
  Description of Artificial Sequence: Synthetic oligonucleotide
  Antisense strand to SEQ ID NO: 1868251
auucauggaggcgaguugg

SEQ ID NO: 1868253 - RNA, 19 nt, Artificial Sequence
  Description of Artificial Sequence: Synthetic oligonucleotide
  Sense strand starting at position 1378 of SEQ ID NO: 1564279
acucgccuccaugaauaau

SEQ ID NO: 1868254 - RNA, 19 nt, Artificial Sequence
  Description of Artificial Sequence: Synthetic oligonucleotide
  Antisense strand to SEQ ID NO: 1868253
auuauucauggaggcgagu

SEQ ID NO: 1868255 - RNA, 19 nt, Artificial Sequence
  Description of Artificial Sequence: Synthetic oligonucleotide
  Sense strand starting at position 1381 of SEQ ID NO: 1564279
cgccuccaugaauaauauu

SEQ ID NO: 1868256 - RNA, 19 nt, Artificial Sequence
  Description of Artificial Sequence: Synthetic oligonucleotide
  Antisense strand to SEQ ID NO: 1868255
aauauuauucauggaggcg

SEQ ID NO: 1868257 - RNA, 19 nt, Artificial Sequence
  Description of Artificial Sequence: Synthetic oligonucleotide
  Sense strand starting at position 1644 of SEQ ID NO: 1564279
aggagaaccugagaaagaa

SEQ ID NO: 1868258 - RNA, 19 nt, Artificial Sequence
  Description of Artificial Sequence: Synthetic oligonucleotide
  Antisense strand to SEQ ID NO: 1868257
uucuuucucagguucuccu

SEQ ID NO: 1868259 - RNA, 19 nt, Artificial Sequence
  Description of Artificial Sequence: Synthetic oligonucleotide
  Sense strand starting at position 2288 of SEQ ID NO: 1564279
cccuguuugugaguaaauc

SEQ ID NO: 1868260 - RNA, 19 nt, Artificial Sequence
  Description of Artificial Sequence: Synthetic oligonucleotide
  Antisense strand to SEQ ID NO: 1868259
gauuuacucacaaacaggg

SEQ ID NO: 1868261 - RNA, 19 nt, Artificial Sequence
  Description of Artificial Sequence: Synthetic oligonucleotide
  Sense strand starting at position 2334 of SEQ ID NO: 1564279
ggucgaaagauagguucuu

SEQ ID NO: 1868262 - RNA, 19 nt, Artificial Sequence
  Description of Artificial Sequence: Synthetic oligonucleotide
  Antisense strand to SEQ ID NO: 1868261
aagaaccuaucuuucgacc

SEQ ID NO: 1868263 - RNA, 19 nt, Artificial Sequence
  Description of Artificial Sequence: Synthetic oligonucleotide
  Sense strand starting at position 2504 of SEQ ID NO: 1564279
uccuuauauugauuaggau

SEQ ID NO: 1868264 - RNA, 19 nt, Artificial Sequence
  Description of Artificial Sequence: Synthetic oligonucleotide
  Antisense strand to SEQ ID NO: 1868263
auccuaaucaauauaagga

SEQ ID NO: 1868265 - RNA, 19 nt, Artificial Sequence
  Description of Artificial Sequence: Synthetic oligonucleotide
  Sense strand starting at position 2543 of SEQ ID NO: 1564279
cuacaauauuagccgaguu

SEQ ID NO: 1868266 - RNA, 19 nt, Artificial Sequence
  Description of Artificial Sequence: Synthetic oligonucleotide
  Antisense strand to SEQ ID NO: 1868265
aacucggcuaauauuguag

SEQ ID NO: 1868267 - RNA, 19 nt, Artificial Sequence
  Description of Artificial Sequence: Synthetic oligonucleotide
  Sense strand starting at position 2860 of SEQ ID NO: 1564279
acuugauuuaguugcgauc

SEQ ID NO: 1868268 - RNA, 19 nt, Artificial Sequence
  Description of Artificial Sequence: Synthetic oligonucleotide
  Antisense strand to SEQ ID NO: 1868267
gaucgcaacuaaaucaagu

SEQ ID NO: 1868269 - RNA, 19 nt, Artificial Sequence
  Description of Artificial Sequence: Synthetic oligonucleotide
  Sense strand starting at position 2949 of SEQ ID NO: 1564279
ugaaucuaacagugauuau

SEQ ID NO: 1868270 - RNA, 19 nt, Artificial Sequence
  Description of Artificial Sequence: Synthetic oligonucleotide
  Antisense strand to SEQ ID NO: 1868269
auaaucacuguuagauuca

SEQ ID NO: 1868271 - RNA, 19 nt, Artificial Sequence
  Description of Artificial Sequence: Synthetic oligonucleotide
  Sense strand starting at position 2952 of SEQ ID NO: 1564279
aucuaacagugauuauguu

SEQ ID NO: 1868272 - RNA, 19 nt, Artificial Sequence
  Description of Artificial Sequence: Synthetic oligonucleotide
  Antisense strand to SEQ ID NO: 1868271
aacauaaucacuguuagau

SEQ ID NO: 1868273 - RNA, 19 nt, Artificial Sequence
  Description of Artificial Sequence: Synthetic oligonucleotide
  Sense strand starting at position 2956 of SEQ ID NO: 1564279
aacagugauuauguugagu

SEQ ID NO: 1868274 - RNA, 19 nt, Artificial Sequence
  Description of Artificial Sequence: Synthetic oligonucleotide
  Antisense strand to SEQ ID NO: 1868273
acucaacauaaucacuguu

SEQ ID NO: 1868275 - RNA, 19 nt, Artificial Sequence
  Description of Artificial Sequence: Synthetic oligonucleotide
  Sense strand starting at position 2961 of SEQ ID NO: 1564279
ugauuauguugagugacag

SEQ ID NO: 1868276 - RNA, 19 nt, Artificial Sequence
  Description of Artificial Sequence: Synthetic oligonucleotide
  Antisense strand to SEQ ID NO: 1868275
cugucacucaacauaauca

SEQ ID NO: 1868277 - RNA, 19 nt, Artificial Sequence
  Description of Artificial Sequence: Synthetic oligonucleotide
  Sense strand starting at position 2962 of SEQ ID NO: 1564279
gauuauguugagugacaga

SEQ ID NO: 1868278 - RNA, 19 nt, Artificial Sequence
  Description of Artificial Sequence: Synthetic oligonucleotide
  Antisense strand to SEQ ID NO: 1868277
ucugucacucaacauaauc

SEQ ID NO: 1868279 - RNA, 19 nt, Artificial Sequence
  Description of Artificial Sequence: Synthetic oligonucleotide
  Sense strand starting at position 3584 of SEQ ID NO: 1564279
uuugccgaccucuagaaua

SEQ ID NO: 1868280 - RNA, 19 nt, Artificial Sequence
  Description of Artificial Sequence: Synthetic oligonucleotide
  Antisense strand to SEQ ID NO: 1868279
uauucuagaggucggcaaa

SEQ ID NO: 1868281 - RNA, 19 nt, Artificial Sequence
  Description of Artificial Sequence: Synthetic oligonucleotide
  Sense strand starting at position 3586 of SEQ ID NO: 1564279
ugccgaccucuagaauaua

SEQ ID NO: 1868282 - RNA, 19 nt, Artificial Sequence
  Description of Artificial Sequence: Synthetic oligonucleotide
  Antisense strand to SEQ ID NO: 1868281
uauauucuagaggucggca

SEQ ID NO: 1868283 - RNA, 19 nt, Artificial Sequence
  Description of Artificial Sequence: Synthetic oligonucleotide
  Sense strand starting at position 3947 of SEQ ID NO: 1564279
ucugucuuugcugacaacu

SEQ ID NO: 1868284 - RNA, 19 nt, Artificial Sequence
  Description of Artificial Sequence: Synthetic oligonucleotide
  Antisense strand to SEQ ID NO: 1868283
aguugucagcaaagacaga

SEQ ID NO: 1868285 - RNA, 19 nt, Artificial Sequence
  Description of Artificial Sequence: Synthetic oligonucleotide
  Sense strand starting at position 368 of SEQ ID NO: 1564280
uuugguaggcucugagaag

SEQ ID NO: 1868286 - RNA, 19 nt, Artificial Sequence
  Description of Artificial Sequence: Synthetic oligonucleotide
  Antisense strand to SEQ ID NO: 1868285
cuucucagagccuaccaaa

SEQ ID NO: 1868287 - RNA, 19 nt, Artificial Sequence
  Description of Artificial Sequence: Synthetic oligonucleotide
  Sense strand starting at position 388 of SEQ ID NO: 1564280
caaagaagguugcugagua

SEQ ID NO: 1868288 - RNA, 19 nt, Artificial Sequence
  Description of Artificial Sequence: Synthetic oligonucleotide
  Antisense strand to SEQ ID NO: 1868287
uacucagcaaccuucuuug

SEQ ID NO: 1868289 - RNA, 19 nt, Artificial Sequence
  Description of Artificial Sequence: Synthetic oligonucleotide
  Sense strand starting at position 420 of SEQ ID NO: 1564280
aucaaagauguauguuaug

SEQ ID NO: 1868290 - RNA, 19 nt, Artificial Sequence
  Description of Artificial Sequence: Synthetic oligonucleotide
  Antisense strand to SEQ ID NO: 1868289
cauaacauacaucuuugau

SEQ ID NO: 1868291 - RNA, 19 nt, Artificial Sequence
  Description of Artificial Sequence: Synthetic oligonucleotide
  Sense strand starting at position 435 of SEQ ID NO: 1564280
uaugaagauugauuguaca

SEQ ID NO: 1868292 - RNA, 19 nt, Artificial Sequence
  Description of Artificial Sequence: Synthetic oligonucleotide
  Antisense strand to SEQ ID NO: 1868291
uguacaaucaaucuucaua

SEQ ID NO: 1868293 - RNA, 19 nt, Artificial Sequence
  Description of Artificial Sequence: Synthetic oligonucleotide
  Sense strand starting at position 443 of SEQ ID NO: 1564280
uugauuguacaguaaugua

SEQ ID NO: 1868294 - RNA, 19 nt, Artificial Sequence
  Description of Artificial Sequence: Synthetic oligonucleotide
  Antisense strand to SEQ ID NO: 1868293
uacauuacuguacaaucaa

SEQ ID NO: 1868295 - RNA, 19 nt, Artificial Sequence
  Description of Artificial Sequence: Synthetic oligonucleotide
  Sense strand starting at position 523 of SEQ ID NO: 1564280
aagacaagguuucuagagu

SEQ ID NO: 1868296 - RNA, 19 nt, Artificial Sequence
  Description of Artificial Sequence: Synthetic oligonucleotide
  Antisense strand to SEQ ID NO: 1868295
acucuagaaaccuugucuu

SEQ ID NO: 1868297 - RNA, 19 nt, Artificial Sequence
  Description of Artificial Sequence: Synthetic oligonucleotide
  Sense strand starting at position 633 of SEQ ID NO: 1564280
uugauaugcugcucauuua

SEQ ID NO: 1868298 - RNA, 19 nt, Artificial Sequence
  Description of Artificial Sequence: Synthetic oligonucleotide
  Antisense strand to SEQ ID NO: 1868297
uaaaugagcagcauaucaa

SEQ ID NO: 1868299 - RNA, 19 nt, Artificial Sequence
  Description of Artificial Sequence: Synthetic oligonucleotide
  Sense strand starting at position 770 of SEQ ID NO: 1564280
cuacauugguuugugggau

SEQ ID NO: 1868300 - RNA, 19 nt, Artificial Sequence
  Description of Artificial Sequence: Synthetic oligonucleotide
  Antisense strand to SEQ ID NO: 1868299
aucccacaaaccaauguag

SEQ ID NO: 1868301 - RNA, 19 nt, Artificial Sequence
  Description of Artificial Sequence: Synthetic oligonucleotide
  Sense strand starting at position 813 of SEQ ID NO: 1564280
ggcucccuuugauccauua

SEQ ID NO: 1868302 - RNA, 19 nt, Artificial Sequence
  Description of Artificial Sequence: Synthetic oligonucleotide
  Antisense strand to SEQ ID NO: 1868301
uaauggaucaaagggagcc

SEQ ID NO: 1868303 - RNA, 19 nt, Artificial Sequence
  Description of Artificial Sequence: Synthetic oligonucleotide
  Sense strand starting at position 860 of SEQ ID NO: 1564280
augauaagaguuggacgau

SEQ ID NO: 1868304 - RNA, 19 nt, Artificial Sequence
  Description of Artificial Sequence: Synthetic oligonucleotide
  Antisense strand to SEQ ID NO: 1868303
aucguccaacucuuaucau

SEQ ID NO: 1868305 - RNA, 19 nt, Artificial Sequence
  Description of Artificial Sequence: Synthetic oligonucleotide
  Sense strand starting at position 866 of SEQ ID NO: 1564280
agaguuggacgauaagcuu

SEQ ID NO: 1868306 - RNA, 19 nt, Artificial Sequence
  Description of Artificial Sequence: Synthetic oligonucleotide
  Antisense strand to SEQ ID NO: 1868305
aagcuuaucguccaacucu

SEQ ID NO: 1868307 - RNA, 19 nt, Artificial Sequence
  Description of Artificial Sequence: Synthetic oligonucleotide
  Sense strand starting at position 1009 of SEQ ID NO: 1564280
gugauuggugguagugcau

SEQ ID NO: 1868308 - RNA, 19 nt, Artificial Sequence
  Description of Artificial Sequence: Synthetic oligonucleotide
  Antisense strand to SEQ ID NO: 1868307
augcacuaccaccaaucac

SEQ ID NO: 1868309 - RNA, 19 nt, Artificial Sequence
  Description of Artificial Sequence: Synthetic oligonucleotide
  Sense strand starting at position 1051 of SEQ ID NO: 1564280
ggguuauagguuuaccaug

SEQ ID NO: 1868310 - RNA, 19 nt, Artificial Sequence
  Description of Artificial Sequence: Synthetic oligonucleotide
  Antisense strand to SEQ ID NO: 1868309
caugguaaaccuauaaccc

SEQ ID NO: 1868311 - RNA, 19 nt, Artificial Sequence
  Description of Artificial Sequence: Synthetic oligonucleotide
  Sense strand starting at position 1058 of SEQ ID NO: 1564280
agguuuaccauguggacaa

SEQ ID NO: 1868312 - RNA, 19 nt, Artificial Sequence
  Description of Artificial Sequence: Synthetic oligonucleotide
  Antisense strand to SEQ ID NO: 1868311
uuguccacaugguaaaccu

SEQ ID NO: 1868313 - RNA, 19 nt, Artificial Sequence
  Description of Artificial Sequence: Synthetic oligonucleotide
  Sense strand starting at position 1099 of SEQ ID NO: 1564280
gaguuuaccugccuggaau

SEQ ID NO: 1868314 - RNA, 19 nt, Artificial Sequence
  Description of Artificial Sequence: Synthetic oligonucleotide
  Antisense strand to SEQ ID NO: 1868313
auuccaggcagguaaacuc

SEQ ID NO: 1868315 - RNA, 19 nt, Artificial Sequence
  Description of Artificial Sequence: Synthetic oligonucleotide
  Sense strand starting at position 1124 of SEQ ID NO: 1564280
ggaguugucuuuccuggga

SEQ ID NO: 1868316 - RNA, 19 nt, Artificial Sequence
  Description of Artificial Sequence: Synthetic oligonucleotide
  Antisense strand to SEQ ID NO: 1868315
ucccaggaaagacaacucc

SEQ ID NO: 1868317 - RNA, 19 nt, Artificial Sequence
  Description of Artificial Sequence: Synthetic oligonucleotide
  Sense strand starting at position 1127 of SEQ ID NO: 1564280
guugucuuuccugggagag

SEQ ID NO: 1868318 - RNA, 19 nt, Artificial Sequence
  Description of Artificial Sequence: Synthetic oligonucleotide
  Antisense strand to SEQ ID NO: 1868317
cucucccaggaaagacaac

SEQ ID NO: 1868319 - RNA, 19 nt, Artificial Sequence
  Description of Artificial Sequence: Synthetic oligonucleotide
  Sense strand starting at position 1193 of SEQ ID NO: 1564280
auguuagacaccggaacuu

SEQ ID NO: 1868320 - RNA, 19 nt, Artificial Sequence
  Description of Artificial Sequence: Synthetic oligonucleotide
  Antisense strand to SEQ ID NO: 1868319
aaguuccggugucuaacau

SEQ ID NO: 1868321 - RNA, 19 nt, Artificial Sequence
  Description of Artificial Sequence: Synthetic oligonucleotide
  Sense strand starting at position 1219 of SEQ ID NO: 1564280
gaagguuggcguucgaguu

SEQ ID NO: 1868322 - RNA, 19 nt, Artificial Sequence
  Description of Artificial Sequence: Synthetic oligonucleotide
  Antisense strand to SEQ ID NO: 1868321
aacucgaacgccaaccuuc

SEQ ID NO: 1868323 - RNA, 19 nt, Artificial Sequence
  Description of Artificial Sequence: Synthetic oligonucleotide
  Sense strand starting at position 1415 of SEQ ID NO: 1564280
cuuacuugucacggaugau

SEQ ID NO: 1868324 - RNA, 19 nt, Artificial Sequence
  Description of Artificial Sequence: Synthetic oligonucleotide
  Antisense strand to SEQ ID NO: 1868323
aucauccgugacaaguaag

SEQ ID NO: 1868325 - RNA, 19 nt, Artificial Sequence
  Description of Artificial Sequence: Synthetic oligonucleotide
  Sense strand starting at position 1416 of SEQ ID NO: 1564280
uuacuugucacggaugaug

SEQ ID NO: 1868326 - RNA, 19 nt, Artificial Sequence
  Description of Artificial Sequence: Synthetic oligonucleotide
  Antisense strand to SEQ ID NO: 1868325
caucauccgugacaaguaa

SEQ ID NO: 1868327 - RNA, 19 nt, Artificial Sequence
  Description of Artificial Sequence: Synthetic oligonucleotide
  Sense strand starting at position 2176 of SEQ ID NO: 1564280
ucagaacuuugggugauua

SEQ ID NO: 1868328 - RNA, 19 nt, Artificial Sequence
  Description of Artificial Sequence: Synthetic oligonucleotide
  Antisense strand to SEQ ID NO: 1868327
uaaucacccaaaguucuga

SEQ ID NO: 1868329 - RNA, 19 nt, Artificial Sequence
  Description of Artificial Sequence: Synthetic oligonucleotide
  Sense strand starting at position 2178 of SEQ ID NO: 1564280
agaacuuugggugauuagu

SEQ ID NO: 1868330 - RNA, 19 nt, Artificial Sequence
  Description of Artificial Sequence: Synthetic oligonucleotide
  Antisense strand to SEQ ID NO: 1868329
acuaaucacccaaaguucu

SEQ ID NO: 1868331 - RNA, 19 nt, Artificial Sequence
  Description of Artificial Sequence: Synthetic oligonucleotide
  Sense strand starting at position 2262 of SEQ ID NO: 1564280
cagacuuugugaccuagca

SEQ ID NO: 1868332 - RNA, 19 nt, Artificial Sequence
  Description of Artificial Sequence: Synthetic oligonucleotide
  Antisense strand to SEQ ID NO: 1868331
ugcuaggucacaaagucug

SEQ ID NO: 1868333 - RNA, 19 nt, Artificial Sequence
  Description of Artificial Sequence: Synthetic oligonucleotide
  Sense strand starting at position 2313 of SEQ ID NO: 1564280
uuagcuugucugcauaaca

SEQ ID NO: 1868334 - RNA, 19 nt, Artificial Sequence
  Description of Artificial Sequence: Synthetic oligonucleotide
  Antisense strand to SEQ ID NO: 1868333
uguuaugcagacaagcuaa

SEQ ID NO: 1868335 - RNA, 19 nt, Artificial Sequence
  Description of Artificial Sequence: Synthetic oligonucleotide
  Sense strand starting at position 2370 of SEQ ID NO: 1564280
gaggcuguccucuacuaga

SEQ ID NO: 1868336 - RNA, 19 nt, Artificial Sequence
  Description of Artificial Sequence: Synthetic oligonucleotide
  Antisense strand to SEQ ID NO: 1868335
ucuaguagaggacagccuc

SEQ ID NO: 1868337 - RNA, 19 nt, Artificial Sequence
  Description of Artificial Sequence: Synthetic oligonucleotide
  Sense strand starting at position 2378 of SEQ ID NO: 1564280
ccucuacuagacuguucua

SEQ ID NO: 1868338 - RNA, 19 nt, Artificial Sequence
  Description of Artificial Sequence: Synthetic oligonucleotide
  Antisense strand to SEQ ID NO: 1868337
uagaacagucuaguagagg

SEQ ID NO: 1868339 - RNA, 19 nt, Artificial Sequence
  Description of Artificial Sequence: Synthetic oligonucleotide
  Sense strand starting at position 2381 of SEQ ID NO: 1564280
cuacuagacuguucuagaa

SEQ ID NO: 1868340 - RNA, 19 nt, Artificial Sequence
  Description of Artificial Sequence: Synthetic oligonucleotide
  Antisense strand to SEQ ID NO: 1868339
uucuagaacagucuaguag

SEQ ID NO: 1868341 - RNA, 19 nt, Artificial Sequence
  Description of Artificial Sequence: Synthetic oligonucleotide
  Sense strand starting at position 2521 of SEQ ID NO: 1564280
ucuuuaaaguacuuggaaa

SEQ ID NO: 1868342 - RNA, 19 nt, Artificial Sequence
  Description of Artificial Sequence: Synthetic oligonucleotide
  Antisense strand to SEQ ID NO: 1868341
uuuccaaguacuuuaaaga

SEQ ID NO: 1868343 - RNA, 19 nt, Artificial Sequence
  Description of Artificial Sequence: Synthetic oligonucleotide
  Sense strand starting at position 2567 of SEQ ID NO: 1564280
acuauaacggccugaggua

SEQ ID NO: 1868344 - RNA, 19 nt, Artificial Sequence
  Description of Artificial Sequence: Synthetic oligonucleotide
  Antisense strand to SEQ ID NO: 1868343
uaccucaggccguuauagu

SEQ ID NO: 1868345 - RNA, 19 nt, Artificial Sequence
  Description of Artificial Sequence: Synthetic oligonucleotide
  Sense strand starting at position 2632 of SEQ ID NO: 1564280
aauuguagagcuuguuaaa

SEQ ID NO: 1868346 - RNA, 19 nt, Artificial Sequence
  Description of Artificial Sequence: Synthetic oligonucleotide
  Antisense strand to SEQ ID NO: 1868345
uuuaacaagcucuacaauu

SEQ ID NO: 1868347 - RNA, 19 nt, Artificial Sequence
  Description of Artificial Sequence: Synthetic oligonucleotide
  Sense strand starting at position 2674 of SEQ ID NO: 1564280
uugagauugugauucugua

SEQ ID NO: 1868348 - RNA, 19 nt, Artificial Sequence
  Description of Artificial Sequence: Synthetic oligonucleotide
  Antisense strand to SEQ ID NO: 1868347
uacagaaucacaaucucaa

SEQ ID NO: 1868349 - RNA, 19 nt, Artificial Sequence
  Description of Artificial Sequence: Synthetic oligonucleotide
  Sense strand starting at position 2678 of SEQ ID NO: 1564280
gauugugauucuguagauc

SEQ ID NO: 1868350 - RNA, 19 nt, Artificial Sequence
  Description of Artificial Sequence: Synthetic oligonucleotide
  Antisense strand to SEQ ID NO: 1868349
gaucuacagaaucacaauc

SEQ ID NO: 1868351 - RNA, 19 nt, Artificial Sequence
  Description of Artificial Sequence: Synthetic oligonucleotide
  Sense strand starting at position 2681 of SEQ ID NO: 1564280
ugugauucuguagauccga

SEQ ID NO: 1868352 - RNA, 19 nt, Artificial Sequence
  Description of Artificial Sequence: Synthetic oligonucleotide
  Antisense strand to SEQ ID NO: 1868351
ucggaucuacagaaucaca

SEQ ID NO: 1868353 - RNA, 19 nt, Artificial Sequence
  Description of Artificial Sequence: Synthetic oligonucleotide
  Sense strand starting at position 2690 of SEQ ID NO: 1564280
guagauccgagaugggaua

SEQ ID NO: 1868354 - RNA, 19 nt, Artificial Sequence
  Description of Artificial Sequence: Synthetic oligonucleotide
  Antisense strand to SEQ ID NO: 1868353
uaucccaucucggaucuac

SEQ ID NO: 1868355 - RNA, 19 nt, Artificial Sequence
  Description of Artificial Sequence: Synthetic oligonucleotide
  Sense strand starting at position 3117 of SEQ ID NO: 1564280
uaucauuaauggguaguua

SEQ ID NO: 1868356 - RNA, 19 nt, Artificial Sequence
  Description of Artificial Sequence: Synthetic oligonucleotide
  Antisense strand to SEQ ID NO: 1868355
uaacuacccauuaaugaua

SEQ ID NO: 1868357 - RNA, 19 nt, Artificial Sequence
  Description of Artificial Sequence: Synthetic oligonucleotide
  Sense strand starting at position 3125 of SEQ ID NO: 1564280
auggguaguuagguugauu

SEQ ID NO: 1868358 - RNA, 19 nt, Artificial Sequence
  Description of Artificial Sequence: Synthetic oligonucleotide
  Antisense strand to SEQ ID NO: 1868357
aaucaaccuaacuacccau

SEQ ID NO: 1868359 - RNA, 19 nt, Artificial Sequence
  Description of Artificial Sequence: Synthetic oligonucleotide
  Sense strand starting at position 3128 of SEQ ID NO: 1564280
gguaguuagguugauucca

SEQ ID NO: 1868360 - RNA, 19 nt, Artificial Sequence
  Description of Artificial Sequence: Synthetic oligonucleotide
  Antisense strand to SEQ ID NO: 1868359
uggaaucaaccuaacuacc

SEQ ID NO: 1868361 - RNA, 19 nt, Artificial Sequence
  Description of Artificial Sequence: Synthetic oligonucleotide
  Sense strand starting at position 3161 of SEQ ID NO: 1564280
uaaauagugcuggaguuaa

SEQ ID NO: 1868362 - RNA, 19 nt, Artificial Sequence
  Description of Artificial Sequence: Synthetic oligonucleotide
  Antisense strand to SEQ ID NO: 1868361
uuaacuccagcacuauuua

SEQ ID NO: 1868363 - RNA, 19 nt, Artificial Sequence
  Description of Artificial Sequence: Synthetic oligonucleotide
  Sense strand starting at position 3515 of SEQ ID NO: 1564280
cuuuguauccaucauagcu

SEQ ID NO: 1868364 - RNA, 19 nt, Artificial Sequence
  Description of Artificial Sequence: Synthetic oligonucleotide
  Antisense strand to SEQ ID NO: 1868363
agcuaugauggauacaaag

SEQ ID NO: 1868365 - RNA, 19 nt, Artificial Sequence
  Description of Artificial Sequence: Synthetic oligonucleotide
  Sense strand starting at position 110 of SEQ ID NO: 1564281
ugacuaagucaaggcaauu

SEQ ID NO: 1868366 - RNA, 19 nt, Artificial Sequence
  Description of Artificial Sequence: Synthetic oligonucleotide
  Antisense strand to SEQ ID NO: 1868365
aauugccuugacuuaguca

SEQ ID NO: 1868367 - RNA, 19 nt, Artificial Sequence
  Description of Artificial Sequence: Synthetic oligonucleotide
  Sense strand starting at position 347 of SEQ ID NO: 1564281
ucaggcauuugagaauaaa

SEQ ID NO: 1868368 - RNA, 19 nt, Artificial Sequence
  Description of Artificial Sequence: Synthetic oligonucleotide
  Antisense strand to SEQ ID NO: 1868367
uuuauucucaaaugccuga

SEQ ID NO: 1868369 - RNA, 19 nt, Artificial Sequence
  Description of Artificial Sequence: Synthetic oligonucleotide
  Sense strand starting at position 583 of SEQ ID NO: 1564281
ccaggauccaaucgaggau

SEQ ID NO: 1868370 - RNA, 19 nt, Artificial Sequence
  Description of Artificial Sequence: Synthetic oligonucleotide
  Antisense strand to SEQ ID NO: 1868369
auccucgauuggauccugg

SEQ ID NO: 1868371 - RNA, 19 nt, Artificial Sequence
  Description of Artificial Sequence: Synthetic oligonucleotide
  Sense strand starting at position 613 of SEQ ID NO: 1564281
uuuaguuaucaugacucgu

SEQ ID NO: 1868372 - RNA, 19 nt, Artificial Sequence
  Description of Artificial Sequence: Synthetic oligonucleotide
  Antisense strand to SEQ ID NO: 1868371
acgagucaugauaacuaaa

SEQ ID NO: 1868373 - RNA, 19 nt, Artificial Sequence
  Description of Artificial Sequence: Synthetic oligonucleotide
  Sense strand starting at position 807 of SEQ ID NO: 1564281
augcaacucggcgagaaau

SEQ ID NO: 1868374 - RNA, 19 nt, Artificial Sequence
  Description of Artificial Sequence: Synthetic oligonucleotide
  Antisense strand to SEQ ID NO: 1868373
auuucucgccgaguugcau

SEQ ID NO: 1868375 - RNA, 19 nt, Artificial Sequence
  Description of Artificial Sequence: Synthetic oligonucleotide
  Sense strand starting at position 809 of SEQ ID NO: 1564281
gcaacucggcgagaaauaa

SEQ ID NO: 1868376 - RNA, 19 nt, Artificial Sequence
  Description of Artificial Sequence: Synthetic oligonucleotide
  Antisense strand to SEQ ID NO: 1868375
uuauuucucgccgaguugc

SEQ ID NO: 1868377 - RNA, 19 nt, Artificial Sequence
  Description of Artificial Sequence: Synthetic oligonucleotide
  Sense strand starting at position 856 of SEQ ID NO: 1564281
aaggacuguuuagcaagaa

SEQ ID NO: 1868378 - RNA, 19 nt, Artificial Sequence
  Description of Artificial Sequence: Synthetic oligonucleotide
  Antisense strand to SEQ ID NO: 1868377
uucuugcuaaacaguccuu

SEQ ID NO: 1868379 - RNA, 19 nt, Artificial Sequence
  Description of Artificial Sequence: Synthetic oligonucleotide
  Sense strand starting at position 860 of SEQ ID NO: 1564281
acuguuuagcaagaaauca

SEQ ID NO: 1868380 - RNA, 19 nt, Artificial Sequence
  Description of Artificial Sequence: Synthetic oligonucleotide
  Antisense strand to SEQ ID NO: 1868379
ugauuucuugcuaaacagu

SEQ ID NO: 1868381 - RNA, 19 nt, Artificial Sequence
  Description of Artificial Sequence: Synthetic oligonucleotide
  Sense strand starting at position 1025 of SEQ ID NO: 1564281
gaaggcuuccgccagaauc

SEQ ID NO: 1868382 - RNA, 19 nt, Artificial Sequence
  Description of Artificial Sequence: Synthetic oligonucleotide
  Antisense strand to SEQ ID NO: 1868381
gauucuggcggaagccuuc

SEQ ID NO: 1868383 - RNA, 19 nt, Artificial Sequence
  Description of Artificial Sequence: Synthetic oligonucleotide
  Sense strand starting at position 1027 of SEQ ID NO: 1564281
aggcuuccgccagaaucaa

SEQ ID NO: 1868384 - RNA, 19 nt, Artificial Sequence
  Description of Artificial Sequence: Synthetic oligonucleotide
  Antisense strand to SEQ ID NO: 1868383
uugauucuggcggaagccu

SEQ ID NO: 1868385 - RNA, 19 nt, Artificial Sequence
  Description of Artificial Sequence: Synthetic oligonucleotide
  Sense strand starting at position 1437 of SEQ ID NO: 1564281
gaccgaaacuggucucauc

SEQ ID NO: 1868386 - RNA, 19 nt, Artificial Sequence
  Description of Artificial Sequence: Synthetic oligonucleotide
  Antisense strand to SEQ ID NO: 1868385
gaugagaccaguuucgguc

SEQ ID NO: 1868387 - RNA, 19 nt, Artificial Sequence
  Description of Artificial Sequence: Synthetic oligonucleotide
  Sense strand starting at position 1989 of SEQ ID NO: 1564281
gggcuacugccauauugga

SEQ ID NO: 1868388 - RNA, 19 nt, Artificial Sequence
  Description of Artificial Sequence: Synthetic oligonucleotide
  Antisense strand to SEQ ID NO: 1868387
uccaauauggcaguagccc

SEQ ID NO: 1868389 - RNA, 19 nt, Artificial Sequence
  Description of Artificial Sequence: Synthetic oligonucleotide
  Sense strand starting at position 2190 of SEQ ID NO: 1564281
uuguuagccugaucagaau

SEQ ID NO: 1868390 - RNA, 19 nt, Artificial Sequence
  Description of Artificial Sequence: Synthetic oligonucleotide
  Antisense strand to SEQ ID NO: 1868389
auucugaucaggcuaacaa

SEQ ID NO: 1868391 - RNA, 19 nt, Artificial Sequence
  Description of Artificial Sequence: Synthetic oligonucleotide
  Sense strand starting at position 2319 of SEQ ID NO: 1564281
caagguguugaagacaagu

SEQ ID NO: 1868392 - RNA, 19 nt, Artificial Sequence
  Description of Artificial Sequence: Synthetic oligonucleotide
  Antisense strand to SEQ ID NO: 1868391
acuugucuucaacaccuug

SEQ ID NO: 1868393 - RNA, 19 nt, Artificial Sequence
  Description of Artificial Sequence: Synthetic oligonucleotide
  Sense strand starting at position 2321 of SEQ ID NO: 1564281
agguguugaagacaaguua

SEQ ID NO: 1868394 - RNA, 19 nt, Artificial Sequence
  Description of Artificial Sequence: Synthetic oligonucleotide
  Antisense strand to SEQ ID NO: 1868393
uaacuugucuucaacaccu

SEQ ID NO: 1868395 - RNA, 19 nt, Artificial Sequence
  Description of Artificial Sequence: Synthetic oligonucleotide
  Sense strand starting at position 2354 of SEQ ID NO: 1564281
guuuguuggagucauagca

SEQ ID NO: 1868396 - RNA, 19 nt, Artificial Sequence
  Description of Artificial Sequence: Synthetic oligonucleotide
  Antisense strand to SEQ ID NO: 1868395
ugcuaugacuccaacaaac

SEQ ID NO: 1868397 - RNA, 19 nt, Artificial Sequence
  Description of Artificial Sequence: Synthetic oligonucleotide
  Sense strand starting at position 2400 of SEQ ID NO: 1564281
guuuaagugcuuuauugga

SEQ ID NO: 1868398 - RNA, 19 nt, Artificial Sequence
  Description of Artificial Sequence: Synthetic oligonucleotide
  Antisense strand to SEQ ID NO: 1868397
uccaauaaagcacuuaaac

SEQ ID NO: 1868399 - RNA, 19 nt, Artificial Sequence
  Description of Artificial Sequence: Synthetic oligonucleotide
  Sense strand starting at position 2402 of SEQ ID NO: 1564281
uuaagugcuuuauuggacu

SEQ ID NO: 1868400 - RNA, 19 nt, Artificial Sequence
  Description of Artificial Sequence: Synthetic oligonucleotide
  Antisense strand to SEQ ID NO: 1868399
aguccaauaaagcacuuaa

SEQ ID NO: 1868401 - RNA, 19 nt, Artificial Sequence
  Description of Artificial Sequence: Synthetic oligonucleotide
  Sense strand starting at position 2451 of SEQ ID NO: 1564281
ccuugucacccauggguaa

SEQ ID NO: 1868402 - RNA, 19 nt, Artificial Sequence
  Description of Artificial Sequence: Synthetic oligonucleotide
  Antisense strand to SEQ ID NO: 1868401
uuacccaugggugacaagg

SEQ ID NO: 1868403 - RNA, 19 nt, Artificial Sequence
  Description of Artificial Sequence: Synthetic oligonucleotide
  Sense strand starting at position 2490 of SEQ ID NO: 1564281
agaaacgucccucagcuaa

SEQ ID NO: 1868404 - RNA, 19 nt, Artificial Sequence
  Description of Artificial Sequence: Synthetic oligonucleotide
  Antisense strand to SEQ ID NO: 1868403
uuagcugagggacguuucu

SEQ ID NO: 1868405 - RNA, 19 nt, Artificial Sequence
  Description of Artificial Sequence: Synthetic oligonucleotide
  Sense strand starting at position 2523 of SEQ ID NO: 1564281
gcaguuuagacuugagaaa

SEQ ID NO: 1868406 - RNA, 19 nt, Artificial Sequence
  Description of Artificial Sequence: Synthetic oligonucleotide
  Antisense strand to SEQ ID NO: 1868405
uuucucaagucuaaacugc

SEQ ID NO: 1868407 - RNA, 19 nt, Artificial Sequence
  Description of Artificial Sequence: Synthetic oligonucleotide
  Sense strand starting at position 2700 of SEQ ID NO: 1564281
uguacagugugauuaucca

SEQ ID NO: 1868408 - RNA, 19 nt, Artificial Sequence
  Description of Artificial Sequence: Synthetic oligonucleotide
  Antisense strand to SEQ ID NO: 1868407
uggauaaucacacuguaca

SEQ ID NO: 1868409 - RNA, 19 nt, Artificial Sequence
  Description of Artificial Sequence: Synthetic oligonucleotide
  Sense strand starting at position 2707 of SEQ ID NO: 1564281
ugugauuauccagaggcuu

SEQ ID NO: 1868410 - RNA, 19 nt, Artificial Sequence
  Description of Artificial Sequence: Synthetic oligonucleotide
  Antisense strand to SEQ ID NO: 1868409
aagccucuggauaaucaca

SEQ ID NO: 1868411 - RNA, 19 nt, Artificial Sequence
  Description of Artificial Sequence: Synthetic oligonucleotide
  Sense strand starting at position 2850 of SEQ ID NO: 1564281
ucagcacugucauuucuuu

SEQ ID NO: 1868412 - RNA, 19 nt, Artificial Sequence
  Description of Artificial Sequence: Synthetic oligonucleotide
  Antisense strand to SEQ ID NO: 1868411
aaagaaaugacagugcuga

SEQ ID NO: 1868413 - RNA, 19 nt, Artificial Sequence
  Description of Artificial Sequence: Synthetic oligonucleotide
  Sense strand starting at position 2873 of SEQ ID NO: 1564281
ugggcauugcaggauaugu

SEQ ID NO: 1868414 - RNA, 19 nt, Artificial Sequence
  Description of Artificial Sequence: Synthetic oligonucleotide
  Antisense strand to SEQ ID NO: 1868413
acauauccugcaaugccca

SEQ ID NO: 1868415 - RNA, 19 nt, Artificial Sequence
  Description of Artificial Sequence: Synthetic oligonucleotide
  Sense strand starting at position 2986 of SEQ ID NO: 1564281
aaaugucucugguugagaa

SEQ ID NO: 1868416 - RNA, 19 nt, Artificial Sequence
  Description of Artificial Sequence: Synthetic oligonucleotide
  Antisense strand to SEQ ID NO: 1868415
uucucaaccagagacauuu

SEQ ID NO: 1868417 - RNA, 19 nt, Artificial Sequence
  Description of Artificial Sequence: Synthetic oligonucleotide
  Sense strand starting at position 2987 of SEQ ID NO: 1564281
aaugucucugguugagaac

SEQ ID NO: 1868418 - RNA, 19 nt, Artificial Sequence
  Description of Artificial Sequence: Synthetic oligonucleotide
  Antisense strand to SEQ ID NO: 1868417
guucucaaccagagacauu

SEQ ID NO: 1868419 - RNA, 19 nt, Artificial Sequence
  Description of Artificial Sequence: Synthetic oligonucleotide
  Sense strand starting at position 3054 of SEQ ID NO: 1564281
cguugaugaugacuuuaau

SEQ ID NO: 1868420 - RNA, 19 nt, Artificial Sequence
  Description of Artificial Sequence: Synthetic oligonucleotide
  Antisense strand to SEQ ID NO: 1868419
auuaaagucaucaucaacg

SEQ ID NO: 1868421 - RNA, 19 nt, Artificial Sequence
  Description of Artificial Sequence: Synthetic oligonucleotide
  Sense strand starting at position 3138 of SEQ ID NO: 1564281
gggauugugucuuuauuac

SEQ ID NO: 1868422 - RNA, 19 nt, Artificial Sequence
  Description of Artificial Sequence: Synthetic oligonucleotide
  Antisense strand to SEQ ID NO: 1868421
guaauaaagacacaauccc

SEQ ID NO: 1868423 - RNA, 19 nt, Artificial Sequence
  Description of Artificial Sequence: Synthetic oligonucleotide
  Sense strand starting at position 3215 of SEQ ID NO: 1564281
guaagcucugggugaggaa

SEQ ID NO: 1868424 - RNA, 19 nt, Artificial Sequence
  Description of Artificial Sequence: Synthetic oligonucleotide
  Antisense strand to SEQ ID NO: 1868423
uuccucacccagagcuuac

SEQ ID NO: 1868425 - RNA, 19 nt, Artificial Sequence
  Description of Artificial Sequence: Synthetic oligonucleotide
  Sense strand starting at position 3263 of SEQ ID NO: 1564281
caaagaaaguggcauuuga

SEQ ID NO: 1868426 - RNA, 19 nt, Artificial Sequence
  Description of Artificial Sequence: Synthetic oligonucleotide
  Antisense strand to SEQ ID NO: 1868425
ucaaaugccacuuucuuug

SEQ ID NO: 1868427 - RNA, 19 nt, Artificial Sequence
  Description of Artificial Sequence: Synthetic oligonucleotide
  Sense strand starting at position 3272 of SEQ ID NO: 1564281
uggcauuugaguugaguca

SEQ ID NO: 1868428 - RNA, 19 nt, Artificial Sequence
  Description of Artificial Sequence: Synthetic oligonucleotide
  Antisense strand to SEQ ID NO: 1868427
ugacucaacucaaaugcca

SEQ ID NO: 1868429 - RNA, 19 nt, Artificial Sequence
  Description of Artificial Sequence: Synthetic oligonucleotide
  Sense strand starting at position 3322 of SEQ ID NO: 1564281
aguugaaucuugucagauu

SEQ ID NO: 1868430 - RNA, 19 nt, Artificial Sequence
  Description of Artificial Sequence: Synthetic oligonucleotide
  Antisense strand to SEQ ID NO: 1868429
aaucugacaagauucaacu

SEQ ID NO: 1868431 - RNA, 19 nt, Artificial Sequence
  Description of Artificial Sequence: Synthetic oligonucleotide
  Sense strand starting at position 3330 of SEQ ID NO: 1564281
cuugucagauucucugaau

SEQ ID NO: 1868432 - RNA, 19 nt, Artificial Sequence
  Description of Artificial Sequence: Synthetic oligonucleotide
  Antisense strand to SEQ ID NO: 1868431
auucagagaaucugacaag

SEQ ID NO: 1868433 - RNA, 19 nt, Artificial Sequence
  Description of Artificial Sequence: Synthetic oligonucleotide
  Sense strand starting at position 3386 of SEQ ID NO: 1564281
ccauuuaucugggcagcca

SEQ ID NO: 1868434 - RNA, 19 nt, Artificial Sequence
  Description of Artificial Sequence: Synthetic oligonucleotide
  Antisense strand to SEQ ID NO: 1868433
uggcugcccagauaaaugg

SEQ ID NO: 1868435 - RNA, 19 nt, Artificial Sequence
  Description of Artificial Sequence: Synthetic oligonucleotide
  Sense strand starting at position 3514 of SEQ ID NO: 1564281
gggugaguucuagaccuuu

SEQ ID NO: 1868436 - RNA, 19 nt, Artificial Sequence
  Description of Artificial Sequence: Synthetic oligonucleotide
  Antisense strand to SEQ ID NO: 1868435
aaaggucuagaacucaccc

SEQ ID NO: 1868437 - RNA, 19 nt, Artificial Sequence
  Description of Artificial Sequence: Synthetic oligonucleotide
  Sense strand starting at position 3596 of SEQ ID NO: 1564281
gccagaaguggccauguca

SEQ ID NO: 1868438 - RNA, 19 nt, Artificial Sequence
  Description of Artificial Sequence: Synthetic oligonucleotide
  Antisense strand to SEQ ID NO: 1868437
ugacauggccacuucuggc

SEQ ID NO: 1868439 - RNA, 19 nt, Artificial Sequence
  Description of Artificial Sequence: Synthetic oligonucleotide
  Sense strand starting at position 3614 of SEQ ID NO: 1564281
aucugauucuagccaagaa

SEQ ID NO: 1868440 - RNA, 19 nt, Artificial Sequence
  Description of Artificial Sequence: Synthetic oligonucleotide
  Antisense strand to SEQ ID NO: 1868439
uucuuggcuagaaucagau

SEQ ID NO: 1868441 - RNA, 19 nt, Artificial Sequence
  Description of Artificial Sequence: Synthetic oligonucleotide
  Sense strand starting at position 3776 of SEQ ID NO: 1564281
gcugaaacaucacuaaagu

SEQ ID NO: 1868442 - RNA, 19 nt, Artificial Sequence
  Description of Artificial Sequence: Synthetic oligonucleotide
  Antisense strand to SEQ ID NO: 1868441
acuuuagugauguuucagc

SEQ ID NO: 1868443 - RNA, 19 nt, Artificial Sequence
  Description of Artificial Sequence: Synthetic oligonucleotide
  Sense strand starting at position 3785 of SEQ ID NO: 1564281
ucacuaaagugcuuagaaa

SEQ ID NO: 1868444 - RNA, 19 nt, Artificial Sequence
  Description of Artificial Sequence: Synthetic oligonucleotide
  Antisense strand to SEQ ID NO: 1868443
uuucuaagcacuuuaguga

SEQ ID NO: 1868445 - RNA, 19 nt, Artificial Sequence
  Description of Artificial Sequence: Synthetic oligonucleotide
  Sense strand starting at position 30 of SEQ ID NO: 1564282
gauucuagcucauuugguu

SEQ ID NO: 1868446 - RNA, 19 nt, Artificial Sequence
  Description of Artificial Sequence: Synthetic oligonucleotide
  Antisense strand to SEQ ID NO: 1868445
aaccaaaugagcuagaauc

SEQ ID NO: 1868447 - RNA, 19 nt, Artificial Sequence
  Description of Artificial Sequence: Synthetic oligonucleotide
  Sense strand starting at position 154 of SEQ ID NO: 1564282
ccaggauaucuuuggauuc

SEQ ID NO: 1868448 - RNA, 19 nt, Artificial Sequence
  Description of Artificial Sequence: Synthetic oligonucleotide
  Antisense strand to SEQ ID NO: 1868447
gaauccaaagauauccugg

SEQ ID NO: 1868449 - RNA, 19 nt, Artificial Sequence
  Description of Artificial Sequence: Synthetic oligonucleotide
  Sense strand starting at position 190 of SEQ ID NO: 1564282
auacacugauguuuccaga

SEQ ID NO: 1868450 - RNA, 19 nt, Artificial Sequence
  Description of Artificial Sequence: Synthetic oligonucleotide
  Antisense strand to SEQ ID NO: 1868449
ucuggaaacaucaguguau

SEQ ID NO: 1868451 - RNA, 19 nt, Artificial Sequence
  Description of Artificial Sequence: Synthetic oligonucleotide
  Sense strand starting at position 547 of SEQ ID NO: 1564282
gguugauggagagguaauu

SEQ ID NO: 1868452 - RNA, 19 nt, Artificial Sequence
  Description of Artificial Sequence: Synthetic oligonucleotide
  Antisense strand to SEQ ID NO: 1868451
aauuaccucuccaucaacc

SEQ ID NO: 1868453 - RNA, 19 nt, Artificial Sequence
  Description of Artificial Sequence: Synthetic oligonucleotide
  Sense strand starting at position 569 of SEQ ID NO: 1564282
caguucugucuugagaaua

SEQ ID NO: 1868454 - RNA, 19 nt, Artificial Sequence
  Description of Artificial Sequence: Synthetic oligonucleotide
  Antisense strand to SEQ ID NO: 1868453
uauucucaagacagaacug

SEQ ID NO: 1868455 - RNA, 19 nt, Artificial Sequence
  Description of Artificial Sequence: Synthetic oligonucleotide
  Sense strand starting at position 640 of SEQ ID NO: 1564282
uaguaaugacagggcaaga

SEQ ID NO: 1868456 - RNA, 19 nt, Artificial Sequence
  Description of Artificial Sequence: Synthetic oligonucleotide
  Antisense strand to SEQ ID NO: 1868455
ucuugcccugucauuacua

SEQ ID NO: 1868457 - RNA, 19 nt, Artificial Sequence
  Description of Artificial Sequence: Synthetic oligonucleotide
  Sense strand starting at position 771 of SEQ ID NO: 1564282
ugaucuaaacagugagcua

SEQ ID NO: 1868458 - RNA, 19 nt, Artificial Sequence
  Description of Artificial Sequence: Synthetic oligonucleotide
  Antisense strand to SEQ ID NO: 1868457
uagcucacuguuuagauca

SEQ ID NO: 1868459 - RNA, 19 nt, Artificial Sequence
  Description of Artificial Sequence: Synthetic oligonucleotide
  Sense strand starting at position 865 of SEQ ID NO: 1564282
agaguaacaucuccuugau

SEQ ID NO: 1868460 - RNA, 19 nt, Artificial Sequence
  Description of Artificial Sequence: Synthetic oligonucleotide
  Antisense strand to SEQ ID NO: 1868459
aucaaggagauguuacucu

SEQ ID NO: 1868461 - RNA, 19 nt, Artificial Sequence
  Description of Artificial Sequence: Synthetic oligonucleotide
  Sense strand starting at position 979 of SEQ ID NO: 1564282
guaaaucaucagcaaacga

SEQ ID NO: 1868462 - RNA, 19 nt, Artificial Sequence
  Description of Artificial Sequence: Synthetic oligonucleotide
  Antisense strand to SEQ ID NO: 1868461
ucguuugcugaugauuuac

SEQ ID NO: 1868463 - RNA, 19 nt, Artificial Sequence
  Description of Artificial Sequence: Synthetic oligonucleotide
  Sense strand starting at position 1188 of SEQ ID NO: 1564282
agaccaaugucaucuaggu

SEQ ID NO: 1868464 - RNA, 19 nt, Artificial Sequence
  Description of Artificial Sequence: Synthetic oligonucleotide
  Antisense strand to SEQ ID NO: 1868463
accuagaugacauuggucu

SEQ ID NO: 1868465 - RNA, 19 nt, Artificial Sequence
  Description of Artificial Sequence: Synthetic oligonucleotide
  Sense strand starting at position 1193 of SEQ ID NO: 1564282
aaugucaucuagguaagga

SEQ ID NO: 1868466 - RNA, 19 nt, Artificial Sequence
  Description of Artificial Sequence: Synthetic oligonucleotide
  Antisense strand to SEQ ID NO: 1868465
uccuuaccuagaugacauu

SEQ ID NO: 1868467 - RNA, 19 nt, Artificial Sequence
  Description of Artificial Sequence: Synthetic oligonucleotide
  Sense strand starting at position 1207 of SEQ ID NO: 1564282
aaggauuuccaguggcguu

SEQ ID NO: 1868468 - RNA, 19 nt, Artificial Sequence
  Description of Artificial Sequence: Synthetic oligonucleotide
  Antisense strand to SEQ ID NO: 1868467
aacgccacuggaaauccuu

SEQ ID NO: 1868469 - RNA, 19 nt, Artificial Sequence
  Description of Artificial Sequence: Synthetic oligonucleotide
  Sense strand starting at position 1325 of SEQ ID NO: 1564282
ugccuuggauuucuuguau

SEQ ID NO: 1868470 - RNA, 19 nt, Artificial Sequence
  Description of Artificial Sequence: Synthetic oligonucleotide
  Antisense strand to SEQ ID NO: 1868469
auacaagaaauccaaggca

SEQ ID NO: 1868471 - RNA, 19 nt, Artificial Sequence
  Description of Artificial Sequence: Synthetic oligonucleotide
  Sense strand starting at position 1388 of SEQ ID NO: 1564282
gcuagaugagagcauucuu

SEQ ID NO: 1868472 - RNA, 19 nt, Artificial Sequence
  Description of Artificial Sequence: Synthetic oligonucleotide
  Antisense strand to SEQ ID NO: 1868471
aagaaugcucucaucuagc

SEQ ID NO: 1868473 - RNA, 19 nt, Artificial Sequence
  Description of Artificial Sequence: Synthetic oligonucleotide
  Sense strand starting at position 1470 of SEQ ID NO: 1564282
aaaggcauccucugaagga

SEQ ID NO: 1868474 - RNA, 19 nt, Artificial Sequence
  Description of Artificial Sequence: Synthetic oligonucleotide
  Antisense strand to SEQ ID NO: 1868473
uccuucagaggaugccuuu

SEQ ID NO: 1868475 - RNA, 19 nt, Artificial Sequence
  Description of Artificial Sequence: Synthetic oligonucleotide
  Sense strand starting at position 1537 of SEQ ID NO: 1564282
ucucaucaacuuuguggaa

SEQ ID NO: 1868476 - RNA, 19 nt, Artificial Sequence
  Description of Artificial Sequence: Synthetic oligonucleotide
  Antisense strand to SEQ ID NO: 1868475
uuccacaaaguugaugaga

SEQ ID NO: 1868477 - RNA, 19 nt, Artificial Sequence
  Description of Artificial Sequence: Synthetic oligonucleotide
  Sense strand starting at position 1538 of SEQ ID NO: 1564282
cucaucaacuuuguggaau

SEQ ID NO: 1868478 - RNA, 19 nt, Artificial Sequence
  Description of Artificial Sequence: Synthetic oligonucleotide
  Antisense strand to SEQ ID NO: 1868477
auuccacaaaguugaugag

SEQ ID NO: 1868479 - RNA, 19 nt, Artificial Sequence
  Description of Artificial Sequence: Synthetic oligonucleotide
  Sense strand starting at position 1544 of SEQ ID NO: 1564282
aacuuuguggaaugaaguu

SEQ ID NO: 1868480 - RNA, 19 nt, Artificial Sequence
  Description of Artificial Sequence: Synthetic oligonucleotide
  Antisense strand to SEQ ID NO: 1868479
aacuucauuccacaaaguu

SEQ ID NO: 1868481 - RNA, 19 nt, Artificial Sequence
  Description of Artificial Sequence: Synthetic oligonucleotide
  Sense strand starting at position 1639 of SEQ ID NO: 1564282
uuugaugaacucuguccaa

SEQ ID NO: 1868482 - RNA, 19 nt, Artificial Sequence
  Description of Artificial Sequence: Synthetic oligonucleotide
  Antisense strand to SEQ ID NO: 1868481
uuggacagaguucaucaaa

SEQ ID NO: 1868483 - RNA, 19 nt, Artificial Sequence
  Description of Artificial Sequence: Synthetic oligonucleotide
  Sense strand starting at position 1674 of SEQ ID NO: 1564282
ucagcaucuguggaggaua

SEQ ID NO: 1868484 - RNA, 19 nt, Artificial Sequence
  Description of Artificial Sequence: Synthetic oligonucleotide
  Antisense strand to SEQ ID NO: 1868483
uauccuccacagaugcuga

SEQ ID NO: 1868485 - RNA, 19 nt, Artificial Sequence
  Description of Artificial Sequence: Synthetic oligonucleotide
  Sense strand starting at position 1676 of SEQ ID NO: 1564282
agcaucuguggaggauaau

SEQ ID NO: 1868486 - RNA, 19 nt, Artificial Sequence
  Description of Artificial Sequence: Synthetic oligonucleotide
  Antisense strand to SEQ ID NO: 1868485
auuauccuccacagaugcu

SEQ ID NO: 1868487 - RNA, 19 nt, Artificial Sequence
  Description of Artificial Sequence: Synthetic oligonucleotide
  Sense strand starting at position 1677 of SEQ ID NO: 1564282
gcaucuguggaggauaauc

SEQ ID NO: 1868488 - RNA, 19 nt, Artificial Sequence
  Description of Artificial Sequence: Synthetic oligonucleotide
  Antisense strand to SEQ ID NO: 1868487
gauuauccuccacagaugc

SEQ ID NO: 1868489 - RNA, 19 nt, Artificial Sequence
  Description of Artificial Sequence: Synthetic oligonucleotide
  Sense strand starting at position 1744 of SEQ ID NO: 1564282
uuugguuuccucuauagga

SEQ ID NO: 1868490 - RNA, 19 nt, Artificial Sequence
  Description of Artificial Sequence: Synthetic oligonucleotide
  Antisense strand to SEQ ID NO: 1868489
uccuauagaggaaaccaaa

SEQ ID NO: 1868491 - RNA, 19 nt, Artificial Sequence
  Description of Artificial Sequence: Synthetic oligonucleotide
  Sense strand starting at position 1746 of SEQ ID NO: 1564282
ugguuuccucuauaggauu

SEQ ID NO: 1868492 - RNA, 19 nt, Artificial Sequence
  Description of Artificial Sequence: Synthetic oligonucleotide
  Antisense strand to SEQ ID NO: 1868491
aauccuauagaggaaacca

SEQ ID NO: 1868493 - RNA, 19 nt, Artificial Sequence
  Description of Artificial Sequence: Synthetic oligonucleotide
  Sense strand starting at position 2052 of SEQ ID NO: 1564282
ucauuaguucucuacacag

SEQ ID NO: 1868494 - RNA, 19 nt, Artificial Sequence
  Description of Artificial Sequence: Synthetic oligonucleotide
  Antisense strand to SEQ ID NO: 1868493
cuguguagagaacuaauga

SEQ ID NO: 1868495 - RNA, 19 nt, Artificial Sequence
  Description of Artificial Sequence: Synthetic oligonucleotide
  Sense strand starting at position 2188 of SEQ ID NO: 1564282
gagucuugauucccaagac

SEQ ID NO: 1868496 - RNA, 19 nt, Artificial Sequence
  Description of Artificial Sequence: Synthetic oligonucleotide
  Antisense strand to SEQ ID NO: 1868495
gucuugggaaucaagacuc

SEQ ID NO: 1868497 - RNA, 19 nt, Artificial Sequence
  Description of Artificial Sequence: Synthetic oligonucleotide
  Sense strand starting at position 2529 of SEQ ID NO: 1564282
gaugaauuguuccuugauu

SEQ ID NO: 1868498 - RNA, 19 nt, Artificial Sequence
  Description of Artificial Sequence: Synthetic oligonucleotide
  Antisense strand to SEQ ID NO: 1868497
aaucaaggaacaauucauc

SEQ ID NO: 1868499 - RNA, 19 nt, Artificial Sequence
  Description of Artificial Sequence: Synthetic oligonucleotide
  Sense strand starting at position 2559 of SEQ ID NO: 1564282
ucauauaugggccacucaa

SEQ ID NO: 1868500 - RNA, 19 nt, Artificial Sequence
  Description of Artificial Sequence: Synthetic oligonucleotide
  Antisense strand to SEQ ID NO: 1868499
uugaguggcccauauauga

SEQ ID NO: 1868501 - RNA, 19 nt, Artificial Sequence
  Description of Artificial Sequence: Synthetic oligonucleotide
  Sense strand starting at position 2740 of SEQ ID NO: 1564282
ggcuauaaggcccacuuaa

SEQ ID NO: 1868502 - RNA, 19 nt, Artificial Sequence
  Description of Artificial Sequence: Synthetic oligonucleotide
  Antisense strand to SEQ ID NO: 1868501
uuaagugggccuuauagcc

SEQ ID NO: 1868503 - RNA, 19 nt, Artificial Sequence
  Description of Artificial Sequence: Synthetic oligonucleotide
  Sense strand starting at position 2861 of SEQ ID NO: 1564282
cugaauaaguuagcagaca

SEQ ID NO: 1868504 - RNA, 19 nt, Artificial Sequence
  Description of Artificial Sequence: Synthetic oligonucleotide
  Antisense strand to SEQ ID NO: 1868503
ugucugcuaacuuauucag

SEQ ID NO: 1868505 - RNA, 19 nt, Artificial Sequence
  Description of Artificial Sequence: Synthetic oligonucleotide
  Sense strand starting at position 2914 of SEQ ID NO: 1564282
caagaauuaguuggaagcu

SEQ ID NO: 1868506 - RNA, 19 nt, Artificial Sequence
  Description of Artificial Sequence: Synthetic oligonucleotide
  Antisense strand to SEQ ID NO: 1868505
agcuuccaacuaauucuug

SEQ ID NO: 1868507 - RNA, 19 nt, Artificial Sequence
  Description of Artificial Sequence: Synthetic oligonucleotide
  Sense strand starting at position 3036 of SEQ ID NO: 1564282
ucagucccuguccaaauua

SEQ ID NO: 1868508 - RNA, 19 nt, Artificial Sequence
  Description of Artificial Sequence: Synthetic oligonucleotide
  Antisense strand to SEQ ID NO: 1868507
uaauuuggacagggacuga

SEQ ID NO: 1868509 - RNA, 19 nt, Artificial Sequence
  Description of Artificial Sequence: Synthetic oligonucleotide
  Sense strand starting at position 3147 of SEQ ID NO: 1564282
ggcauccauccauauacga

SEQ ID NO: 1868510 - RNA, 19 nt, Artificial Sequence
  Description of Artificial Sequence: Synthetic oligonucleotide
  Antisense strand to SEQ ID NO: 1868509
ucguauauggauggaugcc

SEQ ID NO: 1868511 - RNA, 19 nt, Artificial Sequence
  Description of Artificial Sequence: Synthetic oligonucleotide
  Sense strand starting at position 3181 of SEQ ID NO: 1564282
caaguaagagaaugguuau

SEQ ID NO: 1868512 - RNA, 19 nt, Artificial Sequence
  Description of Artificial Sequence: Synthetic oligonucleotide
  Antisense strand to SEQ ID NO: 1868511
auaaccauucucuuacuug

SEQ ID NO: 1868513 - RNA, 19 nt, Artificial Sequence
  Description of Artificial Sequence: Synthetic oligonucleotide
  Sense strand starting at position 3251 of SEQ ID NO: 1564282
uuaaguucucuggauuauu

SEQ ID NO: 1868514 - RNA, 19 nt, Artificial Sequence
  Description of Artificial Sequence: Synthetic oligonucleotide
  Antisense strand to SEQ ID NO: 1868513
aauaauccagagaacuuaa

SEQ ID NO: 1868515 - RNA, 19 nt, Artificial Sequence
  Description of Artificial Sequence: Synthetic oligonucleotide
  Sense strand starting at position 3288 of SEQ ID NO: 1564282
uauagaugcuaaguaagga

SEQ ID NO: 1868516 - RNA, 19 nt, Artificial Sequence
  Description of Artificial Sequence: Synthetic oligonucleotide
  Antisense strand to SEQ ID NO: 1868515
uccuuacuuagcaucuaua

SEQ ID NO: 1868517 - RNA, 19 nt, Artificial Sequence
  Description of Artificial Sequence: Synthetic oligonucleotide
  Sense strand starting at position 3421 of SEQ ID NO: 1564282
cccagcucaucuguauuua

SEQ ID NO: 1868518 - RNA, 19 nt, Artificial Sequence
  Description of Artificial Sequence: Synthetic oligonucleotide
  Antisense strand to SEQ ID NO: 1868517
uaaauacagaugagcuggg

SEQ ID NO: 1868519 - RNA, 19 nt, Artificial Sequence
  Description of Artificial Sequence: Synthetic oligonucleotide
  Sense strand starting at position 3646 of SEQ ID NO: 1564282
aguugaguggucuaaccac

SEQ ID NO: 1868520 - RNA, 19 nt, Artificial Sequence
  Description of Artificial Sequence: Synthetic oligonucleotide
  Antisense strand to SEQ ID NO: 1868519
gugguuagaccacucaacu

SEQ ID NO: 1868521 - RNA, 19 nt, Artificial Sequence
  Description of Artificial Sequence: Synthetic oligonucleotide
  Sense strand starting at position 3775 of SEQ ID NO: 1564282
ugaagagcacuaugugacu

SEQ ID NO: 1868522 - RNA, 19 nt, Artificial Sequence
  Description of Artificial Sequence: Synthetic oligonucleotide
  Antisense strand to SEQ ID NO: 1868521
agucacauagugcucuuca

SEQ ID NO: 1868523 - RNA, 19 nt, Artificial Sequence
  Description of Artificial Sequence: Synthetic oligonucleotide
  Sense strand starting at position 3781 of SEQ ID NO: 1564282
gcacuaugugacuauucca

SEQ ID NO: 1868524 - RNA, 19 nt, Artificial Sequence
  Description of Artificial Sequence: Synthetic oligonucleotide
  Antisense strand to SEQ ID NO: 1868523
uggaauagucacauagugc

SEQ ID NO: 1868525 - RNA, 19 nt, Artificial Sequence
  Description of Artificial Sequence: Synthetic oligonucleotide
  Sense strand starting at position 2548 of SEQ ID NO: 1564283
cgggaauccucccgccgaa

SEQ ID NO: 1868526 - RNA, 19 nt, Artificial Sequence
  Description of Artificial Sequence: Synthetic oligonucleotide
  Antisense strand to SEQ ID NO: 1868525
uucggcgggaggauucccg

SEQ ID NO: 1868527 - RNA, 19 nt, Artificial Sequence
  Description of Artificial Sequence: Synthetic oligonucleotide
  Sense strand starting at position 2756 of SEQ ID NO: 1564283
cccagaggcugcuuaugau

SEQ ID NO: 1868528 - RNA, 19 nt, Artificial Sequence
  Description of Artificial Sequence: Synthetic oligonucleotide
  Antisense strand to SEQ ID NO: 1868527
aucauaagcagccucuggg

SEQ ID NO: 1868529 - RNA, 19 nt, Artificial Sequence
  Description of Artificial Sequence: Synthetic oligonucleotide
  Sense strand starting at position 2763 of SEQ ID NO: 1564283
gcugcuuaugaucaggcaa

SEQ ID NO: 1868530 - RNA, 19 nt, Artificial Sequence
  Description of Artificial Sequence: Synthetic oligonucleotide
  Antisense strand to SEQ ID NO: 1868529
uugccugaucauaagcagc

SEQ ID NO: 1868531 - RNA, 19 nt, Artificial Sequence
  Description of Artificial Sequence: Synthetic oligonucleotide
  Sense strand starting at position 2765 of SEQ ID NO: 1564283
ugcuuaugaucaggcaagu

SEQ ID NO: 1868532 - RNA, 19 nt, Artificial Sequence
  Description of Artificial Sequence: Synthetic oligonucleotide
  Antisense strand to SEQ ID NO: 1868531
acuugccugaucauaagca

SEQ ID NO: 1868533 - RNA, 19 nt, Artificial Sequence
  Description of Artificial Sequence: Synthetic oligonucleotide
  Sense strand starting at position 2976 of SEQ ID NO: 1564283
gugccaaguccagaaaugu

SEQ ID NO: 1868534 - RNA, 19 nt, Artificial Sequence
  Description of Artificial Sequence: Synthetic oligonucleotide
  Antisense strand to SEQ ID NO: 1868533
acauuucuggacuuggcac

SEQ ID NO: 1868535 - RNA, 19 nt, Artificial Sequence
  Description of Artificial Sequence: Synthetic oligonucleotide
  Sense strand starting at position 3306 of SEQ ID NO: 1564283
guggguuaauggcuugaca

SEQ ID NO: 1868536 - RNA, 19 nt, Artificial Sequence
  Description of Artificial Sequence: Synthetic oligonucleotide
  Antisense strand to SEQ ID NO: 1868535
ugucaagccauuaacccac

SEQ ID NO: 1868537 - RNA, 19 nt, Artificial Sequence
  Description of Artificial Sequence: Synthetic oligonucleotide
  Sense strand starting at position 3778 of SEQ ID NO: 1564283
guguucuaggaagagucua

SEQ ID NO: 1868538 - RNA, 19 nt, Artificial Sequence
  Description of Artificial Sequence: Synthetic oligonucleotide
  Antisense strand to SEQ ID NO: 1868537
uagacucuuccuagaacac

SEQ ID NO: 1868539 - RNA, 19 nt, Artificial Sequence
  Description of Artificial Sequence: Synthetic oligonucleotide
  Sense strand starting at position 3976 of SEQ ID NO: 1564283
ggaguugggccucaggaau

SEQ ID NO: 1868540 - RNA, 19 nt, Artificial Sequence
  Description of Artificial Sequence: Synthetic oligonucleotide
  Antisense strand to SEQ ID NO: 1868539
auuccugaggcccaacucc

SEQ ID NO: 1868541 - RNA, 19 nt, Artificial Sequence
  Description of Artificial Sequence: Synthetic oligonucleotide
  Sense strand starting at position 82 of SEQ ID NO: 1564284
guagacagucuguaaguga

SEQ ID NO: 1868542 - RNA, 19 nt, Artificial Sequence
  Description of Artificial Sequence: Synthetic oligonucleotide
  Antisense strand to SEQ ID NO: 1868541
ucacuuacagacugucuac

SEQ ID NO: 1868543 - RNA, 19 nt, Artificial Sequence
  Description of Artificial Sequence: Synthetic oligonucleotide
  Sense strand starting at position 212 of SEQ ID NO: 1564284
ugggucuauggugguagaa

SEQ ID NO: 1868544 - RNA, 19 nt, Artificial Sequence
  Description of Artificial Sequence: Synthetic oligonucleotide
  Antisense strand to SEQ ID NO: 1868543
uucuaccaccauagaccca

SEQ ID NO: 1868545 - RNA, 19 nt, Artificial Sequence
  Description of Artificial Sequence: Synthetic oligonucleotide
  Sense strand starting at position 241 of SEQ ID NO: 1564284
aggcuugacaugugacauc

SEQ ID NO: 1868546 - RNA, 19 nt, Artificial Sequence
  Description of Artificial Sequence: Synthetic oligonucleotide
  Antisense strand to SEQ ID NO: 1868545
gaugucacaugucaagccu

SEQ ID NO: 1868547 - RNA, 19 nt, Artificial Sequence
  Description of Artificial Sequence: Synthetic oligonucleotide
  Sense strand starting at position 265 of SEQ ID NO: 1564284
gcaggccaccuguaaagau

SEQ ID NO: 1868548 - RNA, 19 nt, Artificial Sequence
  Description of Artificial Sequence: Synthetic oligonucleotide
  Antisense strand to SEQ ID NO: 1868547
aucuuuacagguggccugc

SEQ ID NO: 1868549 - RNA, 19 nt, Artificial Sequence
  Description of Artificial Sequence: Synthetic oligonucleotide
  Sense strand starting at position 415 of SEQ ID NO: 1564284
cuaaauguucugcauggau

SEQ ID NO: 1868550 - RNA, 19 nt, Artificial Sequence
  Description of Artificial Sequence: Synthetic oligonucleotide
  Antisense strand to SEQ ID NO: 1868549
auccaugcagaacauuuag

SEQ ID NO: 1868551 - RNA, 19 nt, Artificial Sequence
  Description of Artificial Sequence: Synthetic oligonucleotide
  Sense strand starting at position 547 of SEQ ID NO: 1564284
uacauuugugcuugucaga

SEQ ID NO: 1868552 - RNA, 19 nt, Artificial Sequence
  Description of Artificial Sequence: Synthetic oligonucleotide
  Antisense strand to SEQ ID NO: 1868551
ucugacaagcacaaaugua

SEQ ID NO: 1868553 - RNA, 19 nt, Artificial Sequence
  Description of Artificial Sequence: Synthetic oligonucleotide
  Sense strand starting at position 554 of SEQ ID NO: 1564284
gugcuugucagagaggaag

SEQ ID NO: 1868554 - RNA, 19 nt, Artificial Sequence
  Description of Artificial Sequence: Synthetic oligonucleotide
  Antisense strand to SEQ ID NO: 1868553
cuuccucucugacaagcac

SEQ ID NO: 1868555 - RNA, 19 nt, Artificial Sequence
  Description of Artificial Sequence: Synthetic oligonucleotide
  Sense strand starting at position 556 of SEQ ID NO: 1564284
gcuugucagagaggaagaa

SEQ ID NO: 1868556 - RNA, 19 nt, Artificial Sequence
  Description of Artificial Sequence: Synthetic oligonucleotide
  Antisense strand to SEQ ID NO: 1868555
uucuuccucucugacaagc

SEQ ID NO: 1868557 - RNA, 19 nt, Artificial Sequence
  Description of Artificial Sequence: Synthetic oligonucleotide
  Sense strand starting at position 594 of SEQ ID NO: 1564284
uggguaagugccuggacaa

SEQ ID NO: 1868558 - RNA, 19 nt, Artificial Sequence
  Description of Artificial Sequence: Synthetic oligonucleotide
  Antisense strand to SEQ ID NO: 1868557
uuguccaggcacuuaccca

SEQ ID NO: 1868559 - RNA, 19 nt, Artificial Sequence
  Description of Artificial Sequence: Synthetic oligonucleotide
  Sense strand starting at position 595 of SEQ ID NO: 1564284
ggguaagugccuggacaau

SEQ ID NO: 1868560 - RNA, 19 nt, Artificial Sequence
  Description of Artificial Sequence: Synthetic oligonucleotide
  Antisense strand to SEQ ID NO: 1868559
auuguccaggcacuuaccc

SEQ ID NO: 1868561 - RNA, 19 nt, Artificial Sequence
  Description of Artificial Sequence: Synthetic oligonucleotide
  Sense strand starting at position 601 of SEQ ID NO: 1564284
gugccuggacaauacaauu

SEQ ID NO: 1868562 - RNA, 19 nt, Artificial Sequence
  Description of Artificial Sequence: Synthetic oligonucleotide
  Antisense strand to SEQ ID NO: 1868561
aauuguauuguccaggcac

SEQ ID NO: 1868563 - RNA, 19 nt, Artificial Sequence
  Description of Artificial Sequence: Synthetic oligonucleotide
  Sense strand starting at position 628 of SEQ ID NO: 1564284
aaguguucccaagauugau

SEQ ID NO: 1868564 - RNA, 19 nt, Artificial Sequence
  Description of Artificial Sequence: Synthetic oligonucleotide
  Antisense strand to SEQ ID NO: 1868563
aucaaucuugggaacacuu

SEQ ID NO: 1868565 - RNA, 19 nt, Artificial Sequence
  Description of Artificial Sequence: Synthetic oligonucleotide
  Sense strand starting at position 789 of SEQ ID NO: 1564284
ucuguugagguggaaguua

SEQ ID NO: 1868566 - RNA, 19 nt, Artificial Sequence
  Description of Artificial Sequence: Synthetic oligonucleotide
  Antisense strand to SEQ ID NO: 1868565
uaacuuccaccucaacaga

SEQ ID NO: 1868567 - RNA, 19 nt, Artificial Sequence
  Description of Artificial Sequence: Synthetic oligonucleotide
  Sense strand starting at position 943 of SEQ ID NO: 1564284
cauguuugugaauauguuu

SEQ ID NO: 1868568 - RNA, 19 nt, Artificial Sequence
  Description of Artificial Sequence: Synthetic oligonucleotide
  Antisense strand to SEQ ID NO: 1868567
aaacauauucacaaacaug

SEQ ID NO: 1868569 - RNA, 19 nt, Artificial Sequence
  Description of Artificial Sequence: Synthetic oligonucleotide
  Sense strand starting at position 948 of SEQ ID NO: 1564284
uugugaauauguuucucag

SEQ ID NO: 1868570 - RNA, 19 nt, Artificial Sequence
  Description of Artificial Sequence: Synthetic oligonucleotide
  Antisense strand to SEQ ID NO: 1868569
cugagaaacauauucacaa

SEQ ID NO: 1868571 - RNA, 19 nt, Artificial Sequence
  Description of Artificial Sequence: Synthetic oligonucleotide
  Sense strand starting at position 1000 of SEQ ID NO: 1564284
aguggagucuguucauaug

SEQ ID NO: 1868572 - RNA, 19 nt, Artificial Sequence
  Description of Artificial Sequence: Synthetic oligonucleotide
  Antisense strand to SEQ ID NO: 1868571
cauaugaacagacuccacu

SEQ ID NO: 1868573 - RNA, 19 nt, Artificial Sequence
  Description of Artificial Sequence: Synthetic oligonucleotide
  Sense strand starting at position 1018 of SEQ ID NO: 1564284
ggguacuacauacgugaca

SEQ ID NO: 1868574 - RNA, 19 nt, Artificial Sequence
  Description of Artificial Sequence: Synthetic oligonucleotide
  Antisense strand to SEQ ID NO: 1868573
ugucacguauguaguaccc

SEQ ID NO: 1868575 - RNA, 19 nt, Artificial Sequence
  Description of Artificial Sequence: Synthetic oligonucleotide
  Sense strand starting at position 1020 of SEQ ID NO: 1564284
guacuacauacgugacaga

SEQ ID NO: 1868576 - RNA, 19 nt, Artificial Sequence
  Description of Artificial Sequence: Synthetic oligonucleotide
  Antisense strand to SEQ ID NO: 1868575
ucugucacguauguaguac

SEQ ID NO: 1868577 - RNA, 19 nt, Artificial Sequence
  Description of Artificial Sequence: Synthetic oligonucleotide
  Sense strand starting at position 1021 of SEQ ID NO: 1564284
uacuacauacgugacagau

SEQ ID NO: 1868578 - RNA, 19 nt, Artificial Sequence
  Description of Artificial Sequence: Synthetic oligonucleotide
  Antisense strand to SEQ ID NO: 1868577
aucugucacguauguagua

SEQ ID NO: 1868579 - RNA, 19 nt, Artificial Sequence
  Description of Artificial Sequence: Synthetic oligonucleotide
  Sense strand starting at position 1031 of SEQ ID NO: 1564284
gugacagaugcaugacuuu

SEQ ID NO: 1868580 - RNA, 19 nt, Artificial Sequence
  Description of Artificial Sequence: Synthetic oligonucleotide
  Antisense strand to SEQ ID NO: 1868579
aaagucaugcaucugucac

SEQ ID NO: 1868581 - RNA, 19 nt, Artificial Sequence
  Description of Artificial Sequence: Synthetic oligonucleotide
  Sense strand starting at position 1084 of SEQ ID NO: 1564284
aaacgaaacgcugguagau

SEQ ID NO: 1868582 - RNA, 19 nt, Artificial Sequence
  Description of Artificial Sequence: Synthetic oligonucleotide
  Antisense strand to SEQ ID NO: 1868581
aucuaccagcguuucguuu

SEQ ID NO: 1868583 - RNA, 19 nt, Artificial Sequence
  Description of Artificial Sequence: Synthetic oligonucleotide
  Sense strand starting at position 1543 of SEQ ID NO: 1564284
cgggcucacgcucuuguaa

SEQ ID NO: 1868584 - RNA, 19 nt, Artificial Sequence
  Description of Artificial Sequence: Synthetic oligonucleotide
  Antisense strand to SEQ ID NO: 1868583
uuacaagagcgugagcccg

SEQ ID NO: 1868585 - RNA, 19 nt, Artificial Sequence
  Description of Artificial Sequence: Synthetic oligonucleotide
  Sense strand starting at position 1808 of SEQ ID NO: 1564284
cagagacuucugugaauga

SEQ ID NO: 1868586 - RNA, 19 nt, Artificial Sequence
  Description of Artificial Sequence: Synthetic oligonucleotide
  Antisense strand to SEQ ID NO: 1868585
ucauucacagaagucucug

SEQ ID NO: 1868587 - RNA, 19 nt, Artificial Sequence
  Description of Artificial Sequence: Synthetic oligonucleotide
  Sense strand starting at position 2042 of SEQ ID NO: 1564284
cggccugagcuuuaggaca

SEQ ID NO: 1868588 - RNA, 19 nt, Artificial Sequence
  Description of Artificial Sequence: Synthetic oligonucleotide
  Antisense strand to SEQ ID NO: 1868587
uguccuaaagcucaggccg

SEQ ID NO: 1868589 - RNA, 19 nt, Artificial Sequence
  Description of Artificial Sequence: Synthetic oligonucleotide
  Sense strand starting at position 2558 of SEQ ID NO: 1564284
uguuuaaaggucuggguua

SEQ ID NO: 1868590 - RNA, 19 nt, Artificial Sequence
  Description of Artificial Sequence: Synthetic oligonucleotide
  Antisense strand to SEQ ID NO: 1868589
uaacccagaccuuuaaaca

SEQ ID NO: 1868591 - RNA, 19 nt, Artificial Sequence
  Description of Artificial Sequence: Synthetic oligonucleotide
  Sense strand starting at position 2777 of SEQ ID NO: 1564284
aggcaaaccucuuccugaa

SEQ ID NO: 1868592 - RNA, 19 nt, Artificial Sequence
  Description of Artificial Sequence: Synthetic oligonucleotide
  Antisense strand to SEQ ID NO: 1868591
uucaggaagagguuugccu

SEQ ID NO: 1868593 - RNA, 19 nt, Artificial Sequence
  Description of Artificial Sequence: Synthetic oligonucleotide
  Sense strand starting at position 3200 of SEQ ID NO: 1564284
caaugugaacacugaguca

SEQ ID NO: 1868594 - RNA, 19 nt, Artificial Sequence
  Description of Artificial Sequence: Synthetic oligonucleotide
  Antisense strand to SEQ ID NO: 1868593
ugacucaguguucacauug

SEQ ID NO: 1868595 - RNA, 19 nt, Artificial Sequence
  Description of Artificial Sequence: Synthetic oligonucleotide
  Sense strand starting at position 3212 of SEQ ID NO: 1564284
ugagucauaguauauauca

SEQ ID NO: 1868596 - RNA, 19 nt, Artificial Sequence
  Description of Artificial Sequence: Synthetic oligonucleotide
  Antisense strand to SEQ ID NO: 1868595
ugauauauacuaugacuca

SEQ ID NO: 1868597 - RNA, 19 nt, Artificial Sequence
  Description of Artificial Sequence: Synthetic oligonucleotide
  Sense strand starting at position 3309 of SEQ ID NO: 1564284
acuccugaugcagaguaga

SEQ ID NO: 1868598 - RNA, 19 nt, Artificial Sequence
  Description of Artificial Sequence: Synthetic oligonucleotide
  Antisense strand to SEQ ID NO: 1868597
ucuacucugcaucaggagu

SEQ ID NO: 1868599 - RNA, 19 nt, Artificial Sequence
  Description of Artificial Sequence: Synthetic oligonucleotide
  Sense strand starting at position 3435 of SEQ ID NO: 1564284
augccauaggugcauuaua

SEQ ID NO: 1868600 - RNA, 19 nt, Artificial Sequence
  Description of Artificial Sequence: Synthetic oligonucleotide
  Antisense strand to SEQ ID NO: 1868599
uauaaugcaccuauggcau

SEQ ID NO: 1868601 - RNA, 19 nt, Artificial Sequence
  Description of Artificial Sequence: Synthetic oligonucleotide
  Sense strand starting at position 3444 of SEQ ID NO: 1564284
gugcauuauagcgcuagau

SEQ ID NO: 1868602 - RNA, 19 nt, Artificial Sequence
  Description of Artificial Sequence: Synthetic oligonucleotide
  Antisense strand to SEQ ID NO: 1868601
aucuagcgcuauaaugcac

SEQ ID NO: 1868603 - RNA, 19 nt, Artificial Sequence
  Description of Artificial Sequence: Synthetic oligonucleotide
  Sense strand starting at position 3457 of SEQ ID NO: 1564284
cuagauugugcugggagaa

SEQ ID NO: 1868604 - RNA, 19 nt, Artificial Sequence
  Description of Artificial Sequence: Synthetic oligonucleotide
  Antisense strand to SEQ ID NO: 1868603
uucucccagcacaaucuag

SEQ ID NO: 1868605 - RNA, 19 nt, Artificial Sequence
  Description of Artificial Sequence: Synthetic oligonucleotide
  Sense strand starting at position 3458 of SEQ ID NO: 1564284
uagauugugcugggagaag

SEQ ID NO: 1868606 - RNA, 19 nt, Artificial Sequence
  Description of Artificial Sequence: Synthetic oligonucleotide
  Antisense strand to SEQ ID NO: 1868605
cuucucccagcacaaucua

SEQ ID NO: 1868607 - RNA, 19 nt, Artificial Sequence
  Description of Artificial Sequence: Synthetic oligonucleotide
  Sense strand starting at position 3777 of SEQ ID NO: 1564284
uugguuuagauucgaccau

SEQ ID NO: 1868608 - RNA, 19 nt, Artificial Sequence
  Description of Artificial Sequence: Synthetic oligonucleotide
  Antisense strand to SEQ ID NO: 1868607
auggucgaaucuaaaccaa

SEQ ID NO: 1868609 - RNA, 19 nt, Artificial Sequence
  Description of Artificial Sequence: Synthetic oligonucleotide
  Sense strand starting at position 3781 of SEQ ID NO: 1564284
uuuagauucgaccauaucu

SEQ ID NO: 1868610 - RNA, 19 nt, Artificial Sequence
  Description of Artificial Sequence: Synthetic oligonucleotide
  Antisense strand to SEQ ID NO: 1868609
agauauggucgaaucuaaa

SEQ ID NO: 1868611 - RNA, 19 nt, Artificial Sequence
  Description of Artificial Sequence: Synthetic oligonucleotide
  Sense strand starting at position 3820 of SEQ ID NO: 1564284
gagggaaagugcuuuggaa

SEQ ID NO: 1868612 - RNA, 19 nt, Artificial Sequence
  Description of Artificial Sequence: Synthetic oligonucleotide
  Antisense strand to SEQ ID NO: 1868611
uuccaaagcacuuucccuc

SEQ ID NO: 1868613 - RNA, 19 nt, Artificial Sequence
  Description of Artificial Sequence: Synthetic oligonucleotide
  Sense strand starting at position 3822 of SEQ ID NO: 1564284
gggaaagugcuuuggaauu

SEQ ID NO: 1868614 - RNA, 19 nt, Artificial Sequence
  Description of Artificial Sequence: Synthetic oligonucleotide
  Antisense strand to SEQ ID NO: 1868613
aauuccaaagcacuuuccc

SEQ ID NO: 1868615 - RNA, 19 nt, Artificial Sequence
  Description of Artificial Sequence: Synthetic oligonucleotide
  Sense strand starting at position 3828 of SEQ ID NO: 1564284
gugcuuuggaauuauagac

SEQ ID NO: 1868616 - RNA, 19 nt, Artificial Sequence
  Description of Artificial Sequence: Synthetic oligonucleotide
  Antisense strand to SEQ ID NO: 1868615
gucuauaauuccaaagcac

SEQ ID NO: 1868617 - RNA, 19 nt, Artificial Sequence
  Description of Artificial Sequence: Synthetic oligonucleotide
  Sense strand starting at position 3952 of SEQ ID NO: 1564284
aaugcugagucagucauuu

SEQ ID NO: 1868618 - RNA, 19 nt, Artificial Sequence
  Description of Artificial Sequence: Synthetic oligonucleotide
  Antisense strand to SEQ ID NO: 1868617
aaaugacugacucagcauu

SEQ ID NO: 1868619 - RNA, 19 nt, Artificial Sequence
  Description of Artificial Sequence: Synthetic oligonucleotide
  Sense strand starting at position 3956 of SEQ ID NO: 1564284
cugagucagucauuugcua

SEQ ID NO: 1868620 - RNA, 19 nt, Artificial Sequence
  Description of Artificial Sequence: Synthetic oligonucleotide
  Antisense strand to SEQ ID NO: 1868619
uagcaaaugacugacucag

SEQ ID NO: 1868621 - RNA, 19 nt, Artificial Sequence
  Description of Artificial Sequence: Synthetic oligonucleotide
  Sense strand starting at position 32 of SEQ ID NO: 1564285
aguuuaaaggguuaaaguu

SEQ ID NO: 1868622 - RNA, 19 nt, Artificial Sequence
  Description of Artificial Sequence: Synthetic oligonucleotide
  Antisense strand to SEQ ID NO: 1868621
aacuuuaacccuuuaaacu

SEQ ID NO: 1868623 - RNA, 19 nt, Artificial Sequence
  Description of Artificial Sequence: Synthetic oligonucleotide
  Sense strand starting at position 38 of SEQ ID NO: 1564285
aaggguuaaaguuagaugu

SEQ ID NO: 1868624 - RNA, 19 nt, Artificial Sequence
  Description of Artificial Sequence: Synthetic oligonucleotide
  Antisense strand to SEQ ID NO: 1868623
acaucuaacuuuaacccuu

SEQ ID NO: 1868625 - RNA, 19 nt, Artificial Sequence
  Description of Artificial Sequence: Synthetic oligonucleotide
  Sense strand starting at position 42 of SEQ ID NO: 1564285
guuaaaguuagauguauga

SEQ ID NO: 1868626 - RNA, 19 nt, Artificial Sequence
  Description of Artificial Sequence: Synthetic oligonucleotide
  Antisense strand to SEQ ID NO: 1868625
ucauacaucuaacuuuaac

SEQ ID NO: 1868627 - RNA, 19 nt, Artificial Sequence
  Description of Artificial Sequence: Synthetic oligonucleotide
  Sense strand starting at position 46 of SEQ ID NO: 1564285
aaguuagauguaugacaca

SEQ ID NO: 1868628 - RNA, 19 nt, Artificial Sequence
  Description of Artificial Sequence: Synthetic oligonucleotide
  Antisense strand to SEQ ID NO: 1868627
ugugucauacaucuaacuu

SEQ ID NO: 1868629 - RNA, 19 nt, Artificial Sequence
  Description of Artificial Sequence: Synthetic oligonucleotide
  Sense strand starting at position 188 of SEQ ID NO: 1564285
gcgagaucuaaaggagagu

SEQ ID NO: 1868630 - RNA, 19 nt, Artificial Sequence
  Description of Artificial Sequence: Synthetic oligonucleotide
  Antisense strand to SEQ ID NO: 1868629
acucuccuuuagaucucgc

SEQ ID NO: 1868631 - RNA, 19 nt, Artificial Sequence
  Description of Artificial Sequence: Synthetic oligonucleotide
  Sense strand starting at position 201 of SEQ ID NO: 1564285
gagaguuuauagucucuau

SEQ ID NO: 1868632 - RNA, 19 nt, Artificial Sequence
  Description of Artificial Sequence: Synthetic oligonucleotide
  Antisense strand to SEQ ID NO: 1868631
auagagacuauaaacucuc

SEQ ID NO: 1868633 - RNA, 19 nt, Artificial Sequence
  Description of Artificial Sequence: Synthetic oligonucleotide
  Sense strand starting at position 246 of SEQ ID NO: 1564285
caagcuagucaugguuaag

SEQ ID NO: 1868634 - RNA, 19 nt, Artificial Sequence
  Description of Artificial Sequence: Synthetic oligonucleotide
  Antisense strand to SEQ ID NO: 1868633
cuuaaccaugacuagcuug

SEQ ID NO: 1868635 - RNA, 19 nt, Artificial Sequence
  Description of Artificial Sequence: Synthetic oligonucleotide
  Sense strand starting at position 249 of SEQ ID NO: 1564285
gcuagucaugguuaaggag

SEQ ID NO: 1868636 - RNA, 19 nt, Artificial Sequence
  Description of Artificial Sequence: Synthetic oligonucleotide
  Antisense strand to SEQ ID NO: 1868635
cuccuuaaccaugacuagc

SEQ ID NO: 1868637 - RNA, 19 nt, Artificial Sequence
  Description of Artificial Sequence: Synthetic oligonucleotide
  Sense strand starting at position 264 of SEQ ID NO: 1564285
ggaguccuuaccuaagggu

SEQ ID NO: 1868638 - RNA, 19 nt, Artificial Sequence
  Description of Artificial Sequence: Synthetic oligonucleotide
  Antisense strand to SEQ ID NO: 1868637
acccuuagguaaggacucc

SEQ ID NO: 1868639 - RNA, 19 nt, Artificial Sequence
  Description of Artificial Sequence: Synthetic oligonucleotide
  Sense strand starting at position 297 of SEQ ID NO: 1564285
ggguuaaguaccugcugga

SEQ ID NO: 1868640 - RNA, 19 nt, Artificial Sequence
  Description of Artificial Sequence: Synthetic oligonucleotide
  Antisense strand to SEQ ID NO: 1868639
uccagcagguacuuaaccc

SEQ ID NO: 1868641 - RNA, 19 nt, Artificial Sequence
  Description of Artificial Sequence: Synthetic oligonucleotide
  Sense strand starting at position 310 of SEQ ID NO: 1564285
gcuggaaaguuuccuaauc

SEQ ID NO: 1868642 - RNA, 19 nt, Artificial Sequence
  Description of Artificial Sequence: Synthetic oligonucleotide
  Antisense strand to SEQ ID NO: 1868641
gauuaggaaacuuuccagc

SEQ ID NO: 1868643 - RNA, 19 nt, Artificial Sequence
  Description of Artificial Sequence: Synthetic oligonucleotide
  Sense strand starting at position 311 of SEQ ID NO: 1564285
cuggaaaguuuccuaauca

SEQ ID NO: 1868644 - RNA, 19 nt, Artificial Sequence
  Description of Artificial Sequence: Synthetic oligonucleotide
  Antisense strand to SEQ ID NO: 1868643
ugauuaggaaacuuuccag

SEQ ID NO: 1868645 - RNA, 19 nt, Artificial Sequence
  Description of Artificial Sequence: Synthetic oligonucleotide
  Sense strand starting at position 367 of SEQ ID NO: 1564285
uacaaacguuaaguagauu

SEQ ID NO: 1868646 - RNA, 19 nt, Artificial Sequence
  Description of Artificial Sequence: Synthetic oligonucleotide
  Antisense strand to SEQ ID NO: 1868645
aaucuacuuaacguuugua

SEQ ID NO: 1868647 - RNA, 19 nt, Artificial Sequence
  Description of Artificial Sequence: Synthetic oligonucleotide
  Sense strand starting at position 616 of SEQ ID NO: 1564285
caaauucucguguaaguuc

SEQ ID NO: 1868648 - RNA, 19 nt, Artificial Sequence
  Description of Artificial Sequence: Synthetic oligonucleotide
  Antisense strand to SEQ ID NO: 1868647
gaacuuacacgagaauuug

SEQ ID NO: 1868649 - RNA, 19 nt, Artificial Sequence
  Description of Artificial Sequence: Synthetic oligonucleotide
  Sense strand starting at position 625 of SEQ ID NO: 1564285
guguaaguucuagucgcua

SEQ ID NO: 1868650 - RNA, 19 nt, Artificial Sequence
  Description of Artificial Sequence: Synthetic oligonucleotide
  Antisense strand to SEQ ID NO: 1868649
uagcgacuagaacuuacac

SEQ ID NO: 1868651 - RNA, 19 nt, Artificial Sequence
  Description of Artificial Sequence: Synthetic oligonucleotide
  Sense strand starting at position 630 of SEQ ID NO: 1564285
aguucuagucgcuacagaa

SEQ ID NO: 1868652 - RNA, 19 nt, Artificial Sequence
  Description of Artificial Sequence: Synthetic oligonucleotide
  Antisense strand to SEQ ID NO: 1868651
uucuguagcgacuagaacu

SEQ ID NO: 1868653 - RNA, 19 nt, Artificial Sequence
  Description of Artificial Sequence: Synthetic oligonucleotide
  Sense strand starting at position 797 of SEQ ID NO: 1564285
ugcuaauauuugcagaaac

SEQ ID NO: 1868654 - RNA, 19 nt, Artificial Sequence
  Description of Artificial Sequence: Synthetic oligonucleotide
  Antisense strand to SEQ ID NO: 1868653
guuucugcaaauauuagca

SEQ ID NO: 1868655 - RNA, 19 nt, Artificial Sequence
  Description of Artificial Sequence: Synthetic oligonucleotide
  Sense strand starting at position 830 of SEQ ID NO: 1564285
agguaauagguccaagcua

SEQ ID NO: 1868656 - RNA, 19 nt, Artificial Sequence
  Description of Artificial Sequence: Synthetic oligonucleotide
  Antisense strand to SEQ ID NO: 1868655
uagcuuggaccuauuaccu

SEQ ID NO: 1868657 - RNA, 19 nt, Artificial Sequence
  Description of Artificial Sequence: Synthetic oligonucleotide
  Sense strand starting at position 886 of SEQ ID NO: 1564285
cggcuuuggcccucugcaa

SEQ ID NO: 1868658 - RNA, 19 nt, Artificial Sequence
  Description of Artificial Sequence: Synthetic oligonucleotide
  Antisense strand to SEQ ID NO: 1868657
uugcagagggccaaagccg

SEQ ID NO: 1868659 - RNA, 19 nt, Artificial Sequence
  Description of Artificial Sequence: Synthetic oligonucleotide
  Sense strand starting at position 972 of SEQ ID NO: 1564285
ggagaaacugcggguuauc

SEQ ID NO: 1868660 - RNA, 19 nt, Artificial Sequence
  Description of Artificial Sequence: Synthetic oligonucleotide
  Antisense strand to SEQ ID NO: 1868659
gauaacccgcaguuucucc

SEQ ID NO: 1868661 - RNA, 19 nt, Artificial Sequence
  Description of Artificial Sequence: Synthetic oligonucleotide
  Sense strand starting at position 1081 of SEQ ID NO: 1564285
caguaauggcguuuggugu

SEQ ID NO: 1868662 - RNA, 19 nt, Artificial Sequence
  Description of Artificial Sequence: Synthetic oligonucleotide
  Antisense strand to SEQ ID NO: 1868661
acaccaaacgccauuacug

SEQ ID NO: 1868663 - RNA, 19 nt, Artificial Sequence
  Description of Artificial Sequence: Synthetic oligonucleotide
  Sense strand starting at position 1089 of SEQ ID NO: 1564285
gcguuuggugucaagugga

SEQ ID NO: 1868664 - RNA, 19 nt, Artificial Sequence
  Description of Artificial Sequence: Synthetic oligonucleotide
  Antisense strand to SEQ ID NO: 1868663
uccacuugacaccaaacgc

SEQ ID NO: 1868665 - RNA, 19 nt, Artificial Sequence
  Description of Artificial Sequence: Synthetic oligonucleotide
  Sense strand starting at position 2533 of SEQ ID NO: 1564285
aagauuguucgcgcaguac

SEQ ID NO: 1868666 - RNA, 19 nt, Artificial Sequence
  Description of Artificial Sequence: Synthetic oligonucleotide
  Antisense strand to SEQ ID NO: 1868665
guacugcgcgaacaaucuu

SEQ ID NO: 1868667 - RNA, 19 nt, Artificial Sequence
  Description of Artificial Sequence: Synthetic oligonucleotide
  Sense strand starting at position 2829 of SEQ ID NO: 1564285
cgacaagaacccggaugau

SEQ ID NO: 1868668 - RNA, 19 nt, Artificial Sequence
  Description of Artificial Sequence: Synthetic oligonucleotide
  Antisense strand to SEQ ID NO: 1868667
aucauccggguucuugucg

SEQ ID NO: 1868669 - RNA, 19 nt, Artificial Sequence
  Description of Artificial Sequence: Synthetic oligonucleotide
  Sense strand starting at position 3129 of SEQ ID NO: 1564285
cgagggaggugcucugaga

SEQ ID NO: 1868670 - RNA, 19 nt, Artificial Sequence
  Description of Artificial Sequence: Synthetic oligonucleotide
  Antisense strand to SEQ ID NO: 1868669
ucucagagcaccucccucg

SEQ ID NO: 1868671 - RNA, 19 nt, Artificial Sequence
  Description of Artificial Sequence: Synthetic oligonucleotide
  Sense strand starting at position 3185 of SEQ ID NO: 1564285
agcguuuaggcguccucaa

SEQ ID NO: 1868672 - RNA, 19 nt, Artificial Sequence
  Description of Artificial Sequence: Synthetic oligonucleotide
  Antisense strand to SEQ ID NO: 1868671
uugaggacgccuaaacgcu

SEQ ID NO: 1868673 - RNA, 19 nt, Artificial Sequence
  Description of Artificial Sequence: Synthetic oligonucleotide
  Sense strand starting at position 3186 of SEQ ID NO: 1564285
gcguuuaggcguccucaaa

SEQ ID NO: 1868674 - RNA, 19 nt, Artificial Sequence
  Description of Artificial Sequence: Synthetic oligonucleotide
  Antisense strand to SEQ ID NO: 1868673
uuugaggacgccuaaacgc

SEQ ID NO: 1868675 - RNA, 19 nt, Artificial Sequence
  Description of Artificial Sequence: Synthetic oligonucleotide
  Sense strand starting at position 3205 of SEQ ID NO: 1564285
gcguuuaggcguccucaca

SEQ ID NO: 1868676 - RNA, 19 nt, Artificial Sequence
  Description of Artificial Sequence: Synthetic oligonucleotide
  Antisense strand to SEQ ID NO: 1868675
ugugaggacgccuaaacgc

SEQ ID NO: 1868677 - RNA, 19 nt, Artificial Sequence
  Description of Artificial Sequence: Synthetic oligonucleotide
  Sense strand starting at position 3317 of SEQ ID NO: 1564285
gcgaauaggccguacuuga

SEQ ID NO: 1868678 - RNA, 19 nt, Artificial Sequence
  Description of Artificial Sequence: Synthetic oligonucleotide
  Antisense strand to SEQ ID NO: 1868677
ucaaguacggccuauucgc

SEQ ID NO: 1868679 - RNA, 19 nt, Artificial Sequence
  Description of Artificial Sequence: Synthetic oligonucleotide
  Sense strand starting at position 3358 of SEQ ID NO: 1564285
gccagaucaucagcacaau

SEQ ID NO: 1868680 - RNA, 19 nt, Artificial Sequence
  Description of Artificial Sequence: Synthetic oligonucleotide
  Antisense strand to SEQ ID NO: 1868679
auugugcugaugaucuggc

SEQ ID NO: 1868681 - RNA, 19 nt, Artificial Sequence
  Description of Artificial Sequence: Synthetic oligonucleotide
  Sense strand starting at position 3379 of SEQ ID NO: 1564285
gguguuaggacccggaaga

SEQ ID NO: 1868682 - RNA, 19 nt, Artificial Sequence
  Description of Artificial Sequence: Synthetic oligonucleotide
  Antisense strand to SEQ ID NO: 1868681
ucuuccggguccuaacacc

SEQ ID NO: 1868683 - RNA, 19 nt, Artificial Sequence
  Description of Artificial Sequence: Synthetic oligonucleotide
  Sense strand starting at position 3380 of SEQ ID NO: 1564285
guguuaggacccggaagaa

SEQ ID NO: 1868684 - RNA, 19 nt, Artificial Sequence
  Description of Artificial Sequence: Synthetic oligonucleotide
  Antisense strand to SEQ ID NO: 1868683
uucuuccggguccuaacac

SEQ ID NO: 1868685 - RNA, 19 nt, Artificial Sequence
  Description of Artificial Sequence: Synthetic oligonucleotide
  Sense strand starting at position 3414 of SEQ ID NO: 1564285
cgcugugucauggacuauu

SEQ ID NO: 1868686 - RNA, 19 nt, Artificial Sequence
  Description of Artificial Sequence: Synthetic oligonucleotide
  Antisense strand to SEQ ID NO: 1868685
aauaguccaugacacagcg

SEQ ID NO: 1868687 - RNA, 19 nt, Artificial Sequence
  Description of Artificial Sequence: Synthetic oligonucleotide
  Sense strand starting at position 3514 of SEQ ID NO: 1564285
uguacagucuaccuaggau

SEQ ID NO: 1868688 - RNA, 19 nt, Artificial Sequence
  Description of Artificial Sequence: Synthetic oligonucleotide
  Antisense strand to SEQ ID NO: 1868687
auccuagguagacuguaca

SEQ ID NO: 1868689 - RNA, 19 nt, Artificial Sequence
  Description of Artificial Sequence: Synthetic oligonucleotide
  Sense strand starting at position 3667 of SEQ ID NO: 1564285
gguugaauuuaguuaugcu

SEQ ID NO: 1868690 - RNA, 19 nt, Artificial Sequence
  Description of Artificial Sequence: Synthetic oligonucleotide
  Antisense strand to SEQ ID NO: 1868689
agcauaacuaaauucaacc

SEQ ID NO: 1868691 - RNA, 19 nt, Artificial Sequence
  Description of Artificial Sequence: Synthetic oligonucleotide
  Sense strand starting at position 3750 of SEQ ID NO: 1564285
gaaagcaaguuauugguau

SEQ ID NO: 1868692 - RNA, 19 nt, Artificial Sequence
  Description of Artificial Sequence: Synthetic oligonucleotide
  Antisense strand to SEQ ID NO: 1868691
auaccaauaacuugcuuuc

SEQ ID NO: 1868693 - RNA, 19 nt, Artificial Sequence
  Description of Artificial Sequence: Synthetic oligonucleotide
  Sense strand starting at position 3797 of SEQ ID NO: 1564285
agcacaagauuguuuacaa

SEQ ID NO: 1868694 - RNA, 19 nt, Artificial Sequence
  Description of Artificial Sequence: Synthetic oligonucleotide
  Antisense strand to SEQ ID NO: 1868693
uuguaaacaaucuugugcu

SEQ ID NO: 1868695 - RNA, 19 nt, Artificial Sequence
  Description of Artificial Sequence: Synthetic oligonucleotide
  Sense strand starting at position 3798 of SEQ ID NO: 1564285
gcacaagauuguuuacaaa

SEQ ID NO: 1868696 - RNA, 19 nt, Artificial Sequence
  Description of Artificial Sequence: Synthetic oligonucleotide
  Antisense strand to SEQ ID NO: 1868695
uuuguaaacaaucuugugc

SEQ ID NO: 1868697 - RNA, 19 nt, Artificial Sequence
  Description of Artificial Sequence: Synthetic oligonucleotide
  Sense strand starting at position 3835 of SEQ ID NO: 1564285
cuaauaggguauccaagau

SEQ ID NO: 1868698 - RNA, 19 nt, Artificial Sequence
  Description of Artificial Sequence: Synthetic oligonucleotide
  Antisense strand to SEQ ID NO: 1868697
aucuuggauacccuauuag

SEQ ID NO: 1868699 - RNA, 19 nt, Artificial Sequence
  Description of Artificial Sequence: Synthetic oligonucleotide
  Sense strand starting at position 3841 of SEQ ID NO: 1564285
ggguauccaagauguauca

SEQ ID NO: 1868700 - RNA, 19 nt, Artificial Sequence
  Description of Artificial Sequence: Synthetic oligonucleotide
  Antisense strand to SEQ ID NO: 1868699
ugauacaucuuggauaccc

SEQ ID NO: 1868701 - RNA, 19 nt, Artificial Sequence
  Description of Artificial Sequence: Synthetic oligonucleotide
  Sense strand starting at position 115 of SEQ ID NO: 1564286
cauggaaauugagucucau

SEQ ID NO: 1868702 - RNA, 19 nt, Artificial Sequence
  Description of Artificial Sequence: Synthetic oligonucleotide
  Antisense strand to SEQ ID NO: 1868701
augagacucaauuuccaug

SEQ ID NO: 1868703 - RNA, 19 nt, Artificial Sequence
  Description of Artificial Sequence: Synthetic oligonucleotide
  Sense strand starting at position 119 of SEQ ID NO: 1564286
gaaauugagucucauguaa

SEQ ID NO: 1868704 - RNA, 19 nt, Artificial Sequence
  Description of Artificial Sequence: Synthetic oligonucleotide
  Antisense strand to SEQ ID NO: 1868703
uuacaugagacucaauuuc

SEQ ID NO: 1868705 - RNA, 19 nt, Artificial Sequence
  Description of Artificial Sequence: Synthetic oligonucleotide
  Sense strand starting at position 478 of SEQ ID NO: 1564286
gcaacuugaggguagugau

SEQ ID NO: 1868706 - RNA, 19 nt, Artificial Sequence
  Description of Artificial Sequence: Synthetic oligonucleotide
  Antisense strand to SEQ ID NO: 1868705
aucacuacccucaaguugc

SEQ ID NO: 1868707 - RNA, 19 nt, Artificial Sequence
  Description of Artificial Sequence: Synthetic oligonucleotide
  Sense strand starting at position 485 of SEQ ID NO: 1564286
gaggguagugauuguaacu

SEQ ID NO: 1868708 - RNA, 19 nt, Artificial Sequence
  Description of Artificial Sequence: Synthetic oligonucleotide
  Antisense strand to SEQ ID NO: 1868707
aguuacaaucacuacccuc

SEQ ID NO: 1868709 - RNA, 19 nt, Artificial Sequence
  Description of Artificial Sequence: Synthetic oligonucleotide
  Sense strand starting at position 490 of SEQ ID NO: 1564286
uagugauuguaacuuaguu

SEQ ID NO: 1868710 - RNA, 19 nt, Artificial Sequence
  Description of Artificial Sequence: Synthetic oligonucleotide
  Antisense strand to SEQ ID NO: 1868709
aacuaaguuacaaucacua

SEQ ID NO: 1868711 - RNA, 19 nt, Artificial Sequence
  Description of Artificial Sequence: Synthetic oligonucleotide
  Sense strand starting at position 495 of SEQ ID NO: 1564286
auuguaacuuaguuuccaa

SEQ ID NO: 1868712 - RNA, 19 nt, Artificial Sequence
  Description of Artificial Sequence: Synthetic oligonucleotide
  Antisense strand to SEQ ID NO: 1868711
uuggaaacuaaguuacaau

SEQ ID NO: 1868713 - RNA, 19 nt, Artificial Sequence
  Description of Artificial Sequence: Synthetic oligonucleotide
  Sense strand starting at position 498 of SEQ ID NO: 1564286
guaacuuaguuuccaaauc

SEQ ID NO: 1868714 - RNA, 19 nt, Artificial Sequence
  Description of Artificial Sequence: Synthetic oligonucleotide
  Antisense strand to SEQ ID NO: 1868713
gauuuggaaacuaaguuac

SEQ ID NO: 1868715 - RNA, 19 nt, Artificial Sequence
  Description of Artificial Sequence: Synthetic oligonucleotide
  Sense strand starting at position 625 of SEQ ID NO: 1564286
ccaggaaugugcucucuac

SEQ ID NO: 1868716 - RNA, 19 nt, Artificial Sequence
  Description of Artificial Sequence: Synthetic oligonucleotide
  Antisense strand to SEQ ID NO: 1868715
guagagagcacauuccugg

SEQ ID NO: 1868717 - RNA, 19 nt, Artificial Sequence
  Description of Artificial Sequence: Synthetic oligonucleotide
  Sense strand starting at position 745 of SEQ ID NO: 1564286
aagccagaaggcuguuaaa

SEQ ID NO: 1868718 - RNA, 19 nt, Artificial Sequence
  Description of Artificial Sequence: Synthetic oligonucleotide
  Antisense strand to SEQ ID NO: 1868717
uuuaacagccuucuggcuu

SEQ ID NO: 1868719 - RNA, 19 nt, Artificial Sequence
  Description of Artificial Sequence: Synthetic oligonucleotide
  Sense strand starting at position 768 of SEQ ID NO: 1564286
gcaacagagaaaugugaau

SEQ ID NO: 1868720 - RNA, 19 nt, Artificial Sequence
  Description of Artificial Sequence: Synthetic oligonucleotide
  Antisense strand to SEQ ID NO: 1868719
auucacauuucucuguugc

SEQ ID NO: 1868721 - RNA, 19 nt, Artificial Sequence
  Description of Artificial Sequence: Synthetic oligonucleotide
  Sense strand starting at position 869 of SEQ ID NO: 1564286
ugaagcaaugucuaaucua

SEQ ID NO: 1868722 - RNA, 19 nt, Artificial Sequence
  Description of Artificial Sequence: Synthetic oligonucleotide
  Antisense strand to SEQ ID NO: 1868721
uagauuagacauugcuuca

SEQ ID NO: 1868723 - RNA, 19 nt, Artificial Sequence
  Description of Artificial Sequence: Synthetic oligonucleotide
  Sense strand starting at position 928 of SEQ ID NO: 1564286
agcccuaucccucagaaga

SEQ ID NO: 1868724 - RNA, 19 nt, Artificial Sequence
  Description of Artificial Sequence: Synthetic oligonucleotide
  Antisense strand to SEQ ID NO: 1868723
ucuucugagggauagggcu

SEQ ID NO: 1868725 - RNA, 19 nt, Artificial Sequence
  Description of Artificial Sequence: Synthetic oligonucleotide
  Sense strand starting at position 947 of SEQ ID NO: 1564286
uauauaaagcagcgugaau

SEQ ID NO: 1868726 - RNA, 19 nt, Artificial Sequence
  Description of Artificial Sequence: Synthetic oligonucleotide
  Antisense strand to SEQ ID NO: 1868725
auucacgcugcuuuauaua

SEQ ID NO: 1868727 - RNA, 19 nt, Artificial Sequence
  Description of Artificial Sequence: Synthetic oligonucleotide
  Sense strand starting at position 959 of SEQ ID NO: 1564286
cgugaaugccuuuggaaac

SEQ ID NO: 1868728 - RNA, 19 nt, Artificial Sequence
  Description of Artificial Sequence: Synthetic oligonucleotide
  Antisense strand to SEQ ID NO: 1868727
guuuccaaaggcauucacg

SEQ ID NO: 1868729 - RNA, 19 nt, Artificial Sequence
  Description of Artificial Sequence: Synthetic oligonucleotide
  Sense strand starting at position 969 of SEQ ID NO: 1564286
uuuggaaacuugucaagau

SEQ ID NO: 1868730 - RNA, 19 nt, Artificial Sequence
  Description of Artificial Sequence: Synthetic oligonucleotide
  Antisense strand to SEQ ID NO: 1868729
aucuugacaaguuuccaaa

SEQ ID NO: 1868731 - RNA, 19 nt, Artificial Sequence
  Description of Artificial Sequence: Synthetic oligonucleotide
  Sense strand starting at position 970 of SEQ ID NO: 1564286
uuggaaacuugucaagaug

SEQ ID NO: 1868732 - RNA, 19 nt, Artificial Sequence
  Description of Artificial Sequence: Synthetic oligonucleotide
  Antisense strand to SEQ ID NO: 1868731
caucuugacaaguuuccaa

SEQ ID NO: 1868733 - RNA, 19 nt, Artificial Sequence
  Description of Artificial Sequence: Synthetic oligonucleotide
  Sense strand starting at position 978 of SEQ ID NO: 1564286
uugucaagaugugaaauuu

SEQ ID NO: 1868734 - RNA, 19 nt, Artificial Sequence
  Description of Artificial Sequence: Synthetic oligonucleotide
  Antisense strand to SEQ ID NO: 1868733
aaauuucacaucuugacaa

SEQ ID NO: 1868735 - RNA, 19 nt, Artificial Sequence
  Description of Artificial Sequence: Synthetic oligonucleotide
  Sense strand starting at position 986 of SEQ ID NO: 1564286
augugaaauuuagacugaa

SEQ ID NO: 1868736 - RNA, 19 nt, Artificial Sequence
  Description of Artificial Sequence: Synthetic oligonucleotide
  Antisense strand to SEQ ID NO: 1868735
uucagucuaaauuucacau

SEQ ID NO: 1868737 - RNA, 19 nt, Artificial Sequence
  Description of Artificial Sequence: Synthetic oligonucleotide
  Sense strand starting at position 1008 of SEQ ID NO: 1564286
aggcaucaccuccaagagu

SEQ ID NO: 1868738 - RNA, 19 nt, Artificial Sequence
  Description of Artificial Sequence: Synthetic oligonucleotide
  Antisense strand to SEQ ID NO: 1868737
acucuuggaggugaugccu

SEQ ID NO: 1868739 - RNA, 19 nt, Artificial Sequence
  Description of Artificial Sequence: Synthetic oligonucleotide
  Sense strand starting at position 1021 of SEQ ID NO: 1564286
aagagugaugccugacuuc

SEQ ID NO: 1868740 - RNA, 19 nt, Artificial Sequence
  Description of Artificial Sequence: Synthetic oligonucleotide
  Antisense strand to SEQ ID NO: 1868739
gaagucaggcaucacucuu

SEQ ID NO: 1868741 - RNA, 19 nt, Artificial Sequence
  Description of Artificial Sequence: Synthetic oligonucleotide
  Sense strand starting at position 1126 of SEQ ID NO: 1564286
cuagaauaauauggccaaa

SEQ ID NO: 1868742 - RNA, 19 nt, Artificial Sequence
  Description of Artificial Sequence: Synthetic oligonucleotide
  Antisense strand to SEQ ID NO: 1868741
uuuggccauauuauucuag

SEQ ID NO: 1868743 - RNA, 19 nt, Artificial Sequence
  Description of Artificial Sequence: Synthetic oligonucleotide
  Sense strand starting at position 1246 of SEQ ID NO: 1564286
guguuaucuugauccuugu

SEQ ID NO: 1868744 - RNA, 19 nt, Artificial Sequence
  Description of Artificial Sequence: Synthetic oligonucleotide
  Antisense strand to SEQ ID NO: 1868743
acaaggaucaagauaacac

SEQ ID NO: 1868745 - RNA, 19 nt, Artificial Sequence
  Description of Artificial Sequence: Synthetic oligonucleotide
  Sense strand starting at position 1255 of SEQ ID NO: 1564286
ugauccuuguucccaggaa

SEQ ID NO: 1868746 - RNA, 19 nt, Artificial Sequence
  Description of Artificial Sequence: Synthetic oligonucleotide
  Antisense strand to SEQ ID NO: 1868745
uuccugggaacaaggauca

SEQ ID NO: 1868747 - RNA, 19 nt, Artificial Sequence
  Description of Artificial Sequence: Synthetic oligonucleotide
  Sense strand starting at position 1256 of SEQ ID NO: 1564286
gauccuuguucccaggaau

SEQ ID NO: 1868748 - RNA, 19 nt, Artificial Sequence
  Description of Artificial Sequence: Synthetic oligonucleotide
  Antisense strand to SEQ ID NO: 1868747
auuccugggaacaaggauc

SEQ ID NO: 1868749 - RNA, 19 nt, Artificial Sequence
  Description of Artificial Sequence: Synthetic oligonucleotide
  Sense strand starting at position 1325 of SEQ ID NO: 1564286
uuaguaaaguaggugcuua

SEQ ID NO: 1868750 - RNA, 19 nt, Artificial Sequence
  Description of Artificial Sequence: Synthetic oligonucleotide
  Antisense strand to SEQ ID NO: 1868749
uaagcaccuacuuuacuaa

SEQ ID NO: 1868751 - RNA, 19 nt, Artificial Sequence
  Description of Artificial Sequence: Synthetic oligonucleotide
  Sense strand starting at position 1329 of SEQ ID NO: 1564286
uaaaguaggugcuuaacua

SEQ ID NO: 1868752 - RNA, 19 nt, Artificial Sequence
  Description of Artificial Sequence: Synthetic oligonucleotide
  Antisense strand to SEQ ID NO: 1868751
uaguuaagcaccuacuuua

SEQ ID NO: 1868753 - RNA, 19 nt, Artificial Sequence
  Description of Artificial Sequence: Synthetic oligonucleotide
  Sense strand starting at position 1330 of SEQ ID NO: 1564286
aaaguaggugcuuaacuaa

SEQ ID NO: 1868754 - RNA, 19 nt, Artificial Sequence
  Description of Artificial Sequence: Synthetic oligonucleotide
  Antisense strand to SEQ ID NO: 1868753
uuaguuaagcaccuacuuu

SEQ ID NO: 1868755 - RNA, 19 nt, Artificial Sequence
  Description of Artificial Sequence: Synthetic oligonucleotide
  Sense strand starting at position 1701 of SEQ ID NO: 1564286
ggaguaagcgaaugaaauu

SEQ ID NO: 1868756 - RNA, 19 nt, Artificial Sequence
  Description of Artificial Sequence: Synthetic oligonucleotide
  Antisense strand to SEQ ID NO: 1868755
aauuucauucgcuuacucc

SEQ ID NO: 1868757 - RNA, 19 nt, Artificial Sequence
  Description of Artificial Sequence: Synthetic oligonucleotide
  Sense strand starting at position 1988 of SEQ ID NO: 1564286
auuucuguuuccgucaauc

SEQ ID NO: 1868758 - RNA, 19 nt, Artificial Sequence
  Description of Artificial Sequence: Synthetic oligonucleotide
  Antisense strand to SEQ ID NO: 1868757
gauugacggaaacagaaau

SEQ ID NO: 1868759 - RNA, 19 nt, Artificial Sequence
  Description of Artificial Sequence: Synthetic oligonucleotide
  Sense strand starting at position 2349 of SEQ ID NO: 1564286
ggguuuauugaaugccuau

SEQ ID NO: 1868760 - RNA, 19 nt, Artificial Sequence
  Description of Artificial Sequence: Synthetic oligonucleotide
  Antisense strand to SEQ ID NO: 1868759
auaggcauucaauaaaccc

SEQ ID NO: 1868761 - RNA, 19 nt, Artificial Sequence
  Description of Artificial Sequence: Synthetic oligonucleotide
  Sense strand starting at position 2363 of SEQ ID NO: 1564286
ccuauuaaguggccagauu

SEQ ID NO: 1868762 - RNA, 19 nt, Artificial Sequence
  Description of Artificial Sequence: Synthetic oligonucleotide
  Antisense strand to SEQ ID NO: 1868761
aaucuggccacuuaauagg

SEQ ID NO: 1868763 - RNA, 19 nt, Artificial Sequence
  Description of Artificial Sequence: Synthetic oligonucleotide
  Sense strand starting at position 2393 of SEQ ID NO: 1564286
cggagauccgauggugaac

SEQ ID NO: 1868764 - RNA, 19 nt, Artificial Sequence
  Description of Artificial Sequence: Synthetic oligonucleotide
  Antisense strand to SEQ ID NO: 1868763
guucaccaucggaucuccg

SEQ ID NO: 1868765 - RNA, 19 nt, Artificial Sequence
  Description of Artificial Sequence: Synthetic oligonucleotide
  Sense strand starting at position 2404 of SEQ ID NO: 1564286
uggugaacauaacaaguuu

SEQ ID NO: 1868766 - RNA, 19 nt, Artificial Sequence
  Description of Artificial Sequence: Synthetic oligonucleotide
  Antisense strand to SEQ ID NO: 1868765
aaacuuguuauguucacca

SEQ ID NO: 1868767 - RNA, 19 nt, Artificial Sequence
  Description of Artificial Sequence: Synthetic oligonucleotide
  Sense strand starting at position 2443 of SEQ ID NO: 1564286
cgccuuugaucccuuguaa

SEQ ID NO: 1868768 - RNA, 19 nt, Artificial Sequence
  Description of Artificial Sequence: Synthetic oligonucleotide
  Antisense strand to SEQ ID NO: 1868767
uuacaagggaucaaaggcg

SEQ ID NO: 1868769 - RNA, 19 nt, Artificial Sequence
  Description of Artificial Sequence: Synthetic oligonucleotide
  Sense strand starting at position 2456 of SEQ ID NO: 1564286
uuguaauugcagcuuuguu

SEQ ID NO: 1868770 - RNA, 19 nt, Artificial Sequence
  Description of Artificial Sequence: Synthetic oligonucleotide
  Antisense strand to SEQ ID NO: 1868769
aacaaagcugcaauuacaa

SEQ ID NO: 1868771 - RNA, 19 nt, Artificial Sequence
  Description of Artificial Sequence: Synthetic oligonucleotide
  Sense strand starting at position 3315 of SEQ ID NO: 1564286
agaaauugcucuggacaag

SEQ ID NO: 1868772 - RNA, 19 nt, Artificial Sequence
  Description of Artificial Sequence: Synthetic oligonucleotide
  Antisense strand to SEQ ID NO: 1868771
cuuguccagagcaauuucu

SEQ ID NO: 1868773 - RNA, 19 nt, Artificial Sequence
  Description of Artificial Sequence: Synthetic oligonucleotide
  Sense strand starting at position 3380 of SEQ ID NO: 1564286
uuuggcuucccagaacuuu

SEQ ID NO: 1868774 - RNA, 19 nt, Artificial Sequence
  Description of Artificial Sequence: Synthetic oligonucleotide
  Antisense strand to SEQ ID NO: 1868773
aaaguucugggaagccaaa

SEQ ID NO: 1868775 - RNA, 19 nt, Artificial Sequence
  Description of Artificial Sequence: Synthetic oligonucleotide
  Sense strand starting at position 3389 of SEQ ID NO: 1564286
ccagaacuuuguguggcau

SEQ ID NO: 1868776 - RNA, 19 nt, Artificial Sequence
  Description of Artificial Sequence: Synthetic oligonucleotide
  Antisense strand to SEQ ID NO: 1868775
augccacacaaaguucugg

SEQ ID NO: 1868777 - RNA, 19 nt, Artificial Sequence
  Description of Artificial Sequence: Synthetic oligonucleotide
  Sense strand starting at position 3390 of SEQ ID NO: 1564286
cagaacuuuguguggcauu

SEQ ID NO: 1868778 - RNA, 19 nt, Artificial Sequence
  Description of Artificial Sequence: Synthetic oligonucleotide
  Antisense strand to SEQ ID NO: 1868777
aaugccacacaaaguucug

SEQ ID NO: 1868779 - RNA, 19 nt, Artificial Sequence
  Description of Artificial Sequence: Synthetic oligonucleotide
  Sense strand starting at position 3391 of SEQ ID NO: 1564286
agaacuuuguguggcauuu

SEQ ID NO: 1868780 - RNA, 19 nt, Artificial Sequence
  Description of Artificial Sequence: Synthetic oligonucleotide
  Antisense strand to SEQ ID NO: 1868779
aaaugccacacaaaguucu

SEQ ID NO: 1868781 - RNA, 19 nt, Artificial Sequence
  Description of Artificial Sequence: Synthetic oligonucleotide
  Sense strand starting at position 16 of SEQ ID NO: 1564287
agcucuuacgaucaaugaa

SEQ ID NO: 1868782 - RNA, 19 nt, Artificial Sequence
  Description of Artificial Sequence: Synthetic oligonucleotide
  Antisense strand to SEQ ID NO: 1868781
uucauugaucguaagagcu

SEQ ID NO: 1868783 - RNA, 19 nt, Artificial Sequence
  Description of Artificial Sequence: Synthetic oligonucleotide
  Sense strand starting at position 19 of SEQ ID NO: 1564287
ucuuacgaucaaugaacuu

SEQ ID NO: 1868784 - RNA, 19 nt, Artificial Sequence
  Description of Artificial Sequence: Synthetic oligonucleotide
  Antisense strand to SEQ ID NO: 1868783
aaguucauugaucguaaga

SEQ ID NO: 1868785 - RNA, 19 nt, Artificial Sequence
  Description of Artificial Sequence: Synthetic oligonucleotide
  Sense strand starting at position 86 of SEQ ID NO: 1564287
cacauagaugcgugaagua

SEQ ID NO: 1868786 - RNA, 19 nt, Artificial Sequence
  Description of Artificial Sequence: Synthetic oligonucleotide
  Antisense strand to SEQ ID NO: 1868785
uacuucacgcaucuaugug

SEQ ID NO: 1868787 - RNA, 19 nt, Artificial Sequence
  Description of Artificial Sequence: Synthetic oligonucleotide
  Sense strand starting at position 100 of SEQ ID NO: 1564287
aaguaucugggcugaggaa

SEQ ID NO: 1868788 - RNA, 19 nt, Artificial Sequence
  Description of Artificial Sequence: Synthetic oligonucleotide
  Antisense strand to SEQ ID NO: 1868787
uuccucagcccagauacuu

SEQ ID NO: 1868789 - RNA, 19 nt, Artificial Sequence
  Description of Artificial Sequence: Synthetic oligonucleotide
  Sense strand starting at position 148 of SEQ ID NO: 1564287
cuuaucacuguuuagcaua

SEQ ID NO: 1868790 - RNA, 19 nt, Artificial Sequence
  Description of Artificial Sequence: Synthetic oligonucleotide
  Antisense strand to SEQ ID NO: 1868789
uaugcuaaacagugauaag

SEQ ID NO: 1868791 - RNA, 19 nt, Artificial Sequence
  Description of Artificial Sequence: Synthetic oligonucleotide
  Sense strand starting at position 295 of SEQ ID NO: 1564287
gugccugguacauagaaga

SEQ ID NO: 1868792 - RNA, 19 nt, Artificial Sequence
  Description of Artificial Sequence: Synthetic oligonucleotide
  Antisense strand to SEQ ID NO: 1868791
ucuucuauguaccaggcac

SEQ ID NO: 1868793 - RNA, 19 nt, Artificial Sequence
  Description of Artificial Sequence: Synthetic oligonucleotide
  Sense strand starting at position 325 of SEQ ID NO: 1564287
auauaaguugcaugaggga

SEQ ID NO: 1868794 - RNA, 19 nt, Artificial Sequence
  Description of Artificial Sequence: Synthetic oligonucleotide
  Antisense strand to SEQ ID NO: 1868793
ucccucaugcaacuuauau

SEQ ID NO: 1868795 - RNA, 19 nt, Artificial Sequence
  Description of Artificial Sequence: Synthetic oligonucleotide
  Sense strand starting at position 397 of SEQ ID NO: 1564287
ugugucaacgaagaaguua

SEQ ID NO: 1868796 - RNA, 19 nt, Artificial Sequence
  Description of Artificial Sequence: Synthetic oligonucleotide
  Antisense strand to SEQ ID NO: 1868795
uaacuucuucguugacaca

SEQ ID NO: 1868797 - RNA, 19 nt, Artificial Sequence
  Description of Artificial Sequence: Synthetic oligonucleotide
  Sense strand starting at position 528 of SEQ ID NO: 1564287
uggagucucucuucccauu

SEQ ID NO: 1868798 - RNA, 19 nt, Artificial Sequence
  Description of Artificial Sequence: Synthetic oligonucleotide
  Antisense strand to SEQ ID NO: 1868797
aaugggaagagagacucca

SEQ ID NO: 1868799 - RNA, 19 nt, Artificial Sequence
  Description of Artificial Sequence: Synthetic oligonucleotide
  Sense strand starting at position 604 of SEQ ID NO: 1564287
ggagucgcucaaugacauu

SEQ ID NO: 1868800 - RNA, 19 nt, Artificial Sequence
  Description of Artificial Sequence: Synthetic oligonucleotide
  Antisense strand to SEQ ID NO: 1868799
aaugucauugagcgacucc

SEQ ID NO: 1868801 - RNA, 19 nt, Artificial Sequence
  Description of Artificial Sequence: Synthetic oligonucleotide
  Sense strand starting at position 651 of SEQ ID NO: 1564287
ucauauaccuugucucgau

SEQ ID NO: 1868802 - RNA, 19 nt, Artificial Sequence
  Description of Artificial Sequence: Synthetic oligonucleotide
  Antisense strand to SEQ ID NO: 1868801
aucgagacaagguauauga

SEQ ID NO: 1868803 - RNA, 19 nt, Artificial Sequence
  Description of Artificial Sequence: Synthetic oligonucleotide
  Sense strand starting at position 678 of SEQ ID NO: 1564287
accuuucugaugggacgaa

SEQ ID NO: 1868804 - RNA, 19 nt, Artificial Sequence
  Description of Artificial Sequence: Synthetic oligonucleotide
  Antisense strand to SEQ ID NO: 1868803
uucgucccaucagaaaggu

SEQ ID NO: 1868805 - RNA, 19 nt, Artificial Sequence
  Description of Artificial Sequence: Synthetic oligonucleotide
  Sense strand starting at position 848 of SEQ ID NO: 1564287
ggcucuauccuuuauagau

SEQ ID NO: 1868806 - RNA, 19 nt, Artificial Sequence
  Description of Artificial Sequence: Synthetic oligonucleotide
  Antisense strand to SEQ ID NO: 1868805
aucuauaaaggauagagcc

SEQ ID NO: 1868807 - RNA, 19 nt, Artificial Sequence
  Description of Artificial Sequence: Synthetic oligonucleotide
  Sense strand starting at position 857 of SEQ ID NO: 1564287
cuuuauagaugugugacuu

SEQ ID NO: 1868808 - RNA, 19 nt, Artificial Sequence
  Description of Artificial Sequence: Synthetic oligonucleotide
  Antisense strand to SEQ ID NO: 1868807
aagucacacaucuauaaag

SEQ ID NO: 1868809 - RNA, 19 nt, Artificial Sequence
  Description of Artificial Sequence: Synthetic oligonucleotide
  Sense strand starting at position 858 of SEQ ID NO: 1564287
uuuauagaugugugacuuu

SEQ ID NO: 1868810 - RNA, 19 nt, Artificial Sequence
  Description of Artificial Sequence: Synthetic oligonucleotide
  Antisense strand to SEQ ID NO: 1868809
aaagucacacaucuauaaa

SEQ ID NO: 1868811 - RNA, 19 nt, Artificial Sequence
  Description of Artificial Sequence: Synthetic oligonucleotide
  Sense strand starting at position 928 of SEQ ID NO: 1564287
augacaguauuaccuugua

SEQ ID NO: 1868812 - RNA, 19 nt, Artificial Sequence
  Description of Artificial Sequence: Synthetic oligonucleotide
  Antisense strand to SEQ ID NO: 1868811
uacaagguaauacugucau

SEQ ID NO: 1868813 - RNA, 19 nt, Artificial Sequence
  Description of Artificial Sequence: Synthetic oligonucleotide
  Sense strand starting at position 931 of SEQ ID NO: 1564287
acaguauuaccuuguagag

SEQ ID NO: 1868814 - RNA, 19 nt, Artificial Sequence
  Description of Artificial Sequence: Synthetic oligonucleotide
  Antisense strand to SEQ ID NO: 1868813
cucuacaagguaauacugu

SEQ ID NO: 1868815 - RNA, 19 nt, Artificial Sequence
  Description of Artificial Sequence: Synthetic oligonucleotide
  Sense strand starting at position 941 of SEQ ID NO: 1564287
cuuguagagucauuaggau

SEQ ID NO: 1868816 - RNA, 19 nt, Artificial Sequence
  Description of Artificial Sequence: Synthetic oligonucleotide
  Antisense strand to SEQ ID NO: 1868815
auccuaaugacucuacaag

SEQ ID NO: 1868817 - RNA, 19 nt, Artificial Sequence
  Description of Artificial Sequence: Synthetic oligonucleotide
  Sense strand starting at position 955 of SEQ ID NO: 1564287
aggauuaaaugagcguuua

SEQ ID NO: 1868818 - RNA, 19 nt, Artificial Sequence
  Description of Artificial Sequence: Synthetic oligonucleotide
  Antisense strand to SEQ ID NO: 1868817
uaaacgcucauuuaauccu

SEQ ID NO: 1868819 - RNA, 19 nt, Artificial Sequence
  Description of Artificial Sequence: Synthetic oligonucleotide
  Sense strand starting at position 956 of SEQ ID NO: 1564287
ggauuaaaugagcguuuac

SEQ ID NO: 1868820 - RNA, 19 nt, Artificial Sequence
  Description of Artificial Sequence: Synthetic oligonucleotide
  Antisense strand to SEQ ID NO: 1868819
guaaacgcucauuuaaucc

SEQ ID NO: 1868821 - RNA, 19 nt, Artificial Sequence
  Description of Artificial Sequence: Synthetic oligonucleotide
  Sense strand starting at position 965 of SEQ ID NO: 1564287
gagcguuuacuacaaagca

SEQ ID NO: 1868822 - RNA, 19 nt, Artificial Sequence
  Description of Artificial Sequence: Synthetic oligonucleotide
  Antisense strand to SEQ ID NO: 1868821
ugcuuuguaguaaacgcuc

SEQ ID NO: 1868823 - RNA, 19 nt, Artificial Sequence
  Description of Artificial Sequence: Synthetic oligonucleotide
  Sense strand starting at position 1571 of SEQ ID NO: 1564287
aaggguuggcccuaacuuu

SEQ ID NO: 1868824 - RNA, 19 nt, Artificial Sequence
  Description of Artificial Sequence: Synthetic oligonucleotide
  Antisense strand to SEQ ID NO: 1868823
aaaguuagggccaacccuu

SEQ ID NO: 1868825 - RNA, 19 nt, Artificial Sequence
  Description of Artificial Sequence: Synthetic oligonucleotide
  Sense strand starting at position 2239 of SEQ ID NO: 1564287
ugggauuuggcggguucua

SEQ ID NO: 1868826 - RNA, 19 nt, Artificial Sequence
  Description of Artificial Sequence: Synthetic oligonucleotide
  Antisense strand to SEQ ID NO: 1868825
uagaacccgccaaauccca

SEQ ID NO: 1868827 - RNA, 19 nt, Artificial Sequence
  Description of Artificial Sequence: Synthetic oligonucleotide
  Sense strand starting at position 2333 of SEQ ID NO: 1564287
gguucuggucuauaaggaa

SEQ ID NO: 1868828 - RNA, 19 nt, Artificial Sequence
  Description of Artificial Sequence: Synthetic oligonucleotide
  Antisense strand to SEQ ID NO: 1868827
uuccuuauagaccagaacc

SEQ ID NO: 1868829 - RNA, 19 nt, Artificial Sequence
  Description of Artificial Sequence: Synthetic oligonucleotide
  Sense strand starting at position 2349 of SEQ ID NO: 1564287
gaagaucccgugugaucug

SEQ ID NO: 1868830 - RNA, 19 nt, Artificial Sequence
  Description of Artificial Sequence: Synthetic oligonucleotide
  Antisense strand to SEQ ID NO: 1868829
cagaucacacgggaucuuc

SEQ ID NO: 1868831 - RNA, 19 nt, Artificial Sequence
  Description of Artificial Sequence: Synthetic oligonucleotide
  Sense strand starting at position 2415 of SEQ ID NO: 1564287
uggcaaugggacugaguau

SEQ ID NO: 1868832 - RNA, 19 nt, Artificial Sequence
  Description of Artificial Sequence: Synthetic oligonucleotide
  Antisense strand to SEQ ID NO: 1868831
auacucagucccauugcca

SEQ ID NO: 1868833 - RNA, 19 nt, Artificial Sequence
  Description of Artificial Sequence: Synthetic oligonucleotide
  Sense strand starting at position 2517 of SEQ ID NO: 1564287
ugaggcucaaguggaaauu

SEQ ID NO: 1868834 - RNA, 19 nt, Artificial Sequence
  Description of Artificial Sequence: Synthetic oligonucleotide
  Antisense strand to SEQ ID NO: 1868833
aauuuccacuugagccuca

SEQ ID NO: 1868835 - RNA, 19 nt, Artificial Sequence
  Description of Artificial Sequence: Synthetic oligonucleotide
  Sense strand starting at position 2551 of SEQ ID NO: 1564287
cuaaucaccucguuugaua

SEQ ID NO: 1868836 - RNA, 19 nt, Artificial Sequence
  Description of Artificial Sequence: Synthetic oligonucleotide
  Antisense strand to SEQ ID NO: 1868835
uaucaaacgaggugauuag

SEQ ID NO: 1868837 - RNA, 19 nt, Artificial Sequence
  Description of Artificial Sequence: Synthetic oligonucleotide
  Sense strand starting at position 2559 of SEQ ID NO: 1564287
cucguuugauagucaaaug

SEQ ID NO: 1868838 - RNA, 19 nt, Artificial Sequence
  Description of Artificial Sequence: Synthetic oligonucleotide
  Antisense strand to SEQ ID NO: 1868837
cauuugacuaucaaacgag

SEQ ID NO: 1868839 - RNA, 19 nt, Artificial Sequence
  Description of Artificial Sequence: Synthetic oligonucleotide
  Sense strand starting at position 2591 of SEQ ID NO: 1564287
aaguccucugccgaagauu

SEQ ID NO: 1868840 - RNA, 19 nt, Artificial Sequence
  Description of Artificial Sequence: Synthetic oligonucleotide
  Antisense strand to SEQ ID NO: 1868839
aaucuucggcagaggacuu

SEQ ID NO: 1868841 - RNA, 19 nt, Artificial Sequence
  Description of Artificial Sequence: Synthetic oligonucleotide
  Sense strand starting at position 2686 of SEQ ID NO: 1564287
uagagugacugagugaauu

SEQ ID NO: 1868842 - RNA, 19 nt, Artificial Sequence
  Description of Artificial Sequence: Synthetic oligonucleotide
  Antisense strand to SEQ ID NO: 1868841
aauucacucagucacucua

SEQ ID NO: 1868843 - RNA, 19 nt, Artificial Sequence
  Description of Artificial Sequence: Synthetic oligonucleotide
  Sense strand starting at position 3307 of SEQ ID NO: 1564287
uugcccuuagaacgagaua

SEQ ID NO: 1868844 - RNA, 19 nt, Artificial Sequence
  Description of Artificial Sequence: Synthetic oligonucleotide
  Antisense strand to SEQ ID NO: 1868843
uaucucguucuaagggcaa

SEQ ID NO: 1868845 - RNA, 19 nt, Artificial Sequence
  Description of Artificial Sequence: Synthetic oligonucleotide
  Sense strand starting at position 3390 of SEQ ID NO: 1564287
aaauuacauugagugugau

SEQ ID NO: 1868846 - RNA, 19 nt, Artificial Sequence
  Description of Artificial Sequence: Synthetic oligonucleotide
  Antisense strand to SEQ ID NO: 1868845
aucacacucaauguaauuu

SEQ ID NO: 1868847 - RNA, 19 nt, Artificial Sequence
  Description of Artificial Sequence: Synthetic oligonucleotide
  Sense strand starting at position 3391 of SEQ ID NO: 1564287
aauuacauugagugugauu

SEQ ID NO: 1868848 - RNA, 19 nt, Artificial Sequence
  Description of Artificial Sequence: Synthetic oligonucleotide
  Antisense strand to SEQ ID NO: 1868847
aaucacacucaauguaauu

SEQ ID NO: 1868849 - RNA, 19 nt, Artificial Sequence
  Description of Artificial Sequence: Synthetic oligonucleotide
  Sense strand starting at position 3396 of SEQ ID NO: 1564287
cauugagugugauuggaau

SEQ ID NO: 1868850 - RNA, 19 nt, Artificial Sequence
  Description of Artificial Sequence: Synthetic oligonucleotide
  Antisense strand to SEQ ID NO: 1868849
auuccaaucacacucaaug

SEQ ID NO: 1868851 - RNA, 19 nt, Artificial Sequence
  Description of Artificial Sequence: Synthetic oligonucleotide
  Sense strand starting at position 3398 of SEQ ID NO: 1564287
uugagugugauuggaauag

SEQ ID NO: 1868852 - RNA, 19 nt, Artificial Sequence
  Description of Artificial Sequence: Synthetic oligonucleotide
  Antisense strand to SEQ ID NO: 1868851
cuauuccaaucacacucaa

SEQ ID NO: 1868853 - RNA, 19 nt, Artificial Sequence
  Description of Artificial Sequence: Synthetic oligonucleotide
  Sense strand starting at position 3522 of SEQ ID NO: 1564287
uggagaugagucuguguaa

SEQ ID NO: 1868854 - RNA, 19 nt, Artificial Sequence
  Description of Artificial Sequence: Synthetic oligonucleotide
  Antisense strand to SEQ ID NO: 1868853
uuacacagacucaucucca

SEQ ID NO: 1868855 - RNA, 19 nt, Artificial Sequence
  Description of Artificial Sequence: Synthetic oligonucleotide
  Sense strand starting at position 3523 of SEQ ID NO: 1564287
ggagaugagucuguguaag

SEQ ID NO: 1868856 - RNA, 19 nt, Artificial Sequence
  Description of Artificial Sequence: Synthetic oligonucleotide
  Antisense strand to SEQ ID NO: 1868855
cuuacacagacucaucucc

SEQ ID NO: 1868857 - RNA, 19 nt, Artificial Sequence
  Description of Artificial Sequence: Synthetic oligonucleotide
  Sense strand starting at position 3658 of SEQ ID NO: 1564287
uuaaguucgccaguuguuu

SEQ ID NO: 1868858 - RNA, 19 nt, Artificial Sequence
  Description of Artificial Sequence: Synthetic oligonucleotide
  Antisense strand to SEQ ID NO: 1868857
aaacaacuggcgaacuuaa

SEQ ID NO: 1868859 - RNA, 19 nt, Artificial Sequence
  Description of Artificial Sequence: Synthetic oligonucleotide
  Sense strand starting at position 3795 of SEQ ID NO: 1564287
cgccuaagccuccugcaua

SEQ ID NO: 1868860 - RNA, 19 nt, Artificial Sequence
  Description of Artificial Sequence: Synthetic oligonucleotide
  Antisense strand to SEQ ID NO: 1868859
uaugcaggaggcuuaggcg

SEQ ID NO: 1868861 - RNA, 19 nt, Artificial Sequence
  Description of Artificial Sequence: Synthetic oligonucleotide
  Sense strand starting at position 149 of SEQ ID NO: 1564289
uuuagaggccaauaaucuu

SEQ ID NO: 1868862 - RNA, 19 nt, Artificial Sequence
  Description of Artificial Sequence: Synthetic oligonucleotide
  Antisense strand to SEQ ID NO: 1868861
aagauuauuggccucuaaa

SEQ ID NO: 1868863 - RNA, 19 nt, Artificial Sequence
  Description of Artificial Sequence: Synthetic oligonucleotide
  Sense strand starting at position 241 of SEQ ID NO: 1564289
uuacauuauguugguagaa

SEQ ID NO: 1868864 - RNA, 19 nt, Artificial Sequence
  Description of Artificial Sequence: Synthetic oligonucleotide
  Antisense strand to SEQ ID NO: 1868863
uucuaccaacauaauguaa

SEQ ID NO: 1868865 - RNA, 19 nt, Artificial Sequence
  Description of Artificial Sequence: Synthetic oligonucleotide
  Sense strand starting at position 242 of SEQ ID NO: 1564289
uacauuauguugguagaaa

SEQ ID NO: 1868866 - RNA, 19 nt, Artificial Sequence
  Description of Artificial Sequence: Synthetic oligonucleotide
  Antisense strand to SEQ ID NO: 1868865
uuucuaccaacauaaugua

SEQ ID NO: 1868867 - RNA, 19 nt, Artificial Sequence
  Description of Artificial Sequence: Synthetic oligonucleotide
  Sense strand starting at position 373 of SEQ ID NO: 1564289
cuagcugagcaccaugaau

SEQ ID NO: 1868868 - RNA, 19 nt, Artificial Sequence
  Description of Artificial Sequence: Synthetic oligonucleotide
  Antisense strand to SEQ ID NO: 1868867
auucauggugcucagcuag

SEQ ID NO: 1868869 - RNA, 19 nt, Artificial Sequence
  Description of Artificial Sequence: Synthetic oligonucleotide
  Sense strand starting at position 429 of SEQ ID NO: 1564289
uuaguuugagcuuauacua

SEQ ID NO: 1868870 - RNA, 19 nt, Artificial Sequence
  Description of Artificial Sequence: Synthetic oligonucleotide
  Antisense strand to SEQ ID NO: 1868869
uaguauaagcucaaacuaa

SEQ ID NO: 1868871 - RNA, 19 nt, Artificial Sequence
  Description of Artificial Sequence: Synthetic oligonucleotide
  Sense strand starting at position 736 of SEQ ID NO: 1564289
ccuuguuaugguuagauaa

SEQ ID NO: 1868872 - RNA, 19 nt, Artificial Sequence
  Description of Artificial Sequence: Synthetic oligonucleotide
  Antisense strand to SEQ ID NO: 1868871
uuaucuaaccauaacaagg

SEQ ID NO: 1868873 - RNA, 19 nt, Artificial Sequence
  Description of Artificial Sequence: Synthetic oligonucleotide
  Sense strand starting at position 827 of SEQ ID NO: 1564289
agcaaaugcgaauauacaa

SEQ ID NO: 1868874 - RNA, 19 nt, Artificial Sequence
  Description of Artificial Sequence: Synthetic oligonucleotide
  Antisense strand to SEQ ID NO: 1868873
uuguauauucgcauuugcu

SEQ ID NO: 1868875 - RNA, 19 nt, Artificial Sequence
  Description of Artificial Sequence: Synthetic oligonucleotide
  Sense strand starting at position 843 of SEQ ID NO: 1564289
caauaucaagugugguaua

SEQ ID NO: 1868876 - RNA, 19 nt, Artificial Sequence
  Description of Artificial Sequence: Synthetic oligonucleotide
  Antisense strand to SEQ ID NO: 1868875
uauaccacacuugauauug

SEQ ID NO: 1868877 - RNA, 19 nt, Artificial Sequence
  Description of Artificial Sequence: Synthetic oligonucleotide
  Sense strand starting at position 848 of SEQ ID NO: 1564289
ucaagugugguauaaauaa

SEQ ID NO: 1868878 - RNA, 19 nt, Artificial Sequence
  Description of Artificial Sequence: Synthetic oligonucleotide
  Antisense strand to SEQ ID NO: 1868877
uuauuuauaccacacuuga

SEQ ID NO: 1868879 - RNA, 19 nt, Artificial Sequence
  Description of Artificial Sequence: Synthetic oligonucleotide
  Sense strand starting at position 881 of SEQ ID NO: 1564289
ggauauaagacguaguuag

SEQ ID NO: 1868880 - RNA, 19 nt, Artificial Sequence
  Description of Artificial Sequence: Synthetic oligonucleotide
  Antisense strand to SEQ ID NO: 1868879
cuaacuacgucuuauaucc

SEQ ID NO: 1868881 - RNA, 19 nt, Artificial Sequence
  Description of Artificial Sequence: Synthetic oligonucleotide
  Sense strand starting at position 885 of SEQ ID NO: 1564289
auaagacguaguuaguaaa

SEQ ID NO: 1868882 - RNA, 19 nt, Artificial Sequence
  Description of Artificial Sequence: Synthetic oligonucleotide
  Antisense strand to SEQ ID NO: 1868881
uuuacuaacuacgucuuau

SEQ ID NO: 1868883 - RNA, 19 nt, Artificial Sequence
  Description of Artificial Sequence: Synthetic oligonucleotide
  Sense strand starting at position 1217 of SEQ ID NO: 1564289
uccacuaaguuguuagaau

SEQ ID NO: 1868884 - RNA, 19 nt, Artificial Sequence
  Description of Artificial Sequence: Synthetic oligonucleotide
  Antisense strand to SEQ ID NO: 1868883
auucuaacaacuuagugga

SEQ ID NO: 1868885 - RNA, 19 nt, Artificial Sequence
  Description of Artificial Sequence: Synthetic oligonucleotide
  Sense strand starting at position 1224 of SEQ ID NO: 1564289
aguuguuagaaugauguag

SEQ ID NO: 1868886 - RNA, 19 nt, Artificial Sequence
  Description of Artificial Sequence: Synthetic oligonucleotide
  Antisense strand to SEQ ID NO: 1868885
cuacaucauucuaacaacu

SEQ ID NO: 1868887 - RNA, 19 nt, Artificial Sequence
  Description of Artificial Sequence: Synthetic oligonucleotide
  Sense strand starting at position 1228 of SEQ ID NO: 1564289
guuagaaugauguaguuaa

SEQ ID NO: 1868888 - RNA, 19 nt, Artificial Sequence
  Description of Artificial Sequence: Synthetic oligonucleotide
  Antisense strand to SEQ ID NO: 1868887
uuaacuacaucauucuaac

SEQ ID NO: 1868889 - RNA, 19 nt, Artificial Sequence
  Description of Artificial Sequence: Synthetic oligonucleotide
  Sense strand starting at position 1646 of SEQ ID NO: 1564289
ggccuucucgagcuacguu

SEQ ID NO: 1868890 - RNA, 19 nt, Artificial Sequence
  Description of Artificial Sequence: Synthetic oligonucleotide
  Antisense strand to SEQ ID NO: 1868889
aacguagcucgagaaggcc

SEQ ID NO: 1868891 - RNA, 19 nt, Artificial Sequence
  Description of Artificial Sequence: Synthetic oligonucleotide
  Sense strand starting at position 2085 of SEQ ID NO: 1564289
ucuccuuuggccgaaagua

SEQ ID NO: 1868892 - RNA, 19 nt, Artificial Sequence
  Description of Artificial Sequence: Synthetic oligonucleotide
  Antisense strand to SEQ ID NO: 1868891
uacuuucggccaaaggaga

SEQ ID NO: 1868893 - RNA, 19 nt, Artificial Sequence
  Description of Artificial Sequence: Synthetic oligonucleotide
  Sense strand starting at position 2233 of SEQ ID NO: 1564289
gugcuaaagcccuaggaau

SEQ ID NO: 1868894 - RNA, 19 nt, Artificial Sequence
  Description of Artificial Sequence: Synthetic oligonucleotide
  Antisense strand to SEQ ID NO: 1868893
auuccuagggcuuuagcac

SEQ ID NO: 1868895 - RNA, 19 nt, Artificial Sequence
  Description of Artificial Sequence: Synthetic oligonucleotide
  Sense strand starting at position 2431 of SEQ ID NO: 1564289
gggaacuuacuuugugucu

SEQ ID NO: 1868896 - RNA, 19 nt, Artificial Sequence
  Description of Artificial Sequence: Synthetic oligonucleotide
  Antisense strand to SEQ ID NO: 1868895
agacacaaaguaaguuccc

SEQ ID NO: 1868897 - RNA, 19 nt, Artificial Sequence
  Description of Artificial Sequence: Synthetic oligonucleotide
  Sense strand starting at position 2460 of SEQ ID NO: 1564289
ggucacuggccucauucua

SEQ ID NO: 1868898 - RNA, 19 nt, Artificial Sequence
  Description of Artificial Sequence: Synthetic oligonucleotide
  Antisense strand to SEQ ID NO: 1868897
uagaaugaggccagugacc

SEQ ID NO: 1868899 - RNA, 19 nt, Artificial Sequence
  Description of Artificial Sequence: Synthetic oligonucleotide
  Sense strand starting at position 2515 of SEQ ID NO: 1564289
agccaccuuugaucagaau

SEQ ID NO: 1868900 - RNA, 19 nt, Artificial Sequence
  Description of Artificial Sequence: Synthetic oligonucleotide
  Antisense strand to SEQ ID NO: 1868899
auucugaucaaagguggcu

SEQ ID NO: 1868901 - RNA, 19 nt, Artificial Sequence
  Description of Artificial Sequence: Synthetic oligonucleotide
  Sense strand starting at position 2516 of SEQ ID NO: 1564289
gccaccuuugaucagaaug

SEQ ID NO: 1868902 - RNA, 19 nt, Artificial Sequence
  Description of Artificial Sequence: Synthetic oligonucleotide
  Antisense strand to SEQ ID NO: 1868901
cauucugaucaaagguggc

SEQ ID NO: 1868903 - RNA, 19 nt, Artificial Sequence
  Description of Artificial Sequence: Synthetic oligonucleotide
  Sense strand starting at position 2618 of SEQ ID NO: 1564289
ggacuuacccaaugucauc

SEQ ID NO: 1868904 - RNA, 19 nt, Artificial Sequence
  Description of Artificial Sequence: Synthetic oligonucleotide
  Antisense strand to SEQ ID NO: 1868903
gaugacauuggguaagucc

SEQ ID NO: 1868905 - RNA, 19 nt, Artificial Sequence
  Description of Artificial Sequence: Synthetic oligonucleotide
  Sense strand starting at position 2780 of SEQ ID NO: 1564289
agaauuacgcaauggaaag

SEQ ID NO: 1868906 - RNA, 19 nt, Artificial Sequence
  Description of Artificial Sequence: Synthetic oligonucleotide
  Antisense strand to SEQ ID NO: 1868905
cuuuccauugcguaauucu

SEQ ID NO: 1868907 - RNA, 19 nt, Artificial Sequence
  Description of Artificial Sequence: Synthetic oligonucleotide
  Sense strand starting at position 2798 of SEQ ID NO: 1564289
guaagucucucuucucaga

SEQ ID NO: 1868908 - RNA, 19 nt, Artificial Sequence
  Description of Artificial Sequence: Synthetic oligonucleotide
  Antisense strand to SEQ ID NO: 1868907
ucugagaagagagacuuac

SEQ ID NO: 1868909 - RNA, 19 nt, Artificial Sequence
  Description of Artificial Sequence: Synthetic oligonucleotide
  Sense strand starting at position 2833 of SEQ ID NO: 1564289
gguuuaucuccgcacauaa

SEQ ID NO: 1868910 - RNA, 19 nt, Artificial Sequence
  Description of Artificial Sequence: Synthetic oligonucleotide
  Antisense strand to SEQ ID NO: 1868909
uuaugugcggagauaaacc

SEQ ID NO: 1868911 - RNA, 19 nt, Artificial Sequence
  Description of Artificial Sequence: Synthetic oligonucleotide
  Sense strand starting at position 2844 of SEQ ID NO: 1564289
gcacauaauguacgaucaa

SEQ ID NO: 1868912 - RNA, 19 nt, Artificial Sequence
  Description of Artificial Sequence: Synthetic oligonucleotide
  Antisense strand to SEQ ID NO: 1868911
uugaucguacauuaugugc

SEQ ID NO: 1868913 - RNA, 19 nt, Artificial Sequence
  Description of Artificial Sequence: Synthetic oligonucleotide
  Sense strand starting at position 2936 of SEQ ID NO: 1564289
acuaaagcucagugaaccu

SEQ ID NO: 1868914 - RNA, 19 nt, Artificial Sequence
  Description of Artificial Sequence: Synthetic oligonucleotide
  Antisense strand to SEQ ID NO: 1868913
agguucacugagcuuuagu

SEQ ID NO: 1868915 - RNA, 19 nt, Artificial Sequence
  Description of Artificial Sequence: Synthetic oligonucleotide
  Sense strand starting at position 3019 of SEQ ID NO: 1564289
aguggcuucuaugcgauuu

SEQ ID NO: 1868916 - RNA, 19 nt, Artificial Sequence
  Description of Artificial Sequence: Synthetic oligonucleotide
  Antisense strand to SEQ ID NO: 1868915
aaaucgcauagaagccacu

SEQ ID NO: 1868917 - RNA, 19 nt, Artificial Sequence
  Description of Artificial Sequence: Synthetic oligonucleotide
  Sense strand starting at position 3111 of SEQ ID NO: 1564289
gucucuguuccuggagaga

SEQ ID NO: 1868918 - RNA, 19 nt, Artificial Sequence
  Description of Artificial Sequence: Synthetic oligonucleotide
  Antisense strand to SEQ ID NO: 1868917
ucucuccaggaacagagac

SEQ ID NO: 1868919 - RNA, 19 nt, Artificial Sequence
  Description of Artificial Sequence: Synthetic oligonucleotide
  Sense strand starting at position 3208 of SEQ ID NO: 1564289
uagguaacguuucuacaga

SEQ ID NO: 1868920 - RNA, 19 nt, Artificial Sequence
  Description of Artificial Sequence: Synthetic oligonucleotide
  Antisense strand to SEQ ID NO: 1868919
ucuguagaaacguuaccua

SEQ ID NO: 1868921 - RNA, 19 nt, Artificial Sequence
  Description of Artificial Sequence: Synthetic oligonucleotide
  Sense strand starting at position 3441 of SEQ ID NO: 1564289
ucagcuuaucgcucauguu

SEQ ID NO: 1868922 - RNA, 19 nt, Artificial Sequence
  Description of Artificial Sequence: Synthetic oligonucleotide
  Antisense strand to SEQ ID NO: 1868921
aacaugagcgauaagcuga

SEQ ID NO: 1868923 - RNA, 19 nt, Artificial Sequence
  Description of Artificial Sequence: Synthetic oligonucleotide
  Sense strand starting at position 3612 of SEQ ID NO: 1564289
aacucuauagguggucauu

SEQ ID NO: 1868924 - RNA, 19 nt, Artificial Sequence
  Description of Artificial Sequence: Synthetic oligonucleotide
  Antisense strand to SEQ ID NO: 1868923
aaugaccaccuauagaguu

SEQ ID NO: 1868925 - RNA, 19 nt, Artificial Sequence
  Description of Artificial Sequence: Synthetic oligonucleotide
  Sense strand starting at position 3713 of SEQ ID NO: 1564289
gacuaaauaugauuggucu

SEQ ID NO: 1868926 - RNA, 19 nt, Artificial Sequence
  Description of Artificial Sequence: Synthetic oligonucleotide
  Antisense strand to SEQ ID NO: 1868925
agaccaaucauauuuaguc

SEQ ID NO: 1868927 - RNA, 19 nt, Artificial Sequence
  Description of Artificial Sequence: Synthetic oligonucleotide
  Sense strand starting at position 3714 of SEQ ID NO: 1564289
acuaaauaugauuggucuu

SEQ ID NO: 1868928 - RNA, 19 nt, Artificial Sequence
  Description of Artificial Sequence: Synthetic oligonucleotide
  Antisense strand to SEQ ID NO: 1868927
aagaccaaucauauuuagu

SEQ ID NO: 1868929 - RNA, 19 nt, Artificial Sequence
  Description of Artificial Sequence: Synthetic oligonucleotide
  Sense strand starting at position 3717 of SEQ ID NO: 1564289
aaauaugauuggucuuuag

SEQ ID NO: 1868930 - RNA, 19 nt, Artificial Sequence
  Description of Artificial Sequence: Synthetic oligonucleotide
  Antisense strand to SEQ ID NO: 1868929
cuaaagaccaaucauauuu

SEQ ID NO: 1868931 - RNA, 19 nt, Artificial Sequence
  Description of Artificial Sequence: Synthetic oligonucleotide
  Sense strand starting at position 3720 of SEQ ID NO: 1564289
uaugauuggucuuuagcaa

SEQ ID NO: 1868932 - RNA, 19 nt, Artificial Sequence
  Description of Artificial Sequence: Synthetic oligonucleotide
  Antisense strand to SEQ ID NO: 1868931
uugcuaaagaccaaucaua

SEQ ID NO: 1868933 - RNA, 19 nt, Artificial Sequence
  Description of Artificial Sequence: Synthetic oligonucleotide
  Sense strand starting at position 3721 of SEQ ID NO: 1564289
augauuggucuuuagcaac

SEQ ID NO: 1868934 - RNA, 19 nt, Artificial Sequence
  Description of Artificial Sequence: Synthetic oligonucleotide
  Antisense strand to SEQ ID NO: 1868933
guugcuaaagaccaaucau

SEQ ID NO: 1868935 - RNA, 19 nt, Artificial Sequence
  Description of Artificial Sequence: Synthetic oligonucleotide
  Sense strand starting at position 3762 of SEQ ID NO: 1564289
acagcuuaucuuuagauug

SEQ ID NO: 1868936 - RNA, 19 nt, Artificial Sequence
  Description of Artificial Sequence: Synthetic oligonucleotide
  Antisense strand to SEQ ID NO: 1868935
caaucuaaagauaagcugu

SEQ ID NO: 1868937 - RNA, 19 nt, Artificial Sequence
  Description of Artificial Sequence: Synthetic oligonucleotide
  Sense strand starting at position 3919 of SEQ ID NO: 1564289
cguaguguugugcugauaa

SEQ ID NO: 1868938 - RNA, 19 nt, Artificial Sequence
  Description of Artificial Sequence: Synthetic oligonucleotide
  Antisense strand to SEQ ID NO: 1868937
uuaucagcacaacacuacg

SEQ ID NO: 1868939 - RNA, 19 nt, Artificial Sequence
  Description of Artificial Sequence: Synthetic oligonucleotide
  Sense strand starting at position 3921 of SEQ ID NO: 1564289
uaguguugugcugauaaau

SEQ ID NO: 1868940 - RNA, 19 nt, Artificial Sequence
  Description of Artificial Sequence: Synthetic oligonucleotide
  Antisense strand to SEQ ID NO: 1868939
auuuaucagcacaacacua

SEQ ID NO: 1868941 - RNA, 19 nt, Artificial Sequence
  Description of Artificial Sequence: Synthetic oligonucleotide
  Sense strand starting at position 1558 of SEQ ID NO: 1564290
gcuauaugaagacgucagu

SEQ ID NO: 1868942 - RNA, 19 nt, Artificial Sequence
  Description of Artificial Sequence: Synthetic oligonucleotide
  Antisense strand to SEQ ID NO: 1868941
acugacgucuucauauagc

SEQ ID NO: 1868943 - RNA, 19 nt, Artificial Sequence
  Description of Artificial Sequence: Synthetic oligonucleotide
  Sense strand starting at position 1561 of SEQ ID NO: 1564290
auaugaagacgucaguuga

SEQ ID NO: 1868944 - RNA, 19 nt, Artificial Sequence
  Description of Artificial Sequence: Synthetic oligonucleotide
  Antisense strand to SEQ ID NO: 1868943
ucaacugacgucuucauau

SEQ ID NO: 1868945 - RNA, 19 nt, Artificial Sequence
  Description of Artificial Sequence: Synthetic oligonucleotide
  Sense strand starting at position 2041 of SEQ ID NO: 1564290
ggcuucaggcggugaagau

SEQ ID NO: 1868946 - RNA, 19 nt, Artificial Sequence
  Description of Artificial Sequence: Synthetic oligonucleotide
  Antisense strand to SEQ ID NO: 1868945
aucuucaccgccugaagcc

SEQ ID NO: 1868947 - RNA, 19 nt, Artificial Sequence
  Description of Artificial Sequence: Synthetic oligonucleotide
  Sense strand starting at position 2050 of SEQ ID NO: 1564290
cggugaagaucagcaaaga

SEQ ID NO: 1868948 - RNA, 19 nt, Artificial Sequence
  Description of Artificial Sequence: Synthetic oligonucleotide
  Antisense strand to SEQ ID NO: 1868947
ucuuugcugaucuucaccg

SEQ ID NO: 1868949 - RNA, 19 nt, Artificial Sequence
  Description of Artificial Sequence: Synthetic oligonucleotide
  Sense strand starting at position 2130 of SEQ ID NO: 1564290
acaggauauuugugugagu

SEQ ID NO: 1868950 - RNA, 19 nt, Artificial Sequence
  Description of Artificial Sequence: Synthetic oligonucleotide
  Antisense strand to SEQ ID NO: 1868949
acucacacaaauauccugu

SEQ ID NO: 1868951 - RNA, 19 nt, Artificial Sequence
  Description of Artificial Sequence: Synthetic oligonucleotide
  Sense strand starting at position 2132 of SEQ ID NO: 1564290
aggauauuugugugagugu

SEQ ID NO: 1868952 - RNA, 19 nt, Artificial Sequence
  Description of Artificial Sequence: Synthetic oligonucleotide
  Antisense strand to SEQ ID NO: 1868951
acacucacacaaauauccu

SEQ ID NO: 1868953 - RNA, 19 nt, Artificial Sequence
  Description of Artificial Sequence: Synthetic oligonucleotide
  Sense strand starting at position 2133 of SEQ ID NO: 1564290
ggauauuugugugagugug

SEQ ID NO: 1868954 - RNA, 19 nt, Artificial Sequence
  Description of Artificial Sequence: Synthetic oligonucleotide
  Antisense strand to SEQ ID NO: 1868953
cacacucacacaaauaucc

SEQ ID NO: 1868955 - RNA, 19 nt, Artificial Sequence
  Description of Artificial Sequence: Synthetic oligonucleotide
  Sense strand starting at position 2175 of SEQ ID NO: 1564290
guguguaauauaugucaua

SEQ ID NO: 1868956 - RNA, 19 nt, Artificial Sequence
  Description of Artificial Sequence: Synthetic oligonucleotide
  Antisense strand to SEQ ID NO: 1868955
uaugacauauauuacacac

SEQ ID NO: 1868957 - RNA, 19 nt, Artificial Sequence
  Description of Artificial Sequence: Synthetic oligonucleotide
  Sense strand starting at position 2243 of SEQ ID NO: 1564290
cgauaugcuuuacucuaag

SEQ ID NO: 1868958 - RNA, 19 nt, Artificial Sequence
  Description of Artificial Sequence: Synthetic oligonucleotide
  Antisense strand to SEQ ID NO: 1868957
cuuagaguaaagcauaucg

SEQ ID NO: 1868959 - RNA, 19 nt, Artificial Sequence
  Description of Artificial Sequence: Synthetic oligonucleotide
  Sense strand starting at position 2249 of SEQ ID NO: 1564290
gcuuuacucuaagcaauug

SEQ ID NO: 1868960 - RNA, 19 nt, Artificial Sequence
  Description of Artificial Sequence: Synthetic oligonucleotide
  Antisense strand to SEQ ID NO: 1868959
caauugcuuagaguaaagc

SEQ ID NO: 1868961 - RNA, 19 nt, Artificial Sequence
  Description of Artificial Sequence: Synthetic oligonucleotide
  Sense strand starting at position 2379 of SEQ ID NO: 1564290
caggguaugguuugggaga

SEQ ID NO: 1868962 - RNA, 19 nt, Artificial Sequence
  Description of Artificial Sequence: Synthetic oligonucleotide
  Antisense strand to SEQ ID NO: 1868961
ucucccaaaccauacccug

SEQ ID NO: 1868963 - RNA, 19 nt, Artificial Sequence
  Description of Artificial Sequence: Synthetic oligonucleotide
  Sense strand starting at position 2411 of SEQ ID NO: 1564290
ccauauaucuaauaacgag

SEQ ID NO: 1868964 - RNA, 19 nt, Artificial Sequence
  Description of Artificial Sequence: Synthetic oligonucleotide
  Antisense strand to SEQ ID NO: 1868963
cucguuauuagauauaugg

SEQ ID NO: 1868965 - RNA, 19 nt, Artificial Sequence
  Description of Artificial Sequence: Synthetic oligonucleotide
  Sense strand starting at position 2425 of SEQ ID NO: 1564290
acgaguuaauauccaaagu

SEQ ID NO: 1868966 - RNA, 19 nt, Artificial Sequence
  Description of Artificial Sequence: Synthetic oligonucleotide
  Antisense strand to SEQ ID NO: 1868965
acuuuggauauuaacucgu

SEQ ID NO: 1868967 - RNA, 19 nt, Artificial Sequence
  Description of Artificial Sequence: Synthetic oligonucleotide
  Sense strand starting at position 2487 of SEQ ID NO: 1564290
aauagucugguuuacgaau

SEQ ID NO: 1868968 - RNA, 19 nt, Artificial Sequence
  Description of Artificial Sequence: Synthetic oligonucleotide
  Antisense strand to SEQ ID NO: 1868967
auucguaaaccagacuauu

SEQ ID NO: 1868969 - RNA, 19 nt, Artificial Sequence
  Description of Artificial Sequence: Synthetic oligonucleotide
  Sense strand starting at position 2493 of SEQ ID NO: 1564290
cugguuuacgaauagguaa

SEQ ID NO: 1868970 - RNA, 19 nt, Artificial Sequence
  Description of Artificial Sequence: Synthetic oligonucleotide
  Antisense strand to SEQ ID NO: 1868969
uuaccuauucguaaaccag

SEQ ID NO: 1868971 - RNA, 19 nt, Artificial Sequence
  Description of Artificial Sequence: Synthetic oligonucleotide
  Sense strand starting at position 2495 of SEQ ID NO: 1564290
gguuuacgaauagguaaag

SEQ ID NO: 1868972 - RNA, 19 nt, Artificial Sequence
  Description of Artificial Sequence: Synthetic oligonucleotide
  Antisense strand to SEQ ID NO: 1868971
cuuuaccuauucguaaacc

SEQ ID NO: 1868973 - RNA, 19 nt, Artificial Sequence
  Description of Artificial Sequence: Synthetic oligonucleotide
  Sense strand starting at position 2744 of SEQ ID NO: 1564290
gcagaaauguuauugguac

SEQ ID NO: 1868974 - RNA, 19 nt, Artificial Sequence
  Description of Artificial Sequence: Synthetic oligonucleotide
  Antisense strand to SEQ ID NO: 1868973
guaccaauaacauuucugc

SEQ ID NO: 1868975 - RNA, 19 nt, Artificial Sequence
  Description of Artificial Sequence: Synthetic oligonucleotide
  Sense strand starting at position 2750 of SEQ ID NO: 1564290
auguuauugguacauuaug

SEQ ID NO: 1868976 - RNA, 19 nt, Artificial Sequence
  Description of Artificial Sequence: Synthetic oligonucleotide
  Antisense strand to SEQ ID NO: 1868975
cauaauguaccaauaacau

SEQ ID NO: 1868977 - RNA, 19 nt, Artificial Sequence
  Description of Artificial Sequence: Synthetic oligonucleotide
  Sense strand starting at position 2776 of SEQ ID NO: 1564290
guauaaugguuccuuggaa

SEQ ID NO: 1868978 - RNA, 19 nt, Artificial Sequence
  Description of Artificial Sequence: Synthetic oligonucleotide
  Antisense strand to SEQ ID NO: 1868977
uuccaaggaaccauuauac

SEQ ID NO: 1868979 - RNA, 19 nt, Artificial Sequence
  Description of Artificial Sequence: Synthetic oligonucleotide
  Sense strand starting at position 2777 of SEQ ID NO: 1564290
uauaaugguuccuuggaaa

SEQ ID NO: 1868980 - RNA, 19 nt, Artificial Sequence
  Description of Artificial Sequence: Synthetic oligonucleotide
  Antisense strand to SEQ ID NO: 1868979
uuuccaaggaaccauuaua

SEQ ID NO: 1868981 - RNA, 19 nt, Artificial Sequence
  Description of Artificial Sequence: Synthetic oligonucleotide
  Sense strand starting at position 2875 of SEQ ID NO: 1564290
uagagauagcuccaguacu

SEQ ID NO: 1868982 - RNA, 19 nt, Artificial Sequence
  Description of Artificial Sequence: Synthetic oligonucleotide
  Antisense strand to SEQ ID NO: 1868981
aguacuggagcuaucucua

SEQ ID NO: 1868983 - RNA, 19 nt, Artificial Sequence
  Description of Artificial Sequence: Synthetic oligonucleotide
  Sense strand starting at position 2971 of SEQ ID NO: 1564290
gucaaauacuuauccuagu

SEQ ID NO: 1868984 - RNA, 19 nt, Artificial Sequence
  Description of Artificial Sequence: Synthetic oligonucleotide
  Antisense strand to SEQ ID NO: 1868983
acuaggauaaguauuugac

SEQ ID NO: 1868985 - RNA, 19 nt, Artificial Sequence
  Description of Artificial Sequence: Synthetic oligonucleotide
  Sense strand starting at position 2990 of SEQ ID NO: 1564290
cuagucaucucuuccuagu

SEQ ID NO: 1868986 - RNA, 19 nt, Artificial Sequence
  Description of Artificial Sequence: Synthetic oligonucleotide
  Antisense strand to SEQ ID NO: 1868985
acuaggaagagaugacuag

SEQ ID NO: 1868987 - RNA, 19 nt, Artificial Sequence
  Description of Artificial Sequence: Synthetic oligonucleotide
  Sense strand starting at position 3007 of SEQ ID NO: 1564290
guucuugauuuguaguaac

SEQ ID NO: 1868988 - RNA, 19 nt, Artificial Sequence
  Description of Artificial Sequence: Synthetic oligonucleotide
  Antisense strand to SEQ ID NO: 1868987
guuacuacaaaucaagaac

SEQ ID NO: 1868989 - RNA, 19 nt, Artificial Sequence
  Description of Artificial Sequence: Synthetic oligonucleotide
  Sense strand starting at position 3010 of SEQ ID NO: 1564290
cuugauuuguaguaaccua

SEQ ID NO: 1868990 - RNA, 19 nt, Artificial Sequence
  Description of Artificial Sequence: Synthetic oligonucleotide
  Antisense strand to SEQ ID NO: 1868989
uagguuacuacaaaucaag

SEQ ID NO: 1868991 - RNA, 19 nt, Artificial Sequence
  Description of Artificial Sequence: Synthetic oligonucleotide
  Sense strand starting at position 3017 of SEQ ID NO: 1564290
uguaguaaccuagguacua

SEQ ID NO: 1868992 - RNA, 19 nt, Artificial Sequence
  Description of Artificial Sequence: Synthetic oligonucleotide
  Antisense strand to SEQ ID NO: 1868991
uaguaccuagguuacuaca

SEQ ID NO: 1868993 - RNA, 19 nt, Artificial Sequence
  Description of Artificial Sequence: Synthetic oligonucleotide
  Sense strand starting at position 3106 of SEQ ID NO: 1564290
acuugucuuuaaccaguua

SEQ ID NO: 1868994 - RNA, 19 nt, Artificial Sequence
  Description of Artificial Sequence: Synthetic oligonucleotide
  Antisense strand to SEQ ID NO: 1868993
uaacugguuaaagacaagu

SEQ ID NO: 1868995 - RNA, 19 nt, Artificial Sequence
  Description of Artificial Sequence: Synthetic oligonucleotide
  Sense strand starting at position 3114 of SEQ ID NO: 1564290
uuaaccaguuauucuaguu

SEQ ID NO: 1868996 - RNA, 19 nt, Artificial Sequence
  Description of Artificial Sequence: Synthetic oligonucleotide
  Antisense strand to SEQ ID NO: 1868995
aacuagaauaacugguuaa

SEQ ID NO: 1868997 - RNA, 19 nt, Artificial Sequence
  Description of Artificial Sequence: Synthetic oligonucleotide
  Sense strand starting at position 3164 of SEQ ID NO: 1564290
agguaacucuaguuacugu

SEQ ID NO: 1868998 - RNA, 19 nt, Artificial Sequence
  Description of Artificial Sequence: Synthetic oligonucleotide
  Antisense strand to SEQ ID NO: 1868997
acaguaacuagaguuaccu

SEQ ID NO: 1868999 - RNA, 19 nt, Artificial Sequence
  Description of Artificial Sequence: Synthetic oligonucleotide
  Sense strand starting at position 3173 of SEQ ID NO: 1564290
uaguuacuguauccauagu

SEQ ID NO: 1869000 - RNA, 19 nt, Artificial Sequence
  Description of Artificial Sequence: Synthetic oligonucleotide
  Antisense strand to SEQ ID NO: 1868999
acuauggauacaguaacua

SEQ ID NO: 1869001 - RNA, 19 nt, Artificial Sequence
  Description of Artificial Sequence: Synthetic oligonucleotide
  Sense strand starting at position 3228 of SEQ ID NO: 1564290
guugacuagaaugguuacu

SEQ ID NO: 1869002 - RNA, 19 nt, Artificial Sequence
  Description of Artificial Sequence: Synthetic oligonucleotide
  Antisense strand to SEQ ID NO: 1869001
aguaaccauucuagucaac

SEQ ID NO: 1869003 - RNA, 19 nt, Artificial Sequence
  Description of Artificial Sequence: Synthetic oligonucleotide
  Sense strand starting at position 3274 of SEQ ID NO: 1564290
ugcuaauugcuaguuguuu

SEQ ID NO: 1869004 - RNA, 19 nt, Artificial Sequence
  Description of Artificial Sequence: Synthetic oligonucleotide
  Antisense strand to SEQ ID NO: 1869003
aaacaacuagcaauuagca

SEQ ID NO: 1869005 - RNA, 19 nt, Artificial Sequence
  Description of Artificial Sequence: Synthetic oligonucleotide
  Sense strand starting at position 3275 of SEQ ID NO: 1564290
gcuaauugcuaguuguuua

SEQ ID NO: 1869006 - RNA, 19 nt, Artificial Sequence
  Description of Artificial Sequence: Synthetic oligonucleotide
  Antisense strand to SEQ ID NO: 1869005
uaaacaacuagcaauuagc

SEQ ID NO: 1869007 - RNA, 19 nt, Artificial Sequence
  Description of Artificial Sequence: Synthetic oligonucleotide
  Sense strand starting at position 3295 of SEQ ID NO: 1564290
ucaacuguuugccuaagua

SEQ ID NO: 1869008 - RNA, 19 nt, Artificial Sequence
  Description of Artificial Sequence: Synthetic oligonucleotide
  Antisense strand to SEQ ID NO: 1869007
uacuuaggcaaacaguuga

SEQ ID NO: 1869009 - RNA, 19 nt, Artificial Sequence
  Description of Artificial Sequence: Synthetic oligonucleotide
  Sense strand starting at position 3313 of SEQ ID NO: 1564290
accacuaaaugucuaguuu

SEQ ID NO: 1869010 - RNA, 19 nt, Artificial Sequence
  Description of Artificial Sequence: Synthetic oligonucleotide
  Antisense strand to SEQ ID NO: 1869009
aaacuagacauuuaguggu

SEQ ID NO: 1869011 - RNA, 19 nt, Artificial Sequence
  Description of Artificial Sequence: Synthetic oligonucleotide
  Sense strand starting at position 3366 of SEQ ID NO: 1564290
gaauauguuuauuccaggu

SEQ ID NO: 1869012 - RNA, 19 nt, Artificial Sequence
  Description of Artificial Sequence: Synthetic oligonucleotide
  Antisense strand to SEQ ID NO: 1869011
accuggaauaaacauauuc

SEQ ID NO: 1869013 - RNA, 19 nt, Artificial Sequence
  Description of Artificial Sequence: Synthetic oligonucleotide
  Sense strand starting at position 3370 of SEQ ID NO: 1564290
auguuuauuccagguacug

SEQ ID NO: 1869014 - RNA, 19 nt, Artificial Sequence
  Description of Artificial Sequence: Synthetic oligonucleotide
  Antisense strand to SEQ ID NO: 1869013
caguaccuggaauaaacau

SEQ ID NO: 1869015 - RNA, 19 nt, Artificial Sequence
  Description of Artificial Sequence: Synthetic oligonucleotide
  Sense strand starting at position 3395 of SEQ ID NO: 1564290
ucuaguuaucucuagccca

SEQ ID NO: 1869016 - RNA, 19 nt, Artificial Sequence
  Description of Artificial Sequence: Synthetic oligonucleotide
  Antisense strand to SEQ ID NO: 1869015
ugggcuagagauaacuaga

SEQ ID NO: 1869017 - RNA, 19 nt, Artificial Sequence
  Description of Artificial Sequence: Synthetic oligonucleotide
  Sense strand starting at position 3666 of SEQ ID NO: 1564290
ccuggaugcccagguaaau

SEQ ID NO: 1869018 - RNA, 19 nt, Artificial Sequence
  Description of Artificial Sequence: Synthetic oligonucleotide
  Antisense strand to SEQ ID NO: 1869017
auuuaccugggcauccagg

SEQ ID NO: 1869019 - RNA, 19 nt, Artificial Sequence
  Description of Artificial Sequence: Synthetic oligonucleotide
  Sense strand starting at position 3676 of SEQ ID NO: 1564290
cagguaaauguuugcugca

SEQ ID NO: 1869020 - RNA, 19 nt, Artificial Sequence
  Description of Artificial Sequence: Synthetic oligonucleotide
  Antisense strand to SEQ ID NO: 1869019
ugcagcaaacauuuaccug

SEQ ID NO: 1869021 - RNA, 19 nt, Artificial Sequence
  Description of Artificial Sequence: Synthetic oligonucleotide
  Sense strand starting at position 663 of SEQ ID NO: 1564291
cggagucacucagaucaau

SEQ ID NO: 1869022 - RNA, 19 nt, Artificial Sequence
  Description of Artificial Sequence: Synthetic oligonucleotide
  Antisense strand to SEQ ID NO: 1869021
auugaucugagugacuccg

SEQ ID NO: 1869023 - RNA, 19 nt, Artificial Sequence
  Description of Artificial Sequence: Synthetic oligonucleotide
  Sense strand starting at position 768 of SEQ ID NO: 1564291
gucggugcucucggagaca

SEQ ID NO: 1869024 - RNA, 19 nt, Artificial Sequence
  Description of Artificial Sequence: Synthetic oligonucleotide
  Antisense strand to SEQ ID NO: 1869023
ugucuccgagagcaccgac

SEQ ID NO: 1869025 - RNA, 19 nt, Artificial Sequence
  Description of Artificial Sequence: Synthetic oligonucleotide
  Sense strand starting at position 1538 of SEQ ID NO: 1564291
ggccuuauacgucacaaag

SEQ ID NO: 1869026 - RNA, 19 nt, Artificial Sequence
  Description of Artificial Sequence: Synthetic oligonucleotide
  Antisense strand to SEQ ID NO: 1869025
cuuugugacguauaaggcc

SEQ ID NO: 1869027 - RNA, 19 nt, Artificial Sequence
  Description of Artificial Sequence: Synthetic oligonucleotide
  Sense strand starting at position 1540 of SEQ ID NO: 1564291
ccuuauacgucacaaagca

SEQ ID NO: 1869028 - RNA, 19 nt, Artificial Sequence
  Description of Artificial Sequence: Synthetic oligonucleotide
  Antisense strand to SEQ ID NO: 1869027
ugcuuugugacguauaagg

SEQ ID NO: 1869029 - RNA, 19 nt, Artificial Sequence
  Description of Artificial Sequence: Synthetic oligonucleotide
  Sense strand starting at position 1740 of SEQ ID NO: 1564291
ggaggauauuuccgccaca

SEQ ID NO: 1869030 - RNA, 19 nt, Artificial Sequence
  Description of Artificial Sequence: Synthetic oligonucleotide
  Antisense strand to SEQ ID NO: 1869029
uguggcggaaauauccucc

SEQ ID NO: 1869031 - RNA, 19 nt, Artificial Sequence
  Description of Artificial Sequence: Synthetic oligonucleotide
  Sense strand starting at position 1745 of SEQ ID NO: 1564291
auauuuccgccacauguuu

SEQ ID NO: 1869032 - RNA, 19 nt, Artificial Sequence
  Description of Artificial Sequence: Synthetic oligonucleotide
  Antisense strand to SEQ ID NO: 1869031
aaacauguggcggaaauau

SEQ ID NO: 1869033 - RNA, 19 nt, Artificial Sequence
  Description of Artificial Sequence: Synthetic oligonucleotide
  Sense strand starting at position 2298 of SEQ ID NO: 1564291
ugaaauauauagggcaagu

SEQ ID NO: 1869034 - RNA, 19 nt, Artificial Sequence
  Description of Artificial Sequence: Synthetic oligonucleotide
  Antisense strand to SEQ ID NO: 1869033
acuugcccuauauauuuca

SEQ ID NO: 1869035 - RNA, 19 nt, Artificial Sequence
  Description of Artificial Sequence: Synthetic oligonucleotide
  Sense strand starting at position 2375 of SEQ ID NO: 1564291
ggcuaugguuugggagaag

SEQ ID NO: 1869036 - RNA, 19 nt, Artificial Sequence
  Description of Artificial Sequence: Synthetic oligonucleotide
  Antisense strand to SEQ ID NO: 1869035
cuucucccaaaccauagcc

SEQ ID NO: 1869037 - RNA, 19 nt, Artificial Sequence
  Description of Artificial Sequence: Synthetic oligonucleotide
  Sense strand starting at position 2401 of SEQ ID NO: 1564291
cgaaccauguaucuaauaa

SEQ ID NO: 1869038 - RNA, 19 nt, Artificial Sequence
  Description of Artificial Sequence: Synthetic oligonucleotide
  Antisense strand to SEQ ID NO: 1869037
uuauuagauacaugguucg

SEQ ID NO: 1869039 - RNA, 19 nt, Artificial Sequence
  Description of Artificial Sequence: Synthetic oligonucleotide
  Sense strand starting at position 2405 of SEQ ID NO: 1564291
ccauguaucuaauaaugag

SEQ ID NO: 1869040 - RNA, 19 nt, Artificial Sequence
  Description of Artificial Sequence: Synthetic oligonucleotide
  Antisense strand to SEQ ID NO: 1869039
cucauuauuagauacaugg

SEQ ID NO: 1869041 - RNA, 19 nt, Artificial Sequence
  Description of Artificial Sequence: Synthetic oligonucleotide
  Sense strand starting at position 2762 of SEQ ID NO: 1564291
guccacaucucauauagau

SEQ ID NO: 1869042 - RNA, 19 nt, Artificial Sequence
  Description of Artificial Sequence: Synthetic oligonucleotide
  Antisense strand to SEQ ID NO: 1869041
aucuauaugagauguggac

SEQ ID NO: 1869043 - RNA, 19 nt, Artificial Sequence
  Description of Artificial Sequence: Synthetic oligonucleotide
  Sense strand starting at position 2771 of SEQ ID NO: 1564291
ucauauagauaucuccagu

SEQ ID NO: 1869044 - RNA, 19 nt, Artificial Sequence
  Description of Artificial Sequence: Synthetic oligonucleotide
  Antisense strand to SEQ ID NO: 1869043
acuggagauaucuauauga

SEQ ID NO: 1869045 - RNA, 19 nt, Artificial Sequence
  Description of Artificial Sequence: Synthetic oligonucleotide
  Sense strand starting at position 2895 of SEQ ID NO: 1564291
ucuuauuucuugcuuugua

SEQ ID NO: 1869046 - RNA, 19 nt, Artificial Sequence
  Description of Artificial Sequence: Synthetic oligonucleotide
  Antisense strand to SEQ ID NO: 1869045
uacaaagcaagaaauaaga

SEQ ID NO: 1869047 - RNA, 19 nt, Artificial Sequence
  Description of Artificial Sequence: Synthetic oligonucleotide
  Sense strand starting at position 2911 of SEQ ID NO: 1564291
guaauaaccuagguacuca

SEQ ID NO: 1869048 - RNA, 19 nt, Artificial Sequence
  Description of Artificial Sequence: Synthetic oligonucleotide
  Antisense strand to SEQ ID NO: 1869047
ugaguaccuagguuauuac

SEQ ID NO: 1869049 - RNA, 19 nt, Artificial Sequence
  Description of Artificial Sequence: Synthetic oligonucleotide
  Sense strand starting at position 2971 of SEQ ID NO: 1564291
gagaaauacugaggagaau

SEQ ID NO: 1869050 - RNA, 19 nt, Artificial Sequence
  Description of Artificial Sequence: Synthetic oligonucleotide
  Antisense strand to SEQ ID NO: 1869049
auucuccucaguauuucuc

SEQ ID NO: 1869051 - RNA, 19 nt, Artificial Sequence
  Description of Artificial Sequence: Synthetic oligonucleotide
  Sense strand starting at position 2982 of SEQ ID NO: 1564291
aggagaaugcaaugugaua

SEQ ID NO: 1869052 - RNA, 19 nt, Artificial Sequence
  Description of Artificial Sequence: Synthetic oligonucleotide
  Antisense strand to SEQ ID NO: 1869051
uaucacauugcauucuccu

SEQ ID NO: 1869053 - RNA, 19 nt, Artificial Sequence
  Description of Artificial Sequence: Synthetic oligonucleotide
  Sense strand starting at position 2993 of SEQ ID NO: 1564291
augugauacuucugucuuc

SEQ ID NO: 1869054 - RNA, 19 nt, Artificial Sequence
  Description of Artificial Sequence: Synthetic oligonucleotide
  Antisense strand to SEQ ID NO: 1869053
gaagacagaaguaucacau

SEQ ID NO: 1869055 - RNA, 19 nt, Artificial Sequence
  Description of Artificial Sequence: Synthetic oligonucleotide
  Sense strand starting at position 3060 of SEQ ID NO: 1564291
agguaacucuaguuaccaa

SEQ ID NO: 1869056 - RNA, 19 nt, Artificial Sequence
  Description of Artificial Sequence: Synthetic oligonucleotide
  Antisense strand to SEQ ID NO: 1869055
uugguaacuagaguuaccu

SEQ ID NO: 1869057 - RNA, 19 nt, Artificial Sequence
  Description of Artificial Sequence: Synthetic oligonucleotide
  Sense strand starting at position 3126 of SEQ ID NO: 1564291
ugacucgaaugguuacuaa

SEQ ID NO: 1869058 - RNA, 19 nt, Artificial Sequence
  Description of Artificial Sequence: Synthetic oligonucleotide
  Antisense strand to SEQ ID NO: 1869057
uuaguaaccauucgaguca

SEQ ID NO: 1869059 - RNA, 19 nt, Artificial Sequence
  Description of Artificial Sequence: Synthetic oligonucleotide
  Sense strand starting at position 3129 of SEQ ID NO: 1564291
cucgaaugguuacuaaacu

SEQ ID NO: 1869060 - RNA, 19 nt, Artificial Sequence
  Description of Artificial Sequence: Synthetic oligonucleotide
  Antisense strand to SEQ ID NO: 1869059
aguuuaguaaccauucgag

SEQ ID NO: 1869061 - RNA, 19 nt, Artificial Sequence
  Description of Artificial Sequence: Synthetic oligonucleotide
  Sense strand starting at position 3130 of SEQ ID NO: 1564291
ucgaaugguuacuaaacuu

SEQ ID NO: 1869062 - RNA, 19 nt, Artificial Sequence
  Description of Artificial Sequence: Synthetic oligonucleotide
  Antisense strand to SEQ ID NO: 1869061
aaguuuaguaaccauucga

SEQ ID NO: 1869063 - RNA, 19 nt, Artificial Sequence
  Description of Artificial Sequence: Synthetic oligonucleotide
  Sense strand starting at position 3172 of SEQ ID NO: 1564291
guaauugcuaguuguuugu

SEQ ID NO: 1869064 - RNA, 19 nt, Artificial Sequence
  Description of Artificial Sequence: Synthetic oligonucleotide
  Antisense strand to SEQ ID NO: 1869063
acaaacaacuagcaauuac

SEQ ID NO: 1869065 - RNA, 19 nt, Artificial Sequence
  Description of Artificial Sequence: Synthetic oligonucleotide
  Sense strand starting at position 3251 of SEQ ID NO: 1564291
guuaauuacucacuuggau

SEQ ID NO: 1869066 - RNA, 19 nt, Artificial Sequence
  Description of Artificial Sequence: Synthetic oligonucleotide
  Antisense strand to SEQ ID NO: 1869065
auccaagugaguaauuaac

SEQ ID NO: 1869067 - RNA, 19 nt, Artificial Sequence
  Description of Artificial Sequence: Synthetic oligonucleotide
  Sense strand starting at position 3454 of SEQ ID NO: 1564291
gugguaauuuauuauucca

SEQ ID NO: 1869068 - RNA, 19 nt, Artificial Sequence
  Description of Artificial Sequence: Synthetic oligonucleotide
  Antisense strand to SEQ ID NO: 1869067
uggaauaauaaauuaccac

SEQ ID NO: 1869069 - RNA, 19 nt, Artificial Sequence
  Description of Artificial Sequence: Synthetic oligonucleotide
  Sense strand starting at position 3543 of SEQ ID NO: 1564291
ccuguuauccuuuggaccu

SEQ ID NO: 1869070 - RNA, 19 nt, Artificial Sequence
  Description of Artificial Sequence: Synthetic oligonucleotide
  Antisense strand to SEQ ID NO: 1869069
agguccaaaggauaacagg

SEQ ID NO: 1869071 - RNA, 19 nt, Artificial Sequence
  Description of Artificial Sequence: Synthetic oligonucleotide
  Sense strand starting at position 3544 of SEQ ID NO: 1564291
cuguuauccuuuggaccuu

SEQ ID NO: 1869072 - RNA, 19 nt, Artificial Sequence
  Description of Artificial Sequence: Synthetic oligonucleotide
  Antisense strand to SEQ ID NO: 1869071
aagguccaaaggauaacag

SEQ ID NO: 1869073 - RNA, 19 nt, Artificial Sequence
  Description of Artificial Sequence: Synthetic oligonucleotide
  Sense strand starting at position 3666 of SEQ ID NO: 1564291
uuaguauugcaaugacugu

SEQ ID NO: 1869074 - RNA, 19 nt, Artificial Sequence
  Description of Artificial Sequence: Synthetic oligonucleotide
  Antisense strand to SEQ ID NO: 1869073
acagucauugcaauacuaa

SEQ ID NO: 1869075 - RNA, 19 nt, Artificial Sequence
  Description of Artificial Sequence: Synthetic oligonucleotide
  Sense strand starting at position 3680 of SEQ ID NO: 1564291
acuguuagcucuuucuaug

SEQ ID NO: 1869076 - RNA, 19 nt, Artificial Sequence
  Description of Artificial Sequence: Synthetic oligonucleotide
  Antisense strand to SEQ ID NO: 1869075
cauagaaagagcuaacagu

SEQ ID NO: 1869077 - RNA, 19 nt, Artificial Sequence
  Description of Artificial Sequence: Synthetic oligonucleotide
  Sense strand starting at position 3683 of SEQ ID NO: 1564291
guuagcucuuucuauguaa

SEQ ID NO: 1869078 - RNA, 19 nt, Artificial Sequence
  Description of Artificial Sequence: Synthetic oligonucleotide
  Antisense strand to SEQ ID NO: 1869077
uuacauagaaagagcuaac

SEQ ID NO: 1869079 - RNA, 19 nt, Artificial Sequence
  Description of Artificial Sequence: Synthetic oligonucleotide
  Sense strand starting at position 3719 of SEQ ID NO: 1564291
cccaguuaaguagaacuca

SEQ ID NO: 1869080 - RNA, 19 nt, Artificial Sequence
  Description of Artificial Sequence: Synthetic oligonucleotide
  Antisense strand to SEQ ID NO: 1869079
ugaguucuacuuaacuggg

SEQ ID NO: 1869081 - RNA, 19 nt, Artificial Sequence
  Description of Artificial Sequence: Synthetic oligonucleotide
  Sense strand starting at position 3774 of SEQ ID NO: 1564291
ugacuagauucccuauguu

SEQ ID NO: 1869082 - RNA, 19 nt, Artificial Sequence
  Description of Artificial Sequence: Synthetic oligonucleotide
  Antisense strand to SEQ ID NO: 1869081
aacauagggaaucuaguca

SEQ ID NO: 1869083 - RNA, 19 nt, Artificial Sequence
  Description of Artificial Sequence: Synthetic oligonucleotide
  Sense strand starting at position 3809 of SEQ ID NO: 1564291
uauuguuguugucucuauu

SEQ ID NO: 1869084 - RNA, 19 nt, Artificial Sequence
  Description of Artificial Sequence: Synthetic oligonucleotide
  Antisense strand to SEQ ID NO: 1869083
aauagagacaacaacaaua

SEQ ID NO: 1869085 - RNA, 19 nt, Artificial Sequence
  Description of Artificial Sequence: Synthetic oligonucleotide
  Sense strand starting at position 3830 of SEQ ID NO: 1564291
acuacuuacuuagguauau

SEQ ID NO: 1869086 - RNA, 19 nt, Artificial Sequence
  Description of Artificial Sequence: Synthetic oligonucleotide
  Antisense strand to SEQ ID NO: 1869085
auauaccuaaguaaguagu

SEQ ID NO: 1869087 - RNA, 19 nt, Artificial Sequence
  Description of Artificial Sequence: Synthetic oligonucleotide
  Sense strand starting at position 3843 of SEQ ID NO: 1564291
guauaugacucaucuguag

SEQ ID NO: 1869088 - RNA, 19 nt, Artificial Sequence
  Description of Artificial Sequence: Synthetic oligonucleotide
  Antisense strand to SEQ ID NO: 1869087
cuacagaugagucauauac

SEQ ID NO: 1869089 - RNA, 19 nt, Artificial Sequence
  Description of Artificial Sequence: Synthetic oligonucleotide
  Sense strand starting at position 3847 of SEQ ID NO: 1564291
augacucaucuguaguagu

SEQ ID NO: 1869090 - RNA, 19 nt, Artificial Sequence
  Description of Artificial Sequence: Synthetic oligonucleotide
  Antisense strand to SEQ ID NO: 1869089
acuacuacagaugagucau

SEQ ID NO: 1869091 - RNA, 19 nt, Artificial Sequence
  Description of Artificial Sequence: Synthetic oligonucleotide
  Sense strand starting at position 3850 of SEQ ID NO: 1564291
acucaucuguaguaguaau

SEQ ID NO: 1869092 - RNA, 19 nt, Artificial Sequence
  Description of Artificial Sequence: Synthetic oligonucleotide
  Antisense strand to SEQ ID NO: 1869091
auuacuacuacagaugagu

SEQ ID NO: 1869093 - RNA, 19 nt, Artificial Sequence
  Description of Artificial Sequence: Synthetic oligonucleotide
  Sense strand starting at position 591 of SEQ ID NO: 1564292
gucgcugcucucggagaua

SEQ ID NO: 1869094 - RNA, 19 nt, Artificial Sequence
  Description of Artificial Sequence: Synthetic oligonucleotide
  Antisense strand to SEQ ID NO: 1869093
uaucuccgagagcagcgac

SEQ ID NO: 1869095 - RNA, 19 nt, Artificial Sequence
  Description of Artificial Sequence: Synthetic oligonucleotide
  Sense strand starting at position 2182 of SEQ ID NO: 1564292
uguauuuacuaucauguag

SEQ ID NO: 1869096 - RNA, 19 nt, Artificial Sequence
  Description of Artificial Sequence: Synthetic oligonucleotide
  Antisense strand to SEQ ID NO: 1869095
cuacaugauaguaaauaca

SEQ ID NO: 1869097 - RNA, 19 nt, Artificial Sequence
  Description of Artificial Sequence: Synthetic oligonucleotide
  Sense strand starting at position 2189 of SEQ ID NO: 1564292
acuaucauguaguauugau

SEQ ID NO: 1869098 - RNA, 19 nt, Artificial Sequence
  Description of Artificial Sequence: Synthetic oligonucleotide
  Antisense strand to SEQ ID NO: 1869097
aucaauacuacaugauagu

SEQ ID NO: 1869099 - RNA, 19 nt, Artificial Sequence
  Description of Artificial Sequence: Synthetic oligonucleotide
  Sense strand starting at position 2235 of SEQ ID NO: 1564292
aguuuauucuaagcaauug

SEQ ID NO: 1869100 - RNA, 19 nt, Artificial Sequence
  Description of Artificial Sequence: Synthetic oligonucleotide
  Antisense strand to SEQ ID NO: 1869099
caauugcuuagaauaaacu

SEQ ID NO: 1869101 - RNA, 19 nt, Artificial Sequence
  Description of Artificial Sequence: Synthetic oligonucleotide
  Sense strand starting at position 2292 of SEQ ID NO: 1564292
ugaaauauguagggcaagu

SEQ ID NO: 1869102 - RNA, 19 nt, Artificial Sequence
  Description of Artificial Sequence: Synthetic oligonucleotide
  Antisense strand to SEQ ID NO: 1869101
acuugcccuacauauuuca

SEQ ID NO: 1869103 - RNA, 19 nt, Artificial Sequence
  Description of Artificial Sequence: Synthetic oligonucleotide
  Sense strand starting at position 2369 of SEQ ID NO: 1564292
ggcuaugguuugggagaaa

SEQ ID NO: 1869104 - RNA, 19 nt, Artificial Sequence
  Description of Artificial Sequence: Synthetic oligonucleotide
  Antisense strand to SEQ ID NO: 1869103
uuucucccaaaccauagcc

SEQ ID NO: 1869105 - RNA, 19 nt, Artificial Sequence
  Description of Artificial Sequence: Synthetic oligonucleotide
  Sense strand starting at position 2383 of SEQ ID NO: 1564292
agaaacuauuugcgaacca

SEQ ID NO: 1869106 - RNA, 19 nt, Artificial Sequence
  Description of Artificial Sequence: Synthetic oligonucleotide
  Antisense strand to SEQ ID NO: 1869105
ugguucgcaaauaguuucu

SEQ ID NO: 1869107 - RNA, 19 nt, Artificial Sequence
  Description of Artificial Sequence: Synthetic oligonucleotide
  Sense strand starting at position 2747 of SEQ ID NO: 1564292
ugguacagccguuaggaaa

SEQ ID NO: 1869108 - RNA, 19 nt, Artificial Sequence
  Description of Artificial Sequence: Synthetic oligonucleotide
  Antisense strand to SEQ ID NO: 1869107
uuuccuaacggcuguacca

SEQ ID NO: 1869109 - RNA, 19 nt, Artificial Sequence
  Description of Artificial Sequence: Synthetic oligonucleotide
  Sense strand starting at position 2890 of SEQ ID NO: 1564292
aguguaacucauuaaucac

SEQ ID NO: 1869110 - RNA, 19 nt, Artificial Sequence
  Description of Artificial Sequence: Synthetic oligonucleotide
  Antisense strand to SEQ ID NO: 1869109
gugauuaaugaguuacacu

SEQ ID NO: 1869111 - RNA, 19 nt, Artificial Sequence
  Description of Artificial Sequence: Synthetic oligonucleotide
  Sense strand starting at position 3007 of SEQ ID NO: 1564292
uguaauaaucuagguacua

SEQ ID NO: 1869112 - RNA, 19 nt, Artificial Sequence
  Description of Artificial Sequence: Synthetic oligonucleotide
  Antisense strand to SEQ ID NO: 1869111
uaguaccuagauuauuaca

SEQ ID NO: 1869113 - RNA, 19 nt, Artificial Sequence
  Description of Artificial Sequence: Synthetic oligonucleotide
  Sense strand starting at position 3008 of SEQ ID NO: 1564292
guaauaaucuagguacuac

SEQ ID NO: 1869114 - RNA, 19 nt, Artificial Sequence
  Description of Artificial Sequence: Synthetic oligonucleotide
  Antisense strand to SEQ ID NO: 1869113
guaguaccuagauuauuac

SEQ ID NO: 1869115 - RNA, 19 nt, Artificial Sequence
  Description of Artificial Sequence: Synthetic oligonucleotide
  Sense strand starting at position 3217 of SEQ ID NO: 1564292
cagaguugacuagaaucgu

SEQ ID NO: 1869116 - RNA, 19 nt, Artificial Sequence
  Description of Artificial Sequence: Synthetic oligonucleotide
  Antisense strand to SEQ ID NO: 1869115
acgauucuagucaacucug

SEQ ID NO: 1869117 - RNA, 19 nt, Artificial Sequence
  Description of Artificial Sequence: Synthetic oligonucleotide
  Sense strand starting at position 3221 of SEQ ID NO: 1564292
guugacuagaaucguuacu

SEQ ID NO: 1869118 - RNA, 19 nt, Artificial Sequence
  Description of Artificial Sequence: Synthetic oligonucleotide
  Antisense strand to SEQ ID NO: 1869117
aguaacgauucuagucaac

SEQ ID NO: 1869119 - RNA, 19 nt, Artificial Sequence
  Description of Artificial Sequence: Synthetic oligonucleotide
  Sense strand starting at position 3223 of SEQ ID NO: 1564292
ugacuagaaucguuacuaa

SEQ ID NO: 1869120 - RNA, 19 nt, Artificial Sequence
  Description of Artificial Sequence: Synthetic oligonucleotide
  Antisense strand to SEQ ID NO: 1869119
uuaguaacgauucuaguca

SEQ ID NO: 1869121 - RNA, 19 nt, Artificial Sequence
  Description of Artificial Sequence: Synthetic oligonucleotide
  Sense strand starting at position 3226 of SEQ ID NO: 1564292
cuagaaucguuacuaaacu

SEQ ID NO: 1869122 - RNA, 19 nt, Artificial Sequence
  Description of Artificial Sequence: Synthetic oligonucleotide
  Antisense strand to SEQ ID NO: 1869121
aguuuaguaacgauucuag

SEQ ID NO: 1869123 - RNA, 19 nt, Artificial Sequence
  Description of Artificial Sequence: Synthetic oligonucleotide
  Sense strand starting at position 3244 of SEQ ID NO: 1564292
uuucuauguuaaccaguuu

SEQ ID NO: 1869124 - RNA, 19 nt, Artificial Sequence
  Description of Artificial Sequence: Synthetic oligonucleotide
  Antisense strand to SEQ ID NO: 1869123
aaacugguuaacauagaaa

SEQ ID NO: 1869125 - RNA, 19 nt, Artificial Sequence
  Description of Artificial Sequence: Synthetic oligonucleotide
  Sense strand starting at position 3287 of SEQ ID NO: 1564292
ucaacuguuugccuaggua

SEQ ID NO: 1869126 - RNA, 19 nt, Artificial Sequence
  Description of Artificial Sequence: Synthetic oligonucleotide
  Antisense strand to SEQ ID NO: 1869125
uaccuaggcaaacaguuga

SEQ ID NO: 1869127 - RNA, 19 nt, Artificial Sequence
  Description of Artificial Sequence: Synthetic oligonucleotide
  Sense strand starting at position 3305 of SEQ ID NO: 1564292
accacuaaaugucuaguuu

SEQ ID NO: 1869128 - RNA, 19 nt, Artificial Sequence
  Description of Artificial Sequence: Synthetic oligonucleotide
  Antisense strand to SEQ ID NO: 1869127
aaacuagacauuuaguggu

SEQ ID NO: 1869129 - RNA, 19 nt, Artificial Sequence
  Description of Artificial Sequence: Synthetic oligonucleotide
  Sense strand starting at position 3384 of SEQ ID NO: 1564292
ucaucuaguuaucucuagu

SEQ ID NO: 1869130 - RNA, 19 nt, Artificial Sequence
  Description of Artificial Sequence: Synthetic oligonucleotide
  Antisense strand to SEQ ID NO: 1869129
acuagagauaacuagauga

SEQ ID NO: 1869131 - RNA, 19 nt, Artificial Sequence
  Description of Artificial Sequence: Synthetic oligonucleotide
  Sense strand starting at position 3387 of SEQ ID NO: 1564292
ucuaguuaucucuaguuaa

SEQ ID NO: 1869132 - RNA, 19 nt, Artificial Sequence
  Description of Artificial Sequence: Synthetic oligonucleotide
  Antisense strand to SEQ ID NO: 1869131
uuaacuagagauaacuaga

SEQ ID NO: 1869133 - RNA, 19 nt, Artificial Sequence
  Description of Artificial Sequence: Synthetic oligonucleotide
  Sense strand starting at position 3423 of SEQ ID NO: 1564292
guagauaucuauuguauga

SEQ ID NO: 1869134 - RNA, 19 nt, Artificial Sequence
  Description of Artificial Sequence: Synthetic oligonucleotide
  Antisense strand to SEQ ID NO: 1869133
ucauacaauagauaucuac

SEQ ID NO: 1869135 - RNA, 19 nt, Artificial Sequence
  Description of Artificial Sequence: Synthetic oligonucleotide
  Sense strand starting at position 3535 of SEQ ID NO: 1564292
ucaauuacuuggucugguu

SEQ ID NO: 1869136 - RNA, 19 nt, Artificial Sequence
  Description of Artificial Sequence: Synthetic oligonucleotide
  Antisense strand to SEQ ID NO: 1869135
aaccagaccaaguaauuga

SEQ ID NO: 1869137 - RNA, 19 nt, Artificial Sequence
  Description of Artificial Sequence: Synthetic oligonucleotide
  Sense strand starting at position 3537 of SEQ ID NO: 1564292
aauuacuuggucugguuaa

SEQ ID NO: 1869138 - RNA, 19 nt, Artificial Sequence
  Description of Artificial Sequence: Synthetic oligonucleotide
  Antisense strand to SEQ ID NO: 1869137
uuaaccagaccaaguaauu

SEQ ID NO: 1869139 - RNA, 19 nt, Artificial Sequence
  Description of Artificial Sequence: Synthetic oligonucleotide
  Sense strand starting at position 3538 of SEQ ID NO: 1564292
auuacuuggucugguuaau

SEQ ID NO: 1869140 - RNA, 19 nt, Artificial Sequence
  Description of Artificial Sequence: Synthetic oligonucleotide
  Antisense strand to SEQ ID NO: 1869139
auuaaccagaccaaguaau

SEQ ID NO: 1869141 - RNA, 19 nt, Artificial Sequence
  Description of Artificial Sequence: Synthetic oligonucleotide
  Sense strand starting at position 3547 of SEQ ID NO: 1564292
ucugguuaauucuagcuau

SEQ ID NO: 1869142 - RNA, 19 nt, Artificial Sequence
  Description of Artificial Sequence: Synthetic oligonucleotide
  Antisense strand to SEQ ID NO: 1869141
auagcuagaauuaaccaga

SEQ ID NO: 1869143 - RNA, 19 nt, Artificial Sequence
  Description of Artificial Sequence: Synthetic oligonucleotide
  Sense strand starting at position 3550 of SEQ ID NO: 1564292
gguuaauucuagcuaucuu

SEQ ID NO: 1869144 - RNA, 19 nt, Artificial Sequence
  Description of Artificial Sequence: Synthetic oligonucleotide
  Antisense strand to SEQ ID NO: 1869143
aagauagcuagaauuaacc

SEQ ID NO: 1869145 - RNA, 19 nt, Artificial Sequence
  Description of Artificial Sequence: Synthetic oligonucleotide
  Sense strand starting at position 3565 of SEQ ID NO: 1564292
ucuuuagguugcuaauuaa

SEQ ID NO: 1869146 - RNA, 19 nt, Artificial Sequence
  Description of Artificial Sequence: Synthetic oligonucleotide
  Antisense strand to SEQ ID NO: 1869145
uuaauuagcaaccuaaaga

SEQ ID NO: 1869147 - RNA, 19 nt, Artificial Sequence
  Description of Artificial Sequence: Synthetic oligonucleotide
  Sense strand starting at position 3568 of SEQ ID NO: 1564292
uuagguugcuaauuaaaug

SEQ ID NO: 1869148 - RNA, 19 nt, Artificial Sequence
  Description of Artificial Sequence: Synthetic oligonucleotide
  Antisense strand to SEQ ID NO: 1869147
cauuuaauuagcaaccuaa

SEQ ID NO: 1869149 - RNA, 19 nt, Artificial Sequence
  Description of Artificial Sequence: Synthetic oligonucleotide
  Sense strand starting at position 3628 of SEQ ID NO: 1564292
acaguagaaugauaaggaa

SEQ ID NO: 1869150 - RNA, 19 nt, Artificial Sequence
  Description of Artificial Sequence: Synthetic oligonucleotide
  Antisense strand to SEQ ID NO: 1869149
uuccuuaucauucuacugu

SEQ ID NO: 1869151 - RNA, 19 nt, Artificial Sequence
  Description of Artificial Sequence: Synthetic oligonucleotide
  Sense strand starting at position 3800 of SEQ ID NO: 1564292
gggucagguucacuuggua

SEQ ID NO: 1869152 - RNA, 19 nt, Artificial Sequence
  Description of Artificial Sequence: Synthetic oligonucleotide
  Antisense strand to SEQ ID NO: 1869151
uaccaagugaaccugaccc

SEQ ID NO: 1869153 - RNA, 19 nt, Artificial Sequence
  Description of Artificial Sequence: Synthetic oligonucleotide
  Sense strand starting at position 3813 of SEQ ID NO: 1564292
uugguauuguaaugauugu

SEQ ID NO: 1869154 - RNA, 19 nt, Artificial Sequence
  Description of Artificial Sequence: Synthetic oligonucleotide
  Antisense strand to SEQ ID NO: 1869153
acaaucauuacaauaccaa

SEQ ID NO: 1869155 - RNA, 19 nt, Artificial Sequence
  Description of Artificial Sequence: Synthetic oligonucleotide
  Sense strand starting at position 3814 of SEQ ID NO: 1564292
ugguauuguaaugauuguu

SEQ ID NO: 1869156 - RNA, 19 nt, Artificial Sequence
  Description of Artificial Sequence: Synthetic oligonucleotide
  Antisense strand to SEQ ID NO: 1869155
aacaaucauuacaauacca

SEQ ID NO: 1869157 - RNA, 19 nt, Artificial Sequence
  Description of Artificial Sequence: Synthetic oligonucleotide
  Sense strand starting at position 3830 of SEQ ID NO: 1564292
guuagcuguuucuauguaa

SEQ ID NO: 1869158 - RNA, 19 nt, Artificial Sequence
  Description of Artificial Sequence: Synthetic oligonucleotide
  Antisense strand to SEQ ID NO: 1869157
uuacauagaaacagcuaac

SEQ ID NO: 1869159 - RNA, 19 nt, Artificial Sequence
  Description of Artificial Sequence: Synthetic oligonucleotide
  Sense strand starting at position 3833 of SEQ ID NO: 1564292
agcuguuucuauguaacgu

SEQ ID NO: 1869160 - RNA, 19 nt, Artificial Sequence
  Description of Artificial Sequence: Synthetic oligonucleotide
  Antisense strand to SEQ ID NO: 1869159
acguuacauagaaacagcu

SEQ ID NO: 1869161 - RNA, 19 nt, Artificial Sequence
  Description of Artificial Sequence: Synthetic oligonucleotide
  Sense strand starting at position 3837 of SEQ ID NO: 1564292
guuucuauguaacguguuu

SEQ ID NO: 1869162 - RNA, 19 nt, Artificial Sequence
  Description of Artificial Sequence: Synthetic oligonucleotide
  Antisense strand to SEQ ID NO: 1869161
aaacacguuacauagaaac

SEQ ID NO: 1869163 - RNA, 19 nt, Artificial Sequence
  Description of Artificial Sequence: Synthetic oligonucleotide
  Sense strand starting at position 3919 of SEQ ID NO: 1564292
gagacuagauucccuaugu

SEQ ID NO: 1869164 - RNA, 19 nt, Artificial Sequence
  Description of Artificial Sequence: Synthetic oligonucleotide
  Antisense strand to SEQ ID NO: 1869163
acauagggaaucuagucuc

SEQ ID NO: 1869165 - RNA, 19 nt, Artificial Sequence
  Description of Artificial Sequence: Synthetic oligonucleotide
  Sense strand starting at position 3920 of SEQ ID NO: 1564292
agacuagauucccuauguu

SEQ ID NO: 1869166 - RNA, 19 nt, Artificial Sequence
  Description of Artificial Sequence: Synthetic oligonucleotide
  Antisense strand to SEQ ID NO: 1869165
aacauagggaaucuagucu

SEQ ID NO: 1869167 - RNA, 19 nt, Artificial Sequence
  Description of Artificial Sequence: Synthetic oligonucleotide
  Sense strand starting at position 3954 of SEQ ID NO: 1564292
cuauucuuguugucucuau

SEQ ID NO: 1869168 - RNA, 19 nt, Artificial Sequence
  Description of Artificial Sequence: Synthetic oligonucleotide
  Antisense strand to SEQ ID NO: 1869167
auagagacaacaagaauag

SEQ ID NO: 1869169 - RNA, 19 nt, Artificial Sequence
  Description of Artificial Sequence: Synthetic oligonucleotide
  Sense strand starting at position 3973 of SEQ ID NO: 1564292
uuuacuauuuacguaggua

SEQ ID NO: 1869170 - RNA, 19 nt, Artificial Sequence
  Description of Artificial Sequence: Synthetic oligonucleotide
  Antisense strand to SEQ ID NO: 1869169
uaccuacguaaauaguaaa

SEQ ID NO: 1869171 - RNA, 19 nt, Artificial Sequence
  Description of Artificial Sequence: Synthetic oligonucleotide
  Sense strand starting at position 2161 of SEQ ID NO: 1564293
gagagagugucuguaauau

SEQ ID NO: 1869172 - RNA, 19 nt, Artificial Sequence
  Description of Artificial Sequence: Synthetic oligonucleotide
  Antisense strand to SEQ ID NO: 1869171
auauuacagacacucucuc

SEQ ID NO: 1869173 - RNA, 19 nt, Artificial Sequence
  Description of Artificial Sequence: Synthetic oligonucleotide
  Sense strand starting at position 2165 of SEQ ID NO: 1564293
gagugucuguaauauuaua

SEQ ID NO: 1869174 - RNA, 19 nt, Artificial Sequence
  Description of Artificial Sequence: Synthetic oligonucleotide
  Antisense strand to SEQ ID NO: 1869173
uauaauauuacagacacuc

SEQ ID NO: 1869175 - RNA, 19 nt, Artificial Sequence
  Description of Artificial Sequence: Synthetic oligonucleotide
  Sense strand starting at position 2240 of SEQ ID NO: 1564293
uaugauacgguuuacucua

SEQ ID NO: 1869176 - RNA, 19 nt, Artificial Sequence
  Description of Artificial Sequence: Synthetic oligonucleotide
  Antisense strand to SEQ ID NO: 1869175
uagaguaaaccguaucaua

SEQ ID NO: 1869177 - RNA, 19 nt, Artificial Sequence
  Description of Artificial Sequence: Synthetic oligonucleotide
  Sense strand starting at position 2245 of SEQ ID NO: 1564293
uacgguuuacucuaaguaa

SEQ ID NO: 1869178 - RNA, 19 nt, Artificial Sequence
  Description of Artificial Sequence: Synthetic oligonucleotide
  Antisense strand to SEQ ID NO: 1869177
uuacuuagaguaaaccgua

SEQ ID NO: 1869179 - RNA, 19 nt, Artificial Sequence
  Description of Artificial Sequence: Synthetic oligonucleotide
  Sense strand starting at position 2248 of SEQ ID NO: 1564293
gguuuacucuaaguaauug

SEQ ID NO: 1869180 - RNA, 19 nt, Artificial Sequence
  Description of Artificial Sequence: Synthetic oligonucleotide
  Antisense strand to SEQ ID NO: 1869179
caauuacuuagaguaaacc

SEQ ID NO: 1869181 - RNA, 19 nt, Artificial Sequence
  Description of Artificial Sequence: Synthetic oligonucleotide
  Sense strand starting at position 2390 of SEQ ID NO: 1564293
agaaacuauuugcgaacca

SEQ ID NO: 1869182 - RNA, 19 nt, Artificial Sequence
  Description of Artificial Sequence: Synthetic oligonucleotide
  Antisense strand to SEQ ID NO: 1869181
ugguucgcaaauaguuucu

SEQ ID NO: 1869183 - RNA, 19 nt, Artificial Sequence
  Description of Artificial Sequence: Synthetic oligonucleotide
  Sense strand starting at position 2664 of SEQ ID NO: 1564293
agauaaugauggcaaaggu

SEQ ID NO: 1869184 - RNA, 19 nt, Artificial Sequence
  Description of Artificial Sequence: Synthetic oligonucleotide
  Antisense strand to SEQ ID NO: 1869183
accuuugccaucauuaucu

SEQ ID NO: 1869185 - RNA, 19 nt, Artificial Sequence
  Description of Artificial Sequence: Synthetic oligonucleotide
  Sense strand starting at position 2754 of SEQ ID NO: 1564293
ugguacagccguuaugaaa

SEQ ID NO: 1869186 - RNA, 19 nt, Artificial Sequence
  Description of Artificial Sequence: Synthetic oligonucleotide
  Antisense strand to SEQ ID NO: 1869185
uuucauaacggcuguacca

SEQ ID NO: 1869187 - RNA, 19 nt, Artificial Sequence
  Description of Artificial Sequence: Synthetic oligonucleotide
  Sense strand starting at position 2777 of SEQ ID NO: 1564293
guguaaugguuccuuggaa

SEQ ID NO: 1869188 - RNA, 19 nt, Artificial Sequence
  Description of Artificial Sequence: Synthetic oligonucleotide
  Antisense strand to SEQ ID NO: 1869187
uuccaaggaaccauuacac

SEQ ID NO: 1869189 - RNA, 19 nt, Artificial Sequence
  Description of Artificial Sequence: Synthetic oligonucleotide
  Sense strand starting at position 2778 of SEQ ID NO: 1564293
uguaaugguuccuuggaaa

SEQ ID NO: 1869190 - RNA, 19 nt, Artificial Sequence
  Description of Artificial Sequence: Synthetic oligonucleotide
  Antisense strand to SEQ ID NO: 1869189
uuuccaaggaaccauuaca

SEQ ID NO: 1869191 - RNA, 19 nt, Artificial Sequence
  Description of Artificial Sequence: Synthetic oligonucleotide
  Sense strand starting at position 2901 of SEQ ID NO: 1564293
aguguaacucauuaaucac

SEQ ID NO: 1869192 - RNA, 19 nt, Artificial Sequence
  Description of Artificial Sequence: Synthetic oligonucleotide
  Antisense strand to SEQ ID NO: 1869191
gugauuaaugaguuacacu

SEQ ID NO: 1869193 - RNA, 19 nt, Artificial Sequence
  Description of Artificial Sequence: Synthetic oligonucleotide
  Sense strand starting at position 3000 of SEQ ID NO: 1564293
ucuuauuucuugcuuugua

SEQ ID NO: 1869194 - RNA, 19 nt, Artificial Sequence
  Description of Artificial Sequence: Synthetic oligonucleotide
  Antisense strand to SEQ ID NO: 1869193
uacaaagcaagaaauaaga

SEQ ID NO: 1869195 - RNA, 19 nt, Artificial Sequence
  Description of Artificial Sequence: Synthetic oligonucleotide
  Sense strand starting at position 3015 of SEQ ID NO: 1564293
uguaauaaucuagguacua

SEQ ID NO: 1869196 - RNA, 19 nt, Artificial Sequence
  Description of Artificial Sequence: Synthetic oligonucleotide
  Antisense strand to SEQ ID NO: 1869195
uaguaccuagauuauuaca

SEQ ID NO: 1869197 - RNA, 19 nt, Artificial Sequence
  Description of Artificial Sequence: Synthetic oligonucleotide
  Sense strand starting at position 3016 of SEQ ID NO: 1564293
guaauaaucuagguacuac

SEQ ID NO: 1869198 - RNA, 19 nt, Artificial Sequence
  Description of Artificial Sequence: Synthetic oligonucleotide
  Antisense strand to SEQ ID NO: 1869197
guaguaccuagauuauuac

SEQ ID NO: 1869199 - RNA, 19 nt, Artificial Sequence
  Description of Artificial Sequence: Synthetic oligonucleotide
  Sense strand starting at position 3086 of SEQ ID NO: 1564293
agaagaaugcaauguuaug

SEQ ID NO: 1869200 - RNA, 19 nt, Artificial Sequence
  Description of Artificial Sequence: Synthetic oligonucleotide
  Antisense strand to SEQ ID NO: 1869199
cauaacauugcauucuucu

SEQ ID NO: 1869201 - RNA, 19 nt, Artificial Sequence
  Description of Artificial Sequence: Synthetic oligonucleotide
  Sense strand starting at position 3184 of SEQ ID NO: 1564293
auccacaguacguaguaaa

SEQ ID NO: 1869202 - RNA, 19 nt, Artificial Sequence
  Description of Artificial Sequence: Synthetic oligonucleotide
  Antisense strand to SEQ ID NO: 1869201
uuuacuacguacuguggau

SEQ ID NO: 1869203 - RNA, 19 nt, Artificial Sequence
  Description of Artificial Sequence: Synthetic oligonucleotide
  Sense strand starting at position 3187 of SEQ ID NO: 1564293
cacaguacguaguaaacaa

SEQ ID NO: 1869204 - RNA, 19 nt, Artificial Sequence
  Description of Artificial Sequence: Synthetic oligonucleotide
  Antisense strand to SEQ ID NO: 1869203
uuguuuacuacguacugug

SEQ ID NO: 1869205 - RNA, 19 nt, Artificial Sequence
  Description of Artificial Sequence: Synthetic oligonucleotide
  Sense strand starting at position 3296 of SEQ ID NO: 1564293
ucagcuguuugccuaggua

SEQ ID NO: 1869206 - RNA, 19 nt, Artificial Sequence
  Description of Artificial Sequence: Synthetic oligonucleotide
  Antisense strand to SEQ ID NO: 1869205
uaccuaggcaaacagcuga

SEQ ID NO: 1869207 - RNA, 19 nt, Artificial Sequence
  Description of Artificial Sequence: Synthetic oligonucleotide
  Sense strand starting at position 3351 of SEQ ID NO: 1564293
gaaguaguacugugaagaa

SEQ ID NO: 1869208 - RNA, 19 nt, Artificial Sequence
  Description of Artificial Sequence: Synthetic oligonucleotide
  Antisense strand to SEQ ID NO: 1869207
uucuucacaguacuacuuc

SEQ ID NO: 1869209 - RNA, 19 nt, Artificial Sequence
  Description of Artificial Sequence: Synthetic oligonucleotide
  Sense strand starting at position 3393 of SEQ ID NO: 1564293
ucauguagcuaucucuagu

SEQ ID NO: 1869210 - RNA, 19 nt, Artificial Sequence
  Description of Artificial Sequence: Synthetic oligonucleotide
  Antisense strand to SEQ ID NO: 1869209
acuagagauagcuacauga

SEQ ID NO: 1869211 - RNA, 19 nt, Artificial Sequence
  Description of Artificial Sequence: Synthetic oligonucleotide
  Sense strand starting at position 3396 of SEQ ID NO: 1564293
uguagcuaucucuaguuaa

SEQ ID NO: 1869212 - RNA, 19 nt, Artificial Sequence
  Description of Artificial Sequence: Synthetic oligonucleotide
  Antisense strand to SEQ ID NO: 1869211
uuaacuagagauagcuaca

SEQ ID NO: 1869213 - RNA, 19 nt, Artificial Sequence
  Description of Artificial Sequence: Synthetic oligonucleotide
  Sense strand starting at position 3410 of SEQ ID NO: 1564293
guuaauuacucacuuggau

SEQ ID NO: 1869214 - RNA, 19 nt, Artificial Sequence
  Description of Artificial Sequence: Synthetic oligonucleotide
  Antisense strand to SEQ ID NO: 1869213
auccaagugaguaauuaac

SEQ ID NO: 1869215 - RNA, 19 nt, Artificial Sequence
  Description of Artificial Sequence: Synthetic oligonucleotide
  Sense strand starting at position 3436 of SEQ ID NO: 1564293
auaucuauuguaugaggua

SEQ ID NO: 1869216 - RNA, 19 nt, Artificial Sequence
  Description of Artificial Sequence: Synthetic oligonucleotide
  Antisense strand to SEQ ID NO: 1869215
uaccucauacaauagauau

SEQ ID NO: 1869217 - RNA, 19 nt, Artificial Sequence
  Description of Artificial Sequence: Synthetic oligonucleotide
  Sense strand starting at position 3437 of SEQ ID NO: 1564293
uaucuauuguaugagguaa

SEQ ID NO: 1869218 - RNA, 19 nt, Artificial Sequence
  Description of Artificial Sequence: Synthetic oligonucleotide
  Antisense strand to SEQ ID NO: 1869217
uuaccucauacaauagaua

SEQ ID NO: 1869219 - RNA, 19 nt, Artificial Sequence
  Description of Artificial Sequence: Synthetic oligonucleotide
  Sense strand starting at position 3450 of SEQ ID NO: 1564293
agguaauauuucuaacaug

SEQ ID NO: 1869220 - RNA, 19 nt, Artificial Sequence
  Description of Artificial Sequence: Synthetic oligonucleotide
  Antisense strand to SEQ ID NO: 1869219
cauguuagaaauauuaccu

SEQ ID NO: 1869221 - RNA, 19 nt, Artificial Sequence
  Description of Artificial Sequence: Synthetic oligonucleotide
  Sense strand starting at position 3546 of SEQ ID NO: 1564293
aauuacuuggucuggcgaa

SEQ ID NO: 1869222 - RNA, 19 nt, Artificial Sequence
  Description of Artificial Sequence: Synthetic oligonucleotide
  Antisense strand to SEQ ID NO: 1869221
uucgccagaccaaguaauu

SEQ ID NO: 1869223 - RNA, 19 nt, Artificial Sequence
  Description of Artificial Sequence: Synthetic oligonucleotide
  Sense strand starting at position 3559 of SEQ ID NO: 1564293
ggcgaauucuagcuaucuu

SEQ ID NO: 1869224 - RNA, 19 nt, Artificial Sequence
  Description of Artificial Sequence: Synthetic oligonucleotide
  Antisense strand to SEQ ID NO: 1869223
aagauagcuagaauucgcc

SEQ ID NO: 1869225 - RNA, 19 nt, Artificial Sequence
  Description of Artificial Sequence: Synthetic oligonucleotide
  Sense strand starting at position 3605 of SEQ ID NO: 1564293
agaugucugugguaauuua

SEQ ID NO: 1869226 - RNA, 19 nt, Artificial Sequence
  Description of Artificial Sequence: Synthetic oligonucleotide
  Antisense strand to SEQ ID NO: 1869225
uaaauuaccacagacaucu

SEQ ID NO: 1869227 - RNA, 19 nt, Artificial Sequence
  Description of Artificial Sequence: Synthetic oligonucleotide
  Sense strand starting at position 3692 of SEQ ID NO: 1564293
ucaaguuaucuccaguuau

SEQ ID NO: 1869228 - RNA, 19 nt, Artificial Sequence
  Description of Artificial Sequence: Synthetic oligonucleotide
  Antisense strand to SEQ ID NO: 1869227
auaacuggagauaacuuga

SEQ ID NO: 1869229 - RNA, 19 nt, Artificial Sequence
  Description of Artificial Sequence: Synthetic oligonucleotide
  Sense strand starting at position 3702 of SEQ ID NO: 1564293
uccaguuauucuuuguaac

SEQ ID NO: 1869230 - RNA, 19 nt, Artificial Sequence
  Description of Artificial Sequence: Synthetic oligonucleotide
  Antisense strand to SEQ ID NO: 1869229
guuacaaagaauaacugga

SEQ ID NO: 1869231 - RNA, 19 nt, Artificial Sequence
  Description of Artificial Sequence: Synthetic oligonucleotide
  Sense strand starting at position 3703 of SEQ ID NO: 1564293
ccaguuauucuuuguaacu

SEQ ID NO: 1869232 - RNA, 19 nt, Artificial Sequence
  Description of Artificial Sequence: Synthetic oligonucleotide
  Antisense strand to SEQ ID NO: 1869231
aguuacaaagaauaacugg

SEQ ID NO: 1869233 - RNA, 19 nt, Artificial Sequence
  Description of Artificial Sequence: Synthetic oligonucleotide
  Sense strand starting at position 3742 of SEQ ID NO: 1564293
agcaccuacccuuguaagu

SEQ ID NO: 1869234 - RNA, 19 nt, Artificial Sequence
  Description of Artificial Sequence: Synthetic oligonucleotide
  Antisense strand to SEQ ID NO: 1869233
acuuacaaggguaggugcu

SEQ ID NO: 1869235 - RNA, 19 nt, Artificial Sequence
  Description of Artificial Sequence: Synthetic oligonucleotide
  Sense strand starting at position 3755 of SEQ ID NO: 1564293
guaaguucuuaucucaauu

SEQ ID NO: 1869236 - RNA, 19 nt, Artificial Sequence
  Description of Artificial Sequence: Synthetic oligonucleotide
  Antisense strand to SEQ ID NO: 1869235
aauugagauaagaacuuac

SEQ ID NO: 1869237 - RNA, 19 nt, Artificial Sequence
  Description of Artificial Sequence: Synthetic oligonucleotide
  Sense strand starting at position 3781 of SEQ ID NO: 1564293
auaauugagaguugcaaag

SEQ ID NO: 1869238 - RNA, 19 nt, Artificial Sequence
  Description of Artificial Sequence: Synthetic oligonucleotide
  Antisense strand to SEQ ID NO: 1869237
cuuugcaacucucaauuau

SEQ ID NO: 1869239 - RNA, 19 nt, Artificial Sequence
  Description of Artificial Sequence: Synthetic oligonucleotide
  Sense strand starting at position 3783 of SEQ ID NO: 1564293
aauugagaguugcaaagaa

SEQ ID NO: 1869240 - RNA, 19 nt, Artificial Sequence
  Description of Artificial Sequence: Synthetic oligonucleotide
  Antisense strand to SEQ ID NO: 1869239
uucuuugcaacucucaauu

SEQ ID NO: 1869241 - RNA, 19 nt, Artificial Sequence
  Description of Artificial Sequence: Synthetic oligonucleotide
  Sense strand starting at position 3827 of SEQ ID NO: 1564293
ugguauuguaaugacugua

SEQ ID NO: 1869242 - RNA, 19 nt, Artificial Sequence
  Description of Artificial Sequence: Synthetic oligonucleotide
  Antisense strand to SEQ ID NO: 1869241
uacagucauuacaauacca

SEQ ID NO: 1869243 - RNA, 19 nt, Artificial Sequence
  Description of Artificial Sequence: Synthetic oligonucleotide
  Sense strand starting at position 3846 of SEQ ID NO: 1564293
ggcucuuucuauguaacga

SEQ ID NO: 1869244 - RNA, 19 nt, Artificial Sequence
  Description of Artificial Sequence: Synthetic oligonucleotide
  Antisense strand to SEQ ID NO: 1869243
ucguuacauagaaagagcc

SEQ ID NO: 1869245 - RNA, 19 nt, Artificial Sequence
  Description of Artificial Sequence: Synthetic oligonucleotide
  Sense strand starting at position 3934 of SEQ ID NO: 1564293
agacuagauucccuauguu

SEQ ID NO: 1869246 - RNA, 19 nt, Artificial Sequence
  Description of Artificial Sequence: Synthetic oligonucleotide
  Antisense strand to SEQ ID NO: 1869245
aacauagggaaucuagucu

SEQ ID NO: 1869247 - RNA, 19 nt, Artificial Sequence
  Description of Artificial Sequence: Synthetic oligonucleotide
  Sense strand starting at position 3937 of SEQ ID NO: 1564293
cuagauucccuauguucua

SEQ ID NO: 1869248 - RNA, 19 nt, Artificial Sequence
  Description of Artificial Sequence: Synthetic oligonucleotide
  Antisense strand to SEQ ID NO: 1869247
uagaacauagggaaucuag

SEQ ID NO: 1869249 - RNA, 19 nt, Artificial Sequence
  Description of Artificial Sequence: Synthetic oligonucleotide
  Sense strand starting at position 3968 of SEQ ID NO: 1564293
cuauucuuguugucucuau

SEQ ID NO: 1869250 - RNA, 19 nt, Artificial Sequence
  Description of Artificial Sequence: Synthetic oligonucleotide
  Antisense strand to SEQ ID NO: 1869249
auagagacaacaagaauag

SEQ ID NO: 1869251 - RNA, 19 nt, Artificial Sequence
  Description of Artificial Sequence: Synthetic oligonucleotide
  Sense strand starting at position 297 of SEQ ID NO: 1564294
gucuuucuggcguuaacuu

SEQ ID NO: 1869252 - RNA, 19 nt, Artificial Sequence
  Description of Artificial Sequence: Synthetic oligonucleotide
  Antisense strand to SEQ ID NO: 1869251
aaguuaacgccagaaagac

SEQ ID NO: 1869253 - RNA, 19 nt, Artificial Sequence
  Description of Artificial Sequence: Synthetic oligonucleotide
  Sense strand starting at position 346 of SEQ ID NO: 1564294
acccauugggucuaauagu

SEQ ID NO: 1869254 - RNA, 19 nt, Artificial Sequence
  Description of Artificial Sequence: Synthetic oligonucleotide
  Antisense strand to SEQ ID NO: 1869253
acuauuagacccaaugggu

SEQ ID NO: 1869255 - RNA, 19 nt, Artificial Sequence
  Description of Artificial Sequence: Synthetic oligonucleotide
  Sense strand starting at position 710 of SEQ ID NO: 1564294
uaguguccuuggguagaau

SEQ ID NO: 1869256 - RNA, 19 nt, Artificial Sequence
  Description of Artificial Sequence: Synthetic oligonucleotide
  Antisense strand to SEQ ID NO: 1869255
auucuacccaaggacacua

SEQ ID NO: 1869257 - RNA, 19 nt, Artificial Sequence
  Description of Artificial Sequence: Synthetic oligonucleotide
  Sense strand starting at position 780 of SEQ ID NO: 1564294
gaaagucagaggugguguu

SEQ ID NO: 1869258 - RNA, 19 nt, Artificial Sequence
  Description of Artificial Sequence: Synthetic oligonucleotide
  Antisense strand to SEQ ID NO: 1869257
aacaccaccucugacuuuc

SEQ ID NO: 1869259 - RNA, 19 nt, Artificial Sequence
  Description of Artificial Sequence: Synthetic oligonucleotide
  Sense strand starting at position 1002 of SEQ ID NO: 1564294
gaaacuguauuugaggaau

SEQ ID NO: 1869260 - RNA, 19 nt, Artificial Sequence
  Description of Artificial Sequence: Synthetic oligonucleotide
  Antisense strand to SEQ ID NO: 1869259
auuccucaaauacaguuuc

SEQ ID NO: 1869261 - RNA, 19 nt, Artificial Sequence
  Description of Artificial Sequence: Synthetic oligonucleotide
  Sense strand starting at position 1004 of SEQ ID NO: 1564294
aacuguauuugaggaauau

SEQ ID NO: 1869262 - RNA, 19 nt, Artificial Sequence
  Description of Artificial Sequence: Synthetic oligonucleotide
  Antisense strand to SEQ ID NO: 1869261
auauuccucaaauacaguu

SEQ ID NO: 1869263 - RNA, 19 nt, Artificial Sequence
  Description of Artificial Sequence: Synthetic oligonucleotide
  Sense strand starting at position 1031 of SEQ ID NO: 1564294
ugagaacugucauuggcuu

SEQ ID NO: 1869264 - RNA, 19 nt, Artificial Sequence
  Description of Artificial Sequence: Synthetic oligonucleotide
  Antisense strand to SEQ ID NO: 1869263
aagccaaugacaguucuca

SEQ ID NO: 1869265 - RNA, 19 nt, Artificial Sequence
  Description of Artificial Sequence: Synthetic oligonucleotide
  Sense strand starting at position 1032 of SEQ ID NO: 1564294
gagaacugucauuggcuua

SEQ ID NO: 1869266 - RNA, 19 nt, Artificial Sequence
  Description of Artificial Sequence: Synthetic oligonucleotide
  Antisense strand to SEQ ID NO: 1869265
uaagccaaugacaguucuc

SEQ ID NO: 1869267 - RNA, 19 nt, Artificial Sequence
  Description of Artificial Sequence: Synthetic oligonucleotide
  Sense strand starting at position 1045 of SEQ ID NO: 1564294
ggcuuaguccuaugaagaa

SEQ ID NO: 1869268 - RNA, 19 nt, Artificial Sequence
  Description of Artificial Sequence: Synthetic oligonucleotide
  Antisense strand to SEQ ID NO: 1869267
uucuucauaggacuaagcc

SEQ ID NO: 1869269 - RNA, 19 nt, Artificial Sequence
  Description of Artificial Sequence: Synthetic oligonucleotide
  Sense strand starting at position 1071 of SEQ ID NO: 1564294
ucacucuaccucuggagaa

SEQ ID NO: 1869270 - RNA, 19 nt, Artificial Sequence
  Description of Artificial Sequence: Synthetic oligonucleotide
  Antisense strand to SEQ ID NO: 1869269
uucuccagagguagaguga

SEQ ID NO: 1869271 - RNA, 19 nt, Artificial Sequence
  Description of Artificial Sequence: Synthetic oligonucleotide
  Sense strand starting at position 1185 of SEQ ID NO: 1564294
gcugcaaagcuggauagaa

SEQ ID NO: 1869272 - RNA, 19 nt, Artificial Sequence
  Description of Artificial Sequence: Synthetic oligonucleotide
  Antisense strand to SEQ ID NO: 1869271
uucuauccagcuuugcagc

SEQ ID NO: 1869273 - RNA, 19 nt, Artificial Sequence
  Description of Artificial Sequence: Synthetic oligonucleotide
  Sense strand starting at position 1233 of SEQ ID NO: 1564294
ggcugucucccagagaaga

SEQ ID NO: 1869274 - RNA, 19 nt, Artificial Sequence
  Description of Artificial Sequence: Synthetic oligonucleotide
  Antisense strand to SEQ ID NO: 1869273
ucuucucugggagacagcc

SEQ ID NO: 1869275 - RNA, 19 nt, Artificial Sequence
  Description of Artificial Sequence: Synthetic oligonucleotide
  Sense strand starting at position 1243 of SEQ ID NO: 1564294
cagagaagauguuuccaua

SEQ ID NO: 1869276 - RNA, 19 nt, Artificial Sequence
  Description of Artificial Sequence: Synthetic oligonucleotide
  Antisense strand to SEQ ID NO: 1869275
uauggaaacaucuucucug

SEQ ID NO: 1869277 - RNA, 19 nt, Artificial Sequence
  Description of Artificial Sequence: Synthetic oligonucleotide
  Sense strand starting at position 1334 of SEQ ID NO: 1564294
gccagaacggcauaauuac

SEQ ID NO: 1869278 - RNA, 19 nt, Artificial Sequence
  Description of Artificial Sequence: Synthetic oligonucleotide
  Antisense strand to SEQ ID NO: 1869277
guaauuaugccguucuggc

SEQ ID NO: 1869279 - RNA, 19 nt, Artificial Sequence
  Description of Artificial Sequence: Synthetic oligonucleotide
  Sense strand starting at position 1340 of SEQ ID NO: 1564294
acggcauaauuacuaaaca

SEQ ID NO: 1869280 - RNA, 19 nt, Artificial Sequence
  Description of Artificial Sequence: Synthetic oligonucleotide
  Antisense strand to SEQ ID NO: 1869279
uguuuaguaauuaugccgu

SEQ ID NO: 1869281 - RNA, 19 nt, Artificial Sequence
  Description of Artificial Sequence: Synthetic oligonucleotide
  Sense strand starting at position 1398 of SEQ ID NO: 1564294
gacagaaagugcucccuca

SEQ ID NO: 1869282 - RNA, 19 nt, Artificial Sequence
  Description of Artificial Sequence: Synthetic oligonucleotide
  Antisense strand to SEQ ID NO: 1869281
ugagggagcacuuucuguc

SEQ ID NO: 1869283 - RNA, 19 nt, Artificial Sequence
  Description of Artificial Sequence: Synthetic oligonucleotide
  Sense strand starting at position 1753 of SEQ ID NO: 1564294
accagauuguaucucauug

SEQ ID NO: 1869284 - RNA, 19 nt, Artificial Sequence
  Description of Artificial Sequence: Synthetic oligonucleotide
  Antisense strand to SEQ ID NO: 1869283
caaugagauacaaucuggu

SEQ ID NO: 1869285 - RNA, 19 nt, Artificial Sequence
  Description of Artificial Sequence: Synthetic oligonucleotide
  Sense strand starting at position 1757 of SEQ ID NO: 1564294
gauuguaucucauugagca

SEQ ID NO: 1869286 - RNA, 19 nt, Artificial Sequence
  Description of Artificial Sequence: Synthetic oligonucleotide
  Antisense strand to SEQ ID NO: 1869285
ugcucaaugagauacaauc

SEQ ID NO: 1869287 - RNA, 19 nt, Artificial Sequence
  Description of Artificial Sequence: Synthetic oligonucleotide
  Sense strand starting at position 1758 of SEQ ID NO: 1564294
auuguaucucauugagcaa

SEQ ID NO: 1869288 - RNA, 19 nt, Artificial Sequence
  Description of Artificial Sequence: Synthetic oligonucleotide
  Antisense strand to SEQ ID NO: 1869287
uugcucaaugagauacaau

SEQ ID NO: 1869289 - RNA, 19 nt, Artificial Sequence
  Description of Artificial Sequence: Synthetic oligonucleotide
  Sense strand starting at position 1761 of SEQ ID NO: 1564294
guaucucauugagcaaagu

SEQ ID NO: 1869290 - RNA, 19 nt, Artificial Sequence
  Description of Artificial Sequence: Synthetic oligonucleotide
  Antisense strand to SEQ ID NO: 1869289
acuuugcucaaugagauac

SEQ ID NO: 1869291 - RNA, 19 nt, Artificial Sequence
  Description of Artificial Sequence: Synthetic oligonucleotide
  Sense strand starting at position 1772 of SEQ ID NO: 1564294
agcaaaguauuugaugacu

SEQ ID NO: 1869292 - RNA, 19 nt, Artificial Sequence
  Description of Artificial Sequence: Synthetic oligonucleotide
  Antisense strand to SEQ ID NO: 1869291
agucaucaaauacuuugcu

SEQ ID NO: 1869293 - RNA, 19 nt, Artificial Sequence
  Description of Artificial Sequence: Synthetic oligonucleotide
  Sense strand starting at position 2015 of SEQ ID NO: 1564294
aggcguuuccugcuagcua

SEQ ID NO: 1869294 - RNA, 19 nt, Artificial Sequence
  Description of Artificial Sequence: Synthetic oligonucleotide
  Antisense strand to SEQ ID NO: 1869293
uagcuagcaggaaacgccu

SEQ ID NO: 1869295 - RNA, 19 nt, Artificial Sequence
  Description of Artificial Sequence: Synthetic oligonucleotide
  Sense strand starting at position 2159 of SEQ ID NO: 1564294
uugugagauugucucuuaa

SEQ ID NO: 1869296 - RNA, 19 nt, Artificial Sequence
  Description of Artificial Sequence: Synthetic oligonucleotide
  Antisense strand to SEQ ID NO: 1869295
uuaagagacaaucucacaa

SEQ ID NO: 1869297 - RNA, 19 nt, Artificial Sequence
  Description of Artificial Sequence: Synthetic oligonucleotide
  Sense strand starting at position 2161 of SEQ ID NO: 1564294
gugagauugucucuuaaac

SEQ ID NO: 1869298 - RNA, 19 nt, Artificial Sequence
  Description of Artificial Sequence: Synthetic oligonucleotide
  Antisense strand to SEQ ID NO: 1869297
guuuaagagacaaucucac

SEQ ID NO: 1869299 - RNA, 19 nt, Artificial Sequence
  Description of Artificial Sequence: Synthetic oligonucleotide
  Sense strand starting at position 2250 of SEQ ID NO: 1564294
agaucaagccgaugucaca

SEQ ID NO: 1869300 - RNA, 19 nt, Artificial Sequence
  Description of Artificial Sequence: Synthetic oligonucleotide
  Antisense strand to SEQ ID NO: 1869299
ugugacaucggcuugaucu

SEQ ID NO: 1869301 - RNA, 19 nt, Artificial Sequence
  Description of Artificial Sequence: Synthetic oligonucleotide
  Sense strand starting at position 2356 of SEQ ID NO: 1564294
ggagucuggacuugucaca

SEQ ID NO: 1869302 - RNA, 19 nt, Artificial Sequence
  Description of Artificial Sequence: Synthetic oligonucleotide
  Antisense strand to SEQ ID NO: 1869301
ugugacaaguccagacucc

SEQ ID NO: 1869303 - RNA, 19 nt, Artificial Sequence
  Description of Artificial Sequence: Synthetic oligonucleotide
  Sense strand starting at position 2629 of SEQ ID NO: 1564294
gguuguguucuauagugaa

SEQ ID NO: 1869304 - RNA, 19 nt, Artificial Sequence
  Description of Artificial Sequence: Synthetic oligonucleotide
  Antisense strand to SEQ ID NO: 1869303
uucacuauagaacacaacc

SEQ ID NO: 1869305 - RNA, 19 nt, Artificial Sequence
  Description of Artificial Sequence: Synthetic oligonucleotide
  Sense strand starting at position 2663 of SEQ ID NO: 1564294
cccuguccucauggaauaa

SEQ ID NO: 1869306 - RNA, 19 nt, Artificial Sequence
  Description of Artificial Sequence: Synthetic oligonucleotide
  Antisense strand to SEQ ID NO: 1869305
uuauuccaugaggacaggg

SEQ ID NO: 1869307 - RNA, 19 nt, Artificial Sequence
  Description of Artificial Sequence: Synthetic oligonucleotide
  Sense strand starting at position 2769 of SEQ ID NO: 1564294
agauauuaagcaggguaga

SEQ ID NO: 1869308 - RNA, 19 nt, Artificial Sequence
  Description of Artificial Sequence: Synthetic oligonucleotide
  Antisense strand to SEQ ID NO: 1869307
ucuacccugcuuaauaucu

SEQ ID NO: 1869309 - RNA, 19 nt, Artificial Sequence
  Description of Artificial Sequence: Synthetic oligonucleotide
  Sense strand starting at position 2770 of SEQ ID NO: 1564294
gauauuaagcaggguagaa

SEQ ID NO: 1869310 - RNA, 19 nt, Artificial Sequence
  Description of Artificial Sequence: Synthetic oligonucleotide
  Antisense strand to SEQ ID NO: 1869309
uucuacccugcuuaauauc

SEQ ID NO: 1869311 - RNA, 19 nt, Artificial Sequence
  Description of Artificial Sequence: Synthetic oligonucleotide
  Sense strand starting at position 2903 of SEQ ID NO: 1564294
uuuccugauaccugaggga

SEQ ID NO: 1869312 - RNA, 19 nt, Artificial Sequence
  Description of Artificial Sequence: Synthetic oligonucleotide
  Antisense strand to SEQ ID NO: 1869311
ucccucagguaucaggaaa

SEQ ID NO: 1869313 - RNA, 19 nt, Artificial Sequence
  Description of Artificial Sequence: Synthetic oligonucleotide
  Sense strand starting at position 2938 of SEQ ID NO: 1564294
augagauagugcuuaaucu

SEQ ID NO: 1869314 - RNA, 19 nt, Artificial Sequence
  Description of Artificial Sequence: Synthetic oligonucleotide
  Antisense strand to SEQ ID NO: 1869313
agauuaagcacuaucucau

SEQ ID NO: 1869315 - RNA, 19 nt, Artificial Sequence
  Description of Artificial Sequence: Synthetic oligonucleotide
  Sense strand starting at position 2939 of SEQ ID NO: 1564294
ugagauagugcuuaaucug

SEQ ID NO: 1869316 - RNA, 19 nt, Artificial Sequence
  Description of Artificial Sequence: Synthetic oligonucleotide
  Antisense strand to SEQ ID NO: 1869315
cagauuaagcacuaucuca

SEQ ID NO: 1869317 - RNA, 19 nt, Artificial Sequence
  Description of Artificial Sequence: Synthetic oligonucleotide
  Sense strand starting at position 2971 of SEQ ID NO: 1564294
aggccagugugguuagaag

SEQ ID NO: 1869318 - RNA, 19 nt, Artificial Sequence
  Description of Artificial Sequence: Synthetic oligonucleotide
  Antisense strand to SEQ ID NO: 1869317
cuucuaaccacacuggccu

SEQ ID NO: 1869319 - RNA, 19 nt, Artificial Sequence
  Description of Artificial Sequence: Synthetic oligonucleotide
  Sense strand starting at position 3437 of SEQ ID NO: 1564294
ggcucuaaacuacaguuaa

SEQ ID NO: 1869320 - RNA, 19 nt, Artificial Sequence
  Description of Artificial Sequence: Synthetic oligonucleotide
  Antisense strand to SEQ ID NO: 1869319
uuaacuguaguuuagagcc

SEQ ID NO: 1869321 - RNA, 19 nt, Artificial Sequence
  Description of Artificial Sequence: Synthetic oligonucleotide
  Sense strand starting at position 3502 of SEQ ID NO: 1564294
agcagaauagagugucuau

SEQ ID NO: 1869322 - RNA, 19 nt, Artificial Sequence
  Description of Artificial Sequence: Synthetic oligonucleotide
  Antisense strand to SEQ ID NO: 1869321
auagacacucuauucugcu

SEQ ID NO: 1869323 - RNA, 19 nt, Artificial Sequence
  Description of Artificial Sequence: Synthetic oligonucleotide
  Sense strand starting at position 3505 of SEQ ID NO: 1564294
agaauagagugucuauagu

SEQ ID NO: 1869324 - RNA, 19 nt, Artificial Sequence
  Description of Artificial Sequence: Synthetic oligonucleotide
  Antisense strand to SEQ ID NO: 1869323
acuauagacacucuauucu

SEQ ID NO: 1869325 - RNA, 19 nt, Artificial Sequence
  Description of Artificial Sequence: Synthetic oligonucleotide
  Sense strand starting at position 3798 of SEQ ID NO: 1564294
uugaguucaggugaucaag

SEQ ID NO: 1869326 - RNA, 19 nt, Artificial Sequence
  Description of Artificial Sequence: Synthetic oligonucleotide
  Antisense strand to SEQ ID NO: 1869325
cuugaucaccugaacucaa

SEQ ID NO: 1869327 - RNA, 19 nt, Artificial Sequence
  Description of Artificial Sequence: Synthetic oligonucleotide
  Sense strand starting at position 3955 of SEQ ID NO: 1564294
ugcucaaagugauugacau

SEQ ID NO: 1869328 - RNA, 19 nt, Artificial Sequence
  Description of Artificial Sequence: Synthetic oligonucleotide
  Antisense strand to SEQ ID NO: 1869327
augucaaucacuuugagca

SEQ ID NO: 1869329 - RNA, 19 nt, Artificial Sequence
  Description of Artificial Sequence: Synthetic oligonucleotide
  Sense strand starting at position 3956 of SEQ ID NO: 1564294
gcucaaagugauugacauc

SEQ ID NO: 1869330 - RNA, 19 nt, Artificial Sequence
  Description of Artificial Sequence: Synthetic oligonucleotide
  Antisense strand to SEQ ID NO: 1869329
gaugucaaucacuuugagc

SEQ ID NO: 1869331 - RNA, 19 nt, Artificial Sequence
  Description of Artificial Sequence: Synthetic oligonucleotide
  Sense strand starting at position 24 of SEQ ID NO: 1564295
uugugaccucacuaauaug

SEQ ID NO: 1869332 - RNA, 19 nt, Artificial Sequence
  Description of Artificial Sequence: Synthetic oligonucleotide
  Antisense strand to SEQ ID NO: 1869331
cauauuagugaggucacaa

SEQ ID NO: 1869333 - RNA, 19 nt, Artificial Sequence
  Description of Artificial Sequence: Synthetic oligonucleotide
  Sense strand starting at position 56 of SEQ ID NO: 1564295
agucaaaguguacauacaa

SEQ ID NO: 1869334 - RNA, 19 nt, Artificial Sequence
  Description of Artificial Sequence: Synthetic oligonucleotide
  Antisense strand to SEQ ID NO: 1869333
uuguauguacacuuugacu

SEQ ID NO: 1869335 - RNA, 19 nt, Artificial Sequence
  Description of Artificial Sequence: Synthetic oligonucleotide
  Sense strand starting at position 96 of SEQ ID NO: 1564295
uccucuacuguuuauagga

SEQ ID NO: 1869336 - RNA, 19 nt, Artificial Sequence
  Description of Artificial Sequence: Synthetic oligonucleotide
  Antisense strand to SEQ ID NO: 1869335
uccuauaaacaguagagga

SEQ ID NO: 1869337 - RNA, 19 nt, Artificial Sequence
  Description of Artificial Sequence: Synthetic oligonucleotide
  Sense strand starting at position 181 of SEQ ID NO: 1564295
aucaguggcuuauccaaga

SEQ ID NO: 1869338 - RNA, 19 nt, Artificial Sequence
  Description of Artificial Sequence: Synthetic oligonucleotide
  Antisense strand to SEQ ID NO: 1869337
ucuuggauaagccacugau

SEQ ID NO: 1869339 - RNA, 19 nt, Artificial Sequence
  Description of Artificial Sequence: Synthetic oligonucleotide
  Sense strand starting at position 242 of SEQ ID NO: 1564295
uuggguguuacugagcaga

SEQ ID NO: 1869340 - RNA, 19 nt, Artificial Sequence
  Description of Artificial Sequence: Synthetic oligonucleotide
  Antisense strand to SEQ ID NO: 1869339
ucugcucaguaacacccaa

SEQ ID NO: 1869341 - RNA, 19 nt, Artificial Sequence
  Description of Artificial Sequence: Synthetic oligonucleotide
  Sense strand starting at position 244 of SEQ ID NO: 1564295
ggguguuacugagcagaga

SEQ ID NO: 1869342 - RNA, 19 nt, Artificial Sequence
  Description of Artificial Sequence: Synthetic oligonucleotide
  Antisense strand to SEQ ID NO: 1869341
ucucugcucaguaacaccc

SEQ ID NO: 1869343 - RNA, 19 nt, Artificial Sequence
  Description of Artificial Sequence: Synthetic oligonucleotide
  Sense strand starting at position 245 of SEQ ID NO: 1564295
gguguuacugagcagagau

SEQ ID NO: 1869344 - RNA, 19 nt, Artificial Sequence
  Description of Artificial Sequence: Synthetic oligonucleotide
  Antisense strand to SEQ ID NO: 1869343
aucucugcucaguaacacc

SEQ ID NO: 1869345 - RNA, 19 nt, Artificial Sequence
  Description of Artificial Sequence: Synthetic oligonucleotide
  Sense strand starting at position 258 of SEQ ID NO: 1564295
agagauuuguuagaaguga

SEQ ID NO: 1869346 - RNA, 19 nt, Artificial Sequence
  Description of Artificial Sequence: Synthetic oligonucleotide
  Antisense strand to SEQ ID NO: 1869345
ucacuucuaacaaaucucu

SEQ ID NO: 1869347 - RNA, 19 nt, Artificial Sequence
  Description of Artificial Sequence: Synthetic oligonucleotide
  Sense strand starting at position 519 of SEQ ID NO: 1564295
aggacuaugcuguaagugu

SEQ ID NO: 1869348 - RNA, 19 nt, Artificial Sequence
  Description of Artificial Sequence: Synthetic oligonucleotide
  Antisense strand to SEQ ID NO: 1869347
acacuuacagcauaguccu

SEQ ID NO: 1869349 - RNA, 19 nt, Artificial Sequence
  Description of Artificial Sequence: Synthetic oligonucleotide
  Sense strand starting at position 528 of SEQ ID NO: 1564295
cuguaaguguaucuaauaa

SEQ ID NO: 1869350 - RNA, 19 nt, Artificial Sequence
  Description of Artificial Sequence: Synthetic oligonucleotide
  Antisense strand to SEQ ID NO: 1869349
uuauuagauacacuuacag

SEQ ID NO: 1869351 - RNA, 19 nt, Artificial Sequence
  Description of Artificial Sequence: Synthetic oligonucleotide
  Sense strand starting at position 549 of SEQ ID NO: 1564295
auauguugguauucucaua

SEQ ID NO: 1869352 - RNA, 19 nt, Artificial Sequence
  Description of Artificial Sequence: Synthetic oligonucleotide
  Antisense strand to SEQ ID NO: 1869351
uaugagaauaccaacauau

SEQ ID NO: 1869353 - RNA, 19 nt, Artificial Sequence
  Description of Artificial Sequence: Synthetic oligonucleotide
  Sense strand starting at position 589 of SEQ ID NO: 1564295
ccacauugaggcuggauaa

SEQ ID NO: 1869354 - RNA, 19 nt, Artificial Sequence
  Description of Artificial Sequence: Synthetic oligonucleotide
  Antisense strand to SEQ ID NO: 1869353
uuauccagccucaaugugg

SEQ ID NO: 1869355 - RNA, 19 nt, Artificial Sequence
  Description of Artificial Sequence: Synthetic oligonucleotide
  Sense strand starting at position 590 of SEQ ID NO: 1564295
cacauugaggcuggauaaa

SEQ ID NO: 1869356 - RNA, 19 nt, Artificial Sequence
  Description of Artificial Sequence: Synthetic oligonucleotide
  Antisense strand to SEQ ID NO: 1869355
uuuauccagccucaaugug

SEQ ID NO: 1869357 - RNA, 19 nt, Artificial Sequence
  Description of Artificial Sequence: Synthetic oligonucleotide
  Sense strand starting at position 957 of SEQ ID NO: 1564295
gcauguacucaugaaccua

SEQ ID NO: 1869358 - RNA, 19 nt, Artificial Sequence
  Description of Artificial Sequence: Synthetic oligonucleotide
  Antisense strand to SEQ ID NO: 1869357
uagguucaugaguacaugc

SEQ ID NO: 1869359 - RNA, 19 nt, Artificial Sequence
  Description of Artificial Sequence: Synthetic oligonucleotide
  Sense strand starting at position 1211 of SEQ ID NO: 1564295
gaauucugacaauguaugu

SEQ ID NO: 1869360 - RNA, 19 nt, Artificial Sequence
  Description of Artificial Sequence: Synthetic oligonucleotide
  Antisense strand to SEQ ID NO: 1869359
acauacauugucagaauuc

SEQ ID NO: 1869361 - RNA, 19 nt, Artificial Sequence
  Description of Artificial Sequence: Synthetic oligonucleotide
  Sense strand starting at position 1250 of SEQ ID NO: 1564295
ggcauacaguaggucuuaa

SEQ ID NO: 1869362 - RNA, 19 nt, Artificial Sequence
  Description of Artificial Sequence: Synthetic oligonucleotide
  Antisense strand to SEQ ID NO: 1869361
uuaagaccuacuguaugcc

SEQ ID NO: 1869363 - RNA, 19 nt, Artificial Sequence
  Description of Artificial Sequence: Synthetic oligonucleotide
  Sense strand starting at position 1258 of SEQ ID NO: 1564295
guaggucuuaacgaaugau

SEQ ID NO: 1869364 - RNA, 19 nt, Artificial Sequence
  Description of Artificial Sequence: Synthetic oligonucleotide
  Antisense strand to SEQ ID NO: 1869363
aucauucguuaagaccuac

SEQ ID NO: 1869365 - RNA, 19 nt, Artificial Sequence
  Description of Artificial Sequence: Synthetic oligonucleotide
  Sense strand starting at position 1261 of SEQ ID NO: 1564295
ggucuuaacgaaugauagc

SEQ ID NO: 1869366 - RNA, 19 nt, Artificial Sequence
  Description of Artificial Sequence: Synthetic oligonucleotide
  Antisense strand to SEQ ID NO: 1869365
gcuaucauucguuaagacc

SEQ ID NO: 1869367 - RNA, 19 nt, Artificial Sequence
  Description of Artificial Sequence: Synthetic oligonucleotide
  Sense strand starting at position 1262 of SEQ ID NO: 1564295
gucuuaacgaaugauagcu

SEQ ID NO: 1869368 - RNA, 19 nt, Artificial Sequence
  Description of Artificial Sequence: Synthetic oligonucleotide
  Antisense strand to SEQ ID NO: 1869367
agcuaucauucguuaagac

SEQ ID NO: 1869369 - RNA, 19 nt, Artificial Sequence
  Description of Artificial Sequence: Synthetic oligonucleotide
  Sense strand starting at position 1354 of SEQ ID NO: 1564295
gucaccagccucuaucuua

SEQ ID NO: 1869370 - RNA, 19 nt, Artificial Sequence
  Description of Artificial Sequence: Synthetic oligonucleotide
  Antisense strand to SEQ ID NO: 1869369
uaagauagaggcuggugac

SEQ ID NO: 1869371 - RNA, 19 nt, Artificial Sequence
  Description of Artificial Sequence: Synthetic oligonucleotide
  Sense strand starting at position 2220 of SEQ ID NO: 1564295
gggacuugccgcgcaacau

SEQ ID NO: 1869372 - RNA, 19 nt, Artificial Sequence
  Description of Artificial Sequence: Synthetic oligonucleotide
  Antisense strand to SEQ ID NO: 1869371
auguugcgcggcaaguccc

SEQ ID NO: 1869373 - RNA, 19 nt, Artificial Sequence
  Description of Artificial Sequence: Synthetic oligonucleotide
  Sense strand starting at position 2398 of SEQ ID NO: 1564295
gagcguauuccgccgacga

SEQ ID NO: 1869374 - RNA, 19 nt, Artificial Sequence
  Description of Artificial Sequence: Synthetic oligonucleotide
  Antisense strand to SEQ ID NO: 1869373
ucgucggcggaauacgcuc

SEQ ID NO: 1869375 - RNA, 19 nt, Artificial Sequence
  Description of Artificial Sequence: Synthetic oligonucleotide
  Sense strand starting at position 2435 of SEQ ID NO: 1564295
cgcauuauuucgccacuac

SEQ ID NO: 1869376 - RNA, 19 nt, Artificial Sequence
  Description of Artificial Sequence: Synthetic oligonucleotide
  Antisense strand to SEQ ID NO: 1869375
guaguggcgaaauaaugcg

SEQ ID NO: 1869377 - RNA, 19 nt, Artificial Sequence
  Description of Artificial Sequence: Synthetic oligonucleotide
  Sense strand starting at position 2436 of SEQ ID NO: 1564295
gcauuauuucgccacuacu

SEQ ID NO: 1869378 - RNA, 19 nt, Artificial Sequence
  Description of Artificial Sequence: Synthetic oligonucleotide
  Antisense strand to SEQ ID NO: 1869377
aguaguggcgaaauaaugc

SEQ ID NO: 1869379 - RNA, 19 nt, Artificial Sequence
  Description of Artificial Sequence: Synthetic oligonucleotide
  Sense strand starting at position 2446 of SEQ ID NO: 1564295
gccacuacuugagcaaaua

SEQ ID NO: 1869380 - RNA, 19 nt, Artificial Sequence
  Description of Artificial Sequence: Synthetic oligonucleotide
  Antisense strand to SEQ ID NO: 1869379
uauuugcucaaguaguggc

SEQ ID NO: 1869381 - RNA, 19 nt, Artificial Sequence
  Description of Artificial Sequence: Synthetic oligonucleotide
  Sense strand starting at position 2574 of SEQ ID NO: 1564295
agagcucuugcugagaaug

SEQ ID NO: 1869382 - RNA, 19 nt, Artificial Sequence
  Description of Artificial Sequence: Synthetic oligonucleotide
  Antisense strand to SEQ ID NO: 1869381
cauucucagcaagagcucu

SEQ ID NO: 1869383 - RNA, 19 nt, Artificial Sequence
  Description of Artificial Sequence: Synthetic oligonucleotide
  Sense strand starting at position 2586 of SEQ ID NO: 1564295
gagaaugacuguuccagac

SEQ ID NO: 1869384 - RNA, 19 nt, Artificial Sequence
  Description of Artificial Sequence: Synthetic oligonucleotide
  Antisense strand to SEQ ID NO: 1869383
gucuggaacagucauucuc

SEQ ID NO: 1869385 - RNA, 19 nt, Artificial Sequence
  Description of Artificial Sequence: Synthetic oligonucleotide
  Sense strand starting at position 2590 of SEQ ID NO: 1564295
augacuguuccagacucga

SEQ ID NO: 1869386 - RNA, 19 nt, Artificial Sequence
  Description of Artificial Sequence: Synthetic oligonucleotide
  Antisense strand to SEQ ID NO: 1869385
ucgagucuggaacagucau

SEQ ID NO: 1869387 - RNA, 19 nt, Artificial Sequence
  Description of Artificial Sequence: Synthetic oligonucleotide
  Sense strand starting at position 2767 of SEQ ID NO: 1564295
uggagucaggcuugacaaa

SEQ ID NO: 1869388 - RNA, 19 nt, Artificial Sequence
  Description of Artificial Sequence: Synthetic oligonucleotide
  Antisense strand to SEQ ID NO: 1869387
uuugucaagccugacucca

SEQ ID NO: 1869389 - RNA, 19 nt, Artificial Sequence
  Description of Artificial Sequence: Synthetic oligonucleotide
  Sense strand starting at position 3180 of SEQ ID NO: 1564295
accuuuaggugaguaagaa

SEQ ID NO: 1869390 - RNA, 19 nt, Artificial Sequence
  Description of Artificial Sequence: Synthetic oligonucleotide
  Antisense strand to SEQ ID NO: 1869389
uucuuacucaccuaaaggu

SEQ ID NO: 1869391 - RNA, 19 nt, Artificial Sequence
  Description of Artificial Sequence: Synthetic oligonucleotide
  Sense strand starting at position 3427 of SEQ ID NO: 1564295
ccauucucauuuguuugua

SEQ ID NO: 1869392 - RNA, 19 nt, Artificial Sequence
  Description of Artificial Sequence: Synthetic oligonucleotide
  Antisense strand to SEQ ID NO: 1869391
uacaaacaaaugagaaugg

SEQ ID NO: 1869393 - RNA, 19 nt, Artificial Sequence
  Description of Artificial Sequence: Synthetic oligonucleotide
  Sense strand starting at position 3611 of SEQ ID NO: 1564295
gggacccauaaauguagua

SEQ ID NO: 1869394 - RNA, 19 nt, Artificial Sequence
  Description of Artificial Sequence: Synthetic oligonucleotide
  Antisense strand to SEQ ID NO: 1869393
uacuacauuuauggguccc

SEQ ID NO: 1869395 - RNA, 19 nt, Artificial Sequence
  Description of Artificial Sequence: Synthetic oligonucleotide
  Sense strand starting at position 3625 of SEQ ID NO: 1564295
uaguaauggugguucugaa

SEQ ID NO: 1869396 - RNA, 19 nt, Artificial Sequence
  Description of Artificial Sequence: Synthetic oligonucleotide
  Antisense strand to SEQ ID NO: 1869395
uucagaaccaccauuacua

SEQ ID NO: 1869397 - RNA, 19 nt, Artificial Sequence
  Description of Artificial Sequence: Synthetic oligonucleotide
  Sense strand starting at position 3749 of SEQ ID NO: 1564295
ugaugagguuauccuaguu

SEQ ID NO: 1869398 - RNA, 19 nt, Artificial Sequence
  Description of Artificial Sequence: Synthetic oligonucleotide
  Antisense strand to SEQ ID NO: 1869397
aacuaggauaaccucauca

SEQ ID NO: 1869399 - RNA, 19 nt, Artificial Sequence
  Description of Artificial Sequence: Synthetic oligonucleotide
  Sense strand starting at position 3869 of SEQ ID NO: 1564295
acggaauugugacuuauug

SEQ ID NO: 1869400 - RNA, 19 nt, Artificial Sequence
  Description of Artificial Sequence: Synthetic oligonucleotide
  Antisense strand to SEQ ID NO: 1869399
caauaagucacaauuccgu

SEQ ID NO: 1869401 - RNA, 19 nt, Artificial Sequence
  Description of Artificial Sequence: Synthetic oligonucleotide
  Sense strand starting at position 3871 of SEQ ID NO: 1564295
ggaauugugacuuauuguu

SEQ ID NO: 1869402 - RNA, 19 nt, Artificial Sequence
  Description of Artificial Sequence: Synthetic oligonucleotide
  Antisense strand to SEQ ID NO: 1869401
aacaauaagucacaauucc

SEQ ID NO: 1869403 - RNA, 19 nt, Artificial Sequence
  Description of Artificial Sequence: Synthetic oligonucleotide
  Sense strand starting at position 3900 of SEQ ID NO: 1564295
uagaguagggccugguaua

SEQ ID NO: 1869404 - RNA, 19 nt, Artificial Sequence
  Description of Artificial Sequence: Synthetic oligonucleotide
  Antisense strand to SEQ ID NO: 1869403
uauaccaggcccuacucua

SEQ ID NO: 1869405 - RNA, 19 nt, Artificial Sequence
  Description of Artificial Sequence: Synthetic oligonucleotide
  Sense strand starting at position 3901 of SEQ ID NO: 1564295
agaguagggccugguauau

SEQ ID NO: 1869406 - RNA, 19 nt, Artificial Sequence
  Description of Artificial Sequence: Synthetic oligonucleotide
  Antisense strand to SEQ ID NO: 1869405
auauaccaggcccuacucu

SEQ ID NO: 1869407 - RNA, 19 nt, Artificial Sequence
  Description of Artificial Sequence: Synthetic oligonucleotide
  Sense strand starting at position 3912 of SEQ ID NO: 1564295
ugguauauaguaggaacua

SEQ ID NO: 1869408 - RNA, 19 nt, Artificial Sequence
  Description of Artificial Sequence: Synthetic oligonucleotide
  Antisense strand to SEQ ID NO: 1869407
uaguuccuacuauauacca

SEQ ID NO: 1869409 - RNA, 19 nt, Artificial Sequence
  Description of Artificial Sequence: Synthetic oligonucleotide
  Sense strand starting at position 3983 of SEQ ID NO: 1564295
auaguucuugauggugaaa

SEQ ID NO: 1869410 - RNA, 19 nt, Artificial Sequence
  Description of Artificial Sequence: Synthetic oligonucleotide
  Antisense strand to SEQ ID NO: 1869409
uuucaccaucaagaacuau

SEQ ID NO: 1869411 - RNA, 19 nt, Artificial Sequence
  Description of Artificial Sequence: Synthetic oligonucleotide
  Sense strand starting at position 38 of SEQ ID NO: 1564296
acuagauaauaugugugua

SEQ ID NO: 1869412 - RNA, 19 nt, Artificial Sequence
  Description of Artificial Sequence: Synthetic oligonucleotide
  Antisense strand to SEQ ID NO: 1869411
uacacacauauuaucuagu

SEQ ID NO: 1869413 - RNA, 19 nt, Artificial Sequence
  Description of Artificial Sequence: Synthetic oligonucleotide
  Sense strand starting at position 40 of SEQ ID NO: 1564296
uagauaauauguguguaga

SEQ ID NO: 1869414 - RNA, 19 nt, Artificial Sequence
  Description of Artificial Sequence: Synthetic oligonucleotide
  Antisense strand to SEQ ID NO: 1869413
ucuacacacauauuaucua

SEQ ID NO: 1869415 - RNA, 19 nt, Artificial Sequence
  Description of Artificial Sequence: Synthetic oligonucleotide
  Sense strand starting at position 41 of SEQ ID NO: 1564296
agauaauauguguguagau

SEQ ID NO: 1869416 - RNA, 19 nt, Artificial Sequence
  Description of Artificial Sequence: Synthetic oligonucleotide
  Antisense strand to SEQ ID NO: 1869415
aucuacacacauauuaucu

SEQ ID NO: 1869417 - RNA, 19 nt, Artificial Sequence
  Description of Artificial Sequence: Synthetic oligonucleotide
  Sense strand starting at position 42 of SEQ ID NO: 1564296
gauaauauguguguagaua

SEQ ID NO: 1869418 - RNA, 19 nt, Artificial Sequence
  Description of Artificial Sequence: Synthetic oligonucleotide
  Antisense strand to SEQ ID NO: 1869417
uaucuacacacauauuauc

SEQ ID NO: 1869419 - RNA, 19 nt, Artificial Sequence
  Description of Artificial Sequence: Synthetic oligonucleotide
  Sense strand starting at position 51 of SEQ ID NO: 1564296
uguguagauauauagugua

SEQ ID NO: 1869420 - RNA, 19 nt, Artificial Sequence
  Description of Artificial Sequence: Synthetic oligonucleotide
  Antisense strand to SEQ ID NO: 1869419
uacacuauauaucuacaca

SEQ ID NO: 1869421 - RNA, 19 nt, Artificial Sequence
  Description of Artificial Sequence: Synthetic oligonucleotide
  Sense strand starting at position 91 of SEQ ID NO: 1564296
guuauauaguaacuuagga

SEQ ID NO: 1869422 - RNA, 19 nt, Artificial Sequence
  Description of Artificial Sequence: Synthetic oligonucleotide
  Antisense strand to SEQ ID NO: 1869421
uccuaaguuacuauauaac

SEQ ID NO: 1869423 - RNA, 19 nt, Artificial Sequence
  Description of Artificial Sequence: Synthetic oligonucleotide
  Sense strand starting at position 122 of SEQ ID NO: 1564296
aguauuuauuggucuuguu

SEQ ID NO: 1869424 - RNA, 19 nt, Artificial Sequence
  Description of Artificial Sequence: Synthetic oligonucleotide
  Antisense strand to SEQ ID NO: 1869423
aacaagaccaauaaauacu

SEQ ID NO: 1869425 - RNA, 19 nt, Artificial Sequence
  Description of Artificial Sequence: Synthetic oligonucleotide
  Sense strand starting at position 273 of SEQ ID NO: 1564296
acccaaaucugagugguaa

SEQ ID NO: 1869426 - RNA, 19 nt, Artificial Sequence
  Description of Artificial Sequence: Synthetic oligonucleotide
  Antisense strand to SEQ ID NO: 1869425
uuaccacucagauuugggu

SEQ ID NO: 1869427 - RNA, 19 nt, Artificial Sequence
  Description of Artificial Sequence: Synthetic oligonucleotide
  Sense strand starting at position 274 of SEQ ID NO: 1564296
cccaaaucugagugguaaa

SEQ ID NO: 1869428 - RNA, 19 nt, Artificial Sequence
  Description of Artificial Sequence: Synthetic oligonucleotide
  Antisense strand to SEQ ID NO: 1869427
uuuaccacucagauuuggg

SEQ ID NO: 1869429 - RNA, 19 nt, Artificial Sequence
  Description of Artificial Sequence: Synthetic oligonucleotide
  Sense strand starting at position 386 of SEQ ID NO: 1564296
guauguuagguacaguuaa

SEQ ID NO: 1869430 - RNA, 19 nt, Artificial Sequence
  Description of Artificial Sequence: Synthetic oligonucleotide
  Antisense strand to SEQ ID NO: 1869429
uuaacuguaccuaacauac

SEQ ID NO: 1869431 - RNA, 19 nt, Artificial Sequence
  Description of Artificial Sequence: Synthetic oligonucleotide
  Sense strand starting at position 651 of SEQ ID NO: 1564296
cuaguuaggucacuggaca

SEQ ID NO: 1869432 - RNA, 19 nt, Artificial Sequence
  Description of Artificial Sequence: Synthetic oligonucleotide
  Antisense strand to SEQ ID NO: 1869431
uguccagugaccuaacuag

SEQ ID NO: 1869433 - RNA, 19 nt, Artificial Sequence
  Description of Artificial Sequence: Synthetic oligonucleotide
  Sense strand starting at position 652 of SEQ ID NO: 1564296
uaguuaggucacuggacaa

SEQ ID NO: 1869434 - RNA, 19 nt, Artificial Sequence
  Description of Artificial Sequence: Synthetic oligonucleotide
  Antisense strand to SEQ ID NO: 1869433
uuguccagugaccuaacua

SEQ ID NO: 1869435 - RNA, 19 nt, Artificial Sequence
  Description of Artificial Sequence: Synthetic oligonucleotide
  Sense strand starting at position 901 of SEQ ID NO: 1564296
ugagcacuucgguauauaa

SEQ ID NO: 1869436 - RNA, 19 nt, Artificial Sequence
  Description of Artificial Sequence: Synthetic oligonucleotide
  Antisense strand to SEQ ID NO: 1869435
uuauauaccgaagugcuca

SEQ ID NO: 1869437 - RNA, 19 nt, Artificial Sequence
  Description of Artificial Sequence: Synthetic oligonucleotide
  Sense strand starting at position 1170 of SEQ ID NO: 1564296
augaucucuccuggaucua

SEQ ID NO: 1869438 - RNA, 19 nt, Artificial Sequence
  Description of Artificial Sequence: Synthetic oligonucleotide
  Antisense strand to SEQ ID NO: 1869437
uagauccaggagagaucau

SEQ ID NO: 1869439 - RNA, 19 nt, Artificial Sequence
  Description of Artificial Sequence: Synthetic oligonucleotide
  Sense strand starting at position 1334 of SEQ ID NO: 1564296
acaguaaaguacucaguaa

SEQ ID NO: 1869440 - RNA, 19 nt, Artificial Sequence
  Description of Artificial Sequence: Synthetic oligonucleotide
  Antisense strand to SEQ ID NO: 1869439
uuacugaguacuuuacugu

SEQ ID NO: 1869441 - RNA, 19 nt, Artificial Sequence
  Description of Artificial Sequence: Synthetic oligonucleotide
  Sense strand starting at position 1419 of SEQ ID NO: 1564296
gucaaucacugagcuuaaa

SEQ ID NO: 1869442 - RNA, 19 nt, Artificial Sequence
  Description of Artificial Sequence: Synthetic oligonucleotide
  Antisense strand to SEQ ID NO: 1869441
uuuaagcucagugauugac

SEQ ID NO: 1869443 - RNA, 19 nt, Artificial Sequence
  Description of Artificial Sequence: Synthetic oligonucleotide
  Sense strand starting at position 1489 of SEQ ID NO: 1564296
uugguuucugaguaaauuc

SEQ ID NO: 1869444 - RNA, 19 nt, Artificial Sequence
  Description of Artificial Sequence: Synthetic oligonucleotide
  Antisense strand to SEQ ID NO: 1869443
gaauuuacucagaaaccaa

SEQ ID NO: 1869445 - RNA, 19 nt, Artificial Sequence
  Description of Artificial Sequence: Synthetic oligonucleotide
  Sense strand starting at position 1591 of SEQ ID NO: 1564296
auaauauuaugggcuuaca

SEQ ID NO: 1869446 - RNA, 19 nt, Artificial Sequence
  Description of Artificial Sequence: Synthetic oligonucleotide
  Antisense strand to SEQ ID NO: 1869445
uguaagcccauaauauuau

SEQ ID NO: 1869447 - RNA, 19 nt, Artificial Sequence
  Description of Artificial Sequence: Synthetic oligonucleotide
  Sense strand starting at position 1741 of SEQ ID NO: 1564296
aggaaacucuguuuccaau

SEQ ID NO: 1869448 - RNA, 19 nt, Artificial Sequence
  Description of Artificial Sequence: Synthetic oligonucleotide
  Antisense strand to SEQ ID NO: 1869447
auuggaaacagaguuuccu

SEQ ID NO: 1869449 - RNA, 19 nt, Artificial Sequence
  Description of Artificial Sequence: Synthetic oligonucleotide
  Sense strand starting at position 2004 of SEQ ID NO: 1564296
ucaguacagauuuguguuu

SEQ ID NO: 1869450 - RNA, 19 nt, Artificial Sequence
  Description of Artificial Sequence: Synthetic oligonucleotide
  Antisense strand to SEQ ID NO: 1869449
aaacacaaaucuguacuga

SEQ ID NO: 1869451 - RNA, 19 nt, Artificial Sequence
  Description of Artificial Sequence: Synthetic oligonucleotide
  Sense strand starting at position 2054 of SEQ ID NO: 1564296
uugauauauuugcuacugu

SEQ ID NO: 1869452 - RNA, 19 nt, Artificial Sequence
  Description of Artificial Sequence: Synthetic oligonucleotide
  Antisense strand to SEQ ID NO: 1869451
acaguagcaaauauaucaa

SEQ ID NO: 1869453 - RNA, 19 nt, Artificial Sequence
  Description of Artificial Sequence: Synthetic oligonucleotide
  Sense strand starting at position 2061 of SEQ ID NO: 1564296
auuugcuacuguguuaaua

SEQ ID NO: 1869454 - RNA, 19 nt, Artificial Sequence
  Description of Artificial Sequence: Synthetic oligonucleotide
  Antisense strand to SEQ ID NO: 1869453
uauuaacacaguagcaaau

SEQ ID NO: 1869455 - RNA, 19 nt, Artificial Sequence
  Description of Artificial Sequence: Synthetic oligonucleotide
  Sense strand starting at position 2114 of SEQ ID NO: 1564296
guacacagauucucuaagu

SEQ ID NO: 1869456 - RNA, 19 nt, Artificial Sequence
  Description of Artificial Sequence: Synthetic oligonucleotide
  Antisense strand to SEQ ID NO: 1869455
acuuagagaaucuguguac

SEQ ID NO: 1869457 - RNA, 19 nt, Artificial Sequence
  Description of Artificial Sequence: Synthetic oligonucleotide
  Sense strand starting at position 2213 of SEQ ID NO: 1564296
agcugacaaggcuaauuaa

SEQ ID NO: 1869458 - RNA, 19 nt, Artificial Sequence
  Description of Artificial Sequence: Synthetic oligonucleotide
  Antisense strand to SEQ ID NO: 1869457
uuaauuagccuugucagcu

SEQ ID NO: 1869459 - RNA, 19 nt, Artificial Sequence
  Description of Artificial Sequence: Synthetic oligonucleotide
  Sense strand starting at position 2382 of SEQ ID NO: 1564296
gugaacaaacucuggauau

SEQ ID NO: 1869460 - RNA, 19 nt, Artificial Sequence
  Description of Artificial Sequence: Synthetic oligonucleotide
  Antisense strand to SEQ ID NO: 1869459
auauccagaguuuguucac

SEQ ID NO: 1869461 - RNA, 19 nt, Artificial Sequence
  Description of Artificial Sequence: Synthetic oligonucleotide
  Sense strand starting at position 2539 of SEQ ID NO: 1564296
gugaauacaugcuuaaaga

SEQ ID NO: 1869462 - RNA, 19 nt, Artificial Sequence
  Description of Artificial Sequence: Synthetic oligonucleotide
  Antisense strand to SEQ ID NO: 1869461
ucuuuaagcauguauucac

SEQ ID NO: 1869463 - RNA, 19 nt, Artificial Sequence
  Description of Artificial Sequence: Synthetic oligonucleotide
  Sense strand starting at position 2557 of SEQ ID NO: 1564296
acuuucuuuggagaagucu

SEQ ID NO: 1869464 - RNA, 19 nt, Artificial Sequence
  Description of Artificial Sequence: Synthetic oligonucleotide
  Antisense strand to SEQ ID NO: 1869463
agacuucuccaaagaaagu

SEQ ID NO: 1869465 - RNA, 19 nt, Artificial Sequence
  Description of Artificial Sequence: Synthetic oligonucleotide
  Sense strand starting at position 2600 of SEQ ID NO: 1564296
caguaaaugcuauaggguu

SEQ ID NO: 1869466 - RNA, 19 nt, Artificial Sequence
  Description of Artificial Sequence: Synthetic oligonucleotide
  Antisense strand to SEQ ID NO: 1869465
aacccuauagcauuuacug

SEQ ID NO: 1869467 - RNA, 19 nt, Artificial Sequence
  Description of Artificial Sequence: Synthetic oligonucleotide
  Sense strand starting at position 2888 of SEQ ID NO: 1564296
aguggucucccugacuuau

SEQ ID NO: 1869468 - RNA, 19 nt, Artificial Sequence
  Description of Artificial Sequence: Synthetic oligonucleotide
  Antisense strand to SEQ ID NO: 1869467
auaagucagggagaccacu

SEQ ID NO: 1869469 - RNA, 19 nt, Artificial Sequence
  Description of Artificial Sequence: Synthetic oligonucleotide
  Sense strand starting at position 3160 of SEQ ID NO: 1564296
auguuccugucuuuaauuu

SEQ ID NO: 1869470 - RNA, 19 nt, Artificial Sequence
  Description of Artificial Sequence: Synthetic oligonucleotide
  Antisense strand to SEQ ID NO: 1869469
aaauuaaagacaggaacau

SEQ ID NO: 1869471 - RNA, 19 nt, Artificial Sequence
  Description of Artificial Sequence: Synthetic oligonucleotide
  Sense strand starting at position 3168 of SEQ ID NO: 1564296
gucuuuaauuuacaggaaa

SEQ ID NO: 1869472 - RNA, 19 nt, Artificial Sequence
  Description of Artificial Sequence: Synthetic oligonucleotide
  Antisense strand to SEQ ID NO: 1869471
uuuccuguaaauuaaagac

SEQ ID NO: 1869473 - RNA, 19 nt, Artificial Sequence
  Description of Artificial Sequence: Synthetic oligonucleotide
  Sense strand starting at position 3369 of SEQ ID NO: 1564296
aguauauucuuagcauaga

SEQ ID NO: 1869474 - RNA, 19 nt, Artificial Sequence
  Description of Artificial Sequence: Synthetic oligonucleotide
  Antisense strand to SEQ ID NO: 1869473
ucuaugcuaagaauauacu

SEQ ID NO: 1869475 - RNA, 19 nt, Artificial Sequence
  Description of Artificial Sequence: Synthetic oligonucleotide
  Sense strand starting at position 3463 of SEQ ID NO: 1564296
gccaauauccuacagcuga

SEQ ID NO: 1869476 - RNA, 19 nt, Artificial Sequence
  Description of Artificial Sequence: Synthetic oligonucleotide
  Antisense strand to SEQ ID NO: 1869475
ucagcuguaggauauuggc

SEQ ID NO: 1869477 - RNA, 19 nt, Artificial Sequence
  Description of Artificial Sequence: Synthetic oligonucleotide
  Sense strand starting at position 3474 of SEQ ID NO: 1564296
acagcugaccauugauuau

SEQ ID NO: 1869478 - RNA, 19 nt, Artificial Sequence
  Description of Artificial Sequence: Synthetic oligonucleotide
  Antisense strand to SEQ ID NO: 1869477
auaaucaauggucagcugu

SEQ ID NO: 1869479 - RNA, 19 nt, Artificial Sequence
  Description of Artificial Sequence: Synthetic oligonucleotide
  Sense strand starting at position 3484 of SEQ ID NO: 1564296
auugauuauucuccaguag

SEQ ID NO: 1869480 - RNA, 19 nt, Artificial Sequence
  Description of Artificial Sequence: Synthetic oligonucleotide
  Antisense strand to SEQ ID NO: 1869479
cuacuggagaauaaucaau

SEQ ID NO: 1869481 - RNA, 19 nt, Artificial Sequence
  Description of Artificial Sequence: Synthetic oligonucleotide
  Sense strand starting at position 3485 of SEQ ID NO: 1564296
uugauuauucuccaguagu

SEQ ID NO: 1869482 - RNA, 19 nt, Artificial Sequence
  Description of Artificial Sequence: Synthetic oligonucleotide
  Antisense strand to SEQ ID NO: 1869481
acuacuggagaauaaucaa

SEQ ID NO: 1869483 - RNA, 19 nt, Artificial Sequence
  Description of Artificial Sequence: Synthetic oligonucleotide
  Sense strand starting at position 3495 of SEQ ID NO: 1564296
uccaguaguuucgcauuua

SEQ ID NO: 1869484 - RNA, 19 nt, Artificial Sequence
  Description of Artificial Sequence: Synthetic oligonucleotide
  Antisense strand to SEQ ID NO: 1869483
uaaaugcgaaacuacugga

SEQ ID NO: 1869485 - RNA, 19 nt, Artificial Sequence
  Description of Artificial Sequence: Synthetic oligonucleotide
  Sense strand starting at position 3542 of SEQ ID NO: 1564296
ugugaaucccuccagggua

SEQ ID NO: 1869486 - RNA, 19 nt, Artificial Sequence
  Description of Artificial Sequence: Synthetic oligonucleotide
  Antisense strand to SEQ ID NO: 1869485
uacccuggagggauucaca

SEQ ID NO: 1869487 - RNA, 19 nt, Artificial Sequence
  Description of Artificial Sequence: Synthetic oligonucleotide
  Sense strand starting at position 3806 of SEQ ID NO: 1564296
auaugacuugugcacaaau

SEQ ID NO: 1869488 - RNA, 19 nt, Artificial Sequence
  Description of Artificial Sequence: Synthetic oligonucleotide
  Antisense strand to SEQ ID NO: 1869487
auuugugcacaagucauau

SEQ ID NO: 1869489 - RNA, 19 nt, Artificial Sequence
  Description of Artificial Sequence: Synthetic oligonucleotide
  Sense strand starting at position 3914 of SEQ ID NO: 1564296
ccuaguuugcccuaaggga

SEQ ID NO: 1869490 - RNA, 19 nt, Artificial Sequence
  Description of Artificial Sequence: Synthetic oligonucleotide
  Antisense strand to SEQ ID NO: 1869489
ucccuuagggcaaacuagg

SEQ ID NO: 1869491 - RNA, 19 nt, Artificial Sequence
  Description of Artificial Sequence: Synthetic oligonucleotide
  Sense strand starting at position 219 of SEQ ID NO: 1564297
uuauuugcagcucagcaua

SEQ ID NO: 1869492 - RNA, 19 nt, Artificial Sequence
  Description of Artificial Sequence: Synthetic oligonucleotide
  Antisense strand to SEQ ID NO: 1869491
uaugcugagcugcaaauaa

SEQ ID NO: 1869493 - RNA, 19 nt, Artificial Sequence
  Description of Artificial Sequence: Synthetic oligonucleotide
  Sense strand starting at position 242 of SEQ ID NO: 1564297
gagccugaggucuauagua

SEQ ID NO: 1869494 - RNA, 19 nt, Artificial Sequence
  Description of Artificial Sequence: Synthetic oligonucleotide
  Antisense strand to SEQ ID NO: 1869493
uacuauagaccucaggcuc

SEQ ID NO: 1869495 - RNA, 19 nt, Artificial Sequence
  Description of Artificial Sequence: Synthetic oligonucleotide
  Sense strand starting at position 260 of SEQ ID NO: 1564297
auaagauccuguguacaaa

SEQ ID NO: 1869496 - RNA, 19 nt, Artificial Sequence
  Description of Artificial Sequence: Synthetic oligonucleotide
  Antisense strand to SEQ ID NO: 1869495
uuuguacacaggaucuuau

SEQ ID NO: 1869497 - RNA, 19 nt, Artificial Sequence
  Description of Artificial Sequence: Synthetic oligonucleotide
  Sense strand starting at position 518 of SEQ ID NO: 1564297
ccugcuagagaauggaaau

SEQ ID NO: 1869498 - RNA, 19 nt, Artificial Sequence
  Description of Artificial Sequence: Synthetic oligonucleotide
  Antisense strand to SEQ ID NO: 1869497
auuuccauucucuagcagg

SEQ ID NO: 1869499 - RNA, 19 nt, Artificial Sequence
  Description of Artificial Sequence: Synthetic oligonucleotide
  Sense strand starting at position 697 of SEQ ID NO: 1564297
aggguaaccuaaucagagu

SEQ ID NO: 1869500 - RNA, 19 nt, Artificial Sequence
  Description of Artificial Sequence: Synthetic oligonucleotide
  Antisense strand to SEQ ID NO: 1869499
acucugauuagguuacccu

SEQ ID NO: 1869501 - RNA, 19 nt, Artificial Sequence
  Description of Artificial Sequence: Synthetic oligonucleotide
  Sense strand starting at position 708 of SEQ ID NO: 1564297
aucagagucagcuacggaa

SEQ ID NO: 1869502 - RNA, 19 nt, Artificial Sequence
  Description of Artificial Sequence: Synthetic oligonucleotide
  Antisense strand to SEQ ID NO: 1869501
uuccguagcugacucugau

SEQ ID NO: 1869503 - RNA, 19 nt, Artificial Sequence
  Description of Artificial Sequence: Synthetic oligonucleotide
  Sense strand starting at position 720 of SEQ ID NO: 1564297
uacggaaagcuggauucuu

SEQ ID NO: 1869504 - RNA, 19 nt, Artificial Sequence
  Description of Artificial Sequence: Synthetic oligonucleotide
  Antisense strand to SEQ ID NO: 1869503
aagaauccagcuuuccgua

SEQ ID NO: 1869505 - RNA, 19 nt, Artificial Sequence
  Description of Artificial Sequence: Synthetic oligonucleotide
  Sense strand starting at position 853 of SEQ ID NO: 1564297
cagguugaguuuccugaaa

SEQ ID NO: 1869506 - RNA, 19 nt, Artificial Sequence
  Description of Artificial Sequence: Synthetic oligonucleotide
  Antisense strand to SEQ ID NO: 1869505
uuucaggaaacucaaccug

SEQ ID NO: 1869507 - RNA, 19 nt, Artificial Sequence
  Description of Artificial Sequence: Synthetic oligonucleotide
  Sense strand starting at position 1008 of SEQ ID NO: 1564297
ucuauagggaagugaguua

SEQ ID NO: 1869508 - RNA, 19 nt, Artificial Sequence
  Description of Artificial Sequence: Synthetic oligonucleotide
  Antisense strand to SEQ ID NO: 1869507
uaacucacuucccuauaga

SEQ ID NO: 1869509 - RNA, 19 nt, Artificial Sequence
  Description of Artificial Sequence: Synthetic oligonucleotide
  Sense strand starting at position 1020 of SEQ ID NO: 1564297
ugaguuaucccaggaaugg

SEQ ID NO: 1869510 - RNA, 19 nt, Artificial Sequence
  Description of Artificial Sequence: Synthetic oligonucleotide
  Antisense strand to SEQ ID NO: 1869509
ccauuccugggauaacuca

SEQ ID NO: 1869511 - RNA, 19 nt, Artificial Sequence
  Description of Artificial Sequence: Synthetic oligonucleotide
  Sense strand starting at position 1303 of SEQ ID NO: 1564297
gguagugaacagugaaauc

SEQ ID NO: 1869512 - RNA, 19 nt, Artificial Sequence
  Description of Artificial Sequence: Synthetic oligonucleotide
  Antisense strand to SEQ ID NO: 1869511
gauuucacuguucacuacc

SEQ ID NO: 1869513 - RNA, 19 nt, Artificial Sequence
  Description of Artificial Sequence: Synthetic oligonucleotide
  Sense strand starting at position 1510 of SEQ ID NO: 1564297
ggaggaaagauucggaugu

SEQ ID NO: 1869514 - RNA, 19 nt, Artificial Sequence
  Description of Artificial Sequence: Synthetic oligonucleotide
  Antisense strand to SEQ ID NO: 1869513
acauccgaaucuuuccucc

SEQ ID NO: 1869515 - RNA, 19 nt, Artificial Sequence
  Description of Artificial Sequence: Synthetic oligonucleotide
  Sense strand starting at position 1514 of SEQ ID NO: 1564297
gaaagauucggaugucauu

SEQ ID NO: 1869516 - RNA, 19 nt, Artificial Sequence
  Description of Artificial Sequence: Synthetic oligonucleotide
  Antisense strand to SEQ ID NO: 1869515
aaugacauccgaaucuuuc

SEQ ID NO: 1869517 - RNA, 19 nt, Artificial Sequence
  Description of Artificial Sequence: Synthetic oligonucleotide
  Sense strand starting at position 1713 of SEQ ID NO: 1564297
ucaccugcccaguaggaau

SEQ ID NO: 1869518 - RNA, 19 nt, Artificial Sequence
  Description of Artificial Sequence: Synthetic oligonucleotide
  Antisense strand to SEQ ID NO: 1869517
auuccuacugggcagguga

SEQ ID NO: 1869519 - RNA, 19 nt, Artificial Sequence
  Description of Artificial Sequence: Synthetic oligonucleotide
  Sense strand starting at position 1730 of SEQ ID NO: 1564297
auaggcuuuccauaguaga

SEQ ID NO: 1869520 - RNA, 19 nt, Artificial Sequence
  Description of Artificial Sequence: Synthetic oligonucleotide
  Antisense strand to SEQ ID NO: 1869519
ucuacuauggaaagccuau

SEQ ID NO: 1869521 - RNA, 19 nt, Artificial Sequence
  Description of Artificial Sequence: Synthetic oligonucleotide
  Sense strand starting at position 1948 of SEQ ID NO: 1564297
gcgucugugacugcuuacu

SEQ ID NO: 1869522 - RNA, 19 nt, Artificial Sequence
  Description of Artificial Sequence: Synthetic oligonucleotide
  Antisense strand to SEQ ID NO: 1869521
aguaagcagucacagacgc

SEQ ID NO: 1869523 - RNA, 19 nt, Artificial Sequence
  Description of Artificial Sequence: Synthetic oligonucleotide
  Sense strand starting at position 2085 of SEQ ID NO: 1564297
gagguuccaggaugaguga

SEQ ID NO: 1869524 - RNA, 19 nt, Artificial Sequence
  Description of Artificial Sequence: Synthetic oligonucleotide
  Antisense strand to SEQ ID NO: 1869523
ucacucauccuggaaccuc

SEQ ID NO: 1869525 - RNA, 19 nt, Artificial Sequence
  Description of Artificial Sequence: Synthetic oligonucleotide
  Sense strand starting at position 2123 of SEQ ID NO: 1564297
aggguauugacuugacuuu

SEQ ID NO: 1869526 - RNA, 19 nt, Artificial Sequence
  Description of Artificial Sequence: Synthetic oligonucleotide
  Antisense strand to SEQ ID NO: 1869525
aaagucaagucaauacccu

SEQ ID NO: 1869527 - RNA, 19 nt, Artificial Sequence
  Description of Artificial Sequence: Synthetic oligonucleotide
  Sense strand starting at position 2194 of SEQ ID NO: 1564297
uugagucuccuccacaaga

SEQ ID NO: 1869528 - RNA, 19 nt, Artificial Sequence
  Description of Artificial Sequence: Synthetic oligonucleotide
  Antisense strand to SEQ ID NO: 1869527
ucuuguggaggagacucaa

SEQ ID NO: 1869529 - RNA, 19 nt, Artificial Sequence
  Description of Artificial Sequence: Synthetic oligonucleotide
  Sense strand starting at position 2231 of SEQ ID NO: 1564297
gaccuuugggaugagucuu

SEQ ID NO: 1869530 - RNA, 19 nt, Artificial Sequence
  Description of Artificial Sequence: Synthetic oligonucleotide
  Antisense strand to SEQ ID NO: 1869529
aagacucaucccaaagguc

SEQ ID NO: 1869531 - RNA, 19 nt, Artificial Sequence
  Description of Artificial Sequence: Synthetic oligonucleotide
  Sense strand starting at position 2402 of SEQ ID NO: 1564297
ggcuuaagaguacaagagu

SEQ ID NO: 1869532 - RNA, 19 nt, Artificial Sequence
  Description of Artificial Sequence: Synthetic oligonucleotide
  Antisense strand to SEQ ID NO: 1869531
acucuuguacucuuaagcc

SEQ ID NO: 1869533 - RNA, 19 nt, Artificial Sequence
  Description of Artificial Sequence: Synthetic oligonucleotide
  Sense strand starting at position 2410 of SEQ ID NO: 1564297
aguacaagaguuuagugua

SEQ ID NO: 1869534 - RNA, 19 nt, Artificial Sequence
  Description of Artificial Sequence: Synthetic oligonucleotide
  Antisense strand to SEQ ID NO: 1869533
uacacuaaacucuuguacu

SEQ ID NO: 1869535 - RNA, 19 nt, Artificial Sequence
  Description of Artificial Sequence: Synthetic oligonucleotide
  Sense strand starting at position 2463 of SEQ ID NO: 1564297
uugacaagccaauggauaa

SEQ ID NO: 1869536 - RNA, 19 nt, Artificial Sequence
  Description of Artificial Sequence: Synthetic oligonucleotide
  Antisense strand to SEQ ID NO: 1869535
uuauccauuggcuugucaa

SEQ ID NO: 1869537 - RNA, 19 nt, Artificial Sequence
  Description of Artificial Sequence: Synthetic oligonucleotide
  Sense strand starting at position 2473 of SEQ ID NO: 1564297
aauggauaaggcuguuaug

SEQ ID NO: 1869538 - RNA, 19 nt, Artificial Sequence
  Description of Artificial Sequence: Synthetic oligonucleotide
  Antisense strand to SEQ ID NO: 1869537
cauaacagccuuauccauu

SEQ ID NO: 1869539 - RNA, 19 nt, Artificial Sequence
  Description of Artificial Sequence: Synthetic oligonucleotide
  Sense strand starting at position 2483 of SEQ ID NO: 1564297
gcuguuaugggugaauaug

SEQ ID NO: 1869540 - RNA, 19 nt, Artificial Sequence
  Description of Artificial Sequence: Synthetic oligonucleotide
  Antisense strand to SEQ ID NO: 1869539
cauauucacccauaacagc

SEQ ID NO: 1869541 - RNA, 19 nt, Artificial Sequence
  Description of Artificial Sequence: Synthetic oligonucleotide
  Sense strand starting at position 2493 of SEQ ID NO: 1564297
gugaauaugccucauaucu

SEQ ID NO: 1869542 - RNA, 19 nt, Artificial Sequence
  Description of Artificial Sequence: Synthetic oligonucleotide
  Antisense strand to SEQ ID NO: 1869541
agauaugaggcauauucac

SEQ ID NO: 1869543 - RNA, 19 nt, Artificial Sequence
  Description of Artificial Sequence: Synthetic oligonucleotide
  Sense strand starting at position 2677 of SEQ ID NO: 1564297
gugguaugcuguauuaggu

SEQ ID NO: 1869544 - RNA, 19 nt, Artificial Sequence
  Description of Artificial Sequence: Synthetic oligonucleotide
  Antisense strand to SEQ ID NO: 1869543
accuaauacagcauaccac

SEQ ID NO: 1869545 - RNA, 19 nt, Artificial Sequence
  Description of Artificial Sequence: Synthetic oligonucleotide
  Sense strand starting at position 2684 of SEQ ID NO: 1564297
gcuguauuagguugaauuu

SEQ ID NO: 1869546 - RNA, 19 nt, Artificial Sequence
  Description of Artificial Sequence: Synthetic oligonucleotide
  Antisense strand to SEQ ID NO: 1869545
aaauucaaccuaauacagc

SEQ ID NO: 1869547 - RNA, 19 nt, Artificial Sequence
  Description of Artificial Sequence: Synthetic oligonucleotide
  Sense strand starting at position 2769 of SEQ ID NO: 1564297
gcucaacugcuccagaaau

SEQ ID NO: 1869548 - RNA, 19 nt, Artificial Sequence
  Description of Artificial Sequence: Synthetic oligonucleotide
  Antisense strand to SEQ ID NO: 1869547
auuucuggagcaguugagc

SEQ ID NO: 1869549 - RNA, 19 nt, Artificial Sequence
  Description of Artificial Sequence: Synthetic oligonucleotide
  Sense strand starting at position 2771 of SEQ ID NO: 1564297
ucaacugcuccagaaauug

SEQ ID NO: 1869550 - RNA, 19 nt, Artificial Sequence
  Description of Artificial Sequence: Synthetic oligonucleotide
  Antisense strand to SEQ ID NO: 1869549
caauuucuggagcaguuga

SEQ ID NO: 1869551 - RNA, 19 nt, Artificial Sequence
  Description of Artificial Sequence: Synthetic oligonucleotide
  Sense strand starting at position 2852 of SEQ ID NO: 1564297
gcgcuuugucuacuaagcu

SEQ ID NO: 1869552 - RNA, 19 nt, Artificial Sequence
  Description of Artificial Sequence: Synthetic oligonucleotide
  Antisense strand to SEQ ID NO: 1869551
agcuuaguagacaaagcgc

SEQ ID NO: 1869553 - RNA, 19 nt, Artificial Sequence
  Description of Artificial Sequence: Synthetic oligonucleotide
  Sense strand starting at position 3244 of SEQ ID NO: 1564297
cggguccucacucaggaaa

SEQ ID NO: 1869554 - RNA, 19 nt, Artificial Sequence
  Description of Artificial Sequence: Synthetic oligonucleotide
  Antisense strand to SEQ ID NO: 1869553
uuuccugagugaggacccg

SEQ ID NO: 1869555 - RNA, 19 nt, Artificial Sequence
  Description of Artificial Sequence: Synthetic oligonucleotide
  Sense strand starting at position 3414 of SEQ ID NO: 1564297
gcccacuggacagauguaa

SEQ ID NO: 1869556 - RNA, 19 nt, Artificial Sequence
  Description of Artificial Sequence: Synthetic oligonucleotide
  Antisense strand to SEQ ID NO: 1869555
uuacaucuguccagugggc

SEQ ID NO: 1869557 - RNA, 19 nt, Artificial Sequence
  Description of Artificial Sequence: Synthetic oligonucleotide
  Sense strand starting at position 3429 of SEQ ID NO: 1564297
guaaauuucugccuggcca

SEQ ID NO: 1869558 - RNA, 19 nt, Artificial Sequence
  Description of Artificial Sequence: Synthetic oligonucleotide
  Antisense strand to SEQ ID NO: 1869557
uggccaggcagaaauuuac

SEQ ID NO: 1869559 - RNA, 19 nt, Artificial Sequence
  Description of Artificial Sequence: Synthetic oligonucleotide
  Sense strand starting at position 3584 of SEQ ID NO: 1564297
agcccucuugauuaguaaa

SEQ ID NO: 1869560 - RNA, 19 nt, Artificial Sequence
  Description of Artificial Sequence: Synthetic oligonucleotide
  Antisense strand to SEQ ID NO: 1869559
uuuacuaaucaagagggcu

SEQ ID NO: 1869561 - RNA, 19 nt, Artificial Sequence
  Description of Artificial Sequence: Synthetic oligonucleotide
  Sense strand starting at position 3856 of SEQ ID NO: 1564297
uggguuauuucccuugguu

SEQ ID NO: 1869562 - RNA, 19 nt, Artificial Sequence
  Description of Artificial Sequence: Synthetic oligonucleotide
  Antisense strand to SEQ ID NO: 1869561
aaccaagggaaauaaccca

SEQ ID NO: 1869563 - RNA, 19 nt, Artificial Sequence
  Description of Artificial Sequence: Synthetic oligonucleotide
  Sense strand starting at position 3858 of SEQ ID NO: 1564297
gguuauuucccuugguucu

SEQ ID NO: 1869564 - RNA, 19 nt, Artificial Sequence
  Description of Artificial Sequence: Synthetic oligonucleotide
  Antisense strand to SEQ ID NO: 1869563
agaaccaagggaaauaacc

SEQ ID NO: 1869565 - RNA, 19 nt, Artificial Sequence
  Description of Artificial Sequence: Synthetic oligonucleotide
  Sense strand starting at position 3859 of SEQ ID NO: 1564297
guuauuucccuugguucuu

SEQ ID NO: 1869566 - RNA, 19 nt, Artificial Sequence
  Description of Artificial Sequence: Synthetic oligonucleotide
  Antisense strand to SEQ ID NO: 1869565
aagaaccaagggaaauaac

SEQ ID NO: 1869567 - RNA, 19 nt, Artificial Sequence
  Description of Artificial Sequence: Synthetic oligonucleotide
  Sense strand starting at position 3883 of SEQ ID NO: 1564297
cccucagguggguauuauu

SEQ ID NO: 1869568 - RNA, 19 nt, Artificial Sequence
  Description of Artificial Sequence: Synthetic oligonucleotide
  Antisense strand to SEQ ID NO: 1869567
aauaauacccaccugaggg

SEQ ID NO: 1869569 - RNA, 19 nt, Artificial Sequence
  Description of Artificial Sequence: Synthetic oligonucleotide
  Sense strand starting at position 3893 of SEQ ID NO: 1564297
gguauuauugcacauacuc

SEQ ID NO: 1869570 - RNA, 19 nt, Artificial Sequence
  Description of Artificial Sequence: Synthetic oligonucleotide
  Antisense strand to SEQ ID NO: 1869569
gaguaugugcaauaauacc

SEQ ID NO: 1869571 - RNA, 19 nt, Artificial Sequence
  Description of Artificial Sequence: Synthetic oligonucleotide
  Sense strand starting at position 145 of SEQ ID NO: 1564298
agggcugguugaucacuua

SEQ ID NO: 1869572 - RNA, 19 nt, Artificial Sequence
  Description of Artificial Sequence: Synthetic oligonucleotide
  Antisense strand to SEQ ID NO: 1869571
uaagugaucaaccagcccu

SEQ ID NO: 1869573 - RNA, 19 nt, Artificial Sequence
  Description of Artificial Sequence: Synthetic oligonucleotide
  Sense strand starting at position 148 of SEQ ID NO: 1564298
gcugguugaucacuuacau

SEQ ID NO: 1869574 - RNA, 19 nt, Artificial Sequence
  Description of Artificial Sequence: Synthetic oligonucleotide
  Antisense strand to SEQ ID NO: 1869573
auguaagugaucaaccagc

SEQ ID NO: 1869575 - RNA, 19 nt, Artificial Sequence
  Description of Artificial Sequence: Synthetic oligonucleotide
  Sense strand starting at position 355 of SEQ ID NO: 1564298
cauagucugguuuggagau

SEQ ID NO: 1869576 - RNA, 19 nt, Artificial Sequence
  Description of Artificial Sequence: Synthetic oligonucleotide
  Antisense strand to SEQ ID NO: 1869575
aucuccaaaccagacuaug

SEQ ID NO: 1869577 - RNA, 19 nt, Artificial Sequence
  Description of Artificial Sequence: Synthetic oligonucleotide
  Sense strand starting at position 357 of SEQ ID NO: 1564298
uagucugguuuggagauuu

SEQ ID NO: 1869578 - RNA, 19 nt, Artificial Sequence
  Description of Artificial Sequence: Synthetic oligonucleotide
  Antisense strand to SEQ ID NO: 1869577
aaaucuccaaaccagacua

SEQ ID NO: 1869579 - RNA, 19 nt, Artificial Sequence
  Description of Artificial Sequence: Synthetic oligonucleotide
  Sense strand starting at position 386 of SEQ ID NO: 1564298
accagagaguuggugucua

SEQ ID NO: 1869580 - RNA, 19 nt, Artificial Sequence
  Description of Artificial Sequence: Synthetic oligonucleotide
  Antisense strand to SEQ ID NO: 1869579
uagacaccaacucucuggu

SEQ ID NO: 1869581 - RNA, 19 nt, Artificial Sequence
  Description of Artificial Sequence: Synthetic oligonucleotide
  Sense strand starting at position 391 of SEQ ID NO: 1564298
agaguuggugucuaagggu

SEQ ID NO: 1869582 - RNA, 19 nt, Artificial Sequence
  Description of Artificial Sequence: Synthetic oligonucleotide
  Antisense strand to SEQ ID NO: 1869581
acccuuagacaccaacucu

SEQ ID NO: 1869583 - RNA, 19 nt, Artificial Sequence
  Description of Artificial Sequence: Synthetic oligonucleotide
  Sense strand starting at position 420 of SEQ ID NO: 1564298
ggguauagucugggagcca

SEQ ID NO: 1869584 - RNA, 19 nt, Artificial Sequence
  Description of Artificial Sequence: Synthetic oligonucleotide
  Antisense strand to SEQ ID NO: 1869583
uggcucccagacuauaccc

SEQ ID NO: 1869585 - RNA, 19 nt, Artificial Sequence
  Description of Artificial Sequence: Synthetic oligonucleotide
  Sense strand starting at position 599 of SEQ ID NO: 1564298
guaggauucuaguauuugg

SEQ ID NO: 1869586 - RNA, 19 nt, Artificial Sequence
  Description of Artificial Sequence: Synthetic oligonucleotide
  Antisense strand to SEQ ID NO: 1869585
ccaaauacuagaauccuac

SEQ ID NO: 1869587 - RNA, 19 nt, Artificial Sequence
  Description of Artificial Sequence: Synthetic oligonucleotide
  Sense strand starting at position 703 of SEQ ID NO: 1564298
uguggagagaguuaugguu

SEQ ID NO: 1869588 - RNA, 19 nt, Artificial Sequence
  Description of Artificial Sequence: Synthetic oligonucleotide
  Antisense strand to SEQ ID NO: 1869587
aaccauaacucucuccaca

SEQ ID NO: 1869589 - RNA, 19 nt, Artificial Sequence
  Description of Artificial Sequence: Synthetic oligonucleotide
  Sense strand starting at position 710 of SEQ ID NO: 1564298
agaguuaugguuuaggagu

SEQ ID NO: 1869590 - RNA, 19 nt, Artificial Sequence
  Description of Artificial Sequence: Synthetic oligonucleotide
  Antisense strand to SEQ ID NO: 1869589
acuccuaaaccauaacucu

SEQ ID NO: 1869591 - RNA, 19 nt, Artificial Sequence
  Description of Artificial Sequence: Synthetic oligonucleotide
  Sense strand starting at position 732 of SEQ ID NO: 1564298
guggauauuugauagccuu

SEQ ID NO: 1869592 - RNA, 19 nt, Artificial Sequence
  Description of Artificial Sequence: Synthetic oligonucleotide
  Antisense strand to SEQ ID NO: 1869591
aaggcuaucaaauauccac

SEQ ID NO: 1869593 - RNA, 19 nt, Artificial Sequence
  Description of Artificial Sequence: Synthetic oligonucleotide
  Sense strand starting at position 758 of SEQ ID NO: 1564298
ggaaguuaugcugggucca

SEQ ID NO: 1869594 - RNA, 19 nt, Artificial Sequence
  Description of Artificial Sequence: Synthetic oligonucleotide
  Antisense strand to SEQ ID NO: 1869593
uggacccagcauaacuucc

SEQ ID NO: 1869595 - RNA, 19 nt, Artificial Sequence
  Description of Artificial Sequence: Synthetic oligonucleotide
  Sense strand starting at position 759 of SEQ ID NO: 1564298
gaaguuaugcuggguccau

SEQ ID NO: 1869596 - RNA, 19 nt, Artificial Sequence
  Description of Artificial Sequence: Synthetic oligonucleotide
  Antisense strand to SEQ ID NO: 1869595
auggacccagcauaacuuc

SEQ ID NO: 1869597 - RNA, 19 nt, Artificial Sequence
  Description of Artificial Sequence: Synthetic oligonucleotide
  Sense strand starting at position 774 of SEQ ID NO: 1564298
ccaucuuuauggguuuaaa

SEQ ID NO: 1869598 - RNA, 19 nt, Artificial Sequence
  Description of Artificial Sequence: Synthetic oligonucleotide
  Antisense strand to SEQ ID NO: 1869597
uuuaaacccauaaagaugg

SEQ ID NO: 1869599 - RNA, 19 nt, Artificial Sequence
  Description of Artificial Sequence: Synthetic oligonucleotide
  Sense strand starting at position 806 of SEQ ID NO: 1564298
ggcuuaaaccuagaaaguu

SEQ ID NO: 1869600 - RNA, 19 nt, Artificial Sequence
  Description of Artificial Sequence: Synthetic oligonucleotide
  Antisense strand to SEQ ID NO: 1869599
aacuuucuagguuuaagcc

SEQ ID NO: 1869601 - RNA, 19 nt, Artificial Sequence
  Description of Artificial Sequence: Synthetic oligonucleotide
  Sense strand starting at position 858 of SEQ ID NO: 1564298
uaagaacuaccucgguauu

SEQ ID NO: 1869602 - RNA, 19 nt, Artificial Sequence
  Description of Artificial Sequence: Synthetic oligonucleotide
  Antisense strand to SEQ ID NO: 1869601
aauaccgagguaguucuua

SEQ ID NO: 1869603 - RNA, 19 nt, Artificial Sequence
  Description of Artificial Sequence: Synthetic oligonucleotide
  Sense strand starting at position 868 of SEQ ID NO: 1564298
cucgguauuugaguguuca

SEQ ID NO: 1869604 - RNA, 19 nt, Artificial Sequence
  Description of Artificial Sequence: Synthetic oligonucleotide
  Antisense strand to SEQ ID NO: 1869603
ugaacacucaaauaccgag

SEQ ID NO: 1869605 - RNA, 19 nt, Artificial Sequence
  Description of Artificial Sequence: Synthetic oligonucleotide
  Sense strand starting at position 869 of SEQ ID NO: 1564298
ucgguauuugaguguucag

SEQ ID NO: 1869606 - RNA, 19 nt, Artificial Sequence
  Description of Artificial Sequence: Synthetic oligonucleotide
  Antisense strand to SEQ ID NO: 1869605
cugaacacucaaauaccga

SEQ ID NO: 1869607 - RNA, 19 nt, Artificial Sequence
  Description of Artificial Sequence: Synthetic oligonucleotide
  Sense strand starting at position 984 of SEQ ID NO: 1564298
ugaacagauuuaugacuua

SEQ ID NO: 1869608 - RNA, 19 nt, Artificial Sequence
  Description of Artificial Sequence: Synthetic oligonucleotide
  Antisense strand to SEQ ID NO: 1869607
uaagucauaaaucuguuca

SEQ ID NO: 1869609 - RNA, 19 nt, Artificial Sequence
  Description of Artificial Sequence: Synthetic oligonucleotide
  Sense strand starting at position 997 of SEQ ID NO: 1564298
gacuuaggagcuuggcaaa

SEQ ID NO: 1869610 - RNA, 19 nt, Artificial Sequence
  Description of Artificial Sequence: Synthetic oligonucleotide
  Antisense strand to SEQ ID NO: 1869609
uuugccaagcuccuaaguc

SEQ ID NO: 1869611 - RNA, 19 nt, Artificial Sequence
  Description of Artificial Sequence: Synthetic oligonucleotide
  Sense strand starting at position 1040 of SEQ ID NO: 1564298
gagagauuccugggaugca

SEQ ID NO: 1869612 - RNA, 19 nt, Artificial Sequence
  Description of Artificial Sequence: Synthetic oligonucleotide
  Antisense strand to SEQ ID NO: 1869611
ugcaucccaggaaucucuc

SEQ ID NO: 1869613 - RNA, 19 nt, Artificial Sequence
  Description of Artificial Sequence: Synthetic oligonucleotide
  Sense strand starting at position 1092 of SEQ ID NO: 1564298
guacaaauacagugcucau

SEQ ID NO: 1869614 - RNA, 19 nt, Artificial Sequence
  Description of Artificial Sequence: Synthetic oligonucleotide
  Antisense strand to SEQ ID NO: 1869613
augagcacuguauuuguac

SEQ ID NO: 1869615 - RNA, 19 nt, Artificial Sequence
  Description of Artificial Sequence: Synthetic oligonucleotide
  Sense strand starting at position 1226 of SEQ ID NO: 1564298
guuugccaucuggaugagu

SEQ ID NO: 1869616 - RNA, 19 nt, Artificial Sequence
  Description of Artificial Sequence: Synthetic oligonucleotide
  Antisense strand to SEQ ID NO: 1869615
acucauccagauggcaaac

SEQ ID NO: 1869617 - RNA, 19 nt, Artificial Sequence
  Description of Artificial Sequence: Synthetic oligonucleotide
  Sense strand starting at position 1228 of SEQ ID NO: 1564298
uugccaucuggaugagucu

SEQ ID NO: 1869618 - RNA, 19 nt, Artificial Sequence
  Description of Artificial Sequence: Synthetic oligonucleotide
  Antisense strand to SEQ ID NO: 1869617
agacucauccagauggcaa

SEQ ID NO: 1869619 - RNA, 19 nt, Artificial Sequence
  Description of Artificial Sequence: Synthetic oligonucleotide
  Sense strand starting at position 1235 of SEQ ID NO: 1564298
cuggaugagucuuugguuc

SEQ ID NO: 1869620 - RNA, 19 nt, Artificial Sequence
  Description of Artificial Sequence: Synthetic oligonucleotide
  Antisense strand to SEQ ID NO: 1869619
gaaccaaagacucauccag

SEQ ID NO: 1869621 - RNA, 19 nt, Artificial Sequence
  Description of Artificial Sequence: Synthetic oligonucleotide
  Sense strand starting at position 1263 of SEQ ID NO: 1564298
gggauucacugaucagguc

SEQ ID NO: 1869622 - RNA, 19 nt, Artificial Sequence
  Description of Artificial Sequence: Synthetic oligonucleotide
  Antisense strand to SEQ ID NO: 1869621
gaccugaucagugaauccc

SEQ ID NO: 1869623 - RNA, 19 nt, Artificial Sequence
  Description of Artificial Sequence: Synthetic oligonucleotide
  Sense strand starting at position 1279 of SEQ ID NO: 1564298
gucugaggucuugaagcua

SEQ ID NO: 1869624 - RNA, 19 nt, Artificial Sequence
  Description of Artificial Sequence: Synthetic oligonucleotide
  Antisense strand to SEQ ID NO: 1869623
uagcuucaagaccucagac

SEQ ID NO: 1869625 - RNA, 19 nt, Artificial Sequence
  Description of Artificial Sequence: Synthetic oligonucleotide
  Sense strand starting at position 1333 of SEQ ID NO: 1564298
ugagaacuggcuugcaagu

SEQ ID NO: 1869626 - RNA, 19 nt, Artificial Sequence
  Description of Artificial Sequence: Synthetic oligonucleotide
  Antisense strand to SEQ ID NO: 1869625
acuugcaagccaguucuca

SEQ ID NO: 1869627 - RNA, 19 nt, Artificial Sequence
  Description of Artificial Sequence: Synthetic oligonucleotide
  Sense strand starting at position 1643 of SEQ ID NO: 1564298
gcaaguagacauugagauc

SEQ ID NO: 1869628 - RNA, 19 nt, Artificial Sequence
  Description of Artificial Sequence: Synthetic oligonucleotide
  Antisense strand to SEQ ID NO: 1869627
gaucucaaugucuacuugc

SEQ ID NO: 1869629 - RNA, 19 nt, Artificial Sequence
  Description of Artificial Sequence: Synthetic oligonucleotide
  Sense strand starting at position 1674 of SEQ ID NO: 1564298
guggauuaugacgggaaau

SEQ ID NO: 1869630 - RNA, 19 nt, Artificial Sequence
  Description of Artificial Sequence: Synthetic oligonucleotide
  Antisense strand to SEQ ID NO: 1869629
auuucccgucauaauccac

SEQ ID NO: 1869631 - RNA, 19 nt, Artificial Sequence
  Description of Artificial Sequence: Synthetic oligonucleotide
  Sense strand starting at position 1686 of SEQ ID NO: 1564298
gggaaauucuaggagagga

SEQ ID NO: 1869632 - RNA, 19 nt, Artificial Sequence
  Description of Artificial Sequence: Synthetic oligonucleotide
  Antisense strand to SEQ ID NO: 1869631
uccucuccuagaauuuccc

SEQ ID NO: 1869633 - RNA, 19 nt, Artificial Sequence
  Description of Artificial Sequence: Synthetic oligonucleotide
  Sense strand starting at position 1996 of SEQ ID NO: 1564298
agaggaacuuccgcaauga

SEQ ID NO: 1869634 - RNA, 19 nt, Artificial Sequence
  Description of Artificial Sequence: Synthetic oligonucleotide
  Antisense strand to SEQ ID NO: 1869633
ucauugcggaaguuccucu

SEQ ID NO: 1869635 - RNA, 19 nt, Artificial Sequence
  Description of Artificial Sequence: Synthetic oligonucleotide
  Sense strand starting at position 2775 of SEQ ID NO: 1564298
uaucgugagugcuuagaca

SEQ ID NO: 1869636 - RNA, 19 nt, Artificial Sequence
  Description of Artificial Sequence: Synthetic oligonucleotide
  Antisense strand to SEQ ID NO: 1869635
ugucuaagcacucacgaua

SEQ ID NO: 1869637 - RNA, 19 nt, Artificial Sequence
  Description of Artificial Sequence: Synthetic oligonucleotide
  Sense strand starting at position 2783 of SEQ ID NO: 1564298
gugcuuagacacugccaau

SEQ ID NO: 1869638 - RNA, 19 nt, Artificial Sequence
  Description of Artificial Sequence: Synthetic oligonucleotide
  Antisense strand to SEQ ID NO: 1869637
auuggcagugucuaagcac

SEQ ID NO: 1869639 - RNA, 19 nt, Artificial Sequence
  Description of Artificial Sequence: Synthetic oligonucleotide
  Sense strand starting at position 3215 of SEQ ID NO: 1564298
aucauauaugaaugccuga

SEQ ID NO: 1869640 - RNA, 19 nt, Artificial Sequence
  Description of Artificial Sequence: Synthetic oligonucleotide
  Antisense strand to SEQ ID NO: 1869639
ucaggcauucauauaugau

SEQ ID NO: 1869641 - RNA, 19 nt, Artificial Sequence
  Description of Artificial Sequence: Synthetic oligonucleotide
  Sense strand starting at position 3218 of SEQ ID NO: 1564298
auauaugaaugccugaaca

SEQ ID NO: 1869642 - RNA, 19 nt, Artificial Sequence
  Description of Artificial Sequence: Synthetic oligonucleotide
  Antisense strand to SEQ ID NO: 1869641
uguucaggcauucauauau

SEQ ID NO: 1869643 - RNA, 19 nt, Artificial Sequence
  Description of Artificial Sequence: Synthetic oligonucleotide
  Sense strand starting at position 3234 of SEQ ID NO: 1564298
acaacaucuuguuuaguuu

SEQ ID NO: 1869644 - RNA, 19 nt, Artificial Sequence
  Description of Artificial Sequence: Synthetic oligonucleotide
  Antisense strand to SEQ ID NO: 1869643
aaacuaaacaagauguugu

SEQ ID NO: 1869645 - RNA, 19 nt, Artificial Sequence
  Description of Artificial Sequence: Synthetic oligonucleotide
  Sense strand starting at position 3454 of SEQ ID NO: 1564298
guugcugugauuccuguuu

SEQ ID NO: 1869646 - RNA, 19 nt, Artificial Sequence
  Description of Artificial Sequence: Synthetic oligonucleotide
  Antisense strand to SEQ ID NO: 1869645
aaacaggaaucacagcaac

SEQ ID NO: 1869647 - RNA, 19 nt, Artificial Sequence
  Description of Artificial Sequence: Synthetic oligonucleotide
  Sense strand starting at position 3461 of SEQ ID NO: 1564298
ugauuccuguuugccuaua

SEQ ID NO: 1869648 - RNA, 19 nt, Artificial Sequence
  Description of Artificial Sequence: Synthetic oligonucleotide
  Antisense strand to SEQ ID NO: 1869647
uauaggcaaacaggaauca

SEQ ID NO: 1869649 - RNA, 19 nt, Artificial Sequence
  Description of Artificial Sequence: Synthetic oligonucleotide
  Sense strand starting at position 3664 of SEQ ID NO: 1564298
cgggaaucugagggcugua

SEQ ID NO: 1869650 - RNA, 19 nt, Artificial Sequence
  Description of Artificial Sequence: Synthetic oligonucleotide
  Antisense strand to SEQ ID NO: 1869649
uacagcccucagauucccg

SEQ ID NO: 1869651 - RNA, 19 nt, Artificial Sequence
  Description of Artificial Sequence: Synthetic oligonucleotide
  Sense strand starting at position 863 of SEQ ID NO: 1564299
aguuaaagacuuggugagu

SEQ ID NO: 1869652 - RNA, 19 nt, Artificial Sequence
  Description of Artificial Sequence: Synthetic oligonucleotide
  Antisense strand to SEQ ID NO: 1869651
acucaccaagucuuuaacu

SEQ ID NO: 1869653 - RNA, 19 nt, Artificial Sequence
  Description of Artificial Sequence: Synthetic oligonucleotide
  Sense strand starting at position 1460 of SEQ ID NO: 1564299
ggguuucggauauggaaag

SEQ ID NO: 1869654 - RNA, 19 nt, Artificial Sequence
  Description of Artificial Sequence: Synthetic oligonucleotide
  Antisense strand to SEQ ID NO: 1869653
cuuuccauauccgaaaccc

SEQ ID NO: 1869655 - RNA, 19 nt, Artificial Sequence
  Description of Artificial Sequence: Synthetic oligonucleotide
  Sense strand starting at position 1471 of SEQ ID NO: 1564299
auggaaaguuucccaccuu

SEQ ID NO: 1869656 - RNA, 19 nt, Artificial Sequence
  Description of Artificial Sequence: Synthetic oligonucleotide
  Antisense strand to SEQ ID NO: 1869655
aaggugggaaacuuuccau

SEQ ID NO: 1869657 - RNA, 19 nt, Artificial Sequence
  Description of Artificial Sequence: Synthetic oligonucleotide
  Sense strand starting at position 1632 of SEQ ID NO: 1564299
agcagucuuagauagcaga

SEQ ID NO: 1869658 - RNA, 19 nt, Artificial Sequence
  Description of Artificial Sequence: Synthetic oligonucleotide
  Antisense strand to SEQ ID NO: 1869657
ucugcuaucuaagacugcu

SEQ ID NO: 1869659 - RNA, 19 nt, Artificial Sequence
  Description of Artificial Sequence: Synthetic oligonucleotide
  Sense strand starting at position 1681 of SEQ ID NO: 1564299
cccuguucuucuccuagga

SEQ ID NO: 1869660 - RNA, 19 nt, Artificial Sequence
  Description of Artificial Sequence: Synthetic oligonucleotide
  Antisense strand to SEQ ID NO: 1869659
uccuaggagaagaacaggg

SEQ ID NO: 1869661 - RNA, 19 nt, Artificial Sequence
  Description of Artificial Sequence: Synthetic oligonucleotide
  Sense strand starting at position 1720 of SEQ ID NO: 1564299
ggucaucaguucccguaga

SEQ ID NO: 1869662 - RNA, 19 nt, Artificial Sequence
  Description of Artificial Sequence: Synthetic oligonucleotide
  Antisense strand to SEQ ID NO: 1869661
ucuacgggaacugaugacc

SEQ ID NO: 1869663 - RNA, 19 nt, Artificial Sequence
  Description of Artificial Sequence: Synthetic oligonucleotide
  Sense strand starting at position 1985 of SEQ ID NO: 1564299
agaucuacgucaccaguga

SEQ ID NO: 1869664 - RNA, 19 nt, Artificial Sequence
  Description of Artificial Sequence: Synthetic oligonucleotide
  Antisense strand to SEQ ID NO: 1869663
ucacuggugacguagaucu

SEQ ID NO: 1869665 - RNA, 19 nt, Artificial Sequence
  Description of Artificial Sequence: Synthetic oligonucleotide
  Sense strand starting at position 2002 of SEQ ID NO: 1564299
gagcucgggucccuaauuu

SEQ ID NO: 1869666 - RNA, 19 nt, Artificial Sequence
  Description of Artificial Sequence: Synthetic oligonucleotide
  Antisense strand to SEQ ID NO: 1869665
aaauuagggacccgagcuc

SEQ ID NO: 1869667 - RNA, 19 nt, Artificial Sequence
  Description of Artificial Sequence: Synthetic oligonucleotide
  Sense strand starting at position 2084 of SEQ ID NO: 1564299
uacauuuggcccugucagu

SEQ ID NO: 1869668 - RNA, 19 nt, Artificial Sequence
  Description of Artificial Sequence: Synthetic oligonucleotide
  Antisense strand to SEQ ID NO: 1869667
acugacagggccaaaugua

SEQ ID NO: 1869669 - RNA, 19 nt, Artificial Sequence
  Description of Artificial Sequence: Synthetic oligonucleotide
  Sense strand starting at position 2115 of SEQ ID NO: 1564299
uuccuaucccagcgggaaa

SEQ ID NO: 1869670 - RNA, 19 nt, Artificial Sequence
  Description of Artificial Sequence: Synthetic oligonucleotide
  Antisense strand to SEQ ID NO: 1869669
uuucccgcugggauaggaa

SEQ ID NO: 1869671 - RNA, 19 nt, Artificial Sequence
  Description of Artificial Sequence: Synthetic oligonucleotide
  Sense strand starting at position 2135 of SEQ ID NO: 1564299
auguuauuugcuugacucu

SEQ ID NO: 1869672 - RNA, 19 nt, Artificial Sequence
  Description of Artificial Sequence: Synthetic oligonucleotide
  Antisense strand to SEQ ID NO: 1869671
agagucaagcaaauaacau

SEQ ID NO: 1869673 - RNA, 19 nt, Artificial Sequence
  Description of Artificial Sequence: Synthetic oligonucleotide
  Sense strand starting at position 2144 of SEQ ID NO: 1564299
gcuugacucugauuacuag

SEQ ID NO: 1869674 - RNA, 19 nt, Artificial Sequence
  Description of Artificial Sequence: Synthetic oligonucleotide
  Antisense strand to SEQ ID NO: 1869673
cuaguaaucagagucaagc

SEQ ID NO: 1869675 - RNA, 19 nt, Artificial Sequence
  Description of Artificial Sequence: Synthetic oligonucleotide
  Sense strand starting at position 2202 of SEQ ID NO: 1564299
uacuucuuucgagaauugu

SEQ ID NO: 1869676 - RNA, 19 nt, Artificial Sequence
  Description of Artificial Sequence: Synthetic oligonucleotide
  Antisense strand to SEQ ID NO: 1869675
acaauucucgaaagaagua

SEQ ID NO: 1869677 - RNA, 19 nt, Artificial Sequence
  Description of Artificial Sequence: Synthetic oligonucleotide
  Sense strand starting at position 2211 of SEQ ID NO: 1564299
cgagaauugucucuuccau

SEQ ID NO: 1869678 - RNA, 19 nt, Artificial Sequence
  Description of Artificial Sequence: Synthetic oligonucleotide
  Antisense strand to SEQ ID NO: 1869677
auggaagagacaauucucg

SEQ ID NO: 1869679 - RNA, 19 nt, Artificial Sequence
  Description of Artificial Sequence: Synthetic oligonucleotide
  Sense strand starting at position 2243 of SEQ ID NO: 1564299
ggauaacuccuccaucagu

SEQ ID NO: 1869680 - RNA, 19 nt, Artificial Sequence
  Description of Artificial Sequence: Synthetic oligonucleotide
  Antisense strand to SEQ ID NO: 1869679
acugauggaggaguuaucc

SEQ ID NO: 1869681 - RNA, 19 nt, Artificial Sequence
  Description of Artificial Sequence: Synthetic oligonucleotide
  Sense strand starting at position 2287 of SEQ ID NO: 1564299
ucugcaaucugguucuuag

SEQ ID NO: 1869682 - RNA, 19 nt, Artificial Sequence
  Description of Artificial Sequence: Synthetic oligonucleotide
  Antisense strand to SEQ ID NO: 1869681
cuaagaaccagauugcaga

SEQ ID NO: 1869683 - RNA, 19 nt, Artificial Sequence
  Description of Artificial Sequence: Synthetic oligonucleotide
  Sense strand starting at position 2326 of SEQ ID NO: 1564299
cuuggcagcaguugugaaa

SEQ ID NO: 1869684 - RNA, 19 nt, Artificial Sequence
  Description of Artificial Sequence: Synthetic oligonucleotide
  Antisense strand to SEQ ID NO: 1869683
uuucacaacugcugccaag

SEQ ID NO: 1869685 - RNA, 19 nt, Artificial Sequence
  Description of Artificial Sequence: Synthetic oligonucleotide
  Sense strand starting at position 2366 of SEQ ID NO: 1564299
gaacaagagugagauuucu

SEQ ID NO: 1869686 - RNA, 19 nt, Artificial Sequence
  Description of Artificial Sequence: Synthetic oligonucleotide
  Antisense strand to SEQ ID NO: 1869685
agaaaucucacucuuguuc

SEQ ID NO: 1869687 - RNA, 19 nt, Artificial Sequence
  Description of Artificial Sequence: Synthetic oligonucleotide
  Sense strand starting at position 2569 of SEQ ID NO: 1564299
gccucaaacuccucgaaac

SEQ ID NO: 1869688 - RNA, 19 nt, Artificial Sequence
  Description of Artificial Sequence: Synthetic oligonucleotide
  Antisense strand to SEQ ID NO: 1869687
guuucgaggaguuugaggc

SEQ ID NO: 1869689 - RNA, 19 nt, Artificial Sequence
  Description of Artificial Sequence: Synthetic oligonucleotide
  Sense strand starting at position 2579 of SEQ ID NO: 1564299
ccucgaaacgagugauccu

SEQ ID NO: 1869690 - RNA, 19 nt, Artificial Sequence
  Description of Artificial Sequence: Synthetic oligonucleotide
  Antisense strand to SEQ ID NO: 1869689
aggaucacucguuucgagg

SEQ ID NO: 1869691 - RNA, 19 nt, Artificial Sequence
  Description of Artificial Sequence: Synthetic oligonucleotide
  Sense strand starting at position 2850 of SEQ ID NO: 1564299
auguacagugcuuauugua

SEQ ID NO: 1869692 - RNA, 19 nt, Artificial Sequence
  Description of Artificial Sequence: Synthetic oligonucleotide
  Antisense strand to SEQ ID NO: 1869691
uacaauaagcacuguacau

SEQ ID NO: 1869693 - RNA, 19 nt, Artificial Sequence
  Description of Artificial Sequence: Synthetic oligonucleotide
  Sense strand starting at position 2866 of SEQ ID NO: 1564299
guacauguggcauauagua

SEQ ID NO: 1869694 - RNA, 19 nt, Artificial Sequence
  Description of Artificial Sequence: Synthetic oligonucleotide
  Antisense strand to SEQ ID NO: 1869693
uacuauaugccacauguac

SEQ ID NO: 1869695 - RNA, 19 nt, Artificial Sequence
  Description of Artificial Sequence: Synthetic oligonucleotide
  Sense strand starting at position 3023 of SEQ ID NO: 1564299
aucaauuaaucgucaggua

SEQ ID NO: 1869696 - RNA, 19 nt, Artificial Sequence
  Description of Artificial Sequence: Synthetic oligonucleotide
  Antisense strand to SEQ ID NO: 1869695
uaccugacgauuaauugau

SEQ ID NO: 1869697 - RNA, 19 nt, Artificial Sequence
  Description of Artificial Sequence: Synthetic oligonucleotide
  Sense strand starting at position 3024 of SEQ ID NO: 1564299
ucaauuaaucgucagguac

SEQ ID NO: 1869698 - RNA, 19 nt, Artificial Sequence
  Description of Artificial Sequence: Synthetic oligonucleotide
  Antisense strand to SEQ ID NO: 1869697
guaccugacgauuaauuga

SEQ ID NO: 1869699 - RNA, 19 nt, Artificial Sequence
  Description of Artificial Sequence: Synthetic oligonucleotide
  Sense strand starting at position 3078 of SEQ ID NO: 1564299
ggaauaauagcauaugcuc

SEQ ID NO: 1869700 - RNA, 19 nt, Artificial Sequence
  Description of Artificial Sequence: Synthetic oligonucleotide
  Antisense strand to SEQ ID NO: 1869699
gagcauaugcuauuauucc

SEQ ID NO: 1869701 - RNA, 19 nt, Artificial Sequence
  Description of Artificial Sequence: Synthetic oligonucleotide
  Sense strand starting at position 3084 of SEQ ID NO: 1564299
auagcauaugcucauagaa

SEQ ID NO: 1869702 - RNA, 19 nt, Artificial Sequence
  Description of Artificial Sequence: Synthetic oligonucleotide
  Antisense strand to SEQ ID NO: 1869701
uucuaugagcauaugcuau

SEQ ID NO: 1869703 - RNA, 19 nt, Artificial Sequence
  Description of Artificial Sequence: Synthetic oligonucleotide
  Sense strand starting at position 3182 of SEQ ID NO: 1564299
aguugaugagcauauggua

SEQ ID NO: 1869704 - RNA, 19 nt, Artificial Sequence
  Description of Artificial Sequence: Synthetic oligonucleotide
  Antisense strand to SEQ ID NO: 1869703
uaccauaugcucaucaacu

SEQ ID NO: 1869705 - RNA, 19 nt, Artificial Sequence
  Description of Artificial Sequence: Synthetic oligonucleotide
  Sense strand starting at position 3211 of SEQ ID NO: 1564299
ucacauguacugugagacu

SEQ ID NO: 1869706 - RNA, 19 nt, Artificial Sequence
  Description of Artificial Sequence: Synthetic oligonucleotide
  Antisense strand to SEQ ID NO: 1869705
agucucacaguacauguga

SEQ ID NO: 1869707 - RNA, 19 nt, Artificial Sequence
  Description of Artificial Sequence: Synthetic oligonucleotide
  Sense strand starting at position 3276 of SEQ ID NO: 1564299
uuuagaagauaugugcuuu

SEQ ID NO: 1869708 - RNA, 19 nt, Artificial Sequence
  Description of Artificial Sequence: Synthetic oligonucleotide
  Antisense strand to SEQ ID NO: 1869707
aaagcacauaucuucuaaa

SEQ ID NO: 1869709 - RNA, 19 nt, Artificial Sequence
  Description of Artificial Sequence: Synthetic oligonucleotide
  Sense strand starting at position 3346 of SEQ ID NO: 1564299
gccaaauauggucauugua

SEQ ID NO: 1869710 - RNA, 19 nt, Artificial Sequence
  Description of Artificial Sequence: Synthetic oligonucleotide
  Antisense strand to SEQ ID NO: 1869709
uacaaugaccauauuuggc

SEQ ID NO: 1869711 - RNA, 19 nt, Artificial Sequence
  Description of Artificial Sequence: Synthetic oligonucleotide
  Sense strand starting at position 3349 of SEQ ID NO: 1564299
aaauauggucauuguagua

SEQ ID NO: 1869712 - RNA, 19 nt, Artificial Sequence
  Description of Artificial Sequence: Synthetic oligonucleotide
  Antisense strand to SEQ ID NO: 1869711
uacuacaaugaccauauuu

SEQ ID NO: 1869713 - RNA, 19 nt, Artificial Sequence
  Description of Artificial Sequence: Synthetic oligonucleotide
  Sense strand starting at position 3641 of SEQ ID NO: 1564299
augauaacaugauaaguga

SEQ ID NO: 1869714 - RNA, 19 nt, Artificial Sequence
  Description of Artificial Sequence: Synthetic oligonucleotide
  Antisense strand to SEQ ID NO: 1869713
ucacuuaucauguuaucau

SEQ ID NO: 1869715 - RNA, 19 nt, Artificial Sequence
  Description of Artificial Sequence: Synthetic oligonucleotide
  Sense strand starting at position 3687 of SEQ ID NO: 1564299
cagguuauguuacugagag

SEQ ID NO: 1869716 - RNA, 19 nt, Artificial Sequence
  Description of Artificial Sequence: Synthetic oligonucleotide
  Antisense strand to SEQ ID NO: 1869715
cucucaguaacauaaccug

SEQ ID NO: 1869717 - RNA, 19 nt, Artificial Sequence
  Description of Artificial Sequence: Synthetic oligonucleotide
  Sense strand starting at position 3689 of SEQ ID NO: 1564299
gguuauguuacugagagau

SEQ ID NO: 1869718 - RNA, 19 nt, Artificial Sequence
  Description of Artificial Sequence: Synthetic oligonucleotide
  Antisense strand to SEQ ID NO: 1869717
aucucucaguaacauaacc

SEQ ID NO: 1869719 - RNA, 19 nt, Artificial Sequence
  Description of Artificial Sequence: Synthetic oligonucleotide
  Sense strand starting at position 3717 of SEQ ID NO: 1564299
gaaugacugaugugagucu

SEQ ID NO: 1869720 - RNA, 19 nt, Artificial Sequence
  Description of Artificial Sequence: Synthetic oligonucleotide
  Antisense strand to SEQ ID NO: 1869719
agacucacaucagucauuc

SEQ ID NO: 1869721 - RNA, 19 nt, Artificial Sequence
  Description of Artificial Sequence: Synthetic oligonucleotide
  Sense strand starting at position 3726 of SEQ ID NO: 1564299
augugagucuauuuggcua

SEQ ID NO: 1869722 - RNA, 19 nt, Artificial Sequence
  Description of Artificial Sequence: Synthetic oligonucleotide
  Antisense strand to SEQ ID NO: 1869721
uagccaaauagacucacau

SEQ ID NO: 1869723 - RNA, 19 nt, Artificial Sequence
  Description of Artificial Sequence: Synthetic oligonucleotide
  Sense strand starting at position 3781 of SEQ ID NO: 1564299
ugugauuuguugccacaaa

SEQ ID NO: 1869724 - RNA, 19 nt, Artificial Sequence
  Description of Artificial Sequence: Synthetic oligonucleotide
  Antisense strand to SEQ ID NO: 1869723
uuuguggcaacaaaucaca

SEQ ID NO: 1869725 - RNA, 19 nt, Artificial Sequence
  Description of Artificial Sequence: Synthetic oligonucleotide
  Sense strand starting at position 3808 of SEQ ID NO: 1564299
cacugagcacuuggacuua

SEQ ID NO: 1869726 - RNA, 19 nt, Artificial Sequence
  Description of Artificial Sequence: Synthetic oligonucleotide
  Antisense strand to SEQ ID NO: 1869725
uaaguccaagugcucagug

SEQ ID NO: 1869727 - RNA, 19 nt, Artificial Sequence
  Description of Artificial Sequence: Synthetic oligonucleotide
  Sense strand starting at position 3947 of SEQ ID NO: 1564299
uccugaacaucauaggaua

SEQ ID NO: 1869728 - RNA, 19 nt, Artificial Sequence
  Description of Artificial Sequence: Synthetic oligonucleotide
  Antisense strand to SEQ ID NO: 1869727
uauccuaugauguucagga

SEQ ID NO: 1869729 - RNA, 19 nt, Artificial Sequence
  Description of Artificial Sequence: Synthetic oligonucleotide
  Sense strand starting at position 3964 of SEQ ID NO: 1564299
uauacuugagaauguguau

SEQ ID NO: 1869730 - RNA, 19 nt, Artificial Sequence
  Description of Artificial Sequence: Synthetic oligonucleotide
  Antisense strand to SEQ ID NO: 1869729
auacacauucucaaguaua

SEQ ID NO: 1869731 - RNA, 19 nt, Artificial Sequence
  Description of Artificial Sequence: Synthetic oligonucleotide
  Sense strand starting at position 5 of SEQ ID NO: 1564300
ggucauuccuccuuuggag

SEQ ID NO: 1869732 - RNA, 19 nt, Artificial Sequence
  Description of Artificial Sequence: Synthetic oligonucleotide
  Antisense strand to SEQ ID NO: 1869731
cuccaaaggaggaaugacc

SEQ ID NO: 1869733 - RNA, 19 nt, Artificial Sequence
  Description of Artificial Sequence: Synthetic oligonucleotide
  Sense strand starting at position 77 of SEQ ID NO: 1564300
ugggcaaacgcuuggugau

SEQ ID NO: 1869734 - RNA, 19 nt, Artificial Sequence
  Description of Artificial Sequence: Synthetic oligonucleotide
  Antisense strand to SEQ ID NO: 1869733
aucaccaagcguuugccca

SEQ ID NO: 1869735 - RNA, 19 nt, Artificial Sequence
  Description of Artificial Sequence: Synthetic oligonucleotide
  Sense strand starting at position 284 of SEQ ID NO: 1564300
gguagaugcgagaguguuc

SEQ ID NO: 1869736 - RNA, 19 nt, Artificial Sequence
  Description of Artificial Sequence: Synthetic oligonucleotide
  Antisense strand to SEQ ID NO: 1869735
gaacacucucgcaucuacc

SEQ ID NO: 1869737 - RNA, 19 nt, Artificial Sequence
  Description of Artificial Sequence: Synthetic oligonucleotide
  Sense strand starting at position 289 of SEQ ID NO: 1564300
augcgagaguguucagucu

SEQ ID NO: 1869738 - RNA, 19 nt, Artificial Sequence
  Description of Artificial Sequence: Synthetic oligonucleotide
  Antisense strand to SEQ ID NO: 1869737
agacugaacacucucgcau

SEQ ID NO: 1869739 - RNA, 19 nt, Artificial Sequence
  Description of Artificial Sequence: Synthetic oligonucleotide
  Sense strand starting at position 367 of SEQ ID NO: 1564300
gugcauaccuguccucaua

SEQ ID NO: 1869740 - RNA, 19 nt, Artificial Sequence
  Description of Artificial Sequence: Synthetic oligonucleotide
  Antisense strand to SEQ ID NO: 1869739
uaugaggacagguaugcac

SEQ ID NO: 1869741 - RNA, 19 nt, Artificial Sequence
  Description of Artificial Sequence: Synthetic oligonucleotide
  Sense strand starting at position 369 of SEQ ID NO: 1564300
gcauaccuguccucauaga

SEQ ID NO: 1869742 - RNA, 19 nt, Artificial Sequence
  Description of Artificial Sequence: Synthetic oligonucleotide
  Antisense strand to SEQ ID NO: 1869741
ucuaugaggacagguaugc

SEQ ID NO: 1869743 - RNA, 19 nt, Artificial Sequence
  Description of Artificial Sequence: Synthetic oligonucleotide
  Sense strand starting at position 528 of SEQ ID NO: 1564300
ccgagaaccuuugaggugu

SEQ ID NO: 1869744 - RNA, 19 nt, Artificial Sequence
  Description of Artificial Sequence: Synthetic oligonucleotide
  Antisense strand to SEQ ID NO: 1869743
acaccucaaagguucucgg

SEQ ID NO: 1869745 - RNA, 19 nt, Artificial Sequence
  Description of Artificial Sequence: Synthetic oligonucleotide
  Sense strand starting at position 567 of SEQ ID NO: 1564300
agagucagaucacuucuca

SEQ ID NO: 1869746 - RNA, 19 nt, Artificial Sequence
  Description of Artificial Sequence: Synthetic oligonucleotide
  Antisense strand to SEQ ID NO: 1869745
ugagaagugaucugacucu

SEQ ID NO: 1869747 - RNA, 19 nt, Artificial Sequence
  Description of Artificial Sequence: Synthetic oligonucleotide
  Sense strand starting at position 685 of SEQ ID NO: 1564300
aaagacagggcuugcuaua

SEQ ID NO: 1869748 - RNA, 19 nt, Artificial Sequence
  Description of Artificial Sequence: Synthetic oligonucleotide
  Antisense strand to SEQ ID NO: 1869747
uauagcaagcccugucuuu

SEQ ID NO: 1869749 - RNA, 19 nt, Artificial Sequence
  Description of Artificial Sequence: Synthetic oligonucleotide
  Sense strand starting at position 690 of SEQ ID NO: 1564300
cagggcuugcuauauguuu

SEQ ID NO: 1869750 - RNA, 19 nt, Artificial Sequence
  Description of Artificial Sequence: Synthetic oligonucleotide
  Antisense strand to SEQ ID NO: 1869749
aaacauauagcaagcccug

SEQ ID NO: 1869751 - RNA, 19 nt, Artificial Sequence
  Description of Artificial Sequence: Synthetic oligonucleotide
  Sense strand starting at position 695 of SEQ ID NO: 1564300
cuugcuauauguuuacuga

SEQ ID NO: 1869752 - RNA, 19 nt, Artificial Sequence
  Description of Artificial Sequence: Synthetic oligonucleotide
  Antisense strand to SEQ ID NO: 1869751
ucaguaaacauauagcaag

SEQ ID NO: 1869753 - RNA, 19 nt, Artificial Sequence
  Description of Artificial Sequence: Synthetic oligonucleotide
  Sense strand starting at position 698 of SEQ ID NO: 1564300
gcuauauguuuacugaccu

SEQ ID NO: 1869754 - RNA, 19 nt, Artificial Sequence
  Description of Artificial Sequence: Synthetic oligonucleotide
  Antisense strand to SEQ ID NO: 1869753
aggucaguaaacauauagc

SEQ ID NO: 1869755 - RNA, 19 nt, Artificial Sequence
  Description of Artificial Sequence: Synthetic oligonucleotide
  Sense strand starting at position 710 of SEQ ID NO: 1564300
cugaccuguuuacaaaguu

SEQ ID NO: 1869756 - RNA, 19 nt, Artificial Sequence
  Description of Artificial Sequence: Synthetic oligonucleotide
  Antisense strand to SEQ ID NO: 1869755
aacuuuguaaacaggucag

SEQ ID NO: 1869757 - RNA, 19 nt, Artificial Sequence
  Description of Artificial Sequence: Synthetic oligonucleotide
  Sense strand starting at position 720 of SEQ ID NO: 1564300
uacaaaguuuguguguuua

SEQ ID NO: 1869758 - RNA, 19 nt, Artificial Sequence
  Description of Artificial Sequence: Synthetic oligonucleotide
  Antisense strand to SEQ ID NO: 1869757
uaaacacacaaacuuugua

SEQ ID NO: 1869759 - RNA, 19 nt, Artificial Sequence
  Description of Artificial Sequence: Synthetic oligonucleotide
  Sense strand starting at position 722 of SEQ ID NO: 1564300
caaaguuuguguguuuacu

SEQ ID NO: 1869760 - RNA, 19 nt, Artificial Sequence
  Description of Artificial Sequence: Synthetic oligonucleotide
  Antisense strand to SEQ ID NO: 1869759
aguaaacacacaaacuuug

SEQ ID NO: 1869761 - RNA, 19 nt, Artificial Sequence
  Description of Artificial Sequence: Synthetic oligonucleotide
  Sense strand starting at position 731 of SEQ ID NO: 1564300
uguguuuacugguuuacuu

SEQ ID NO: 1869762 - RNA, 19 nt, Artificial Sequence
  Description of Artificial Sequence: Synthetic oligonucleotide
  Antisense strand to SEQ ID NO: 1869761
aaguaaaccaguaaacaca

SEQ ID NO: 1869763 - RNA, 19 nt, Artificial Sequence
  Description of Artificial Sequence: Synthetic oligonucleotide
  Sense strand starting at position 738 of SEQ ID NO: 1564300
acugguuuacuuggcauau

SEQ ID NO: 1869764 - RNA, 19 nt, Artificial Sequence
  Description of Artificial Sequence: Synthetic oligonucleotide
  Antisense strand to SEQ ID NO: 1869763
auaugccaaguaaaccagu

SEQ ID NO: 1869765 - RNA, 19 nt, Artificial Sequence
  Description of Artificial Sequence: Synthetic oligonucleotide
  Sense strand starting at position 739 of SEQ ID NO: 1564300
cugguuuacuuggcauauu

SEQ ID NO: 1869766 - RNA, 19 nt, Artificial Sequence
  Description of Artificial Sequence: Synthetic oligonucleotide
  Antisense strand to SEQ ID NO: 1869765
aauaugccaaguaaaccag

SEQ ID NO: 1869767 - RNA, 19 nt, Artificial Sequence
  Description of Artificial Sequence: Synthetic oligonucleotide
  Sense strand starting at position 740 of SEQ ID NO: 1564300
ugguuuacuuggcauauua

SEQ ID NO: 1869768 - RNA, 19 nt, Artificial Sequence
  Description of Artificial Sequence: Synthetic oligonucleotide
  Antisense strand to SEQ ID NO: 1869767
uaauaugccaaguaaacca

SEQ ID NO: 1869769 - RNA, 19 nt, Artificial Sequence
  Description of Artificial Sequence: Synthetic oligonucleotide
  Sense strand starting at position 742 of SEQ ID NO: 1564300
guuuacuuggcauauuauc

SEQ ID NO: 1869770 - RNA, 19 nt, Artificial Sequence
  Description of Artificial Sequence: Synthetic oligonucleotide
  Antisense strand to SEQ ID NO: 1869769
gauaauaugccaaguaaac

SEQ ID NO: 1869771 - RNA, 19 nt, Artificial Sequence
  Description of Artificial Sequence: Synthetic oligonucleotide
  Sense strand starting at position 810 of SEQ ID NO: 1564300
ugaugaaagucaguggagu

SEQ ID NO: 1869772 - RNA, 19 nt, Artificial Sequence
  Description of Artificial Sequence: Synthetic oligonucleotide
  Antisense strand to SEQ ID NO: 1869771
acuccacugacuuucauca

SEQ ID NO: 1869773 - RNA, 19 nt, Artificial Sequence
  Description of Artificial Sequence: Synthetic oligonucleotide
  Sense strand starting at position 2485 of SEQ ID NO: 1564300
uuguguauacaaggauaau

SEQ ID NO: 1869774 - RNA, 19 nt, Artificial Sequence
  Description of Artificial Sequence: Synthetic oligonucleotide
  Antisense strand to SEQ ID NO: 1869773
auuauccuuguauacacaa

SEQ ID NO: 1869775 - RNA, 19 nt, Artificial Sequence
  Description of Artificial Sequence: Synthetic oligonucleotide
  Sense strand starting at position 2525 of SEQ ID NO: 1564300
gggugaguuugcuaaucau

SEQ ID NO: 1869776 - RNA, 19 nt, Artificial Sequence
  Description of Artificial Sequence: Synthetic oligonucleotide
  Antisense strand to SEQ ID NO: 1869775
augauuagcaaacucaccc

SEQ ID NO: 1869777 - RNA, 19 nt, Artificial Sequence
  Description of Artificial Sequence: Synthetic oligonucleotide
  Sense strand starting at position 2936 of SEQ ID NO: 1564300
gcacaaucuuguccaagca

SEQ ID NO: 1869778 - RNA, 19 nt, Artificial Sequence
  Description of Artificial Sequence: Synthetic oligonucleotide
  Antisense strand to SEQ ID NO: 1869777
ugcuuggacaagauugugc

SEQ ID NO: 1869779 - RNA, 19 nt, Artificial Sequence
  Description of Artificial Sequence: Synthetic oligonucleotide
  Sense strand starting at position 2991 of SEQ ID NO: 1564300
caaagacgccuugaaaguu

SEQ ID NO: 1869780 - RNA, 19 nt, Artificial Sequence
  Description of Artificial Sequence: Synthetic oligonucleotide
  Antisense strand to SEQ ID NO: 1869779
aacuuucaaggcgucuuug

SEQ ID NO: 1869781 - RNA, 19 nt, Artificial Sequence
  Description of Artificial Sequence: Synthetic oligonucleotide
  Sense strand starting at position 3048 of SEQ ID NO: 1564300
ugaguaaggucgguugugu

SEQ ID NO: 1869782 - RNA, 19 nt, Artificial Sequence
  Description of Artificial Sequence: Synthetic oligonucleotide
  Antisense strand to SEQ ID NO: 1869781
acacaaccgaccuuacuca

SEQ ID NO: 1869783 - RNA, 19 nt, Artificial Sequence
  Description of Artificial Sequence: Synthetic oligonucleotide
  Sense strand starting at position 3112 of SEQ ID NO: 1564300
aggcuugaguuucuuucuu

SEQ ID NO: 1869784 - RNA, 19 nt, Artificial Sequence
  Description of Artificial Sequence: Synthetic oligonucleotide
  Antisense strand to SEQ ID NO: 1869783
aagaaagaaacucaagccu

SEQ ID NO: 1869785 - RNA, 19 nt, Artificial Sequence
  Description of Artificial Sequence: Synthetic oligonucleotide
  Sense strand starting at position 3436 of SEQ ID NO: 1564300
aggcuugaguuucuaaaga

SEQ ID NO: 1869786 - RNA, 19 nt, Artificial Sequence
  Description of Artificial Sequence: Synthetic oligonucleotide
  Antisense strand to SEQ ID NO: 1869785
ucuuuagaaacucaagccu

SEQ ID NO: 1869787 - RNA, 19 nt, Artificial Sequence
  Description of Artificial Sequence: Synthetic oligonucleotide
  Sense strand starting at position 3561 of SEQ ID NO: 1564300
ucuuaacguuaucagggua

SEQ ID NO: 1869788 - RNA, 19 nt, Artificial Sequence
  Description of Artificial Sequence: Synthetic oligonucleotide
  Antisense strand to SEQ ID NO: 1869787
uacccugauaacguuaaga

SEQ ID NO: 1869789 - RNA, 19 nt, Artificial Sequence
  Description of Artificial Sequence: Synthetic oligonucleotide
  Sense strand starting at position 3564 of SEQ ID NO: 1564300
uaacguuaucaggguaaac

SEQ ID NO: 1869790 - RNA, 19 nt, Artificial Sequence
  Description of Artificial Sequence: Synthetic oligonucleotide
  Antisense strand to SEQ ID NO: 1869789
guuuacccugauaacguua

SEQ ID NO: 1869791 - RNA, 19 nt, Artificial Sequence
  Description of Artificial Sequence: Synthetic oligonucleotide
  Sense strand starting at position 3566 of SEQ ID NO: 1564300
acguuaucaggguaaacuu

SEQ ID NO: 1869792 - RNA, 19 nt, Artificial Sequence
  Description of Artificial Sequence: Synthetic oligonucleotide
  Antisense strand to SEQ ID NO: 1869791
aaguuuacccugauaacgu

SEQ ID NO: 1869793 - RNA, 19 nt, Artificial Sequence
  Description of Artificial Sequence: Synthetic oligonucleotide
  Sense strand starting at position 3575 of SEQ ID NO: 1564300
ggguaaacuuccuguugga

SEQ ID NO: 1869794 - RNA, 19 nt, Artificial Sequence
  Description of Artificial Sequence: Synthetic oligonucleotide
  Antisense strand to SEQ ID NO: 1869793
uccaacaggaaguuuaccc

SEQ ID NO: 1869795 - RNA, 19 nt, Artificial Sequence
  Description of Artificial Sequence: Synthetic oligonucleotide
  Sense strand starting at position 3585 of SEQ ID NO: 1564300
ccuguuggaucuuaacauc

SEQ ID NO: 1869796 - RNA, 19 nt, Artificial Sequence
  Description of Artificial Sequence: Synthetic oligonucleotide
  Antisense strand to SEQ ID NO: 1869795
gauguuaagauccaacagg

SEQ ID NO: 1869797 - RNA, 19 nt, Artificial Sequence
  Description of Artificial Sequence: Synthetic oligonucleotide
  Sense strand starting at position 3588 of SEQ ID NO: 1564300
guuggaucuuaacaucaac

SEQ ID NO: 1869798 - RNA, 19 nt, Artificial Sequence
  Description of Artificial Sequence: Synthetic oligonucleotide
  Antisense strand to SEQ ID NO: 1869797
guugauguuaagauccaac

SEQ ID NO: 1869799 - RNA, 19 nt, Artificial Sequence
  Description of Artificial Sequence: Synthetic oligonucleotide
  Sense strand starting at position 3684 of SEQ ID NO: 1564300
accgaaagaucacacugua

SEQ ID NO: 1869800 - RNA, 19 nt, Artificial Sequence
  Description of Artificial Sequence: Synthetic oligonucleotide
  Antisense strand to SEQ ID NO: 1869799
uacagugugaucuuucggu

SEQ ID NO: 1869801 - RNA, 19 nt, Artificial Sequence
  Description of Artificial Sequence: Synthetic oligonucleotide
  Sense strand starting at position 3687 of SEQ ID NO: 1564300
gaaagaucacacuguauug

SEQ ID NO: 1869802 - RNA, 19 nt, Artificial Sequence
  Description of Artificial Sequence: Synthetic oligonucleotide
  Antisense strand to SEQ ID NO: 1869801
caauacagugugaucuuuc

SEQ ID NO: 1869803 - RNA, 19 nt, Artificial Sequence
  Description of Artificial Sequence: Synthetic oligonucleotide
  Sense strand starting at position 3720 of SEQ ID NO: 1564300
cucccuugucccuguaaca

SEQ ID NO: 1869804 - RNA, 19 nt, Artificial Sequence
  Description of Artificial Sequence: Synthetic oligonucleotide
  Antisense strand to SEQ ID NO: 1869803
uguuacagggacaagggag

SEQ ID NO: 1869805 - RNA, 19 nt, Artificial Sequence
  Description of Artificial Sequence: Synthetic oligonucleotide
  Sense strand starting at position 3731 of SEQ ID NO: 1564300
cuguaacaagcuuaucagu

SEQ ID NO: 1869806 - RNA, 19 nt, Artificial Sequence
  Description of Artificial Sequence: Synthetic oligonucleotide
  Antisense strand to SEQ ID NO: 1869805
acugauaagcuuguuacag

SEQ ID NO: 1869807 - RNA, 19 nt, Artificial Sequence
  Description of Artificial Sequence: Synthetic oligonucleotide
  Sense strand starting at position 3733 of SEQ ID NO: 1564300
guaacaagcuuaucagugu

SEQ ID NO: 1869808 - RNA, 19 nt, Artificial Sequence
  Description of Artificial Sequence: Synthetic oligonucleotide
  Antisense strand to SEQ ID NO: 1869807
acacugauaagcuuguuac

SEQ ID NO: 1869809 - RNA, 19 nt, Artificial Sequence
  Description of Artificial Sequence: Synthetic oligonucleotide
  Sense strand starting at position 3862 of SEQ ID NO: 1564300
cuggguacuguucaaggua

SEQ ID NO: 1869810 - RNA, 19 nt, Artificial Sequence
  Description of Artificial Sequence: Synthetic oligonucleotide
  Antisense strand to SEQ ID NO: 1869809
uaccuugaacaguacccag

SEQ ID NO: 1869811 - RNA, 19 nt, Artificial Sequence
  Description of Artificial Sequence: Synthetic oligonucleotide
  Sense strand starting at position 23 of SEQ ID NO: 1564301
gugcauaccuguccucaua

SEQ ID NO: 1869812 - RNA, 19 nt, Artificial Sequence
  Description of Artificial Sequence: Synthetic oligonucleotide
  Antisense strand to SEQ ID NO: 1869811
uaugaggacagguaugcac

SEQ ID NO: 1869813 - RNA, 19 nt, Artificial Sequence
  Description of Artificial Sequence: Synthetic oligonucleotide
  Sense strand starting at position 25 of SEQ ID NO: 1564301
gcauaccuguccucauaga

SEQ ID NO: 1869814 - RNA, 19 nt, Artificial Sequence
  Description of Artificial Sequence: Synthetic oligonucleotide
  Antisense strand to SEQ ID NO: 1869813
ucuaugaggacagguaugc

SEQ ID NO: 1869815 - RNA, 19 nt, Artificial Sequence
  Description of Artificial Sequence: Synthetic oligonucleotide
  Sense strand starting at position 184 of SEQ ID NO: 1564301
ccgagaaccuuugaggugu

SEQ ID NO: 1869816 - RNA, 19 nt, Artificial Sequence
  Description of Artificial Sequence: Synthetic oligonucleotide
  Antisense strand to SEQ ID NO: 1869815
acaccucaaagguucucgg

SEQ ID NO: 1869817 - RNA, 19 nt, Artificial Sequence
  Description of Artificial Sequence: Synthetic oligonucleotide
  Sense strand starting at position 223 of SEQ ID NO: 1564301
agagucagaucacuucuca

SEQ ID NO: 1869818 - RNA, 19 nt, Artificial Sequence
  Description of Artificial Sequence: Synthetic oligonucleotide
  Antisense strand to SEQ ID NO: 1869817
ugagaagugaucugacucu

SEQ ID NO: 1869819 - RNA, 19 nt, Artificial Sequence
  Description of Artificial Sequence: Synthetic oligonucleotide
  Sense strand starting at position 341 of SEQ ID NO: 1564301
aaagacagggcuugcuaua

SEQ ID NO: 1869820 - RNA, 19 nt, Artificial Sequence
  Description of Artificial Sequence: Synthetic oligonucleotide
  Antisense strand to SEQ ID NO: 1869819
uauagcaagcccugucuuu

SEQ ID NO: 1869821 - RNA, 19 nt, Artificial Sequence
  Description of Artificial Sequence: Synthetic oligonucleotide
  Sense strand starting at position 346 of SEQ ID NO: 1564301
cagggcuugcuauauguuu

SEQ ID NO: 1869822 - RNA, 19 nt, Artificial Sequence
  Description of Artificial Sequence: Synthetic oligonucleotide
  Antisense strand to SEQ ID NO: 1869821
aaacauauagcaagcccug

SEQ ID NO: 1869823 - RNA, 19 nt, Artificial Sequence
  Description of Artificial Sequence: Synthetic oligonucleotide
  Sense strand starting at position 351 of SEQ ID NO: 1564301
cuugcuauauguuuacuga

SEQ ID NO: 1869824 - RNA, 19 nt, Artificial Sequence
  Description of Artificial Sequence: Synthetic oligonucleotide
  Antisense strand to SEQ ID NO: 1869823
ucaguaaacauauagcaag

SEQ ID NO: 1869825 - RNA, 19 nt, Artificial Sequence
  Description of Artificial Sequence: Synthetic oligonucleotide
  Sense strand starting at position 354 of SEQ ID NO: 1564301
gcuauauguuuacugaccu

SEQ ID NO: 1869826 - RNA, 19 nt, Artificial Sequence
  Description of Artificial Sequence: Synthetic oligonucleotide
  Antisense strand to SEQ ID NO: 1869825
aggucaguaaacauauagc

SEQ ID NO: 1869827 - RNA, 19 nt, Artificial Sequence
  Description of Artificial Sequence: Synthetic oligonucleotide
  Sense strand starting at position 366 of SEQ ID NO: 1564301
cugaccuguuuacaaaguu

SEQ ID NO: 1869828 - RNA, 19 nt, Artificial Sequence
  Description of Artificial Sequence: Synthetic oligonucleotide
  Antisense strand to SEQ ID NO: 1869827
aacuuuguaaacaggucag

SEQ ID NO: 1869829 - RNA, 19 nt, Artificial Sequence
  Description of Artificial Sequence: Synthetic oligonucleotide
  Sense strand starting at position 376 of SEQ ID NO: 1564301
uacaaaguuuguguguuua

SEQ ID NO: 1869830 - RNA, 19 nt, Artificial Sequence
  Description of Artificial Sequence: Synthetic oligonucleotide
  Antisense strand to SEQ ID NO: 1869829
uaaacacacaaacuuugua

SEQ ID NO: 1869831 - RNA, 19 nt, Artificial Sequence
  Description of Artificial Sequence: Synthetic oligonucleotide
  Sense strand starting at position 378 of SEQ ID NO: 1564301
caaaguuuguguguuuacu

SEQ ID NO: 1869832 - RNA, 19 nt, Artificial Sequence
  Description of Artificial Sequence: Synthetic oligonucleotide
  Antisense strand to SEQ ID NO: 1869831
aguaaacacacaaacuuug

SEQ ID NO: 1869833 - RNA, 19 nt, Artificial Sequence
  Description of Artificial Sequence: Synthetic oligonucleotide
  Sense strand starting at position 387 of SEQ ID NO: 1564301
uguguuuacugguuuacuu

SEQ ID NO: 1869834 - RNA, 19 nt, Artificial Sequence
  Description of Artificial Sequence: Synthetic oligonucleotide
  Antisense strand to SEQ ID NO: 1869833
aaguaaaccaguaaacaca

SEQ ID NO: 1869835 - RNA, 19 nt, Artificial Sequence
  Description of Artificial Sequence: Synthetic oligonucleotide
  Sense strand starting at position 394 of SEQ ID NO: 1564301
acugguuuacuuggcauau

SEQ ID NO: 1869836 - RNA, 19 nt, Artificial Sequence
  Description of Artificial Sequence: Synthetic oligonucleotide
  Antisense strand to SEQ ID NO: 1869835
auaugccaaguaaaccagu

SEQ ID NO: 1869837 - RNA, 19 nt, Artificial Sequence
  Description of Artificial Sequence: Synthetic oligonucleotide
  Sense strand starting at position 395 of SEQ ID NO: 1564301
cugguuuacuuggcauauu

SEQ ID NO: 1869838 - RNA, 19 nt, Artificial Sequence
  Description of Artificial Sequence: Synthetic oligonucleotide
  Antisense strand to SEQ ID NO: 1869837
aauaugccaaguaaaccag

SEQ ID NO: 1869839 - RNA, 19 nt, Artificial Sequence
  Description of Artificial Sequence: Synthetic oligonucleotide
  Sense strand starting at position 396 of SEQ ID NO: 1564301
ugguuuacuuggcauauua

SEQ ID NO: 1869840 - RNA, 19 nt, Artificial Sequence
  Description of Artificial Sequence: Synthetic oligonucleotide
  Antisense strand to SEQ ID NO: 1869839
uaauaugccaaguaaacca

SEQ ID NO: 1869841 - RNA, 19 nt, Artificial Sequence
  Description of Artificial Sequence: Synthetic oligonucleotide
  Sense strand starting at position 398 of SEQ ID NO: 1564301
guuuacuuggcauauuauc

SEQ ID NO: 1869842 - RNA, 19 nt, Artificial Sequence
  Description of Artificial Sequence: Synthetic oligonucleotide
  Antisense strand to SEQ ID NO: 1869841
gauaauaugccaaguaaac

SEQ ID NO: 1869843 - RNA, 19 nt, Artificial Sequence
  Description of Artificial Sequence: Synthetic oligonucleotide
  Sense strand starting at position 466 of SEQ ID NO: 1564301
ugaugaaagucaguggagu

SEQ ID NO: 1869844 - RNA, 19 nt, Artificial Sequence
  Description of Artificial Sequence: Synthetic oligonucleotide
  Antisense strand to SEQ ID NO: 1869843
acuccacugacuuucauca

SEQ ID NO: 1869845 - RNA, 19 nt, Artificial Sequence
  Description of Artificial Sequence: Synthetic oligonucleotide
  Sense strand starting at position 2141 of SEQ ID NO: 1564301
uuguguauacaaggauaau

SEQ ID NO: 1869846 - RNA, 19 nt, Artificial Sequence
  Description of Artificial Sequence: Synthetic oligonucleotide
  Antisense strand to SEQ ID NO: 1869845
auuauccuuguauacacaa

SEQ ID NO: 1869847 - RNA, 19 nt, Artificial Sequence
  Description of Artificial Sequence: Synthetic oligonucleotide
  Sense strand starting at position 2181 of SEQ ID NO: 1564301
gggugaguuugcuaaucau

SEQ ID NO: 1869848 - RNA, 19 nt, Artificial Sequence
  Description of Artificial Sequence: Synthetic oligonucleotide
  Antisense strand to SEQ ID NO: 1869847
augauuagcaaacucaccc

SEQ ID NO: 1869849 - RNA, 19 nt, Artificial Sequence
  Description of Artificial Sequence: Synthetic oligonucleotide
  Sense strand starting at position 2589 of SEQ ID NO: 1564301
gcagcacaaucuuguccaa

SEQ ID NO: 1869850 - RNA, 19 nt, Artificial Sequence
  Description of Artificial Sequence: Synthetic oligonucleotide
  Antisense strand to SEQ ID NO: 1869849
uuggacaagauugugcugc

SEQ ID NO: 1869851 - RNA, 19 nt, Artificial Sequence
  Description of Artificial Sequence: Synthetic oligonucleotide
  Sense strand starting at position 2592 of SEQ ID NO: 1564301
gcacaaucuuguccaagca

SEQ ID NO: 1869852 - RNA, 19 nt, Artificial Sequence
  Description of Artificial Sequence: Synthetic oligonucleotide
  Antisense strand to SEQ ID NO: 1869851
ugcuuggacaagauugugc

SEQ ID NO: 1869853 - RNA, 19 nt, Artificial Sequence
  Description of Artificial Sequence: Synthetic oligonucleotide
  Sense strand starting at position 2647 of SEQ ID NO: 1564301
caaagacgccuugaaaguu

SEQ ID NO: 1869854 - RNA, 19 nt, Artificial Sequence
  Description of Artificial Sequence: Synthetic oligonucleotide
  Antisense strand to SEQ ID NO: 1869853
aacuuucaaggcgucuuug

SEQ ID NO: 1869855 - RNA, 19 nt, Artificial Sequence
  Description of Artificial Sequence: Synthetic oligonucleotide
  Sense strand starting at position 2704 of SEQ ID NO: 1564301
ugaguaaggucgguugugu

SEQ ID NO: 1869856 - RNA, 19 nt, Artificial Sequence
  Description of Artificial Sequence: Synthetic oligonucleotide
  Antisense strand to SEQ ID NO: 1869855
acacaaccgaccuuacuca

SEQ ID NO: 1869857 - RNA, 19 nt, Artificial Sequence
  Description of Artificial Sequence: Synthetic oligonucleotide
  Sense strand starting at position 2723 of SEQ ID NO: 1564301
gugugugacugggaugguu

SEQ ID NO: 1869858 - RNA, 19 nt, Artificial Sequence
  Description of Artificial Sequence: Synthetic oligonucleotide
  Antisense strand to SEQ ID NO: 1869857
aaccaucccagucacacac

SEQ ID NO: 1869859 - RNA, 19 nt, Artificial Sequence
  Description of Artificial Sequence: Synthetic oligonucleotide
  Sense strand starting at position 2768 of SEQ ID NO: 1564301
aggcuugaguuucuuucuu

SEQ ID NO: 1869860 - RNA, 19 nt, Artificial Sequence
  Description of Artificial Sequence: Synthetic oligonucleotide
  Antisense strand to SEQ ID NO: 1869859
aagaaagaaacucaagccu

SEQ ID NO: 1869861 - RNA, 19 nt, Artificial Sequence
  Description of Artificial Sequence: Synthetic oligonucleotide
  Sense strand starting at position 3092 of SEQ ID NO: 1564301
aggcuugaguuucuaaaga

SEQ ID NO: 1869862 - RNA, 19 nt, Artificial Sequence
  Description of Artificial Sequence: Synthetic oligonucleotide
  Antisense strand to SEQ ID NO: 1869861
ucuuuagaaacucaagccu

SEQ ID NO: 1869863 - RNA, 19 nt, Artificial Sequence
  Description of Artificial Sequence: Synthetic oligonucleotide
  Sense strand starting at position 3217 of SEQ ID NO: 1564301
ucuuaacguuaucagggua

SEQ ID NO: 1869864 - RNA, 19 nt, Artificial Sequence
  Description of Artificial Sequence: Synthetic oligonucleotide
  Antisense strand to SEQ ID NO: 1869863
uacccugauaacguuaaga

SEQ ID NO: 1869865 - RNA, 19 nt, Artificial Sequence
  Description of Artificial Sequence: Synthetic oligonucleotide
  Sense strand starting at position 3220 of SEQ ID NO: 1564301
uaacguuaucaggguaaac

SEQ ID NO: 1869866 - RNA, 19 nt, Artificial Sequence
  Description of Artificial Sequence: Synthetic oligonucleotide
  Antisense strand to SEQ ID NO: 1869865
guuuacccugauaacguua

SEQ ID NO: 1869867 - RNA, 19 nt, Artificial Sequence
  Description of Artificial Sequence: Synthetic oligonucleotide
  Sense strand starting at position 3222 of SEQ ID NO: 1564301
acguuaucaggguaaacuu

SEQ ID NO: 1869868 - RNA, 19 nt, Artificial Sequence
  Description of Artificial Sequence: Synthetic oligonucleotide
  Antisense strand to SEQ ID NO: 1869867
aaguuuacccugauaacgu

SEQ ID NO: 1869869 - RNA, 19 nt, Artificial Sequence
  Description of Artificial Sequence: Synthetic oligonucleotide
  Sense strand starting at position 3231 of SEQ ID NO: 1564301
ggguaaacuuccuguugga

SEQ ID NO: 1869870 - RNA, 19 nt, Artificial Sequence
  Description of Artificial Sequence: Synthetic oligonucleotide
  Antisense strand to SEQ ID NO: 1869869
uccaacaggaaguuuaccc

SEQ ID NO: 1869871 - RNA, 19 nt, Artificial Sequence
  Description of Artificial Sequence: Synthetic oligonucleotide
  Sense strand starting at position 3241 of SEQ ID NO: 1564301
ccuguuggaucuuaacauc

SEQ ID NO: 1869872 - RNA, 19 nt, Artificial Sequence
  Description of Artificial Sequence: Synthetic oligonucleotide
  Antisense strand to SEQ ID NO: 1869871
gauguuaagauccaacagg

SEQ ID NO: 1869873 - RNA, 19 nt, Artificial Sequence
  Description of Artificial Sequence: Synthetic oligonucleotide
  Sense strand starting at position 3244 of SEQ ID NO: 1564301
guuggaucuuaacaucaac

SEQ ID NO: 1869874 - RNA, 19 nt, Artificial Sequence
  Description of Artificial Sequence: Synthetic oligonucleotide
  Antisense strand to SEQ ID NO: 1869873
guugauguuaagauccaac

SEQ ID NO: 1869875 - RNA, 19 nt, Artificial Sequence
  Description of Artificial Sequence: Synthetic oligonucleotide
  Sense strand starting at position 3340 of SEQ ID NO: 1564301
accgaaagaucacacugua

SEQ ID NO: 1869876 - RNA, 19 nt, Artificial Sequence
  Description of Artificial Sequence: Synthetic oligonucleotide
  Antisense strand to SEQ ID NO: 1869875
uacagugugaucuuucggu

SEQ ID NO: 1869877 - RNA, 19 nt, Artificial Sequence
  Description of Artificial Sequence: Synthetic oligonucleotide
  Sense strand starting at position 3343 of SEQ ID NO: 1564301
gaaagaucacacuguauug

SEQ ID NO: 1869878 - RNA, 19 nt, Artificial Sequence
  Description of Artificial Sequence: Synthetic oligonucleotide
  Antisense strand to SEQ ID NO: 1869877
caauacagugugaucuuuc

SEQ ID NO: 1869879 - RNA, 19 nt, Artificial Sequence
  Description of Artificial Sequence: Synthetic oligonucleotide
  Sense strand starting at position 3353 of SEQ ID NO: 1564301
acuguauuguguugacuca

SEQ ID NO: 1869880 - RNA, 19 nt, Artificial Sequence
  Description of Artificial Sequence: Synthetic oligonucleotide
  Antisense strand to SEQ ID NO: 1869879
ugagucaacacaauacagu

SEQ ID NO: 1869881 - RNA, 19 nt, Artificial Sequence
  Description of Artificial Sequence: Synthetic oligonucleotide
  Sense strand starting at position 3376 of SEQ ID NO: 1564301
cucccuugucccuguaaca

SEQ ID NO: 1869882 - RNA, 19 nt, Artificial Sequence
  Description of Artificial Sequence: Synthetic oligonucleotide
  Antisense strand to SEQ ID NO: 1869881
uguuacagggacaagggag

SEQ ID NO: 1869883 - RNA, 19 nt, Artificial Sequence
  Description of Artificial Sequence: Synthetic oligonucleotide
  Sense strand starting at position 3387 of SEQ ID NO: 1564301
cuguaacaagcuuaucagu

SEQ ID NO: 1869884 - RNA, 19 nt, Artificial Sequence
  Description of Artificial Sequence: Synthetic oligonucleotide
  Antisense strand to SEQ ID NO: 1869883
acugauaagcuuguuacag

SEQ ID NO: 1869885 - RNA, 19 nt, Artificial Sequence
  Description of Artificial Sequence: Synthetic oligonucleotide
  Sense strand starting at position 3389 of SEQ ID NO: 1564301
guaacaagcuuaucagugu

SEQ ID NO: 1869886 - RNA, 19 nt, Artificial Sequence
  Description of Artificial Sequence: Synthetic oligonucleotide
  Antisense strand to SEQ ID NO: 1869885
acacugauaagcuuguuac

SEQ ID NO: 1869887 - RNA, 19 nt, Artificial Sequence
  Description of Artificial Sequence: Synthetic oligonucleotide
  Sense strand starting at position 3518 of SEQ ID NO: 1564301
cuggguacuguucaaggua

SEQ ID NO: 1869888 - RNA, 19 nt, Artificial Sequence
  Description of Artificial Sequence: Synthetic oligonucleotide
  Antisense strand to SEQ ID NO: 1869887
uaccuugaacaguacccag

SEQ ID NO: 1869889 - RNA, 19 nt, Artificial Sequence
  Description of Artificial Sequence: Synthetic oligonucleotide
  Sense strand starting at position 3923 of SEQ ID NO: 1564301
aucugaagcccagggaauu

SEQ ID NO: 1869890 - RNA, 19 nt, Artificial Sequence
  Description of Artificial Sequence: Synthetic oligonucleotide
  Antisense strand to SEQ ID NO: 1869889
aauucccugggcuucagau

SEQ ID NO: 1869891 - RNA, 19 nt, Artificial Sequence
  Description of Artificial Sequence: Synthetic oligonucleotide
  Sense strand starting at position 149 of SEQ ID NO: 1564302
auguauuuccuaugcucua

SEQ ID NO: 1869892 - RNA, 19 nt, Artificial Sequence
  Description of Artificial Sequence: Synthetic oligonucleotide
  Antisense strand to SEQ ID NO: 1869891
uagagcauaggaaauacau

SEQ ID NO: 1869893 - RNA, 19 nt, Artificial Sequence
  Description of Artificial Sequence: Synthetic oligonucleotide
  Sense strand starting at position 203 of SEQ ID NO: 1564302
gaaggagauucggugucau

SEQ ID NO: 1869894 - RNA, 19 nt, Artificial Sequence
  Description of Artificial Sequence: Synthetic oligonucleotide
  Antisense strand to SEQ ID NO: 1869893
augacaccgaaucuccuuc

SEQ ID NO: 1869895 - RNA, 19 nt, Artificial Sequence
  Description of Artificial Sequence: Synthetic oligonucleotide
  Sense strand starting at position 306 of SEQ ID NO: 1564302
guacauugcuuucugauuu

SEQ ID NO: 1869896 - RNA, 19 nt, Artificial Sequence
  Description of Artificial Sequence: Synthetic oligonucleotide
  Antisense strand to SEQ ID NO: 1869895
aaaucagaaagcaauguac

SEQ ID NO: 1869897 - RNA, 19 nt, Artificial Sequence
  Description of Artificial Sequence: Synthetic oligonucleotide
  Sense strand starting at position 345 of SEQ ID NO: 1564302
gcauauuguguauaaacau

SEQ ID NO: 1869898 - RNA, 19 nt, Artificial Sequence
  Description of Artificial Sequence: Synthetic oligonucleotide
  Antisense strand to SEQ ID NO: 1869897
auguuuauacacaauaugc

SEQ ID NO: 1869899 - RNA, 19 nt, Artificial Sequence
  Description of Artificial Sequence: Synthetic oligonucleotide
  Sense strand starting at position 424 of SEQ ID NO: 1564302
uuauuacucccacggagua

SEQ ID NO: 1869900 - RNA, 19 nt, Artificial Sequence
  Description of Artificial Sequence: Synthetic oligonucleotide
  Antisense strand to SEQ ID NO: 1869899
uacuccgugggaguaauaa

SEQ ID NO: 1869901 - RNA, 19 nt, Artificial Sequence
  Description of Artificial Sequence: Synthetic oligonucleotide
  Sense strand starting at position 425 of SEQ ID NO: 1564302
uauuacucccacggaguaa

SEQ ID NO: 1869902 - RNA, 19 nt, Artificial Sequence
  Description of Artificial Sequence: Synthetic oligonucleotide
  Antisense strand to SEQ ID NO: 1869901
uuacuccgugggaguaaua

SEQ ID NO: 1869903 - RNA, 19 nt, Artificial Sequence
  Description of Artificial Sequence: Synthetic oligonucleotide
  Sense strand starting at position 451 of SEQ ID NO: 1564302
aauugaaggcagugaacuu

SEQ ID NO: 1869904 - RNA, 19 nt, Artificial Sequence
  Description of Artificial Sequence: Synthetic oligonucleotide
  Antisense strand to SEQ ID NO: 1869903
aaguucacugccuucaauu

SEQ ID NO: 1869905 - RNA, 19 nt, Artificial Sequence
  Description of Artificial Sequence: Synthetic oligonucleotide
  Sense strand starting at position 461 of SEQ ID NO: 1564302
agugaacuucucgaaccau

SEQ ID NO: 1869906 - RNA, 19 nt, Artificial Sequence
  Description of Artificial Sequence: Synthetic oligonucleotide
  Antisense strand to SEQ ID NO: 1869905
augguucgagaaguucacu

SEQ ID NO: 1869907 - RNA, 19 nt, Artificial Sequence
  Description of Artificial Sequence: Synthetic oligonucleotide
  Sense strand starting at position 467 of SEQ ID NO: 1564302
cuucucgaaccauauuagu

SEQ ID NO: 1869908 - RNA, 19 nt, Artificial Sequence
  Description of Artificial Sequence: Synthetic oligonucleotide
  Antisense strand to SEQ ID NO: 1869907
acuaauaugguucgagaag

SEQ ID NO: 1869909 - RNA, 19 nt, Artificial Sequence
  Description of Artificial Sequence: Synthetic oligonucleotide
  Sense strand starting at position 552 of SEQ ID NO: 1564302
ccucuauuuccacguacau

SEQ ID NO: 1869910 - RNA, 19 nt, Artificial Sequence
  Description of Artificial Sequence: Synthetic oligonucleotide
  Antisense strand to SEQ ID NO: 1869909
auguacguggaaauagagg

SEQ ID NO: 1869911 - RNA, 19 nt, Artificial Sequence
  Description of Artificial Sequence: Synthetic oligonucleotide
  Sense strand starting at position 623 of SEQ ID NO: 1564302
guggagaaguggguaagua

SEQ ID NO: 1869912 - RNA, 19 nt, Artificial Sequence
  Description of Artificial Sequence: Synthetic oligonucleotide
  Antisense strand to SEQ ID NO: 1869911
uacuuacccacuucuccac

SEQ ID NO: 1869913 - RNA, 19 nt, Artificial Sequence
  Description of Artificial Sequence: Synthetic oligonucleotide
  Sense strand starting at position 627 of SEQ ID NO: 1564302
agaaguggguaaguaaaua

SEQ ID NO: 1869914 - RNA, 19 nt, Artificial Sequence
  Description of Artificial Sequence: Synthetic oligonucleotide
  Antisense strand to SEQ ID NO: 1869913
uauuuacuuacccacuucu

SEQ ID NO: 1869915 - RNA, 19 nt, Artificial Sequence
  Description of Artificial Sequence: Synthetic oligonucleotide
  Sense strand starting at position 772 of SEQ ID NO: 1564302
ccagauuacucagcacuug

SEQ ID NO: 1869916 - RNA, 19 nt, Artificial Sequence
  Description of Artificial Sequence: Synthetic oligonucleotide
  Antisense strand to SEQ ID NO: 1869915
caagugcugaguaaucugg

SEQ ID NO: 1869917 - RNA, 19 nt, Artificial Sequence
  Description of Artificial Sequence: Synthetic oligonucleotide
  Sense strand starting at position 803 of SEQ ID NO: 1564302
cagucaguugugcacauuu

SEQ ID NO: 1869918 - RNA, 19 nt, Artificial Sequence
  Description of Artificial Sequence: Synthetic oligonucleotide
  Antisense strand to SEQ ID NO: 1869917
aaaugugcacaacugacug

SEQ ID NO: 1869919 - RNA, 19 nt, Artificial Sequence
  Description of Artificial Sequence: Synthetic oligonucleotide
  Sense strand starting at position 863 of SEQ ID NO: 1564302
gggaccguguauucgauuu

SEQ ID NO: 1869920 - RNA, 19 nt, Artificial Sequence
  Description of Artificial Sequence: Synthetic oligonucleotide
  Antisense strand to SEQ ID NO: 1869919
aaaucgaauacacgguccc

SEQ ID NO: 1869921 - RNA, 19 nt, Artificial Sequence
  Description of Artificial Sequence: Synthetic oligonucleotide
  Sense strand starting at position 918 of SEQ ID NO: 1564302
acuguugaucuagaguaca

SEQ ID NO: 1869922 - RNA, 19 nt, Artificial Sequence
  Description of Artificial Sequence: Synthetic oligonucleotide
  Antisense strand to SEQ ID NO: 1869921
uguacucuagaucaacagu

SEQ ID NO: 1869923 - RNA, 19 nt, Artificial Sequence
  Description of Artificial Sequence: Synthetic oligonucleotide
  Sense strand starting at position 930 of SEQ ID NO: 1564302
gaguacauucgcuagagga

SEQ ID NO: 1869924 - RNA, 19 nt, Artificial Sequence
  Description of Artificial Sequence: Synthetic oligonucleotide
  Antisense strand to SEQ ID NO: 1869923
uccucuagcgaauguacuc

SEQ ID NO: 1869925 - RNA, 19 nt, Artificial Sequence
  Description of Artificial Sequence: Synthetic oligonucleotide
  Sense strand starting at position 932 of SEQ ID NO: 1564302
guacauucgcuagaggacu

SEQ ID NO: 1869926 - RNA, 19 nt, Artificial Sequence
  Description of Artificial Sequence: Synthetic oligonucleotide
  Antisense strand to SEQ ID NO: 1869925
aguccucuagcgaauguac

SEQ ID NO: 1869927 - RNA, 19 nt, Artificial Sequence
  Description of Artificial Sequence: Synthetic oligonucleotide
  Sense strand starting at position 946 of SEQ ID NO: 1564302
ggacuuucuuaagcaaaua

SEQ ID NO: 1869928 - RNA, 19 nt, Artificial Sequence
  Description of Artificial Sequence: Synthetic oligonucleotide
  Antisense strand to SEQ ID NO: 1869927
uauuugcuuaagaaagucc

SEQ ID NO: 1869929 - RNA, 19 nt, Artificial Sequence
  Description of Artificial Sequence: Synthetic oligonucleotide
  Sense strand starting at position 1042 of SEQ ID NO: 1564302
ugaagugaauagguaaguu

SEQ ID NO: 1869930 - RNA, 19 nt, Artificial Sequence
  Description of Artificial Sequence: Synthetic oligonucleotide
  Antisense strand to SEQ ID NO: 1869929
aacuuaccuauucacuuca

SEQ ID NO: 1869931 - RNA, 19 nt, Artificial Sequence
  Description of Artificial Sequence: Synthetic oligonucleotide
  Sense strand starting at position 1061 of SEQ ID NO: 1564302
agcgguaaacgggagaaua

SEQ ID NO: 1869932 - RNA, 19 nt, Artificial Sequence
  Description of Artificial Sequence: Synthetic oligonucleotide
  Antisense strand to SEQ ID NO: 1869931
uauucucccguuuaccgcu

SEQ ID NO: 1869933 - RNA, 19 nt, Artificial Sequence
  Description of Artificial Sequence: Synthetic oligonucleotide
  Sense strand starting at position 2072 of SEQ ID NO: 1564302
gcccgagaagccuaucaaa

SEQ ID NO: 1869934 - RNA, 19 nt, Artificial Sequence
  Description of Artificial Sequence: Synthetic oligonucleotide
  Antisense strand to SEQ ID NO: 1869933
uuugauaggcuucucgggc

SEQ ID NO: 1869935 - RNA, 19 nt, Artificial Sequence
  Description of Artificial Sequence: Synthetic oligonucleotide
  Sense strand starting at position 2328 of SEQ ID NO: 1564302
aaauacucucgggaaacgu

SEQ ID NO: 1869936 - RNA, 19 nt, Artificial Sequence
  Description of Artificial Sequence: Synthetic oligonucleotide
  Antisense strand to SEQ ID NO: 1869935
acguuucccgagaguauuu

SEQ ID NO: 1869937 - RNA, 19 nt, Artificial Sequence
  Description of Artificial Sequence: Synthetic oligonucleotide
  Sense strand starting at position 2365 of SEQ ID NO: 1564302
guauauuuacgaugucuua

SEQ ID NO: 1869938 - RNA, 19 nt, Artificial Sequence
  Description of Artificial Sequence: Synthetic oligonucleotide
  Antisense strand to SEQ ID NO: 1869937
uaagacaucguaaauauac

SEQ ID NO: 1869939 - RNA, 19 nt, Artificial Sequence
  Description of Artificial Sequence: Synthetic oligonucleotide
  Sense strand starting at position 2470 of SEQ ID NO: 1564302
cgagaucucuaauugagau

SEQ ID NO: 1869940 - RNA, 19 nt, Artificial Sequence
  Description of Artificial Sequence: Synthetic oligonucleotide
  Antisense strand to SEQ ID NO: 1869939
aucucaauuagagaucucg

SEQ ID NO: 1869941 - RNA, 19 nt, Artificial Sequence
  Description of Artificial Sequence: Synthetic oligonucleotide
  Sense strand starting at position 2551 of SEQ ID NO: 1564302
aguuccaugguguaaugau

SEQ ID NO: 1869942 - RNA, 19 nt, Artificial Sequence
  Description of Artificial Sequence: Synthetic oligonucleotide
  Antisense strand to SEQ ID NO: 1869941
aucauuacaccauggaacu

SEQ ID NO: 1869943 - RNA, 19 nt, Artificial Sequence
  Description of Artificial Sequence: Synthetic oligonucleotide
  Sense strand starting at position 2829 of SEQ ID NO: 1564302
acgggucauugaccaucaa

SEQ ID NO: 1869944 - RNA, 19 nt, Artificial Sequence
  Description of Artificial Sequence: Synthetic oligonucleotide
  Antisense strand to SEQ ID NO: 1869943
uugauggucaaugacccgu

SEQ ID NO: 1869945 - RNA, 19 nt, Artificial Sequence
  Description of Artificial Sequence: Synthetic oligonucleotide
  Sense strand starting at position 2836 of SEQ ID NO: 1564302
auugaccaucaaggugaua

SEQ ID NO: 1869946 - RNA, 19 nt, Artificial Sequence
  Description of Artificial Sequence: Synthetic oligonucleotide
  Antisense strand to SEQ ID NO: 1869945
uaucaccuugauggucaau

SEQ ID NO: 1869947 - RNA, 19 nt, Artificial Sequence
  Description of Artificial Sequence: Synthetic oligonucleotide
  Sense strand starting at position 2847 of SEQ ID NO: 1564302
aggugauaacauugacuuu

SEQ ID NO: 1869948 - RNA, 19 nt, Artificial Sequence
  Description of Artificial Sequence: Synthetic oligonucleotide
  Antisense strand to SEQ ID NO: 1869947
aaagucaauguuaucaccu

SEQ ID NO: 1869949 - RNA, 19 nt, Artificial Sequence
  Description of Artificial Sequence: Synthetic oligonucleotide
  Sense strand starting at position 2926 of SEQ ID NO: 1564302
guucgugcagccucaauua

SEQ ID NO: 1869950 - RNA, 19 nt, Artificial Sequence
  Description of Artificial Sequence: Synthetic oligonucleotide
  Antisense strand to SEQ ID NO: 1869949
uaauugaggcugcacgaac

SEQ ID NO: 1869951 - RNA, 19 nt, Artificial Sequence
  Description of Artificial Sequence: Synthetic oligonucleotide
  Sense strand starting at position 3046 of SEQ ID NO: 1564302
ucuaguggacuuggguaaa

SEQ ID NO: 1869952 - RNA, 19 nt, Artificial Sequence
  Description of Artificial Sequence: Synthetic oligonucleotide
  Antisense strand to SEQ ID NO: 1869951
uuuacccaaguccacuaga

SEQ ID NO: 1869953 - RNA, 19 nt, Artificial Sequence
  Description of Artificial Sequence: Synthetic oligonucleotide
  Sense strand starting at position 3072 of SEQ ID NO: 1564302
ugucauauacuguauauuc

SEQ ID NO: 1869954 - RNA, 19 nt, Artificial Sequence
  Description of Artificial Sequence: Synthetic oligonucleotide
  Antisense strand to SEQ ID NO: 1869953
gaauauacaguauaugaca

SEQ ID NO: 1869955 - RNA, 19 nt, Artificial Sequence
  Description of Artificial Sequence: Synthetic oligonucleotide
  Sense strand starting at position 3347 of SEQ ID NO: 1564302
gauccuugugaggguauga

SEQ ID NO: 1869956 - RNA, 19 nt, Artificial Sequence
  Description of Artificial Sequence: Synthetic oligonucleotide
  Antisense strand to SEQ ID NO: 1869955
ucauacccucacaaggauc

SEQ ID NO: 1869957 - RNA, 19 nt, Artificial Sequence
  Description of Artificial Sequence: Synthetic oligonucleotide
  Sense strand starting at position 3557 of SEQ ID NO: 1564302
gauguuaacuaccugaaug

SEQ ID NO: 1869958 - RNA, 19 nt, Artificial Sequence
  Description of Artificial Sequence: Synthetic oligonucleotide
  Antisense strand to SEQ ID NO: 1869957
cauucagguaguuaacauc

SEQ ID NO: 1869959 - RNA, 19 nt, Artificial Sequence
  Description of Artificial Sequence: Synthetic oligonucleotide
  Sense strand starting at position 3559 of SEQ ID NO: 1564302
uguuaacuaccugaaugua

SEQ ID NO: 1869960 - RNA, 19 nt, Artificial Sequence
  Description of Artificial Sequence: Synthetic oligonucleotide
  Antisense strand to SEQ ID NO: 1869959
uacauucagguaguuaaca

SEQ ID NO: 1869961 - RNA, 19 nt, Artificial Sequence
  Description of Artificial Sequence: Synthetic oligonucleotide
  Sense strand starting at position 3574 of SEQ ID NO: 1564302
uguauucucuuccuagaua

SEQ ID NO: 1869962 - RNA, 19 nt, Artificial Sequence
  Description of Artificial Sequence: Synthetic oligonucleotide
  Antisense strand to SEQ ID NO: 1869961
uaucuaggaagagaauaca

SEQ ID NO: 1869963 - RNA, 19 nt, Artificial Sequence
  Description of Artificial Sequence: Synthetic oligonucleotide
  Sense strand starting at position 3604 of SEQ ID NO: 1564302
auuuauggcuuccaaagaa

SEQ ID NO: 1869964 - RNA, 19 nt, Artificial Sequence
  Description of Artificial Sequence: Synthetic oligonucleotide
  Antisense strand to SEQ ID NO: 1869963
uucuuuggaagccauaaau

SEQ ID NO: 1869965 - RNA, 19 nt, Artificial Sequence
  Description of Artificial Sequence: Synthetic oligonucleotide
  Sense strand starting at position 3640 of SEQ ID NO: 1564302
cuauaugauagagguguua

SEQ ID NO: 1869966 - RNA, 19 nt, Artificial Sequence
  Description of Artificial Sequence: Synthetic oligonucleotide
  Antisense strand to SEQ ID NO: 1869965
uaacaccucuaucauauag

SEQ ID NO: 1869967 - RNA, 19 nt, Artificial Sequence
  Description of Artificial Sequence: Synthetic oligonucleotide
  Sense strand starting at position 3642 of SEQ ID NO: 1564302
auaugauagagguguuagu

SEQ ID NO: 1869968 - RNA, 19 nt, Artificial Sequence
  Description of Artificial Sequence: Synthetic oligonucleotide
  Antisense strand to SEQ ID NO: 1869967
acuaacaccucuaucauau

SEQ ID NO: 1869969 - RNA, 19 nt, Artificial Sequence
  Description of Artificial Sequence: Synthetic oligonucleotide
  Sense strand starting at position 3722 of SEQ ID NO: 1564302
ucuugagcucaagaguuuc

SEQ ID NO: 1869970 - RNA, 19 nt, Artificial Sequence
  Description of Artificial Sequence: Synthetic oligonucleotide
  Antisense strand to SEQ ID NO: 1869969
gaaacucuugagcucaaga

SEQ ID NO: 1869971 - RNA, 19 nt, Artificial Sequence
  Description of Artificial Sequence: Synthetic oligonucleotide
  Sense strand starting at position 37 of SEQ ID NO: 1564303
aaagaaugcccagguagga

SEQ ID NO: 1869972 - RNA, 19 nt, Artificial Sequence
  Description of Artificial Sequence: Synthetic oligonucleotide
  Antisense strand to SEQ ID NO: 1869971
uccuaccugggcauucuuu

SEQ ID NO: 1869973 - RNA, 19 nt, Artificial Sequence
  Description of Artificial Sequence: Synthetic oligonucleotide
  Sense strand starting at position 132 of SEQ ID NO: 1564303
ucacuuuggucuugguuga

SEQ ID NO: 1869974 - RNA, 19 nt, Artificial Sequence
  Description of Artificial Sequence: Synthetic oligonucleotide
  Antisense strand to SEQ ID NO: 1869973
ucaaccaagaccaaaguga

SEQ ID NO: 1869975 - RNA, 19 nt, Artificial Sequence
  Description of Artificial Sequence: Synthetic oligonucleotide
  Sense strand starting at position 133 of SEQ ID NO: 1564303
cacuuuggucuugguugaa

SEQ ID NO: 1869976 - RNA, 19 nt, Artificial Sequence
  Description of Artificial Sequence: Synthetic oligonucleotide
  Antisense strand to SEQ ID NO: 1869975
uucaaccaagaccaaagug

SEQ ID NO: 1869977 - RNA, 19 nt, Artificial Sequence
  Description of Artificial Sequence: Synthetic oligonucleotide
  Sense strand starting at position 158 of SEQ ID NO: 1564303
gcuggucacuccucgaagu

SEQ ID NO: 1869978 - RNA, 19 nt, Artificial Sequence
  Description of Artificial Sequence: Synthetic oligonucleotide
  Antisense strand to SEQ ID NO: 1869977
acuucgaggagugaccagc

SEQ ID NO: 1869979 - RNA, 19 nt, Artificial Sequence
  Description of Artificial Sequence: Synthetic oligonucleotide
  Sense strand starting at position 183 of SEQ ID NO: 1564303
ugagucauggugcaggauu

SEQ ID NO: 1869980 - RNA, 19 nt, Artificial Sequence
  Description of Artificial Sequence: Synthetic oligonucleotide
  Antisense strand to SEQ ID NO: 1869979
aauccugcaccaugacuca

SEQ ID NO: 1869981 - RNA, 19 nt, Artificial Sequence
  Description of Artificial Sequence: Synthetic oligonucleotide
  Sense strand starting at position 194 of SEQ ID NO: 1564303
gcaggauuguuccucugca

SEQ ID NO: 1869982 - RNA, 19 nt, Artificial Sequence
  Description of Artificial Sequence: Synthetic oligonucleotide
  Antisense strand to SEQ ID NO: 1869981
ugcagaggaacaauccugc

SEQ ID NO: 1869983 - RNA, 19 nt, Artificial Sequence
  Description of Artificial Sequence: Synthetic oligonucleotide
  Sense strand starting at position 195 of SEQ ID NO: 1564303
caggauuguuccucugcau

SEQ ID NO: 1869984 - RNA, 19 nt, Artificial Sequence
  Description of Artificial Sequence: Synthetic oligonucleotide
  Antisense strand to SEQ ID NO: 1869983
augcagaggaacaauccug

SEQ ID NO: 1869985 - RNA, 19 nt, Artificial Sequence
  Description of Artificial Sequence: Synthetic oligonucleotide
  Sense strand starting at position 221 of SEQ ID NO: 1564303
ggauaaagaugagaagagu

SEQ ID NO: 1869986 - RNA, 19 nt, Artificial Sequence
  Description of Artificial Sequence: Synthetic oligonucleotide
  Antisense strand to SEQ ID NO: 1869985
acucuucucaucuuuaucc

SEQ ID NO: 1869987 - RNA, 19 nt, Artificial Sequence
  Description of Artificial Sequence: Synthetic oligonucleotide
  Sense strand starting at position 230 of SEQ ID NO: 1564303
ugagaagaguccuggaauc

SEQ ID NO: 1869988 - RNA, 19 nt, Artificial Sequence
  Description of Artificial Sequence: Synthetic oligonucleotide
  Antisense strand to SEQ ID NO: 1869987
gauuccaggacucuucuca

SEQ ID NO: 1869989 - RNA, 19 nt, Artificial Sequence
  Description of Artificial Sequence: Synthetic oligonucleotide
  Sense strand starting at position 258 of SEQ ID NO: 1564303
aguucugccucaccugauu

SEQ ID NO: 1869990 - RNA, 19 nt, Artificial Sequence
  Description of Artificial Sequence: Synthetic oligonucleotide
  Antisense strand to SEQ ID NO: 1869989
aaucaggugaggcagaacu

SEQ ID NO: 1869991 - RNA, 19 nt, Artificial Sequence
  Description of Artificial Sequence: Synthetic oligonucleotide
  Sense strand starting at position 296 of SEQ ID NO: 1564303
acuacugacucuggaguga

SEQ ID NO: 1869992 - RNA, 19 nt, Artificial Sequence
  Description of Artificial Sequence: Synthetic oligonucleotide
  Antisense strand to SEQ ID NO: 1869991
ucacuccagagucaguagu

SEQ ID NO: 1869993 - RNA, 19 nt, Artificial Sequence
  Description of Artificial Sequence: Synthetic oligonucleotide
  Sense strand starting at position 659 of SEQ ID NO: 1564303
gcucuaagcucccaagauc

SEQ ID NO: 1869994 - RNA, 19 nt, Artificial Sequence
  Description of Artificial Sequence: Synthetic oligonucleotide
  Antisense strand to SEQ ID NO: 1869993
gaucuugggagcuuagagc

SEQ ID NO: 1869995 - RNA, 19 nt, Artificial Sequence
  Description of Artificial Sequence: Synthetic oligonucleotide
  Sense strand starting at position 774 of SEQ ID NO: 1564303
cucacugacuugucaggaa

SEQ ID NO: 1869996 - RNA, 19 nt, Artificial Sequence
  Description of Artificial Sequence: Synthetic oligonucleotide
  Antisense strand to SEQ ID NO: 1869995
uuccugacaagucagugag

SEQ ID NO: 1869997 - RNA, 19 nt, Artificial Sequence
  Description of Artificial Sequence: Synthetic oligonucleotide
  Sense strand starting at position 777 of SEQ ID NO: 1564303
acugacuugucaggaagua

SEQ ID NO: 1869998 - RNA, 19 nt, Artificial Sequence
  Description of Artificial Sequence: Synthetic oligonucleotide
  Antisense strand to SEQ ID NO: 1869997
uacuuccugacaagucagu

SEQ ID NO: 1869999 - RNA, 19 nt, Artificial Sequence
  Description of Artificial Sequence: Synthetic oligonucleotide
  Sense strand starting at position 844 of SEQ ID NO: 1564303
ucuugaucccaaugccaga

SEQ ID NO: 1870000 - RNA, 19 nt, Artificial Sequence
  Description of Artificial Sequence: Synthetic oligonucleotide
  Antisense strand to SEQ ID NO: 1869999
ucuggcauugggaucaaga

SEQ ID NO: 1870001 - RNA, 19 nt, Artificial Sequence
  Description of Artificial Sequence: Synthetic oligonucleotide
  Sense strand starting at position 915 of SEQ ID NO: 1564303
accggacucucucaauaaa

SEQ ID NO: 1870002 - RNA, 19 nt, Artificial Sequence
  Description of Artificial Sequence: Synthetic oligonucleotide
  Antisense strand to SEQ ID NO: 1870001
uuuauugagagaguccggu

SEQ ID NO: 1870003 - RNA, 19 nt, Artificial Sequence
  Description of Artificial Sequence: Synthetic oligonucleotide
  Sense strand starting at position 1016 of SEQ ID NO: 1564303
aggaacuccucugcucaua

SEQ ID NO: 1870004 - RNA, 19 nt, Artificial Sequence
  Description of Artificial Sequence: Synthetic oligonucleotide
  Antisense strand to SEQ ID NO: 1870003
uaugagcagaggaguuccu

SEQ ID NO: 1870005 - RNA, 19 nt, Artificial Sequence
  Description of Artificial Sequence: Synthetic oligonucleotide
  Sense strand starting at position 1145 of SEQ ID NO: 1564303
uucucaugccuugguaacu

SEQ ID NO: 1870006 - RNA, 19 nt, Artificial Sequence
  Description of Artificial Sequence: Synthetic oligonucleotide
  Antisense strand to SEQ ID NO: 1870005
aguuaccaaggcaugagaa

SEQ ID NO: 1870007 - RNA, 19 nt, Artificial Sequence
  Description of Artificial Sequence: Synthetic oligonucleotide
  Sense strand starting at position 1146 of SEQ ID NO: 1564303
ucucaugccuugguaacua

SEQ ID NO: 1870008 - RNA, 19 nt, Artificial Sequence
  Description of Artificial Sequence: Synthetic oligonucleotide
  Antisense strand to SEQ ID NO: 1870007
uaguuaccaaggcaugaga

SEQ ID NO: 1870009 - RNA, 19 nt, Artificial Sequence
  Description of Artificial Sequence: Synthetic oligonucleotide
  Sense strand starting at position 1533 of SEQ ID NO: 1564303
cccaauaacucuggccaga

SEQ ID NO: 1870010 - RNA, 19 nt, Artificial Sequence
  Description of Artificial Sequence: Synthetic oligonucleotide
  Antisense strand to SEQ ID NO: 1870009
ucuggccagaguuauuggg

SEQ ID NO: 1870011 - RNA, 19 nt, Artificial Sequence
  Description of Artificial Sequence: Synthetic oligonucleotide
  Sense strand starting at position 1643 of SEQ ID NO: 1564303
acagcucugccuuagaguu

SEQ ID NO: 1870012 - RNA, 19 nt, Artificial Sequence
  Description of Artificial Sequence: Synthetic oligonucleotide
  Antisense strand to SEQ ID NO: 1870011
aacucuaaggcagagcugu

SEQ ID NO: 1870013 - RNA, 19 nt, Artificial Sequence
  Description of Artificial Sequence: Synthetic oligonucleotide
  Sense strand starting at position 1645 of SEQ ID NO: 1564303
agcucugccuuagaguuau

SEQ ID NO: 1870014 - RNA, 19 nt, Artificial Sequence
  Description of Artificial Sequence: Synthetic oligonucleotide
  Antisense strand to SEQ ID NO: 1870013
auaacucuaaggcagagcu

SEQ ID NO: 1870015 - RNA, 19 nt, Artificial Sequence
  Description of Artificial Sequence: Synthetic oligonucleotide
  Sense strand starting at position 1655 of SEQ ID NO: 1564303
uagaguuauucucuggaca

SEQ ID NO: 1870016 - RNA, 19 nt, Artificial Sequence
  Description of Artificial Sequence: Synthetic oligonucleotide
  Antisense strand to SEQ ID NO: 1870015
uguccagagaauaacucua

SEQ ID NO: 1870017 - RNA, 19 nt, Artificial Sequence
  Description of Artificial Sequence: Synthetic oligonucleotide
  Sense strand starting at position 1656 of SEQ ID NO: 1564303
agaguuauucucuggacag

SEQ ID NO: 1870018 - RNA, 19 nt, Artificial Sequence
  Description of Artificial Sequence: Synthetic oligonucleotide
  Antisense strand to SEQ ID NO: 1870017
cuguccagagaauaacucu

SEQ ID NO: 1870019 - RNA, 19 nt, Artificial Sequence
  Description of Artificial Sequence: Synthetic oligonucleotide
  Sense strand starting at position 1657 of SEQ ID NO: 1564303
gaguuauucucuggacagc

SEQ ID NO: 1870020 - RNA, 19 nt, Artificial Sequence
  Description of Artificial Sequence: Synthetic oligonucleotide
  Antisense strand to SEQ ID NO: 1870019
gcuguccagagaauaacuc

SEQ ID NO: 1870021 - RNA, 19 nt, Artificial Sequence
  Description of Artificial Sequence: Synthetic oligonucleotide
  Sense strand starting at position 1658 of SEQ ID NO: 1564303
aguuauucucuggacagcu

SEQ ID NO: 1870022 - RNA, 19 nt, Artificial Sequence
  Description of Artificial Sequence: Synthetic oligonucleotide
  Antisense strand to SEQ ID NO: 1870021
agcuguccagagaauaacu

SEQ ID NO: 1870023 - RNA, 19 nt, Artificial Sequence
  Description of Artificial Sequence: Synthetic oligonucleotide
  Sense strand starting at position 1711 of SEQ ID NO: 1564303
ccaagacucuguccgggau

SEQ ID NO: 1870024 - RNA, 19 nt, Artificial Sequence
  Description of Artificial Sequence: Synthetic oligonucleotide
  Antisense strand to SEQ ID NO: 1870023
aucccggacagagucuugg

SEQ ID NO: 1870025 - RNA, 19 nt, Artificial Sequence
  Description of Artificial Sequence: Synthetic oligonucleotide
  Sense strand starting at position 2009 of SEQ ID NO: 1564303
gagccugucgcaggaaaug

SEQ ID NO: 1870026 - RNA, 19 nt, Artificial Sequence
  Description of Artificial Sequence: Synthetic oligonucleotide
  Antisense strand to SEQ ID NO: 1870025
cauuuccugcgacaggcuc

SEQ ID NO: 1870027 - RNA, 19 nt, Artificial Sequence
  Description of Artificial Sequence: Synthetic oligonucleotide
  Sense strand starting at position 2085 of SEQ ID NO: 1564303
cggagcaucgcgagugaca

SEQ ID NO: 1870028 - RNA, 19 nt, Artificial Sequence
  Description of Artificial Sequence: Synthetic oligonucleotide
  Antisense strand to SEQ ID NO: 1870027
ugucacucgcgaugcuccg

SEQ ID NO: 1870029 - RNA, 19 nt, Artificial Sequence
  Description of Artificial Sequence: Synthetic oligonucleotide
  Sense strand starting at position 2181 of SEQ ID NO: 1564303
ccgagacugucugagggaa

SEQ ID NO: 1870030 - RNA, 19 nt, Artificial Sequence
  Description of Artificial Sequence: Synthetic oligonucleotide
  Antisense strand to SEQ ID NO: 1870029
uucccucagacagucucgg

SEQ ID NO: 1870031 - RNA, 19 nt, Artificial Sequence
  Description of Artificial Sequence: Synthetic oligonucleotide
  Sense strand starting at position 2433 of SEQ ID NO: 1564303
ggagaaaccuccuuggcuc

SEQ ID NO: 1870032 - RNA, 19 nt, Artificial Sequence
  Description of Artificial Sequence: Synthetic oligonucleotide
  Antisense strand to SEQ ID NO: 1870031
gagccaaggagguuucucc

SEQ ID NO: 1870033 - RNA, 19 nt, Artificial Sequence
  Description of Artificial Sequence: Synthetic oligonucleotide
  Sense strand starting at position 2886 of SEQ ID NO: 1564303
guaugaaugcuuuggguua

SEQ ID NO: 1870034 - RNA, 19 nt, Artificial Sequence
  Description of Artificial Sequence: Synthetic oligonucleotide
  Antisense strand to SEQ ID NO: 1870033
uaacccaaagcauucauac

SEQ ID NO: 1870035 - RNA, 19 nt, Artificial Sequence
  Description of Artificial Sequence: Synthetic oligonucleotide
  Sense strand starting at position 2887 of SEQ ID NO: 1564303
uaugaaugcuuuggguuaa

SEQ ID NO: 1870036 - RNA, 19 nt, Artificial Sequence
  Description of Artificial Sequence: Synthetic oligonucleotide
  Antisense strand to SEQ ID NO: 1870035
uuaacccaaagcauucaua

SEQ ID NO: 1870037 - RNA, 19 nt, Artificial Sequence
  Description of Artificial Sequence: Synthetic oligonucleotide
  Sense strand starting at position 2888 of SEQ ID NO: 1564303
augaaugcuuuggguuaaa

SEQ ID NO: 1870038 - RNA, 19 nt, Artificial Sequence
  Description of Artificial Sequence: Synthetic oligonucleotide
  Antisense strand to SEQ ID NO: 1870037
uuuaacccaaagcauucau

SEQ ID NO: 1870039 - RNA, 19 nt, Artificial Sequence
  Description of Artificial Sequence: Synthetic oligonucleotide
  Sense strand starting at position 2922 of SEQ ID NO: 1564303
agguccuaccuaugauaaa

SEQ ID NO: 1870040 - RNA, 19 nt, Artificial Sequence
  Description of Artificial Sequence: Synthetic oligonucleotide
  Antisense strand to SEQ ID NO: 1870039
uuuaucauagguaggaccu

SEQ ID NO: 1870041 - RNA, 19 nt, Artificial Sequence
  Description of Artificial Sequence: Synthetic oligonucleotide
  Sense strand starting at position 2923 of SEQ ID NO: 1564303
gguccuaccuaugauaaag

SEQ ID NO: 1870042 - RNA, 19 nt, Artificial Sequence
  Description of Artificial Sequence: Synthetic oligonucleotide
  Antisense strand to SEQ ID NO: 1870041
cuuuaucauagguaggacc

SEQ ID NO: 1870043 - RNA, 19 nt, Artificial Sequence
  Description of Artificial Sequence: Synthetic oligonucleotide
  Sense strand starting at position 3043 of SEQ ID NO: 1564303
gugcaauuagcgcgaucuu

SEQ ID NO: 1870044 - RNA, 19 nt, Artificial Sequence
  Description of Artificial Sequence: Synthetic oligonucleotide
  Antisense strand to SEQ ID NO: 1870043
aagaucgcgcuaauugcac

SEQ ID NO: 1870045 - RNA, 19 nt, Artificial Sequence
  Description of Artificial Sequence: Synthetic oligonucleotide
  Sense strand starting at position 3189 of SEQ ID NO: 1564303
ccggguuucucccuguuga

SEQ ID NO: 1870046 - RNA, 19 nt, Artificial Sequence
  Description of Artificial Sequence: Synthetic oligonucleotide
  Antisense strand to SEQ ID NO: 1870045
ucaacagggagaaacccgg

SEQ ID NO: 1870047 - RNA, 19 nt, Artificial Sequence
  Description of Artificial Sequence: Synthetic oligonucleotide
  Sense strand starting at position 3190 of SEQ ID NO: 1564303
cggguuucucccuguugau

SEQ ID NO: 1870048 - RNA, 19 nt, Artificial Sequence
  Description of Artificial Sequence: Synthetic oligonucleotide
  Antisense strand to SEQ ID NO: 1870047
aucaacagggagaaacccg

SEQ ID NO: 1870049 - RNA, 19 nt, Artificial Sequence
  Description of Artificial Sequence: Synthetic oligonucleotide
  Sense strand starting at position 3760 of SEQ ID NO: 1564303
cugggagacgagcgaaauu

SEQ ID NO: 1870050 - RNA, 19 nt, Artificial Sequence
  Description of Artificial Sequence: Synthetic oligonucleotide
  Antisense strand to SEQ ID NO: 1870049
aauuucgcucgucucccag

SEQ ID NO: 1870051 - RNA, 19 nt, Artificial Sequence
  Description of Artificial Sequence: Synthetic oligonucleotide
  Sense strand starting at position 221 of SEQ ID NO: 1564304
gugacuaauugcccggacu

SEQ ID NO: 1870052 - RNA, 19 nt, Artificial Sequence
  Description of Artificial Sequence: Synthetic oligonucleotide
  Antisense strand to SEQ ID NO: 1870051
aguccgggcaauuagucac

SEQ ID NO: 1870053 - RNA, 19 nt, Artificial Sequence
  Description of Artificial Sequence: Synthetic oligonucleotide
  Sense strand starting at position 222 of SEQ ID NO: 1564304
ugacuaauugcccggacuu

SEQ ID NO: 1870054 - RNA, 19 nt, Artificial Sequence
  Description of Artificial Sequence: Synthetic oligonucleotide
  Antisense strand to SEQ ID NO: 1870053
aaguccgggcaauuaguca

SEQ ID NO: 1870055 - RNA, 19 nt, Artificial Sequence
  Description of Artificial Sequence: Synthetic oligonucleotide
  Sense strand starting at position 223 of SEQ ID NO: 1564304
gacuaauugcccggacuuc

SEQ ID NO: 1870056 - RNA, 19 nt, Artificial Sequence
  Description of Artificial Sequence: Synthetic oligonucleotide
  Antisense strand to SEQ ID NO: 1870055
gaaguccgggcaauuaguc

SEQ ID NO: 1870057 - RNA, 19 nt, Artificial Sequence
  Description of Artificial Sequence: Synthetic oligonucleotide
  Sense strand starting at position 747 of SEQ ID NO: 1564304
accugauaucaacguuguu

SEQ ID NO: 1870058 - RNA, 19 nt, Artificial Sequence
  Description of Artificial Sequence: Synthetic oligonucleotide
  Antisense strand to SEQ ID NO: 1870057
aacaacguugauaucaggu

SEQ ID NO: 1870059 - RNA, 19 nt, Artificial Sequence
  Description of Artificial Sequence: Synthetic oligonucleotide
  Sense strand starting at position 829 of SEQ ID NO: 1564304
uggaguuucuaagcuaauu

SEQ ID NO: 1870060 - RNA, 19 nt, Artificial Sequence
  Description of Artificial Sequence: Synthetic oligonucleotide
  Antisense strand to SEQ ID NO: 1870059
aauuagcuuagaaacucca

SEQ ID NO: 1870061 - RNA, 19 nt, Artificial Sequence
  Description of Artificial Sequence: Synthetic oligonucleotide
  Sense strand starting at position 888 of SEQ ID NO: 1564304
ggcucaggcuuccuaacau

SEQ ID NO: 1870062 - RNA, 19 nt, Artificial Sequence
  Description of Artificial Sequence: Synthetic oligonucleotide
  Antisense strand to SEQ ID NO: 1870061
auguuaggaagccugagcc

SEQ ID NO: 1870063 - RNA, 19 nt, Artificial Sequence
  Description of Artificial Sequence: Synthetic oligonucleotide
  Sense strand starting at position 1007 of SEQ ID NO: 1564304
cccuguaaaucauggauuu

SEQ ID NO: 1870064 - RNA, 19 nt, Artificial Sequence
  Description of Artificial Sequence: Synthetic oligonucleotide
  Antisense strand to SEQ ID NO: 1870063
aaauccaugauuuacaggg

SEQ ID NO: 1870065 - RNA, 19 nt, Artificial Sequence
  Description of Artificial Sequence: Synthetic oligonucleotide
  Sense strand starting at position 1032 of SEQ ID NO: 1564304
auuggugcauacguuuaua

SEQ ID NO: 1870066 - RNA, 19 nt, Artificial Sequence
  Description of Artificial Sequence: Synthetic oligonucleotide
  Antisense strand to SEQ ID NO: 1870065
uauaaacguaugcaccaau

SEQ ID NO: 1870067 - RNA, 19 nt, Artificial Sequence
  Description of Artificial Sequence: Synthetic oligonucleotide
  Sense strand starting at position 1035 of SEQ ID NO: 1564304
ggugcauacguuuauaaug

SEQ ID NO: 1870068 - RNA, 19 nt, Artificial Sequence
  Description of Artificial Sequence: Synthetic oligonucleotide
  Antisense strand to SEQ ID NO: 1870067
cauuauaaacguaugcacc

SEQ ID NO: 1870069 - RNA, 19 nt, Artificial Sequence
  Description of Artificial Sequence: Synthetic oligonucleotide
  Sense strand starting at position 1043 of SEQ ID NO: 1564304
cguuuauaaugcuugcaau

SEQ ID NO: 1870070 - RNA, 19 nt, Artificial Sequence
  Description of Artificial Sequence: Synthetic oligonucleotide
  Antisense strand to SEQ ID NO: 1870069
auugcaagcauuauaaacg

SEQ ID NO: 1870071 - RNA, 19 nt, Artificial Sequence
  Description of Artificial Sequence: Synthetic oligonucleotide
  Sense strand starting at position 1440 of SEQ ID NO: 1564304
aaagauaaguggucaccuu

SEQ ID NO: 1870072 - RNA, 19 nt, Artificial Sequence
  Description of Artificial Sequence: Synthetic oligonucleotide
  Antisense strand to SEQ ID NO: 1870071
aaggugaccacuuaucuuu

SEQ ID NO: 1870073 - RNA, 19 nt, Artificial Sequence
  Description of Artificial Sequence: Synthetic oligonucleotide
  Sense strand starting at position 1449 of SEQ ID NO: 1564304
uggucaccuuaccuaugau

SEQ ID NO: 1870074 - RNA, 19 nt, Artificial Sequence
  Description of Artificial Sequence: Synthetic oligonucleotide
  Antisense strand to SEQ ID NO: 1870073
aucauagguaaggugacca

SEQ ID NO: 1870075 - RNA, 19 nt, Artificial Sequence
  Description of Artificial Sequence: Synthetic oligonucleotide
  Sense strand starting at position 1567 of SEQ ID NO: 1564304
uguuuauucccuuacacag

SEQ ID NO: 1870076 - RNA, 19 nt, Artificial Sequence
  Description of Artificial Sequence: Synthetic oligonucleotide
  Antisense strand to SEQ ID NO: 1870075
cuguguaagggaauaaaca

SEQ ID NO: 1870077 - RNA, 19 nt, Artificial Sequence
  Description of Artificial Sequence: Synthetic oligonucleotide
  Sense strand starting at position 1642 of SEQ ID NO: 1564304
gcuugugagaaggaguaca

SEQ ID NO: 1870078 - RNA, 19 nt, Artificial Sequence
  Description of Artificial Sequence: Synthetic oligonucleotide
  Antisense strand to SEQ ID NO: 1870077
uguacuccuucucacaagc

SEQ ID NO: 1870079 - RNA, 19 nt, Artificial Sequence
  Description of Artificial Sequence: Synthetic oligonucleotide
  Sense strand starting at position 1675 of SEQ ID NO: 1564304
gguauacuguauccagaga

SEQ ID NO: 1870080 - RNA, 19 nt, Artificial Sequence
  Description of Artificial Sequence: Synthetic oligonucleotide
  Antisense strand to SEQ ID NO: 1870079
ucucuggauacaguauacc

SEQ ID NO: 1870081 - RNA, 19 nt, Artificial Sequence
  Description of Artificial Sequence: Synthetic oligonucleotide
  Sense strand starting at position 1713 of SEQ ID NO: 1564304
cgauuuauggugcgaggaa

SEQ ID NO: 1870082 - RNA, 19 nt, Artificial Sequence
  Description of Artificial Sequence: Synthetic oligonucleotide
  Antisense strand to SEQ ID NO: 1870081
uuccucgcaccauaaaucg

SEQ ID NO: 1870083 - RNA, 19 nt, Artificial Sequence
  Description of Artificial Sequence: Synthetic oligonucleotide
  Sense strand starting at position 1714 of SEQ ID NO: 1564304
gauuuauggugcgaggaag

SEQ ID NO: 1870084 - RNA, 19 nt, Artificial Sequence
  Description of Artificial Sequence: Synthetic oligonucleotide
  Antisense strand to SEQ ID NO: 1870083
cuuccucgcaccauaaauc

SEQ ID NO: 1870085 - RNA, 19 nt, Artificial Sequence
  Description of Artificial Sequence: Synthetic oligonucleotide
  Sense strand starting at position 1784 of SEQ ID NO: 1564304
cacuuuccggagugagaaa

SEQ ID NO: 1870086 - RNA, 19 nt, Artificial Sequence
  Description of Artificial Sequence: Synthetic oligonucleotide
  Antisense strand to SEQ ID NO: 1870085
uuucucacuccggaaagug

SEQ ID NO: 1870087 - RNA, 19 nt, Artificial Sequence
  Description of Artificial Sequence: Synthetic oligonucleotide
  Sense strand starting at position 2158 of SEQ ID NO: 1564304
ucagaucaucaccgucaau

SEQ ID NO: 1870088 - RNA, 19 nt, Artificial Sequence
  Description of Artificial Sequence: Synthetic oligonucleotide
  Antisense strand to SEQ ID NO: 1870087
auugacggugaugaucuga

SEQ ID NO: 1870089 - RNA, 19 nt, Artificial Sequence
  Description of Artificial Sequence: Synthetic oligonucleotide
  Sense strand starting at position 2170 of SEQ ID NO: 1564304
cgucaaucgucaucgacca

SEQ ID NO: 1870090 - RNA, 19 nt, Artificial Sequence
  Description of Artificial Sequence: Synthetic oligonucleotide
  Antisense strand to SEQ ID NO: 1870089
uggucgaugacgauugacg

SEQ ID NO: 1870091 - RNA, 19 nt, Artificial Sequence
  Description of Artificial Sequence: Synthetic oligonucleotide
  Sense strand starting at position 2171 of SEQ ID NO: 1564304
gucaaucgucaucgaccaa

SEQ ID NO: 1870092 - RNA, 19 nt, Artificial Sequence
  Description of Artificial Sequence: Synthetic oligonucleotide
  Antisense strand to SEQ ID NO: 1870091
uuggucgaugacgauugac

SEQ ID NO: 1870093 - RNA, 19 nt, Artificial Sequence
  Description of Artificial Sequence: Synthetic oligonucleotide
  Sense strand starting at position 2988 of SEQ ID NO: 1564304
gaaucuaggcgucaggaau

SEQ ID NO: 1870094 - RNA, 19 nt, Artificial Sequence
  Description of Artificial Sequence: Synthetic oligonucleotide
  Antisense strand to SEQ ID NO: 1870093
auuccugacgccuagauuc

SEQ ID NO: 1870095 - RNA, 19 nt, Artificial Sequence
  Description of Artificial Sequence: Synthetic oligonucleotide
  Sense strand starting at position 2994 of SEQ ID NO: 1564304
aggcgucaggaaugauagu

SEQ ID NO: 1870096 - RNA, 19 nt, Artificial Sequence
  Description of Artificial Sequence: Synthetic oligonucleotide
  Antisense strand to SEQ ID NO: 1870095
acuaucauuccugacgccu

SEQ ID NO: 1870097 - RNA, 19 nt, Artificial Sequence
  Description of Artificial Sequence: Synthetic oligonucleotide
  Sense strand starting at position 2995 of SEQ ID NO: 1564304
ggcgucaggaaugauaguu

SEQ ID NO: 1870098 - RNA, 19 nt, Artificial Sequence
  Description of Artificial Sequence: Synthetic oligonucleotide
  Antisense strand to SEQ ID NO: 1870097
aacuaucauuccugacgcc

SEQ ID NO: 1870099 - RNA, 19 nt, Artificial Sequence
  Description of Artificial Sequence: Synthetic oligonucleotide
  Sense strand starting at position 3003 of SEQ ID NO: 1564304
gaaugauaguucguugauc

SEQ ID NO: 1870100 - RNA, 19 nt, Artificial Sequence
  Description of Artificial Sequence: Synthetic oligonucleotide
  Antisense strand to SEQ ID NO: 1870099
gaucaacgaacuaucauuc

SEQ ID NO: 1870101 - RNA, 19 nt, Artificial Sequence
  Description of Artificial Sequence: Synthetic oligonucleotide
  Sense strand starting at position 3005 of SEQ ID NO: 1564304
augauaguucguugaucca

SEQ ID NO: 1870102 - RNA, 19 nt, Artificial Sequence
  Description of Artificial Sequence: Synthetic oligonucleotide
  Antisense strand to SEQ ID NO: 1870101
uggaucaacgaacuaucau

SEQ ID NO: 1870103 - RNA, 19 nt, Artificial Sequence
  Description of Artificial Sequence: Synthetic oligonucleotide
  Sense strand starting at position 3008 of SEQ ID NO: 1564304
auaguucguugauccaaau

SEQ ID NO: 1870104 - RNA, 19 nt, Artificial Sequence
  Description of Artificial Sequence: Synthetic oligonucleotide
  Antisense strand to SEQ ID NO: 1870103
auuuggaucaacgaacuau

SEQ ID NO: 1870105 - RNA, 19 nt, Artificial Sequence
  Description of Artificial Sequence: Synthetic oligonucleotide
  Sense strand starting at position 3053 of SEQ ID NO: 1564304
gugccaaccucuccugauu

SEQ ID NO: 1870106 - RNA, 19 nt, Artificial Sequence
  Description of Artificial Sequence: Synthetic oligonucleotide
  Antisense strand to SEQ ID NO: 1870105
aaucaggagagguuggcac

SEQ ID NO: 1870107 - RNA, 19 nt, Artificial Sequence
  Description of Artificial Sequence: Synthetic oligonucleotide
  Sense strand starting at position 3062 of SEQ ID NO: 1564304
ucuccugauuacgugaaua

SEQ ID NO: 1870108 - RNA, 19 nt, Artificial Sequence
  Description of Artificial Sequence: Synthetic oligonucleotide
  Antisense strand to SEQ ID NO: 1870107
uauucacguaaucaggaga

SEQ ID NO: 1870109 - RNA, 19 nt, Artificial Sequence
  Description of Artificial Sequence: Synthetic oligonucleotide
  Sense strand starting at position 3064 of SEQ ID NO: 1564304
uccugauuacgugaauaau

SEQ ID NO: 1870110 - RNA, 19 nt, Artificial Sequence
  Description of Artificial Sequence: Synthetic oligonucleotide
  Antisense strand to SEQ ID NO: 1870109
auuauucacguaaucagga

SEQ ID NO: 1870111 - RNA, 19 nt, Artificial Sequence
  Description of Artificial Sequence: Synthetic oligonucleotide
  Sense strand starting at position 3123 of SEQ ID NO: 1564304
cguugcguucuggaugaga

SEQ ID NO: 1870112 - RNA, 19 nt, Artificial Sequence
  Description of Artificial Sequence: Synthetic oligonucleotide
  Antisense strand to SEQ ID NO: 1870111
ucucauccagaacgcaacg

SEQ ID NO: 1870113 - RNA, 19 nt, Artificial Sequence
  Description of Artificial Sequence: Synthetic oligonucleotide
  Sense strand starting at position 3125 of SEQ ID NO: 1564304
uugcguucuggaugagaga

SEQ ID NO: 1870114 - RNA, 19 nt, Artificial Sequence
  Description of Artificial Sequence: Synthetic oligonucleotide
  Antisense strand to SEQ ID NO: 1870113
ucucucauccagaacgcaa

SEQ ID NO: 1870115 - RNA, 19 nt, Artificial Sequence
  Description of Artificial Sequence: Synthetic oligonucleotide
  Sense strand starting at position 3225 of SEQ ID NO: 1564304
guguucugaccaugcguca

SEQ ID NO: 1870116 - RNA, 19 nt, Artificial Sequence
  Description of Artificial Sequence: Synthetic oligonucleotide
  Antisense strand to SEQ ID NO: 1870115
ugacgcauggucagaacac

SEQ ID NO: 1870117 - RNA, 19 nt, Artificial Sequence
  Description of Artificial Sequence: Synthetic oligonucleotide
  Sense strand starting at position 3239 of SEQ ID NO: 1564304
cgucacugacucuacagau

SEQ ID NO: 1870118 - RNA, 19 nt, Artificial Sequence
  Description of Artificial Sequence: Synthetic oligonucleotide
  Antisense strand to SEQ ID NO: 1870117
aucuguagagucagugacg

SEQ ID NO: 1870119 - RNA, 19 nt, Artificial Sequence
  Description of Artificial Sequence: Synthetic oligonucleotide
  Sense strand starting at position 3338 of SEQ ID NO: 1564304
gcaucagugaacuguguag

SEQ ID NO: 1870120 - RNA, 19 nt, Artificial Sequence
  Description of Artificial Sequence: Synthetic oligonucleotide
  Antisense strand to SEQ ID NO: 1870119
cuacacaguucacugaugc

SEQ ID NO: 1870121 - RNA, 19 nt, Artificial Sequence
  Description of Artificial Sequence: Synthetic oligonucleotide
  Sense strand starting at position 3340 of SEQ ID NO: 1564304
aucagugaacuguguagaa

SEQ ID NO: 1870122 - RNA, 19 nt, Artificial Sequence
  Description of Artificial Sequence: Synthetic oligonucleotide
  Antisense strand to SEQ ID NO: 1870121
uucuacacaguucacugau

SEQ ID NO: 1870123 - RNA, 19 nt, Artificial Sequence
  Description of Artificial Sequence: Synthetic oligonucleotide
  Sense strand starting at position 3443 of SEQ ID NO: 1564304
cagggaagcuuuguaggaa

SEQ ID NO: 1870124 - RNA, 19 nt, Artificial Sequence
  Description of Artificial Sequence: Synthetic oligonucleotide
  Antisense strand to SEQ ID NO: 1870123
uuccuacaaagcuucccug

SEQ ID NO: 1870125 - RNA, 19 nt, Artificial Sequence
  Description of Artificial Sequence: Synthetic oligonucleotide
  Sense strand starting at position 3468 of SEQ ID NO: 1564304
aguaaaucacagcauaguu

SEQ ID NO: 1870126 - RNA, 19 nt, Artificial Sequence
  Description of Artificial Sequence: Synthetic oligonucleotide
  Antisense strand to SEQ ID NO: 1870125
aacuaugcugugauuuacu

SEQ ID NO: 1870127 - RNA, 19 nt, Artificial Sequence
  Description of Artificial Sequence: Synthetic oligonucleotide
  Sense strand starting at position 3483 of SEQ ID NO: 1564304
aguuauccagacugcaauu

SEQ ID NO: 1870128 - RNA, 19 nt, Artificial Sequence
  Description of Artificial Sequence: Synthetic oligonucleotide
  Antisense strand to SEQ ID NO: 1870127
aauugcagucuggauaacu

SEQ ID NO: 1870129 - RNA, 19 nt, Artificial Sequence
  Description of Artificial Sequence: Synthetic oligonucleotide
  Sense strand starting at position 3540 of SEQ ID NO: 1564304
gggauuccgcgcugaacca

SEQ ID NO: 1870130 - RNA, 19 nt, Artificial Sequence
  Description of Artificial Sequence: Synthetic oligonucleotide
  Antisense strand to SEQ ID NO: 1870129
ugguucagcgcggaauccc

SEQ ID NO: 1870131 - RNA, 19 nt, Artificial Sequence
  Description of Artificial Sequence: Synthetic oligonucleotide
  Sense strand starting at position 24 of SEQ ID NO: 1564305
augggaauguucucaaguu

SEQ ID NO: 1870132 - RNA, 19 nt, Artificial Sequence
  Description of Artificial Sequence: Synthetic oligonucleotide
  Antisense strand to SEQ ID NO: 1870131
aacuugagaacauucccau

SEQ ID NO: 1870133 - RNA, 19 nt, Artificial Sequence
  Description of Artificial Sequence: Synthetic oligonucleotide
  Sense strand starting at position 32 of SEQ ID NO: 1564305
guucucaaguuugcaacau

SEQ ID NO: 1870134 - RNA, 19 nt, Artificial Sequence
  Description of Artificial Sequence: Synthetic oligonucleotide
  Antisense strand to SEQ ID NO: 1870133
auguugcaaacuugagaac

SEQ ID NO: 1870135 - RNA, 19 nt, Artificial Sequence
  Description of Artificial Sequence: Synthetic oligonucleotide
  Sense strand starting at position 120 of SEQ ID NO: 1564305
cguuaaucuugacccagaa

SEQ ID NO: 1870136 - RNA, 19 nt, Artificial Sequence
  Description of Artificial Sequence: Synthetic oligonucleotide
  Antisense strand to SEQ ID NO: 1870135
uucugggucaagauuaacg

SEQ ID NO: 1870137 - RNA, 19 nt, Artificial Sequence
  Description of Artificial Sequence: Synthetic oligonucleotide
  Sense strand starting at position 157 of SEQ ID NO: 1564305
agacauccuuaucagaaga

SEQ ID NO: 1870138 - RNA, 19 nt, Artificial Sequence
  Description of Artificial Sequence: Synthetic oligonucleotide
  Antisense strand to SEQ ID NO: 1870137
ucuucugauaaggaugucu

SEQ ID NO: 1870139 - RNA, 19 nt, Artificial Sequence
  Description of Artificial Sequence: Synthetic oligonucleotide
  Sense strand starting at position 299 of SEQ ID NO: 1564305
caaagucagcuuuagugga

SEQ ID NO: 1870140 - RNA, 19 nt, Artificial Sequence
  Description of Artificial Sequence: Synthetic oligonucleotide
  Antisense strand to SEQ ID NO: 1870139
uccacuaaagcugacuuug

SEQ ID NO: 1870141 - RNA, 19 nt, Artificial Sequence
  Description of Artificial Sequence: Synthetic oligonucleotide
  Sense strand starting at position 301 of SEQ ID NO: 1564305
aagucagcuuuaguggauu

SEQ ID NO: 1870142 - RNA, 19 nt, Artificial Sequence
  Description of Artificial Sequence: Synthetic oligonucleotide
  Antisense strand to SEQ ID NO: 1870141
aauccacuaaagcugacuu

SEQ ID NO: 1870143 - RNA, 19 nt, Artificial Sequence
  Description of Artificial Sequence: Synthetic oligonucleotide
  Sense strand starting at position 494 of SEQ ID NO: 1564305
ccuuuaaugcaagguaucu

SEQ ID NO: 1870144 - RNA, 19 nt, Artificial Sequence
  Description of Artificial Sequence: Synthetic oligonucleotide
  Antisense strand to SEQ ID NO: 1870143
agauaccuugcauuaaagg

SEQ ID NO: 1870145 - RNA, 19 nt, Artificial Sequence
  Description of Artificial Sequence: Synthetic oligonucleotide
  Sense strand starting at position 521 of SEQ ID NO: 1564305
agcugucgaguuuaaacaa

SEQ ID NO: 1870146 - RNA, 19 nt, Artificial Sequence
  Description of Artificial Sequence: Synthetic oligonucleotide
  Antisense strand to SEQ ID NO: 1870145
uuguuuaaacucgacagcu

SEQ ID NO: 1870147 - RNA, 19 nt, Artificial Sequence
  Description of Artificial Sequence: Synthetic oligonucleotide
  Sense strand starting at position 560 of SEQ ID NO: 1564305
aaggauagagaccgucuua

SEQ ID NO: 1870148 - RNA, 19 nt, Artificial Sequence
  Description of Artificial Sequence: Synthetic oligonucleotide
  Antisense strand to SEQ ID NO: 1870147
uaagacggucucuauccuu

SEQ ID NO: 1870149 - RNA, 19 nt, Artificial Sequence
  Description of Artificial Sequence: Synthetic oligonucleotide
  Sense strand starting at position 586 of SEQ ID NO: 1564305
cccgcugcucugucacaua

SEQ ID NO: 1870150 - RNA, 19 nt, Artificial Sequence
  Description of Artificial Sequence: Synthetic oligonucleotide
  Antisense strand to SEQ ID NO: 1870149
uaugugacagagcagcggg

SEQ ID NO: 1870151 - RNA, 19 nt, Artificial Sequence
  Description of Artificial Sequence: Synthetic oligonucleotide
  Sense strand starting at position 659 of SEQ ID NO: 1564305
agauaacgguaucuccaaa

SEQ ID NO: 1870152 - RNA, 19 nt, Artificial Sequence
  Description of Artificial Sequence: Synthetic oligonucleotide
  Antisense strand to SEQ ID NO: 1870151
uuuggagauaccguuaucu

SEQ ID NO: 1870153 - RNA, 19 nt, Artificial Sequence
  Description of Artificial Sequence: Synthetic oligonucleotide
  Sense strand starting at position 847 of SEQ ID NO: 1564305
gauacucacgugcaggauu

SEQ ID NO: 1870154 - RNA, 19 nt, Artificial Sequence
  Description of Artificial Sequence: Synthetic oligonucleotide
  Antisense strand to SEQ ID NO: 1870153
aauccugcacgugaguauc

SEQ ID NO: 1870155 - RNA, 19 nt, Artificial Sequence
  Description of Artificial Sequence: Synthetic oligonucleotide
  Sense strand starting at position 1038 of SEQ ID NO: 1564305
ucagaaucuccuugagccu

SEQ ID NO: 1870156 - RNA, 19 nt, Artificial Sequence
  Description of Artificial Sequence: Synthetic oligonucleotide
  Antisense strand to SEQ ID NO: 1870155
aggcucaaggagauucuga

SEQ ID NO: 1870157 - RNA, 19 nt, Artificial Sequence
  Description of Artificial Sequence: Synthetic oligonucleotide
  Sense strand starting at position 1223 of SEQ ID NO: 1564305
agugaucacucaguccuuu

SEQ ID NO: 1870158 - RNA, 19 nt, Artificial Sequence
  Description of Artificial Sequence: Synthetic oligonucleotide
  Antisense strand to SEQ ID NO: 1870157
aaaggacugagugaucacu

SEQ ID NO: 1870159 - RNA, 19 nt, Artificial Sequence
  Description of Artificial Sequence: Synthetic oligonucleotide
  Sense strand starting at position 1766 of SEQ ID NO: 1564305
cgagccacaccguagaaua

SEQ ID NO: 1870160 - RNA, 19 nt, Artificial Sequence
  Description of Artificial Sequence: Synthetic oligonucleotide
  Antisense strand to SEQ ID NO: 1870159
uauucuacgguguggcucg

SEQ ID NO: 1870161 - RNA, 19 nt, Artificial Sequence
  Description of Artificial Sequence: Synthetic oligonucleotide
  Sense strand starting at position 2012 of SEQ ID NO: 1564305
guacuccagccagggaauu

SEQ ID NO: 1870162 - RNA, 19 nt, Artificial Sequence
  Description of Artificial Sequence: Synthetic oligonucleotide
  Antisense strand to SEQ ID NO: 1870161
aauucccuggcuggaguac

SEQ ID NO: 1870163 - RNA, 19 nt, Artificial Sequence
  Description of Artificial Sequence: Synthetic oligonucleotide
  Sense strand starting at position 2284 of SEQ ID NO: 1564305
gcgacaucuccuguguguu

SEQ ID NO: 1870164 - RNA, 19 nt, Artificial Sequence
  Description of Artificial Sequence: Synthetic oligonucleotide
  Antisense strand to SEQ ID NO: 1870163
aacacacaggagaugucgc

SEQ ID NO: 1870165 - RNA, 19 nt, Artificial Sequence
  Description of Artificial Sequence: Synthetic oligonucleotide
  Sense strand starting at position 2542 of SEQ ID NO: 1564305
cggcuuugggauuagaagu

SEQ ID NO: 1870166 - RNA, 19 nt, Artificial Sequence
  Description of Artificial Sequence: Synthetic oligonucleotide
  Antisense strand to SEQ ID NO: 1870165
acuucuaaucccaaagccg

SEQ ID NO: 1870167 - RNA, 19 nt, Artificial Sequence
  Description of Artificial Sequence: Synthetic oligonucleotide
  Sense strand starting at position 2549 of SEQ ID NO: 1564305
gggauuagaagucgaagca

SEQ ID NO: 1870168 - RNA, 19 nt, Artificial Sequence
  Description of Artificial Sequence: Synthetic oligonucleotide
  Antisense strand to SEQ ID NO: 1870167
ugcuucgacuucuaauccc

SEQ ID NO: 1870169 - RNA, 19 nt, Artificial Sequence
  Description of Artificial Sequence: Synthetic oligonucleotide
  Sense strand starting at position 2770 of SEQ ID NO: 1564305
ugcgauguacccugggaau

SEQ ID NO: 1870170 - RNA, 19 nt, Artificial Sequence
  Description of Artificial Sequence: Synthetic oligonucleotide
  Antisense strand to SEQ ID NO: 1870169
auucccaggguacaucgca

SEQ ID NO: 1870171 - RNA, 19 nt, Artificial Sequence
  Description of Artificial Sequence: Synthetic oligonucleotide
  Sense strand starting at position 2772 of SEQ ID NO: 1564305
cgauguacccugggaauug

SEQ ID NO: 1870172 - RNA, 19 nt, Artificial Sequence
  Description of Artificial Sequence: Synthetic oligonucleotide
  Antisense strand to SEQ ID NO: 1870171
caauucccaggguacaucg

SEQ ID NO: 1870173 - RNA, 19 nt, Artificial Sequence
  Description of Artificial Sequence: Synthetic oligonucleotide
  Sense strand starting at position 3142 of SEQ ID NO: 1564305
gagcuuucgguacauguua

SEQ ID NO: 1870174 - RNA, 19 nt, Artificial Sequence
  Description of Artificial Sequence: Synthetic oligonucleotide
  Antisense strand to SEQ ID NO: 1870173
uaacauguaccgaaagcuc

SEQ ID NO: 1870175 - RNA, 19 nt, Artificial Sequence
  Description of Artificial Sequence: Synthetic oligonucleotide
  Sense strand starting at position 3211 of SEQ ID NO: 1564305
auagaauuguuuccgucau

SEQ ID NO: 1870176 - RNA, 19 nt, Artificial Sequence
  Description of Artificial Sequence: Synthetic oligonucleotide
  Antisense strand to SEQ ID NO: 1870175
augacggaaacaauucuau

SEQ ID NO: 1870177 - RNA, 19 nt, Artificial Sequence
  Description of Artificial Sequence: Synthetic oligonucleotide
  Sense strand starting at position 3236 of SEQ ID NO: 1564305
augaauaaucccggcccga

SEQ ID NO: 1870178 - RNA, 19 nt, Artificial Sequence
  Description of Artificial Sequence: Synthetic oligonucleotide
  Antisense strand to SEQ ID NO: 1870177
ucgggccgggauuauucau

SEQ ID NO: 1870179 - RNA, 19 nt, Artificial Sequence
  Description of Artificial Sequence: Synthetic oligonucleotide
  Sense strand starting at position 3288 of SEQ ID NO: 1564305
ggacaugaauugcucaacu

SEQ ID NO: 1870180 - RNA, 19 nt, Artificial Sequence
  Description of Artificial Sequence: Synthetic oligonucleotide
  Antisense strand to SEQ ID NO: 1870179
aguugagcaauucaugucc

SEQ ID NO: 1870181 - RNA, 19 nt, Artificial Sequence
  Description of Artificial Sequence: Synthetic oligonucleotide
  Sense strand starting at position 3370 of SEQ ID NO: 1564305
ucaaucucccgggagucau

SEQ ID NO: 1870182 - RNA, 19 nt, Artificial Sequence
  Description of Artificial Sequence: Synthetic oligonucleotide
  Antisense strand to SEQ ID NO: 1870181
augacucccgggagauuga

SEQ ID NO: 1870183 - RNA, 19 nt, Artificial Sequence
  Description of Artificial Sequence: Synthetic oligonucleotide
  Sense strand starting at position 3441 of SEQ ID NO: 1564305
ggaggcugugugggaaaua

SEQ ID NO: 1870184 - RNA, 19 nt, Artificial Sequence
  Description of Artificial Sequence: Synthetic oligonucleotide
  Antisense strand to SEQ ID NO: 1870183
uauuucccacacagccucc

SEQ ID NO: 1870185 - RNA, 19 nt, Artificial Sequence
  Description of Artificial Sequence: Synthetic oligonucleotide
  Sense strand starting at position 3446 of SEQ ID NO: 1564305
cugugugggaaauaucuga

SEQ ID NO: 1870186 - RNA, 19 nt, Artificial Sequence
  Description of Artificial Sequence: Synthetic oligonucleotide
  Antisense strand to SEQ ID NO: 1870185
ucagauauuucccacacag

SEQ ID NO: 1870187 - RNA, 19 nt, Artificial Sequence
  Description of Artificial Sequence: Synthetic oligonucleotide
  Sense strand starting at position 3451 of SEQ ID NO: 1564305
ugggaaauaucugacuaau

SEQ ID NO: 1870188 - RNA, 19 nt, Artificial Sequence
  Description of Artificial Sequence: Synthetic oligonucleotide
  Antisense strand to SEQ ID NO: 1870187
auuagucagauauuuccca

SEQ ID NO: 1870189 - RNA, 19 nt, Artificial Sequence
  Description of Artificial Sequence: Synthetic oligonucleotide
  Sense strand starting at position 3453 of SEQ ID NO: 1564305
ggaaauaucugacuaaugc

SEQ ID NO: 1870190 - RNA, 19 nt, Artificial Sequence
  Description of Artificial Sequence: Synthetic oligonucleotide
  Antisense strand to SEQ ID NO: 1870189
gcauuagucagauauuucc

SEQ ID NO: 1870191 - RNA, 19 nt, Artificial Sequence
  Description of Artificial Sequence: Synthetic oligonucleotide
  Sense strand starting at position 3538 of SEQ ID NO: 1564305
ugcuguaggccucagaaau

SEQ ID NO: 1870192 - RNA, 19 nt, Artificial Sequence
  Description of Artificial Sequence: Synthetic oligonucleotide
  Antisense strand to SEQ ID NO: 1870191
auuucugaggccuacagca

SEQ ID NO: 1870193 - RNA, 19 nt, Artificial Sequence
  Description of Artificial Sequence: Synthetic oligonucleotide
  Sense strand starting at position 3619 of SEQ ID NO: 1564305
ccaaauaaaguguaauggu

SEQ ID NO: 1870194 - RNA, 19 nt, Artificial Sequence
  Description of Artificial Sequence: Synthetic oligonucleotide
  Antisense strand to SEQ ID NO: 1870193
accauuacacuuuauuugg

SEQ ID NO: 1870195 - RNA, 19 nt, Artificial Sequence
  Description of Artificial Sequence: Synthetic oligonucleotide
  Sense strand starting at position 3627 of SEQ ID NO: 1564305
aguguaaugguuuaucuuu

SEQ ID NO: 1870196 - RNA, 19 nt, Artificial Sequence
  Description of Artificial Sequence: Synthetic oligonucleotide
  Antisense strand to SEQ ID NO: 1870195
aaagauaaaccauuacacu

SEQ ID NO: 1870197 - RNA, 19 nt, Artificial Sequence
  Description of Artificial Sequence: Synthetic oligonucleotide
  Sense strand starting at position 3629 of SEQ ID NO: 1564305
uguaaugguuuaucuuuga

SEQ ID NO: 1870198 - RNA, 19 nt, Artificial Sequence
  Description of Artificial Sequence: Synthetic oligonucleotide
  Antisense strand to SEQ ID NO: 1870197
ucaaagauaaaccauuaca

SEQ ID NO: 1870199 - RNA, 19 nt, Artificial Sequence
  Description of Artificial Sequence: Synthetic oligonucleotide
  Sense strand starting at position 3633 of SEQ ID NO: 1564305
augguuuaucuuugacuuu

SEQ ID NO: 1870200 - RNA, 19 nt, Artificial Sequence
  Description of Artificial Sequence: Synthetic oligonucleotide
  Antisense strand to SEQ ID NO: 1870199
aaagucaaagauaaaccau

SEQ ID NO: 1870201 - RNA, 19 nt, Artificial Sequence
  Description of Artificial Sequence: Synthetic oligonucleotide
  Sense strand starting at position 3636 of SEQ ID NO: 1564305
guuuaucuuugacuuugua

SEQ ID NO: 1870202 - RNA, 19 nt, Artificial Sequence
  Description of Artificial Sequence: Synthetic oligonucleotide
  Antisense strand to SEQ ID NO: 1870201
uacaaagucaaagauaaac

SEQ ID NO: 1870203 - RNA, 19 nt, Artificial Sequence
  Description of Artificial Sequence: Synthetic oligonucleotide
  Sense strand starting at position 3726 of SEQ ID NO: 1564305
uccauauugccagaauaug

SEQ ID NO: 1870204 - RNA, 19 nt, Artificial Sequence
  Description of Artificial Sequence: Synthetic oligonucleotide
  Antisense strand to SEQ ID NO: 1870203
cauauucuggcaauaugga

SEQ ID NO: 1870205 - RNA, 19 nt, Artificial Sequence
  Description of Artificial Sequence: Synthetic oligonucleotide
  Sense strand starting at position 3755 of SEQ ID NO: 1564305
ggaccaugcccuuaauaca

SEQ ID NO: 1870206 - RNA, 19 nt, Artificial Sequence
  Description of Artificial Sequence: Synthetic oligonucleotide
  Antisense strand to SEQ ID NO: 1870205
uguauuaagggcauggucc

SEQ ID NO: 1870207 - RNA, 19 nt, Artificial Sequence
  Description of Artificial Sequence: Synthetic oligonucleotide
  Sense strand starting at position 3892 of SEQ ID NO: 1564305
aggugugguuucuccaaau

SEQ ID NO: 1870208 - RNA, 19 nt, Artificial Sequence
  Description of Artificial Sequence: Synthetic oligonucleotide
  Antisense strand to SEQ ID NO: 1870207
auuuggagaaaccacaccu

SEQ ID NO: 1870209 - RNA, 19 nt, Artificial Sequence
  Description of Artificial Sequence: Synthetic oligonucleotide
  Sense strand starting at position 3926 of SEQ ID NO: 1564305
ccuuaagagucucugaagu

SEQ ID NO: 1870210 - RNA, 19 nt, Artificial Sequence
  Description of Artificial Sequence: Synthetic oligonucleotide
  Antisense strand to SEQ ID NO: 1870209
acuucagagacucuuaagg

SEQ ID NO: 1870211 - RNA, 19 nt, Artificial Sequence
  Description of Artificial Sequence: Synthetic oligonucleotide
  Sense strand starting at position 1 of SEQ ID NO: 1564306
ggaaaugugucugaaauac

SEQ ID NO: 1870212 - RNA, 19 nt, Artificial Sequence
  Description of Artificial Sequence: Synthetic oligonucleotide
  Antisense strand to SEQ ID NO: 1870211
guauuucagacacauuucc

SEQ ID NO: 1870213 - RNA, 19 nt, Artificial Sequence
  Description of Artificial Sequence: Synthetic oligonucleotide
  Sense strand starting at position 43 of SEQ ID NO: 1564306
ugauuucuguaugguccau

SEQ ID NO: 1870214 - RNA, 19 nt, Artificial Sequence
  Description of Artificial Sequence: Synthetic oligonucleotide
  Antisense strand to SEQ ID NO: 1870213
auggaccauacagaaauca

SEQ ID NO: 1870215 - RNA, 19 nt, Artificial Sequence
  Description of Artificial Sequence: Synthetic oligonucleotide
  Sense strand starting at position 64 of SEQ ID NO: 1564306
acguuugucacagguuaca

SEQ ID NO: 1870216 - RNA, 19 nt, Artificial Sequence
  Description of Artificial Sequence: Synthetic oligonucleotide
  Antisense strand to SEQ ID NO: 1870215
uguaaccugugacaaacgu

SEQ ID NO: 1870217 - RNA, 19 nt, Artificial Sequence
  Description of Artificial Sequence: Synthetic oligonucleotide
  Sense strand starting at position 154 of SEQ ID NO: 1564306
uuauauuacccuuggaaag

SEQ ID NO: 1870218 - RNA, 19 nt, Artificial Sequence
  Description of Artificial Sequence: Synthetic oligonucleotide
  Antisense strand to SEQ ID NO: 1870217
cuuuccaaggguaauauaa

SEQ ID NO: 1870219 - RNA, 19 nt, Artificial Sequence
  Description of Artificial Sequence: Synthetic oligonucleotide
  Sense strand starting at position 168 of SEQ ID NO: 1564306
gaaagugagccuuagccuu

SEQ ID NO: 1870220 - RNA, 19 nt, Artificial Sequence
  Description of Artificial Sequence: Synthetic oligonucleotide
  Antisense strand to SEQ ID NO: 1870219
aaggcuaaggcucacuuuc

SEQ ID NO: 1870221 - RNA, 19 nt, Artificial Sequence
  Description of Artificial Sequence: Synthetic oligonucleotide
  Sense strand starting at position 297 of SEQ ID NO: 1564306
ccauccaaggguugaucaa

SEQ ID NO: 1870222 - RNA, 19 nt, Artificial Sequence
  Description of Artificial Sequence: Synthetic oligonucleotide
  Antisense strand to SEQ ID NO: 1870221
uugaucaacccuuggaugg

SEQ ID NO: 1870223 - RNA, 19 nt, Artificial Sequence
  Description of Artificial Sequence: Synthetic oligonucleotide
  Sense strand starting at position 324 of SEQ ID NO: 1564306
ggcucuagccuuugguuaa

SEQ ID NO: 1870224 - RNA, 19 nt, Artificial Sequence
  Description of Artificial Sequence: Synthetic oligonucleotide
  Antisense strand to SEQ ID NO: 1870223
uuaaccaaaggcuagagcc

SEQ ID NO: 1870225 - RNA, 19 nt, Artificial Sequence
  Description of Artificial Sequence: Synthetic oligonucleotide
  Sense strand starting at position 403 of SEQ ID NO: 1564306
uuguacuaggauugauaua

SEQ ID NO: 1870226 - RNA, 19 nt, Artificial Sequence
  Description of Artificial Sequence: Synthetic oligonucleotide
  Antisense strand to SEQ ID NO: 1870225
uauaucaauccuaguacaa

SEQ ID NO: 1870227 - RNA, 19 nt, Artificial Sequence
  Description of Artificial Sequence: Synthetic oligonucleotide
  Sense strand starting at position 410 of SEQ ID NO: 1564306
aggauugauauagguuucu

SEQ ID NO: 1870228 - RNA, 19 nt, Artificial Sequence
  Description of Artificial Sequence: Synthetic oligonucleotide
  Antisense strand to SEQ ID NO: 1870227
agaaaccuauaucaauccu

SEQ ID NO: 1870229 - RNA, 19 nt, Artificial Sequence
  Description of Artificial Sequence: Synthetic oligonucleotide
  Sense strand starting at position 419 of SEQ ID NO: 1564306
auagguuucugagcccaga

SEQ ID NO: 1870230 - RNA, 19 nt, Artificial Sequence
  Description of Artificial Sequence: Synthetic oligonucleotide
  Antisense strand to SEQ ID NO: 1870229
ucugggcucagaaaccuau

SEQ ID NO: 1870231 - RNA, 19 nt, Artificial Sequence
  Description of Artificial Sequence: Synthetic oligonucleotide
  Sense strand starting at position 432 of SEQ ID NO: 1564306
cccagagguuugcaauguu

SEQ ID NO: 1870232 - RNA, 19 nt, Artificial Sequence
  Description of Artificial Sequence: Synthetic oligonucleotide
  Antisense strand to SEQ ID NO: 1870231
aacauugcaaaccucuggg

SEQ ID NO: 1870233 - RNA, 19 nt, Artificial Sequence
  Description of Artificial Sequence: Synthetic oligonucleotide
  Sense strand starting at position 435 of SEQ ID NO: 1564306
agagguuugcaauguucag

SEQ ID NO: 1870234 - RNA, 19 nt, Artificial Sequence
  Description of Artificial Sequence: Synthetic oligonucleotide
  Antisense strand to SEQ ID NO: 1870233
cugaacauugcaaaccucu

SEQ ID NO: 1870235 - RNA, 19 nt, Artificial Sequence
  Description of Artificial Sequence: Synthetic oligonucleotide
  Sense strand starting at position 451 of SEQ ID NO: 1564306
cagcgagaauguuagggaa

SEQ ID NO: 1870236 - RNA, 19 nt, Artificial Sequence
  Description of Artificial Sequence: Synthetic oligonucleotide
  Antisense strand to SEQ ID NO: 1870235
uucccuaacauucucgcug

SEQ ID NO: 1870237 - RNA, 19 nt, Artificial Sequence
  Description of Artificial Sequence: Synthetic oligonucleotide
  Sense strand starting at position 453 of SEQ ID NO: 1564306
gcgagaauguuagggaauc

SEQ ID NO: 1870238 - RNA, 19 nt, Artificial Sequence
  Description of Artificial Sequence: Synthetic oligonucleotide
  Antisense strand to SEQ ID NO: 1870237
gauucccuaacauucucgc

SEQ ID NO: 1870239 - RNA, 19 nt, Artificial Sequence
  Description of Artificial Sequence: Synthetic oligonucleotide
  Sense strand starting at position 454 of SEQ ID NO: 1564306
cgagaauguuagggaauca

SEQ ID NO: 1870240 - RNA, 19 nt, Artificial Sequence
  Description of Artificial Sequence: Synthetic oligonucleotide
  Antisense strand to SEQ ID NO: 1870239
ugauucccuaacauucucg

SEQ ID NO: 1870241 - RNA, 19 nt, Artificial Sequence
  Description of Artificial Sequence: Synthetic oligonucleotide
  Sense strand starting at position 662 of SEQ ID NO: 1564306
cugggaagccugugguguu

SEQ ID NO: 1870242 - RNA, 19 nt, Artificial Sequence
  Description of Artificial Sequence: Synthetic oligonucleotide
  Antisense strand to SEQ ID NO: 1870241
aacaccacaggcuucccag

SEQ ID NO: 1870243 - RNA, 19 nt, Artificial Sequence
  Description of Artificial Sequence: Synthetic oligonucleotide
  Sense strand starting at position 735 of SEQ ID NO: 1564306
ucagauaaccuguggaaac

SEQ ID NO: 1870244 - RNA, 19 nt, Artificial Sequence
  Description of Artificial Sequence: Synthetic oligonucleotide
  Antisense strand to SEQ ID NO: 1870243
guuuccacagguuaucuga

SEQ ID NO: 1870245 - RNA, 19 nt, Artificial Sequence
  Description of Artificial Sequence: Synthetic oligonucleotide
  Sense strand starting at position 736 of SEQ ID NO: 1564306
cagauaaccuguggaaaca

SEQ ID NO: 1870246 - RNA, 19 nt, Artificial Sequence
  Description of Artificial Sequence: Synthetic oligonucleotide
  Antisense strand to SEQ ID NO: 1870245
uguuuccacagguuaucug

SEQ ID NO: 1870247 - RNA, 19 nt, Artificial Sequence
  Description of Artificial Sequence: Synthetic oligonucleotide
  Sense strand starting at position 815 of SEQ ID NO: 1564306
aaucgaaacccguagacaa

SEQ ID NO: 1870248 - RNA, 19 nt, Artificial Sequence
  Description of Artificial Sequence: Synthetic oligonucleotide
  Antisense strand to SEQ ID NO: 1870247
uugucuacggguuucgauu

SEQ ID NO: 1870249 - RNA, 19 nt, Artificial Sequence
  Description of Artificial Sequence: Synthetic oligonucleotide
  Sense strand starting at position 848 of SEQ ID NO: 1564306
aaggaagagcuucguuaca

SEQ ID NO: 1870250 - RNA, 19 nt, Artificial Sequence
  Description of Artificial Sequence: Synthetic oligonucleotide
  Antisense strand to SEQ ID NO: 1870249
uguaacgaagcucuuccuu

SEQ ID NO: 1870251 - RNA, 19 nt, Artificial Sequence
  Description of Artificial Sequence: Synthetic oligonucleotide
  Sense strand starting at position 850 of SEQ ID NO: 1564306
ggaagagcuucguuacaug

SEQ ID NO: 1870252 - RNA, 19 nt, Artificial Sequence
  Description of Artificial Sequence: Synthetic oligonucleotide
  Antisense strand to SEQ ID NO: 1870251
cauguaacgaagcucuucc

SEQ ID NO: 1870253 - RNA, 19 nt, Artificial Sequence
  Description of Artificial Sequence: Synthetic oligonucleotide
  Sense strand starting at position 853 of SEQ ID NO: 1564306
agagcuucguuacauggaa

SEQ ID NO: 1870254 - RNA, 19 nt, Artificial Sequence
  Description of Artificial Sequence: Synthetic oligonucleotide
  Antisense strand to SEQ ID NO: 1870253
uuccauguaacgaagcucu

SEQ ID NO: 1870255 - RNA, 19 nt, Artificial Sequence
  Description of Artificial Sequence: Synthetic oligonucleotide
  Sense strand starting at position 879 of SEQ ID NO: 1564306
aaugaaaucugauagugcu

SEQ ID NO: 1870256 - RNA, 19 nt, Artificial Sequence
  Description of Artificial Sequence: Synthetic oligonucleotide
  Antisense strand to SEQ ID NO: 1870255
agcacuaucagauuucauu

SEQ ID NO: 1870257 - RNA, 19 nt, Artificial Sequence
  Description of Artificial Sequence: Synthetic oligonucleotide
  Sense strand starting at position 935 of SEQ ID NO: 1564306
acgugaauaagacagcuuu

SEQ ID NO: 1870258 - RNA, 19 nt, Artificial Sequence
  Description of Artificial Sequence: Synthetic oligonucleotide
  Antisense strand to SEQ ID NO: 1870257
aaagcugucuuauucacgu

SEQ ID NO: 1870259 - RNA, 19 nt, Artificial Sequence
  Description of Artificial Sequence: Synthetic oligonucleotide
  Sense strand starting at position 1028 of SEQ ID NO: 1564306
ugggacuaaucauauugca

SEQ ID NO: 1870260 - RNA, 19 nt, Artificial Sequence
  Description of Artificial Sequence: Synthetic oligonucleotide
  Antisense strand to SEQ ID NO: 1870259
ugcaauaugauuaguccca

SEQ ID NO: 1870261 - RNA, 19 nt, Artificial Sequence
  Description of Artificial Sequence: Synthetic oligonucleotide
  Sense strand starting at position 1042 of SEQ ID NO: 1564306
uugcauucuggcugcagua

SEQ ID NO: 1870262 - RNA, 19 nt, Artificial Sequence
  Description of Artificial Sequence: Synthetic oligonucleotide
  Antisense strand to SEQ ID NO: 1870261
uacugcagccagaaugcaa

SEQ ID NO: 1870263 - RNA, 19 nt, Artificial Sequence
  Description of Artificial Sequence: Synthetic oligonucleotide
  Sense strand starting at position 1113 of SEQ ID NO: 1564306
caacuagaguuugggaaca

SEQ ID NO: 1870264 - RNA, 19 nt, Artificial Sequence
  Description of Artificial Sequence: Synthetic oligonucleotide
  Antisense strand to SEQ ID NO: 1870263
uguucccaaacucuaguug

SEQ ID NO: 1870265 - RNA, 19 nt, Artificial Sequence
  Description of Artificial Sequence: Synthetic oligonucleotide
  Sense strand starting at position 1115 of SEQ ID NO: 1564306
acuagaguuugggaacaga

SEQ ID NO: 1870266 - RNA, 19 nt, Artificial Sequence
  Description of Artificial Sequence: Synthetic oligonucleotide
  Antisense strand to SEQ ID NO: 1870265
ucuguucccaaacucuagu

SEQ ID NO: 1870267 - RNA, 19 nt, Artificial Sequence
  Description of Artificial Sequence: Synthetic oligonucleotide
  Sense strand starting at position 1248 of SEQ ID NO: 1564306
gcacguuugugauccaagg

SEQ ID NO: 1870268 - RNA, 19 nt, Artificial Sequence
  Description of Artificial Sequence: Synthetic oligonucleotide
  Antisense strand to SEQ ID NO: 1870267
ccuuggaucacaaacgugc

SEQ ID NO: 1870269 - RNA, 19 nt, Artificial Sequence
  Description of Artificial Sequence: Synthetic oligonucleotide
  Sense strand starting at position 1546 of SEQ ID NO: 1564306
accuccauucuuggucaga

SEQ ID NO: 1870270 - RNA, 19 nt, Artificial Sequence
  Description of Artificial Sequence: Synthetic oligonucleotide
  Antisense strand to SEQ ID NO: 1870269
ucugaccaagaauggaggu

SEQ ID NO: 1870271 - RNA, 19 nt, Artificial Sequence
  Description of Artificial Sequence: Synthetic oligonucleotide
  Sense strand starting at position 3015 of SEQ ID NO: 1564306
gcaaacaauucccgagaga

SEQ ID NO: 1870272 - RNA, 19 nt, Artificial Sequence
  Description of Artificial Sequence: Synthetic oligonucleotide
  Antisense strand to SEQ ID NO: 1870271
ucucucgggaauuguuugc

SEQ ID NO: 1870273 - RNA, 19 nt, Artificial Sequence
  Description of Artificial Sequence: Synthetic oligonucleotide
  Sense strand starting at position 3325 of SEQ ID NO: 1564306
gcgggaguuccuugaccuu

SEQ ID NO: 1870274 - RNA, 19 nt, Artificial Sequence
  Description of Artificial Sequence: Synthetic oligonucleotide
  Antisense strand to SEQ ID NO: 1870273
aaggucaaggaacucccgc

SEQ ID NO: 1870275 - RNA, 19 nt, Artificial Sequence
  Description of Artificial Sequence: Synthetic oligonucleotide
  Sense strand starting at position 3506 of SEQ ID NO: 1564306
ggcugugucuugcucuaaa

SEQ ID NO: 1870276 - RNA, 19 nt, Artificial Sequence
  Description of Artificial Sequence: Synthetic oligonucleotide
  Antisense strand to SEQ ID NO: 1870275
uuuagagcaagacacagcc

SEQ ID NO: 1870277 - RNA, 19 nt, Artificial Sequence
  Description of Artificial Sequence: Synthetic oligonucleotide
  Sense strand starting at position 3509 of SEQ ID NO: 1564306
ugugucuugcucuaaaucu

SEQ ID NO: 1870278 - RNA, 19 nt, Artificial Sequence
  Description of Artificial Sequence: Synthetic oligonucleotide
  Antisense strand to SEQ ID NO: 1870277
agauuuagagcaagacaca

SEQ ID NO: 1870279 - RNA, 19 nt, Artificial Sequence
  Description of Artificial Sequence: Synthetic oligonucleotide
  Sense strand starting at position 3563 of SEQ ID NO: 1564306
cacguuaugccaggaaaug

SEQ ID NO: 1870280 - RNA, 19 nt, Artificial Sequence
  Description of Artificial Sequence: Synthetic oligonucleotide
  Antisense strand to SEQ ID NO: 1870279
cauuuccuggcauaacgug

SEQ ID NO: 1870281 - RNA, 19 nt, Artificial Sequence
  Description of Artificial Sequence: Synthetic oligonucleotide
  Sense strand starting at position 3583 of SEQ ID NO: 1564306
aggacaguaucagggagau

SEQ ID NO: 1870282 - RNA, 19 nt, Artificial Sequence
  Description of Artificial Sequence: Synthetic oligonucleotide
  Antisense strand to SEQ ID NO: 1870281
aucucccugauacuguccu

SEQ ID NO: 1870283 - RNA, 19 nt, Artificial Sequence
  Description of Artificial Sequence: Synthetic oligonucleotide
  Sense strand starting at position 3631 of SEQ ID NO: 1564306
ucugguagagccugauuga

SEQ ID NO: 1870284 - RNA, 19 nt, Artificial Sequence
  Description of Artificial Sequence: Synthetic oligonucleotide
  Antisense strand to SEQ ID NO: 1870283
ucaaucaggcucuaccaga

SEQ ID NO: 1870285 - RNA, 19 nt, Artificial Sequence
  Description of Artificial Sequence: Synthetic oligonucleotide
  Sense strand starting at position 3632 of SEQ ID NO: 1564306
cugguagagccugauugaa

SEQ ID NO: 1870286 - RNA, 19 nt, Artificial Sequence
  Description of Artificial Sequence: Synthetic oligonucleotide
  Antisense strand to SEQ ID NO: 1870285
uucaaucaggcucuaccag

SEQ ID NO: 1870287 - RNA, 19 nt, Artificial Sequence
  Description of Artificial Sequence: Synthetic oligonucleotide
  Sense strand starting at position 3634 of SEQ ID NO: 1564306
gguagagccugauugaaau

SEQ ID NO: 1870288 - RNA, 19 nt, Artificial Sequence
  Description of Artificial Sequence: Synthetic oligonucleotide
  Antisense strand to SEQ ID NO: 1870287
auuucaaucaggcucuacc

SEQ ID NO: 1870289 - RNA, 19 nt, Artificial Sequence
  Description of Artificial Sequence: Synthetic oligonucleotide
  Sense strand starting at position 3689 of SEQ ID NO: 1564306
cugaaaugcucacaagagu

SEQ ID NO: 1870290 - RNA, 19 nt, Artificial Sequence
  Description of Artificial Sequence: Synthetic oligonucleotide
  Antisense strand to SEQ ID NO: 1870289
acucuugugagcauuucag

SEQ ID NO: 1870291 - RNA, 19 nt, Artificial Sequence
  Description of Artificial Sequence: Synthetic oligonucleotide
  Sense strand starting at position 119 of SEQ ID NO: 1564307
guucucuuugcuccuguua

SEQ ID NO: 1870292 - RNA, 19 nt, Artificial Sequence
  Description of Artificial Sequence: Synthetic oligonucleotide
  Antisense strand to SEQ ID NO: 1870291
uaacaggagcaaagagaac

SEQ ID NO: 1870293 - RNA, 19 nt, Artificial Sequence
  Description of Artificial Sequence: Synthetic oligonucleotide
  Sense strand starting at position 411 of SEQ ID NO: 1564307
agguaugucuuauuauaag

SEQ ID NO: 1870294 - RNA, 19 nt, Artificial Sequence
  Description of Artificial Sequence: Synthetic oligonucleotide
  Antisense strand to SEQ ID NO: 1870293
cuuauaauaagacauaccu

SEQ ID NO: 1870295 - RNA, 19 nt, Artificial Sequence
  Description of Artificial Sequence: Synthetic oligonucleotide
  Sense strand starting at position 423 of SEQ ID NO: 1564307
uuauaaguaugucuagaga

SEQ ID NO: 1870296 - RNA, 19 nt, Artificial Sequence
  Description of Artificial Sequence: Synthetic oligonucleotide
  Antisense strand to SEQ ID NO: 1870295
ucucuagacauacuuauaa

SEQ ID NO: 1870297 - RNA, 19 nt, Artificial Sequence
  Description of Artificial Sequence: Synthetic oligonucleotide
  Sense strand starting at position 515 of SEQ ID NO: 1564307
agauauccucagggacuuu

SEQ ID NO: 1870298 - RNA, 19 nt, Artificial Sequence
  Description of Artificial Sequence: Synthetic oligonucleotide
  Antisense strand to SEQ ID NO: 1870297
aaagucccugaggauaucu

SEQ ID NO: 1870299 - RNA, 19 nt, Artificial Sequence
  Description of Artificial Sequence: Synthetic oligonucleotide
  Sense strand starting at position 544 of SEQ ID NO: 1564307
uuaaucaauguugggauga

SEQ ID NO: 1870300 - RNA, 19 nt, Artificial Sequence
  Description of Artificial Sequence: Synthetic oligonucleotide
  Antisense strand to SEQ ID NO: 1870299
ucaucccaacauugauuaa

SEQ ID NO: 1870301 - RNA, 19 nt, Artificial Sequence
  Description of Artificial Sequence: Synthetic oligonucleotide
  Sense strand starting at position 558 of SEQ ID NO: 1564307
gaugaauguguguaaucug

SEQ ID NO: 1870302 - RNA, 19 nt, Artificial Sequence
  Description of Artificial Sequence: Synthetic oligonucleotide
  Antisense strand to SEQ ID NO: 1870301
cagauuacacacauucauc

SEQ ID NO: 1870303 - RNA, 19 nt, Artificial Sequence
  Description of Artificial Sequence: Synthetic oligonucleotide
  Sense strand starting at position 572 of SEQ ID NO: 1564307
aucuguucugaauaagcau

SEQ ID NO: 1870304 - RNA, 19 nt, Artificial Sequence
  Description of Artificial Sequence: Synthetic oligonucleotide
  Antisense strand to SEQ ID NO: 1870303
augcuuauucagaacagau

SEQ ID NO: 1870305 - RNA, 19 nt, Artificial Sequence
  Description of Artificial Sequence: Synthetic oligonucleotide
  Sense strand starting at position 711 of SEQ ID NO: 1564307
gggagaccauuaucagugu

SEQ ID NO: 1870306 - RNA, 19 nt, Artificial Sequence
  Description of Artificial Sequence: Synthetic oligonucleotide
  Antisense strand to SEQ ID NO: 1870305
acacugauaauggucuccc

SEQ ID NO: 1870307 - RNA, 19 nt, Artificial Sequence
  Description of Artificial Sequence: Synthetic oligonucleotide
  Sense strand starting at position 714 of SEQ ID NO: 1564307
agaccauuaucaguguauc

SEQ ID NO: 1870308 - RNA, 19 nt, Artificial Sequence
  Description of Artificial Sequence: Synthetic oligonucleotide
  Antisense strand to SEQ ID NO: 1870307
gauacacugauaauggucu

SEQ ID NO: 1870309 - RNA, 19 nt, Artificial Sequence
  Description of Artificial Sequence: Synthetic oligonucleotide
  Sense strand starting at position 717 of SEQ ID NO: 1564307
ccauuaucaguguauccau

SEQ ID NO: 1870310 - RNA, 19 nt, Artificial Sequence
  Description of Artificial Sequence: Synthetic oligonucleotide
  Antisense strand to SEQ ID NO: 1870309
auggauacacugauaaugg

SEQ ID NO: 1870311 - RNA, 19 nt, Artificial Sequence
  Description of Artificial Sequence: Synthetic oligonucleotide
  Sense strand starting at position 901 of SEQ ID NO: 1564307
gaauacugcgauugggaaa

SEQ ID NO: 1870312 - RNA, 19 nt, Artificial Sequence
  Description of Artificial Sequence: Synthetic oligonucleotide
  Antisense strand to SEQ ID NO: 1870311
uuucccaaucgcaguauuc

SEQ ID NO: 1870313 - RNA, 19 nt, Artificial Sequence
  Description of Artificial Sequence: Synthetic oligonucleotide
  Sense strand starting at position 2614 of SEQ ID NO: 1564307
agucauagucagcacgaaa

SEQ ID NO: 1870314 - RNA, 19 nt, Artificial Sequence
  Description of Artificial Sequence: Synthetic oligonucleotide
  Antisense strand to SEQ ID NO: 1870313
uuucgugcugacuaugacu

SEQ ID NO: 1870315 - RNA, 19 nt, Artificial Sequence
  Description of Artificial Sequence: Synthetic oligonucleotide
  Sense strand starting at position 2617 of SEQ ID NO: 1564307
cauagucagcacgaaagaa

SEQ ID NO: 1870316 - RNA, 19 nt, Artificial Sequence
  Description of Artificial Sequence: Synthetic oligonucleotide
  Antisense strand to SEQ ID NO: 1870315
uucuuucgugcugacuaug

SEQ ID NO: 1870317 - RNA, 19 nt, Artificial Sequence
  Description of Artificial Sequence: Synthetic oligonucleotide
  Sense strand starting at position 3305 of SEQ ID NO: 1564307
ugaauaaauucuucuguag

SEQ ID NO: 1870318 - RNA, 19 nt, Artificial Sequence
  Description of Artificial Sequence: Synthetic oligonucleotide
  Antisense strand to SEQ ID NO: 1870317
cuacagaagaauuuauuca

SEQ ID NO: 1870319 - RNA, 19 nt, Artificial Sequence
  Description of Artificial Sequence: Synthetic oligonucleotide
  Sense strand starting at position 3538 of SEQ ID NO: 1564307
guguauugaccugaucccu

SEQ ID NO: 1870320 - RNA, 19 nt, Artificial Sequence
  Description of Artificial Sequence: Synthetic oligonucleotide
  Antisense strand to SEQ ID NO: 1870319
agggaucaggucaauacac

SEQ ID NO: 1870321 - RNA, 19 nt, Artificial Sequence
  Description of Artificial Sequence: Synthetic oligonucleotide
  Sense strand starting at position 3544 of SEQ ID NO: 1564307
ugaccugaucccugggaca

SEQ ID NO: 1870322 - RNA, 19 nt, Artificial Sequence
  Description of Artificial Sequence: Synthetic oligonucleotide
  Antisense strand to SEQ ID NO: 1870321
ugucccagggaucagguca

SEQ ID NO: 1870323 - RNA, 19 nt, Artificial Sequence
  Description of Artificial Sequence: Synthetic oligonucleotide
  Sense strand starting at position 3572 of SEQ ID NO: 1564307
gacugaaaucaugguauca

SEQ ID NO: 1870324 - RNA, 19 nt, Artificial Sequence
  Description of Artificial Sequence: Synthetic oligonucleotide
  Antisense strand to SEQ ID NO: 1870323
ugauaccaugauuucaguc

SEQ ID NO: 1870325 - RNA, 19 nt, Artificial Sequence
  Description of Artificial Sequence: Synthetic oligonucleotide
  Sense strand starting at position 3673 of SEQ ID NO: 1564307
agauguaugcaauaaugca

SEQ ID NO: 1870326 - RNA, 19 nt, Artificial Sequence
  Description of Artificial Sequence: Synthetic oligonucleotide
  Antisense strand to SEQ ID NO: 1870325
ugcauuauugcauacaucu

SEQ ID NO: 1870327 - RNA, 19 nt, Artificial Sequence
  Description of Artificial Sequence: Synthetic oligonucleotide
  Sense strand starting at position 3742 of SEQ ID NO: 1564307
aacagaucugaucguaauu

SEQ ID NO: 1870328 - RNA, 19 nt, Artificial Sequence
  Description of Artificial Sequence: Synthetic oligonucleotide
  Antisense strand to SEQ ID NO: 1870327
aauuacgaucagaucuguu

SEQ ID NO: 1870329 - RNA, 19 nt, Artificial Sequence
  Description of Artificial Sequence: Synthetic oligonucleotide
  Sense strand starting at position 3983 of SEQ ID NO: 1564307
gaguucuaccaccagguaa

SEQ ID NO: 1870330 - RNA, 19 nt, Artificial Sequence
  Description of Artificial Sequence: Synthetic oligonucleotide
  Antisense strand to SEQ ID NO: 1870329
uuaccuggugguagaacuc

SEQ ID NO: 1870331 - RNA, 19 nt, Artificial Sequence
  Description of Artificial Sequence: Synthetic oligonucleotide
  Sense strand starting at position 118 of SEQ ID NO: 1564308
guucucuuugcuccuguua

SEQ ID NO: 1870332 - RNA, 19 nt, Artificial Sequence
  Description of Artificial Sequence: Synthetic oligonucleotide
  Antisense strand to SEQ ID NO: 1870331
uaacaggagcaaagagaac

SEQ ID NO: 1870333 - RNA, 19 nt, Artificial Sequence
  Description of Artificial Sequence: Synthetic oligonucleotide
  Sense strand starting at position 410 of SEQ ID NO: 1564308
agguaugucuuauuauaag

SEQ ID NO: 1870334 - RNA, 19 nt, Artificial Sequence
  Description of Artificial Sequence: Synthetic oligonucleotide
  Antisense strand to SEQ ID NO: 1870333
cuuauaauaagacauaccu

SEQ ID NO: 1870335 - RNA, 19 nt, Artificial Sequence
  Description of Artificial Sequence: Synthetic oligonucleotide
  Sense strand starting at position 422 of SEQ ID NO: 1564308
uuauaaguaugucuagaga

SEQ ID NO: 1870336 - RNA, 19 nt, Artificial Sequence
  Description of Artificial Sequence: Synthetic oligonucleotide
  Antisense strand to SEQ ID NO: 1870335
ucucuagacauacuuauaa

SEQ ID NO: 1870337 - RNA, 19 nt, Artificial Sequence
  Description of Artificial Sequence: Synthetic oligonucleotide
  Sense strand starting at position 514 of SEQ ID NO: 1564308
agauauccucagggacuuu

SEQ ID NO: 1870338 - RNA, 19 nt, Artificial Sequence
  Description of Artificial Sequence: Synthetic oligonucleotide
  Antisense strand to SEQ ID NO: 1870337
aaagucccugaggauaucu

SEQ ID NO: 1870339 - RNA, 19 nt, Artificial Sequence
  Description of Artificial Sequence: Synthetic oligonucleotide
  Sense strand starting at position 543 of SEQ ID NO: 1564308
uuaaucaauguugggauga

SEQ ID NO: 1870340 - RNA, 19 nt, Artificial Sequence
  Description of Artificial Sequence: Synthetic oligonucleotide
  Antisense strand to SEQ ID NO: 1870339
ucaucccaacauugauuaa

SEQ ID NO: 1870341 - RNA, 19 nt, Artificial Sequence
  Description of Artificial Sequence: Synthetic oligonucleotide
  Sense strand starting at position 557 of SEQ ID NO: 1564308
gaugaauguguguaaucug

SEQ ID NO: 1870342 - RNA, 19 nt, Artificial Sequence
  Description of Artificial Sequence: Synthetic oligonucleotide
  Antisense strand to SEQ ID NO: 1870341
cagauuacacacauucauc

SEQ ID NO: 1870343 - RNA, 19 nt, Artificial Sequence
  Description of Artificial Sequence: Synthetic oligonucleotide
  Sense strand starting at position 571 of SEQ ID NO: 1564308
aucuguucugaauaagcau

SEQ ID NO: 1870344 - RNA, 19 nt, Artificial Sequence
  Description of Artificial Sequence: Synthetic oligonucleotide
  Antisense strand to SEQ ID NO: 1870343
augcuuauucagaacagau

SEQ ID NO: 1870345 - RNA, 19 nt, Artificial Sequence
  Description of Artificial Sequence: Synthetic oligonucleotide
  Sense strand starting at position 716 of SEQ ID NO: 1564308
ccauuaucaguguauccau

SEQ ID NO: 1870346 - RNA, 19 nt, Artificial Sequence
  Description of Artificial Sequence: Synthetic oligonucleotide
  Antisense strand to SEQ ID NO: 1870345
auggauacacugauaaugg

SEQ ID NO: 1870347 - RNA, 19 nt, Artificial Sequence
  Description of Artificial Sequence: Synthetic oligonucleotide
  Sense strand starting at position 2584 of SEQ ID NO: 1564308
ggaggacugaucugcagac

SEQ ID NO: 1870348 - RNA, 19 nt, Artificial Sequence
  Description of Artificial Sequence: Synthetic oligonucleotide
  Antisense strand to SEQ ID NO: 1870347
gucugcagaucaguccucc

SEQ ID NO: 1870349 - RNA, 19 nt, Artificial Sequence
  Description of Artificial Sequence: Synthetic oligonucleotide
  Sense strand starting at position 2613 of SEQ ID NO: 1564308
agucauagucagcacgaaa

SEQ ID NO: 1870350 - RNA, 19 nt, Artificial Sequence
  Description of Artificial Sequence: Synthetic oligonucleotide
  Antisense strand to SEQ ID NO: 1870349
uuucgugcugacuaugacu

SEQ ID NO: 1870351 - RNA, 19 nt, Artificial Sequence
  Description of Artificial Sequence: Synthetic oligonucleotide
  Sense strand starting at position 2616 of SEQ ID NO: 1564308
cauagucagcacgaaagaa

SEQ ID NO: 1870352 - RNA, 19 nt, Artificial Sequence
  Description of Artificial Sequence: Synthetic oligonucleotide
  Antisense strand to SEQ ID NO: 1870351
uucuuucgugcugacuaug

SEQ ID NO: 1870353 - RNA, 19 nt, Artificial Sequence
  Description of Artificial Sequence: Synthetic oligonucleotide
  Sense strand starting at position 3304 of SEQ ID NO: 1564308
ugaauaaauucuucuguag

SEQ ID NO: 1870354 - RNA, 19 nt, Artificial Sequence
  Description of Artificial Sequence: Synthetic oligonucleotide
  Antisense strand to SEQ ID NO: 1870353
cuacagaagaauuuauuca

SEQ ID NO: 1870355 - RNA, 19 nt, Artificial Sequence
  Description of Artificial Sequence: Synthetic oligonucleotide
  Sense strand starting at position 3409 of SEQ ID NO: 1564308
ugaauauaccuguagguca

SEQ ID NO: 1870356 - RNA, 19 nt, Artificial Sequence
  Description of Artificial Sequence: Synthetic oligonucleotide
  Antisense strand to SEQ ID NO: 1870355
ugaccuacagguauauuca

SEQ ID NO: 1870357 - RNA, 19 nt, Artificial Sequence
  Description of Artificial Sequence: Synthetic oligonucleotide
  Sense strand starting at position 3537 of SEQ ID NO: 1564308
guguauugaccugaucccu

SEQ ID NO: 1870358 - RNA, 19 nt, Artificial Sequence
  Description of Artificial Sequence: Synthetic oligonucleotide
  Antisense strand to SEQ ID NO: 1870357
agggaucaggucaauacac

SEQ ID NO: 1870359 - RNA, 19 nt, Artificial Sequence
  Description of Artificial Sequence: Synthetic oligonucleotide
  Sense strand starting at position 3543 of SEQ ID NO: 1564308
ugaccugaucccugggaca

SEQ ID NO: 1870360 - RNA, 19 nt, Artificial Sequence
  Description of Artificial Sequence: Synthetic oligonucleotide
  Antisense strand to SEQ ID NO: 1870359
ugucccagggaucagguca

SEQ ID NO: 1870361 - RNA, 19 nt, Artificial Sequence
  Description of Artificial Sequence: Synthetic oligonucleotide
  Sense strand starting at position 3556 of SEQ ID NO: 1564308
gggacaaguuucccagacu

SEQ ID NO: 1870362 - RNA, 19 nt, Artificial Sequence
  Description of Artificial Sequence: Synthetic oligonucleotide
  Antisense strand to SEQ ID NO: 1870361
agucugggaaacuuguccc

SEQ ID NO: 1870363 - RNA, 19 nt, Artificial Sequence
  Description of Artificial Sequence: Synthetic oligonucleotide
  Sense strand starting at position 3571 of SEQ ID NO: 1564308
gacugaaaucaugguauca

SEQ ID NO: 1870364 - RNA, 19 nt, Artificial Sequence
  Description of Artificial Sequence: Synthetic oligonucleotide
  Antisense strand to SEQ ID NO: 1870363
ugauaccaugauuucaguc

SEQ ID NO: 1870365 - RNA, 19 nt, Artificial Sequence
  Description of Artificial Sequence: Synthetic oligonucleotide
  Sense strand starting at position 3672 of SEQ ID NO: 1564308
agauguaugcaauaaugca

SEQ ID NO: 1870366 - RNA, 19 nt, Artificial Sequence
  Description of Artificial Sequence: Synthetic oligonucleotide
  Antisense strand to SEQ ID NO: 1870365
ugcauuauugcauacaucu

SEQ ID NO: 1870367 - RNA, 19 nt, Artificial Sequence
  Description of Artificial Sequence: Synthetic oligonucleotide
  Sense strand starting at position 3741 of SEQ ID NO: 1564308
aacagaucugaucguaauu

SEQ ID NO: 1870368 - RNA, 19 nt, Artificial Sequence
  Description of Artificial Sequence: Synthetic oligonucleotide
  Antisense strand to SEQ ID NO: 1870367
aauuacgaucagaucuguu

SEQ ID NO: 1870369 - RNA, 19 nt, Artificial Sequence
  Description of Artificial Sequence: Synthetic oligonucleotide
  Sense strand starting at position 3982 of SEQ ID NO: 1564308
gaguucuaccaccagguaa

SEQ ID NO: 1870370 - RNA, 19 nt, Artificial Sequence
  Description of Artificial Sequence: Synthetic oligonucleotide
  Antisense strand to SEQ ID NO: 1870369
uuaccuggugguagaacuc

SEQ ID NO: 1870371 - RNA, 19 nt, Artificial Sequence
  Description of Artificial Sequence: Synthetic oligonucleotide
  Sense strand starting at position 272 of SEQ ID NO: 1564309
guucucuuugcuccuguua

SEQ ID NO: 1870372 - RNA, 19 nt, Artificial Sequence
  Description of Artificial Sequence: Synthetic oligonucleotide
  Antisense strand to SEQ ID NO: 1870371
uaacaggagcaaagagaac

SEQ ID NO: 1870373 - RNA, 19 nt, Artificial Sequence
  Description of Artificial Sequence: Synthetic oligonucleotide
  Sense strand starting at position 564 of SEQ ID NO: 1564309
agguaugucuuauuauaag

SEQ ID NO: 1870374 - RNA, 19 nt, Artificial Sequence
  Description of Artificial Sequence: Synthetic oligonucleotide
  Antisense strand to SEQ ID NO: 1870373
cuuauaauaagacauaccu

SEQ ID NO: 1870375 - RNA, 19 nt, Artificial Sequence
  Description of Artificial Sequence: Synthetic oligonucleotide
  Sense strand starting at position 576 of SEQ ID NO: 1564309
uuauaaguaugucuagaga

SEQ ID NO: 1870376 - RNA, 19 nt, Artificial Sequence
  Description of Artificial Sequence: Synthetic oligonucleotide
  Antisense strand to SEQ ID NO: 1870375
ucucuagacauacuuauaa

SEQ ID NO: 1870377 - RNA, 19 nt, Artificial Sequence
  Description of Artificial Sequence: Synthetic oligonucleotide
  Sense strand starting at position 668 of SEQ ID NO: 1564309
agauauccucagggacuuu

SEQ ID NO: 1870378 - RNA, 19 nt, Artificial Sequence
  Description of Artificial Sequence: Synthetic oligonucleotide
  Antisense strand to SEQ ID NO: 1870377
aaagucccugaggauaucu

SEQ ID NO: 1870379 - RNA, 19 nt, Artificial Sequence
  Description of Artificial Sequence: Synthetic oligonucleotide
  Sense strand starting at position 697 of SEQ ID NO: 1564309
uuaaucaauguugggauga

SEQ ID NO: 1870380 - RNA, 19 nt, Artificial Sequence
  Description of Artificial Sequence: Synthetic oligonucleotide
  Antisense strand to SEQ ID NO: 1870379
ucaucccaacauugauuaa

SEQ ID NO: 1870381 - RNA, 19 nt, Artificial Sequence
  Description of Artificial Sequence: Synthetic oligonucleotide
  Sense strand starting at position 708 of SEQ ID NO: 1564309
ugggaugaauguguguaau

SEQ ID NO: 1870382 - RNA, 19 nt, Artificial Sequence
  Description of Artificial Sequence: Synthetic oligonucleotide
  Antisense strand to SEQ ID NO: 1870381
auuacacacauucauccca

SEQ ID NO: 1870383 - RNA, 19 nt, Artificial Sequence
  Description of Artificial Sequence: Synthetic oligonucleotide
  Sense strand starting at position 711 of SEQ ID NO: 1564309
gaugaauguguguaaucug

SEQ ID NO: 1870384 - RNA, 19 nt, Artificial Sequence
  Description of Artificial Sequence: Synthetic oligonucleotide
  Antisense strand to SEQ ID NO: 1870383
cagauuacacacauucauc

SEQ ID NO: 1870385 - RNA, 19 nt, Artificial Sequence
  Description of Artificial Sequence: Synthetic oligonucleotide
  Sense strand starting at position 725 of SEQ ID NO: 1564309
aucuguucugaauaagcau

SEQ ID NO: 1870386 - RNA, 19 nt, Artificial Sequence
  Description of Artificial Sequence: Synthetic oligonucleotide
  Antisense strand to SEQ ID NO: 1870385
augcuuauucagaacagau

SEQ ID NO: 1870387 - RNA, 19 nt, Artificial Sequence
  Description of Artificial Sequence: Synthetic oligonucleotide
  Sense strand starting at position 864 of SEQ ID NO: 1564309
gggagaccauuaucagugu

SEQ ID NO: 1870388 - RNA, 19 nt, Artificial Sequence
  Description of Artificial Sequence: Synthetic oligonucleotide
  Antisense strand to SEQ ID NO: 1870387
acacugauaauggucuccc

SEQ ID NO: 1870389 - RNA, 19 nt, Artificial Sequence
  Description of Artificial Sequence: Synthetic oligonucleotide
  Sense strand starting at position 867 of SEQ ID NO: 1564309
agaccauuaucaguguauc

SEQ ID NO: 1870390 - RNA, 19 nt, Artificial Sequence
  Description of Artificial Sequence: Synthetic oligonucleotide
  Antisense strand to SEQ ID NO: 1870389
gauacacugauaauggucu

SEQ ID NO: 1870391 - RNA, 19 nt, Artificial Sequence
  Description of Artificial Sequence: Synthetic oligonucleotide
  Sense strand starting at position 870 of SEQ ID NO: 1564309
ccauuaucaguguauccau

SEQ ID NO: 1870392 - RNA, 19 nt, Artificial Sequence
  Description of Artificial Sequence: Synthetic oligonucleotide
  Antisense strand to SEQ ID NO: 1870391
auggauacacugauaaugg

SEQ ID NO: 1870393 - RNA, 19 nt, Artificial Sequence
  Description of Artificial Sequence: Synthetic oligonucleotide
  Sense strand starting at position 1054 of SEQ ID NO: 1564309
gaauacugcgauugggaaa

SEQ ID NO: 1870394 - RNA, 19 nt, Artificial Sequence
  Description of Artificial Sequence: Synthetic oligonucleotide
  Antisense strand to SEQ ID NO: 1870393
uuucccaaucgcaguauuc

SEQ ID NO: 1870395 - RNA, 19 nt, Artificial Sequence
  Description of Artificial Sequence: Synthetic oligonucleotide
  Sense strand starting at position 2767 of SEQ ID NO: 1564309
agucauagucagcacgaaa

SEQ ID NO: 1870396 - RNA, 19 nt, Artificial Sequence
  Description of Artificial Sequence: Synthetic oligonucleotide
  Antisense strand to SEQ ID NO: 1870395
uuucgugcugacuaugacu

SEQ ID NO: 1870397 - RNA, 19 nt, Artificial Sequence
  Description of Artificial Sequence: Synthetic oligonucleotide
  Sense strand starting at position 2770 of SEQ ID NO: 1564309
cauagucagcacgaaagaa

SEQ ID NO: 1870398 - RNA, 19 nt, Artificial Sequence
  Description of Artificial Sequence: Synthetic oligonucleotide
  Antisense strand to SEQ ID NO: 1870397
uucuuucgugcugacuaug

SEQ ID NO: 1870399 - RNA, 19 nt, Artificial Sequence
  Description of Artificial Sequence: Synthetic oligonucleotide
  Sense strand starting at position 3458 of SEQ ID NO: 1564309
ugaauaaauucuucuguag

SEQ ID NO: 1870400 - RNA, 19 nt, Artificial Sequence
  Description of Artificial Sequence: Synthetic oligonucleotide
  Antisense strand to SEQ ID NO: 1870399
cuacagaagaauuuauuca

SEQ ID NO: 1870401 - RNA, 19 nt, Artificial Sequence
  Description of Artificial Sequence: Synthetic oligonucleotide
  Sense strand starting at position 3691 of SEQ ID NO: 1564309
guguauugaccugaucccu

SEQ ID NO: 1870402 - RNA, 19 nt, Artificial Sequence
  Description of Artificial Sequence: Synthetic oligonucleotide
  Antisense strand to SEQ ID NO: 1870401
agggaucaggucaauacac

SEQ ID NO: 1870403 - RNA, 19 nt, Artificial Sequence
  Description of Artificial Sequence: Synthetic oligonucleotide
  Sense strand starting at position 3697 of SEQ ID NO: 1564309
ugaccugaucccugggaca

SEQ ID NO: 1870404 - RNA, 19 nt, Artificial Sequence
  Description of Artificial Sequence: Synthetic oligonucleotide
  Antisense strand to SEQ ID NO: 1870403
ugucccagggaucagguca

SEQ ID NO: 1870405 - RNA, 19 nt, Artificial Sequence
  Description of Artificial Sequence: Synthetic oligonucleotide
  Sense strand starting at position 3725 of SEQ ID NO: 1564309
gacugaaaucaugguauca

SEQ ID NO: 1870406 - RNA, 19 nt, Artificial Sequence
  Description of Artificial Sequence: Synthetic oligonucleotide
  Antisense strand to SEQ ID NO: 1870405
ugauaccaugauuucaguc

SEQ ID NO: 1870407 - RNA, 19 nt, Artificial Sequence
  Description of Artificial Sequence: Synthetic oligonucleotide
  Sense strand starting at position 3826 of SEQ ID NO: 1564309
agauguaugcaauaaugca

SEQ ID NO: 1870408 - RNA, 19 nt, Artificial Sequence
  Description of Artificial Sequence: Synthetic oligonucleotide
  Antisense strand to SEQ ID NO: 1870407
ugcauuauugcauacaucu

SEQ ID NO: 1870409 - RNA, 19 nt, Artificial Sequence
  Description of Artificial Sequence: Synthetic oligonucleotide
  Sense strand starting at position 3895 of SEQ ID NO: 1564309
aacagaucugaucguaauu

SEQ ID NO: 1870410 - RNA, 19 nt, Artificial Sequence
  Description of Artificial Sequence: Synthetic oligonucleotide
  Antisense strand to SEQ ID NO: 1870409
aauuacgaucagaucuguu

SEQ ID NO: 1870411 - RNA, 19 nt, Artificial Sequence
  Description of Artificial Sequence: Synthetic oligonucleotide
  Sense strand starting at position 271 of SEQ ID NO: 1564310
guucucuuugcuccuguua

SEQ ID NO: 1870412 - RNA, 19 nt, Artificial Sequence
  Description of Artificial Sequence: Synthetic oligonucleotide
  Antisense strand to SEQ ID NO: 1870411
uaacaggagcaaagagaac

SEQ ID NO: 1870413 - RNA, 19 nt, Artificial Sequence
  Description of Artificial Sequence: Synthetic oligonucleotide
  Sense strand starting at position 563 of SEQ ID NO: 1564310
agguaugucuuauuauaag

SEQ ID NO: 1870414 - RNA, 19 nt, Artificial Sequence
  Description of Artificial Sequence: Synthetic oligonucleotide
  Antisense strand to SEQ ID NO: 1870413
cuuauaauaagacauaccu

SEQ ID NO: 1870415 - RNA, 19 nt, Artificial Sequence
  Description of Artificial Sequence: Synthetic oligonucleotide
  Sense strand starting at position 575 of SEQ ID NO: 1564310
uuauaaguaugucuagaga

SEQ ID NO: 1870416 - RNA, 19 nt, Artificial Sequence
  Description of Artificial Sequence: Synthetic oligonucleotide
  Antisense strand to SEQ ID NO: 1870415
ucucuagacauacuuauaa

SEQ ID NO: 1870417 - RNA, 19 nt, Artificial Sequence
  Description of Artificial Sequence: Synthetic oligonucleotide
  Sense strand starting at position 667 of SEQ ID NO: 1564310
agauauccucagggacuuu

SEQ ID NO: 1870418 - RNA, 19 nt, Artificial Sequence
  Description of Artificial Sequence: Synthetic oligonucleotide
  Antisense strand to SEQ ID NO: 1870417
aaagucccugaggauaucu

SEQ ID NO: 1870419 - RNA, 19 nt, Artificial Sequence
  Description of Artificial Sequence: Synthetic oligonucleotide
  Sense strand starting at position 696 of SEQ ID NO: 1564310
uuaaucaauguugggauga

SEQ ID NO: 1870420 - RNA, 19 nt, Artificial Sequence
  Description of Artificial Sequence: Synthetic oligonucleotide
  Antisense strand to SEQ ID NO: 1870419
ucaucccaacauugauuaa

SEQ ID NO: 1870421 - RNA, 19 nt, Artificial Sequence
  Description of Artificial Sequence: Synthetic oligonucleotide
  Sense strand starting at position 710 of SEQ ID NO: 1564310
gaugaauguguguaaucug

SEQ ID NO: 1870422 - RNA, 19 nt, Artificial Sequence
  Description of Artificial Sequence: Synthetic oligonucleotide
  Antisense strand to SEQ ID NO: 1870421
cagauuacacacauucauc

SEQ ID NO: 1870423 - RNA, 19 nt, Artificial Sequence
  Description of Artificial Sequence: Synthetic oligonucleotide
  Sense strand starting at position 724 of SEQ ID NO: 1564310
aucuguucugaauaagcau

SEQ ID NO: 1870424 - RNA, 19 nt, Artificial Sequence
  Description of Artificial Sequence: Synthetic oligonucleotide
  Antisense strand to SEQ ID NO: 1870423
augcuuauucagaacagau

SEQ ID NO: 1870425 - RNA, 19 nt, Artificial Sequence
  Description of Artificial Sequence: Synthetic oligonucleotide
  Sense strand starting at position 866 of SEQ ID NO: 1564310
agaccauuaucaguguauc

SEQ ID NO: 1870426 - RNA, 19 nt, Artificial Sequence
  Description of Artificial Sequence: Synthetic oligonucleotide
  Antisense strand to SEQ ID NO: 1870425
gauacacugauaauggucu

SEQ ID NO: 1870427 - RNA, 19 nt, Artificial Sequence
  Description of Artificial Sequence: Synthetic oligonucleotide
  Sense strand starting at position 869 of SEQ ID NO: 1564310
ccauuaucaguguauccau

SEQ ID NO: 1870428 - RNA, 19 nt, Artificial Sequence
  Description of Artificial Sequence: Synthetic oligonucleotide
  Antisense strand to SEQ ID NO: 1870427
auggauacacugauaaugg

SEQ ID NO: 1870429 - RNA, 19 nt, Artificial Sequence
  Description of Artificial Sequence: Synthetic oligonucleotide
  Sense strand starting at position 2737 of SEQ ID NO: 1564310
ggaggacugaucugcagac

SEQ ID NO: 1870430 - RNA, 19 nt, Artificial Sequence
  Description of Artificial Sequence: Synthetic oligonucleotide
  Antisense strand to SEQ ID NO: 1870429
gucugcagaucaguccucc

SEQ ID NO: 1870431 - RNA, 19 nt, Artificial Sequence
  Description of Artificial Sequence: Synthetic oligonucleotide
  Sense strand starting at position 2766 of SEQ ID NO: 1564310
agucauagucagcacgaaa

SEQ ID NO: 1870432 - RNA, 19 nt, Artificial Sequence
  Description of Artificial Sequence: Synthetic oligonucleotide
  Antisense strand to SEQ ID NO: 1870431
uuucgugcugacuaugacu

SEQ ID NO: 1870433 - RNA, 19 nt, Artificial Sequence
  Description of Artificial Sequence: Synthetic oligonucleotide
  Sense strand starting at position 2769 of SEQ ID NO: 1564310
cauagucagcacgaaagaa

SEQ ID NO: 1870434 - RNA, 19 nt, Artificial Sequence
  Description of Artificial Sequence: Synthetic oligonucleotide
  Antisense strand to SEQ ID NO: 1870433
uucuuucgugcugacuaug

SEQ ID NO: 1870435 - RNA, 19 nt, Artificial Sequence
  Description of Artificial Sequence: Synthetic oligonucleotide
  Sense strand starting at position 3457 of SEQ ID NO: 1564310
ugaauaaauucuucuguag

SEQ ID NO: 1870436 - RNA, 19 nt, Artificial Sequence
  Description of Artificial Sequence: Synthetic oligonucleotide
  Antisense strand to SEQ ID NO: 1870435
cuacagaagaauuuauuca

SEQ ID NO: 1870437 - RNA, 19 nt, Artificial Sequence
  Description of Artificial Sequence: Synthetic oligonucleotide
  Sense strand starting at position 3562 of SEQ ID NO: 1564310
ugaauauaccuguagguca

SEQ ID NO: 1870438 - RNA, 19 nt, Artificial Sequence
  Description of Artificial Sequence: Synthetic oligonucleotide
  Antisense strand to SEQ ID NO: 1870437
ugaccuacagguauauuca

SEQ ID NO: 1870439 - RNA, 19 nt, Artificial Sequence
  Description of Artificial Sequence: Synthetic oligonucleotide
  Sense strand starting at position 3690 of SEQ ID NO: 1564310
guguauugaccugaucccu

SEQ ID NO: 1870440 - RNA, 19 nt, Artificial Sequence
  Description of Artificial Sequence: Synthetic oligonucleotide
  Antisense strand to SEQ ID NO: 1870439
agggaucaggucaauacac

SEQ ID NO: 1870441 - RNA, 19 nt, Artificial Sequence
  Description of Artificial Sequence: Synthetic oligonucleotide
  Sense strand starting at position 3696 of SEQ ID NO: 1564310
ugaccugaucccugggaca

SEQ ID NO: 1870442 - RNA, 19 nt, Artificial Sequence
  Description of Artificial Sequence: Synthetic oligonucleotide
  Antisense strand to SEQ ID NO: 1870441
ugucccagggaucagguca

SEQ ID NO: 1870443 - RNA, 19 nt, Artificial Sequence
  Description of Artificial Sequence: Synthetic oligonucleotide
  Sense strand starting at position 3709 of SEQ ID NO: 1564310
gggacaaguuucccagacu

SEQ ID NO: 1870444 - RNA, 19 nt, Artificial Sequence
  Description of Artificial Sequence: Synthetic oligonucleotide
  Antisense strand to SEQ ID NO: 1870443
agucugggaaacuuguccc

SEQ ID NO: 1870445 - RNA, 19 nt, Artificial Sequence
  Description of Artificial Sequence: Synthetic oligonucleotide
  Sense strand starting at position 3724 of SEQ ID NO: 1564310
gacugaaaucaugguauca

SEQ ID NO: 1870446 - RNA, 19 nt, Artificial Sequence
  Description of Artificial Sequence: Synthetic oligonucleotide
  Antisense strand to SEQ ID NO: 1870445
ugauaccaugauuucaguc

SEQ ID NO: 1870447 - RNA, 19 nt, Artificial Sequence
  Description of Artificial Sequence: Synthetic oligonucleotide
  Sense strand starting at position 3825 of SEQ ID NO: 1564310
agauguaugcaauaaugca

SEQ ID NO: 1870448 - RNA, 19 nt, Artificial Sequence
  Description of Artificial Sequence: Synthetic oligonucleotide
  Antisense strand to SEQ ID NO: 1870447
ugcauuauugcauacaucu

SEQ ID NO: 1870449 - RNA, 19 nt, Artificial Sequence
  Description of Artificial Sequence: Synthetic oligonucleotide
  Sense strand starting at position 3894 of SEQ ID NO: 1564310
aacagaucugaucguaauu

SEQ ID NO: 1870450 - RNA, 19 nt, Artificial Sequence
  Description of Artificial Sequence: Synthetic oligonucleotide
  Antisense strand to SEQ ID NO: 1870449
aauuacgaucagaucuguu

SEQ ID NO: 1870451 - RNA, 19 nt, Artificial Sequence
  Description of Artificial Sequence: Synthetic oligonucleotide
  Sense strand starting at position 119 of SEQ ID NO: 1564311
guucucuuugcuccuguua

SEQ ID NO: 1870452 - RNA, 19 nt, Artificial Sequence
  Description of Artificial Sequence: Synthetic oligonucleotide
  Antisense strand to SEQ ID NO: 1870451
uaacaggagcaaagagaac

SEQ ID NO: 1870453 - RNA, 19 nt, Artificial Sequence
  Description of Artificial Sequence: Synthetic oligonucleotide
  Sense strand starting at position 411 of SEQ ID NO: 1564311
agguaugucuuauuauaag

SEQ ID NO: 1870454 - RNA, 19 nt, Artificial Sequence
  Description of Artificial Sequence: Synthetic oligonucleotide
  Antisense strand to SEQ ID NO: 1870453
cuuauaauaagacauaccu

SEQ ID NO: 1870455 - RNA, 19 nt, Artificial Sequence
  Description of Artificial Sequence: Synthetic oligonucleotide
  Sense strand starting at position 423 of SEQ ID NO: 1564311
uuauaaguaugucuagaga

SEQ ID NO: 1870456 - RNA, 19 nt, Artificial Sequence
  Description of Artificial Sequence: Synthetic oligonucleotide
  Antisense strand to SEQ ID NO: 1870455
ucucuagacauacuuauaa

SEQ ID NO: 1870457 - RNA, 19 nt, Artificial Sequence
  Description of Artificial Sequence: Synthetic oligonucleotide
  Sense strand starting at position 515 of SEQ ID NO: 1564311
agauauccucagggacuuu

SEQ ID NO: 1870458 - RNA, 19 nt, Artificial Sequence
  Description of Artificial Sequence: Synthetic oligonucleotide
  Antisense strand to SEQ ID NO: 1870457
aaagucccugaggauaucu

SEQ ID NO: 1870459 - RNA, 19 nt, Artificial Sequence
  Description of Artificial Sequence: Synthetic oligonucleotide
  Sense strand starting at position 544 of SEQ ID NO: 1564311
uuaaucaauguugggauga

SEQ ID NO: 1870460 - RNA, 19 nt, Artificial Sequence
  Description of Artificial Sequence: Synthetic oligonucleotide
  Antisense strand to SEQ ID NO: 1870459
ucaucccaacauugauuaa

SEQ ID NO: 1870461 - RNA, 19 nt, Artificial Sequence
  Description of Artificial Sequence: Synthetic oligonucleotide
  Sense strand starting at position 558 of SEQ ID NO: 1564311
gaugaauguguguaaucug

SEQ ID NO: 1870462 - RNA, 19 nt, Artificial Sequence
  Description of Artificial Sequence: Synthetic oligonucleotide
  Antisense strand to SEQ ID NO: 1870461
cagauuacacacauucauc

SEQ ID NO: 1870463 - RNA, 19 nt, Artificial Sequence
  Description of Artificial Sequence: Synthetic oligonucleotide
  Sense strand starting at position 572 of SEQ ID NO: 1564311
aucuguucugaauaagcau

SEQ ID NO: 1870464 - RNA, 19 nt, Artificial Sequence
  Description of Artificial Sequence: Synthetic oligonucleotide
  Antisense strand to SEQ ID NO: 1870463
augcuuauucagaacagau

SEQ ID NO: 1870465 - RNA, 19 nt, Artificial Sequence
  Description of Artificial Sequence: Synthetic oligonucleotide
  Sense strand starting at position 711 of SEQ ID NO: 1564311
gggagaccauuaucagugu

SEQ ID NO: 1870466 - RNA, 19 nt, Artificial Sequence
  Description of Artificial Sequence: Synthetic oligonucleotide
  Antisense strand to SEQ ID NO: 1870465
acacugauaauggucuccc

SEQ ID NO: 1870467 - RNA, 19 nt, Artificial Sequence
  Description of Artificial Sequence: Synthetic oligonucleotide
  Sense strand starting at position 717 of SEQ ID NO: 1564311
ccauuaucaguguauccau

SEQ ID NO: 1870468 - RNA, 19 nt, Artificial Sequence
  Description of Artificial Sequence: Synthetic oligonucleotide
  Antisense strand to SEQ ID NO: 1870467
auggauacacugauaaugg

SEQ ID NO: 1870469 - RNA, 19 nt, Artificial Sequence
  Description of Artificial Sequence: Synthetic oligonucleotide
  Sense strand starting at position 901 of SEQ ID NO: 1564311
gaauacugcgauugggaaa

SEQ ID NO: 1870470 - RNA, 19 nt, Artificial Sequence
  Description of Artificial Sequence: Synthetic oligonucleotide
  Antisense strand to SEQ ID NO: 1870469
uuucccaaucgcaguauuc

SEQ ID NO: 1870471 - RNA, 19 nt, Artificial Sequence
  Description of Artificial Sequence: Synthetic oligonucleotide
  Sense strand starting at position 2614 of SEQ ID NO: 1564311
agucauagucagcacgaaa

SEQ ID NO: 1870472 - RNA, 19 nt, Artificial Sequence
  Description of Artificial Sequence: Synthetic oligonucleotide
  Antisense strand to SEQ ID NO: 1870471
uuucgugcugacuaugacu

SEQ ID NO: 1870473 - RNA, 19 nt, Artificial Sequence
  Description of Artificial Sequence: Synthetic oligonucleotide
  Sense strand starting at position 2617 of SEQ ID NO: 1564311
cauagucagcacgaaagaa

SEQ ID NO: 1870474 - RNA, 19 nt, Artificial Sequence
  Description of Artificial Sequence: Synthetic oligonucleotide
  Antisense strand to SEQ ID NO: 1870473
uucuuucgugcugacuaug

SEQ ID NO: 1870475 - RNA, 19 nt, Artificial Sequence
  Description of Artificial Sequence: Synthetic oligonucleotide
  Sense strand starting at position 3305 of SEQ ID NO: 1564311
ugaauaaauucuucuguag

SEQ ID NO: 1870476 - RNA, 19 nt, Artificial Sequence
  Description of Artificial Sequence: Synthetic oligonucleotide
  Antisense strand to SEQ ID NO: 1870475
cuacagaagaauuuauuca

SEQ ID NO: 1870477 - RNA, 19 nt, Artificial Sequence
  Description of Artificial Sequence: Synthetic oligonucleotide
  Sense strand starting at position 3538 of SEQ ID NO: 1564311
guguauugaccugaucccu

SEQ ID NO: 1870478 - RNA, 19 nt, Artificial Sequence
  Description of Artificial Sequence: Synthetic oligonucleotide
  Antisense strand to SEQ ID NO: 1870477
agggaucaggucaauacac

SEQ ID NO: 1870479 - RNA, 19 nt, Artificial Sequence
  Description of Artificial Sequence: Synthetic oligonucleotide
  Sense strand starting at position 3544 of SEQ ID NO: 1564311
ugaccugaucccugggaca

SEQ ID NO: 1870480 - RNA, 19 nt, Artificial Sequence
  Description of Artificial Sequence: Synthetic oligonucleotide
  Antisense strand to SEQ ID NO: 1870479
ugucccagggaucagguca

SEQ ID NO: 1870481 - RNA, 19 nt, Artificial Sequence
  Description of Artificial Sequence: Synthetic oligonucleotide
  Sense strand starting at position 3572 of SEQ ID NO: 1564311
gacugaaaucaugguauca

SEQ ID NO: 1870482 - RNA, 19 nt, Artificial Sequence
  Description of Artificial Sequence: Synthetic oligonucleotide
  Antisense strand to SEQ ID NO: 1870481
ugauaccaugauuucaguc

SEQ ID NO: 1870483 - RNA, 19 nt, Artificial Sequence
  Description of Artificial Sequence: Synthetic oligonucleotide
  Sense strand starting at position 3673 of SEQ ID NO: 1564311
agauguaugcaauaaugca

SEQ ID NO: 1870484 - RNA, 19 nt, Artificial Sequence
  Description of Artificial Sequence: Synthetic oligonucleotide
  Antisense strand to SEQ ID NO: 1870483
ugcauuauugcauacaucu

SEQ ID NO: 1870485 - RNA, 19 nt, Artificial Sequence
  Description of Artificial Sequence: Synthetic oligonucleotide
  Sense strand starting at position 3742 of SEQ ID NO: 1564311
aacagaucugaucguaauu

SEQ ID NO: 1870486 - RNA, 19 nt, Artificial Sequence
  Description of Artificial Sequence: Synthetic oligonucleotide
  Antisense strand to SEQ ID NO: 1870485
aauuacgaucagaucuguu

SEQ ID NO: 1870487 - RNA, 19 nt, Artificial Sequence
  Description of Artificial Sequence: Synthetic oligonucleotide
  Sense strand starting at position 3983 of SEQ ID NO: 1564311
gaguucuaccaccagguaa

SEQ ID NO: 1870488 - RNA, 19 nt, Artificial Sequence
  Description of Artificial Sequence: Synthetic oligonucleotide
  Antisense strand to SEQ ID NO: 1870487
uuaccuggugguagaacuc

SEQ ID NO: 1870489 - RNA, 19 nt, Artificial Sequence
  Description of Artificial Sequence: Synthetic oligonucleotide
  Sense strand starting at position 118 of SEQ ID NO: 1564312
guucucuuugcuccuguua

SEQ ID NO: 1870490 - RNA, 19 nt, Artificial Sequence
  Description of Artificial Sequence: Synthetic oligonucleotide
  Antisense strand to SEQ ID NO: 1870489
uaacaggagcaaagagaac

SEQ ID NO: 1870491 - RNA, 19 nt, Artificial Sequence
  Description of Artificial Sequence: Synthetic oligonucleotide
  Sense strand starting at position 410 of SEQ ID NO: 1564312
agguaugucuuauuauaag

SEQ ID NO: 1870492 - RNA, 19 nt, Artificial Sequence
  Description of Artificial Sequence: Synthetic oligonucleotide
  Antisense strand to SEQ ID NO: 1870491
cuuauaauaagacauaccu

SEQ ID NO: 1870493 - RNA, 19 nt, Artificial Sequence
  Description of Artificial Sequence: Synthetic oligonucleotide
  Sense strand starting at position 422 of SEQ ID NO: 1564312
uuauaaguaugucuagaga

SEQ ID NO: 1870494 - RNA, 19 nt, Artificial Sequence
  Description of Artificial Sequence: Synthetic oligonucleotide
  Antisense strand to SEQ ID NO: 1870493
ucucuagacauacuuauaa

SEQ ID NO: 1870495 - RNA, 19 nt, Artificial Sequence
  Description of Artificial Sequence: Synthetic oligonucleotide
  Sense strand starting at position 514 of SEQ ID NO: 1564312
agauauccucagggacuuu

SEQ ID NO: 1870496 - RNA, 19 nt, Artificial Sequence
  Description of Artificial Sequence: Synthetic oligonucleotide
  Antisense strand to SEQ ID NO: 1870495
aaagucccugaggauaucu

SEQ ID NO: 1870497 - RNA, 19 nt, Artificial Sequence
  Description of Artificial Sequence: Synthetic oligonucleotide
  Sense strand starting at position 543 of SEQ ID NO: 1564312
uuaaucaauguugggauga

SEQ ID NO: 1870498 - RNA, 19 nt, Artificial Sequence
  Description of Artificial Sequence: Synthetic oligonucleotide
  Antisense strand to SEQ ID NO: 1870497
ucaucccaacauugauuaa

SEQ ID NO: 1870499 - RNA, 19 nt, Artificial Sequence
  Description of Artificial Sequence: Synthetic oligonucleotide
  Sense strand starting at position 557 of SEQ ID NO: 1564312
gaugaauguguguaaucug

SEQ ID NO: 1870500 - RNA, 19 nt, Artificial Sequence
  Description of Artificial Sequence: Synthetic oligonucleotide
  Antisense strand to SEQ ID NO: 1870499
cagauuacacacauucauc

SEQ ID NO: 1870501 - RNA, 19 nt, Artificial Sequence
  Description of Artificial Sequence: Synthetic oligonucleotide
  Sense strand starting at position 571 of SEQ ID NO: 1564312
aucuguucugaauaagcau

SEQ ID NO: 1870502 - RNA, 19 nt, Artificial Sequence
  Description of Artificial Sequence: Synthetic oligonucleotide
  Antisense strand to SEQ ID NO: 1870501
augcuuauucagaacagau

SEQ ID NO: 1870503 - RNA, 19 nt, Artificial Sequence
  Description of Artificial Sequence: Synthetic oligonucleotide
  Sense strand starting at position 713 of SEQ ID NO: 1564312
agaccauuaucaguguauc

SEQ ID NO: 1870504 - RNA, 19 nt, Artificial Sequence
  Description of Artificial Sequence: Synthetic oligonucleotide
  Antisense strand to SEQ ID NO: 1870503
gauacacugauaauggucu

SEQ ID NO: 1870505 - RNA, 19 nt, Artificial Sequence
  Description of Artificial Sequence: Synthetic oligonucleotide
  Sense strand starting at position 716 of SEQ ID NO: 1564312
ccauuaucaguguauccau

SEQ ID NO: 1870506 - RNA, 19 nt, Artificial Sequence
  Description of Artificial Sequence: Synthetic oligonucleotide
  Antisense strand to SEQ ID NO: 1870505
auggauacacugauaaugg

SEQ ID NO: 1870507 - RNA, 19 nt, Artificial Sequence
  Description of Artificial Sequence: Synthetic oligonucleotide
  Sense strand starting at position 2584 of SEQ ID NO: 1564312
ggaggacugaucugcagac

SEQ ID NO: 1870508 - RNA, 19 nt, Artificial Sequence
  Description of Artificial Sequence: Synthetic oligonucleotide
  Antisense strand to SEQ ID NO: 1870507
gucugcagaucaguccucc

SEQ ID NO: 1870509 - RNA, 19 nt, Artificial Sequence
  Description of Artificial Sequence: Synthetic oligonucleotide
  Sense strand starting at position 2613 of SEQ ID NO: 1564312
agucauagucagcacgaaa

SEQ ID NO: 1870510 - RNA, 19 nt, Artificial Sequence
  Description of Artificial Sequence: Synthetic oligonucleotide
  Antisense strand to SEQ ID NO: 1870509
uuucgugcugacuaugacu

SEQ ID NO: 1870511 - RNA, 19 nt, Artificial Sequence
  Description of Artificial Sequence: Synthetic oligonucleotide
  Sense strand starting at position 2616 of SEQ ID NO: 1564312
cauagucagcacgaaagaa

SEQ ID NO: 1870512 - RNA, 19 nt, Artificial Sequence
  Description of Artificial Sequence: Synthetic oligonucleotide
  Antisense strand to SEQ ID NO: 1870511
uucuuucgugcugacuaug

SEQ ID NO: 1870513 - RNA, 19 nt, Artificial Sequence
  Description of Artificial Sequence: Synthetic oligonucleotide
  Sense strand starting at position 3304 of SEQ ID NO: 1564312
ugaauaaauucuucuguag

SEQ ID NO: 1870514 - RNA, 19 nt, Artificial Sequence
  Description of Artificial Sequence: Synthetic oligonucleotide
  Antisense strand to SEQ ID NO: 1870513
cuacagaagaauuuauuca

SEQ ID NO: 1870515 - RNA, 19 nt, Artificial Sequence
  Description of Artificial Sequence: Synthetic oligonucleotide
  Sense strand starting at position 3409 of SEQ ID NO: 1564312
ugaauauaccuguagguca

SEQ ID NO: 1870516 - RNA, 19 nt, Artificial Sequence
  Description of Artificial Sequence: Synthetic oligonucleotide
  Antisense strand to SEQ ID NO: 1870515
ugaccuacagguauauuca

SEQ ID NO: 1870517 - RNA, 19 nt, Artificial Sequence
  Description of Artificial Sequence: Synthetic oligonucleotide
  Sense strand starting at position 3537 of SEQ ID NO: 1564312
guguauugaccugaucccu

SEQ ID NO: 1870518 - RNA, 19 nt, Artificial Sequence
  Description of Artificial Sequence: Synthetic oligonucleotide
  Antisense strand to SEQ ID NO: 1870517
agggaucaggucaauacac

SEQ ID NO: 1870519 - RNA, 19 nt, Artificial Sequence
  Description of Artificial Sequence: Synthetic oligonucleotide
  Sense strand starting at position 3543 of SEQ ID NO: 1564312
ugaccugaucccugggaca

SEQ ID NO: 1870520 - RNA, 19 nt, Artificial Sequence
  Description of Artificial Sequence: Synthetic oligonucleotide
  Antisense strand to SEQ ID NO: 1870519
ugucccagggaucagguca

SEQ ID NO: 1870521 - RNA, 19 nt, Artificial Sequence
  Description of Artificial Sequence: Synthetic oligonucleotide
  Sense strand starting at position 3556 of SEQ ID NO: 1564312
gggacaaguuucccagacu

SEQ ID NO: 1870522 - RNA, 19 nt, Artificial Sequence
  Description of Artificial Sequence: Synthetic oligonucleotide
  Antisense strand to SEQ ID NO: 1870521
agucugggaaacuuguccc

SEQ ID NO: 1870523 - RNA, 19 nt, Artificial Sequence
  Description of Artificial Sequence: Synthetic oligonucleotide
  Sense strand starting at position 3571 of SEQ ID NO: 1564312
gacugaaaucaugguauca

SEQ ID NO: 1870524 - RNA, 19 nt, Artificial Sequence
  Description of Artificial Sequence: Synthetic oligonucleotide
  Antisense strand to SEQ ID NO: 1870523
ugauaccaugauuucaguc

SEQ ID NO: 1870525 - RNA, 19 nt, Artificial Sequence
  Description of Artificial Sequence: Synthetic oligonucleotide
  Sense strand starting at position 3672 of SEQ ID NO: 1564312
agauguaugcaauaaugca

SEQ ID NO: 1870526 - RNA, 19 nt, Artificial Sequence
  Description of Artificial Sequence: Synthetic oligonucleotide
  Antisense strand to SEQ ID NO: 1870525
ugcauuauugcauacaucu

SEQ ID NO: 1870527 - RNA, 19 nt, Artificial Sequence
  Description of Artificial Sequence: Synthetic oligonucleotide
  Sense strand starting at position 3741 of SEQ ID NO: 1564312
aacagaucugaucguaauu

SEQ ID NO: 1870528 - RNA, 19 nt, Artificial Sequence
  Description of Artificial Sequence: Synthetic oligonucleotide
  Antisense strand to SEQ ID NO: 1870527
aauuacgaucagaucuguu

SEQ ID NO: 1870529 - RNA, 19 nt, Artificial Sequence
  Description of Artificial Sequence: Synthetic oligonucleotide
  Sense strand starting at position 3982 of SEQ ID NO: 1564312
gaguucuaccaccagguaa

SEQ ID NO: 1870530 - RNA, 19 nt, Artificial Sequence
  Description of Artificial Sequence: Synthetic oligonucleotide
  Antisense strand to SEQ ID NO: 1870529
uuaccuggugguagaacuc

SEQ ID NO: 1870531 - RNA, 19 nt, Artificial Sequence
  Description of Artificial Sequence: Synthetic oligonucleotide
  Sense strand starting at position 235 of SEQ ID NO: 1564313
gccaacuuugagcaaaugu

SEQ ID NO: 1870532 - RNA, 19 nt, Artificial Sequence
  Description of Artificial Sequence: Synthetic oligonucleotide
  Antisense strand to SEQ ID NO: 1870531
acauuugcucaaaguuggc

SEQ ID NO: 1870533 - RNA, 19 nt, Artificial Sequence
  Description of Artificial Sequence: Synthetic oligonucleotide
  Sense strand starting at position 242 of SEQ ID NO: 1564313
uugagcaaauguuugguau

SEQ ID NO: 1870534 - RNA, 19 nt, Artificial Sequence
  Description of Artificial Sequence: Synthetic oligonucleotide
  Antisense strand to SEQ ID NO: 1870533
auaccaaacauuugcucaa

SEQ ID NO: 1870535 - RNA, 19 nt, Artificial Sequence
  Description of Artificial Sequence: Synthetic oligonucleotide
  Sense strand starting at position 243 of SEQ ID NO: 1564313
ugagcaaauguuugguauc

SEQ ID NO: 1870536 - RNA, 19 nt, Artificial Sequence
  Description of Artificial Sequence: Synthetic oligonucleotide
  Antisense strand to SEQ ID NO: 1870535
gauaccaaacauuugcuca

SEQ ID NO: 1870537 - RNA, 19 nt, Artificial Sequence
  Description of Artificial Sequence: Synthetic oligonucleotide
  Sense strand starting at position 245 of SEQ ID NO: 1564313
agcaaauguuugguaucuu

SEQ ID NO: 1870538 - RNA, 19 nt, Artificial Sequence
  Description of Artificial Sequence: Synthetic oligonucleotide
  Antisense strand to SEQ ID NO: 1870537
aagauaccaaacauuugcu

SEQ ID NO: 1870539 - RNA, 19 nt, Artificial Sequence
  Description of Artificial Sequence: Synthetic oligonucleotide
  Sense strand starting at position 272 of SEQ ID NO: 1564313
guucucuuugcuccuguua

SEQ ID NO: 1870540 - RNA, 19 nt, Artificial Sequence
  Description of Artificial Sequence: Synthetic oligonucleotide
  Antisense strand to SEQ ID NO: 1870539
uaacaggagcaaagagaac

SEQ ID NO: 1870541 - RNA, 19 nt, Artificial Sequence
  Description of Artificial Sequence: Synthetic oligonucleotide
  Sense strand starting at position 564 of SEQ ID NO: 1564313
agguaugucuuauuauaag

SEQ ID NO: 1870542 - RNA, 19 nt, Artificial Sequence
  Description of Artificial Sequence: Synthetic oligonucleotide
  Antisense strand to SEQ ID NO: 1870541
cuuauaauaagacauaccu

SEQ ID NO: 1870543 - RNA, 19 nt, Artificial Sequence
  Description of Artificial Sequence: Synthetic oligonucleotide
  Sense strand starting at position 576 of SEQ ID NO: 1564313
uuauaaguaugucuagaga

SEQ ID NO: 1870544 - RNA, 19 nt, Artificial Sequence
  Description of Artificial Sequence: Synthetic oligonucleotide
  Antisense strand to SEQ ID NO: 1870543
ucucuagacauacuuauaa

SEQ ID NO: 1870545 - RNA, 19 nt, Artificial Sequence
  Description of Artificial Sequence: Synthetic oligonucleotide
  Sense strand starting at position 668 of SEQ ID NO: 1564313
agauauccucagggacuuu

SEQ ID NO: 1870546 - RNA, 19 nt, Artificial Sequence
  Description of Artificial Sequence: Synthetic oligonucleotide
  Antisense strand to SEQ ID NO: 1870545
aaagucccugaggauaucu

SEQ ID NO: 1870547 - RNA, 19 nt, Artificial Sequence
  Description of Artificial Sequence: Synthetic oligonucleotide
  Sense strand starting at position 697 of SEQ ID NO: 1564313
uuaaucaauguugggauga

SEQ ID NO: 1870548 - RNA, 19 nt, Artificial Sequence
  Description of Artificial Sequence: Synthetic oligonucleotide
  Antisense strand to SEQ ID NO: 1870547
ucaucccaacauugauuaa

SEQ ID NO: 1870549 - RNA, 19 nt, Artificial Sequence
  Description of Artificial Sequence: Synthetic oligonucleotide
  Sense strand starting at position 707 of SEQ ID NO: 1564313
uugggaugaauguguguaa

SEQ ID NO: 1870550 - RNA, 19 nt, Artificial Sequence
  Description of Artificial Sequence: Synthetic oligonucleotide
  Antisense strand to SEQ ID NO: 1870549
uuacacacauucaucccaa

SEQ ID NO: 1870551 - RNA, 19 nt, Artificial Sequence
  Description of Artificial Sequence: Synthetic oligonucleotide
  Sense strand starting at position 708 of SEQ ID NO: 1564313
ugggaugaauguguguaau

SEQ ID NO: 1870552 - RNA, 19 nt, Artificial Sequence
  Description of Artificial Sequence: Synthetic oligonucleotide
  Antisense strand to SEQ ID NO: 1870551
auuacacacauucauccca

SEQ ID NO: 1870553 - RNA, 19 nt, Artificial Sequence
  Description of Artificial Sequence: Synthetic oligonucleotide
  Sense strand starting at position 710 of SEQ ID NO: 1564313
ggaugaauguguguaaucu

SEQ ID NO: 1870554 - RNA, 19 nt, Artificial Sequence
  Description of Artificial Sequence: Synthetic oligonucleotide
  Antisense strand to SEQ ID NO: 1870553
agauuacacacauucaucc

SEQ ID NO: 1870555 - RNA, 19 nt, Artificial Sequence
  Description of Artificial Sequence: Synthetic oligonucleotide
  Sense strand starting at position 711 of SEQ ID NO: 1564313
gaugaauguguguaaucug

SEQ ID NO: 1870556 - RNA, 19 nt, Artificial Sequence
  Description of Artificial Sequence: Synthetic oligonucleotide
  Antisense strand to SEQ ID NO: 1870555
cagauuacacacauucauc

SEQ ID NO: 1870557 - RNA, 19 nt, Artificial Sequence
  Description of Artificial Sequence: Synthetic oligonucleotide
  Sense strand starting at position 719 of SEQ ID NO: 1564313
uguguaaucuguucugaau

SEQ ID NO: 1870558 - RNA, 19 nt, Artificial Sequence
  Description of Artificial Sequence: Synthetic oligonucleotide
  Antisense strand to SEQ ID NO: 1870557
auucagaacagauuacaca

SEQ ID NO: 1870559 - RNA, 19 nt, Artificial Sequence
  Description of Artificial Sequence: Synthetic oligonucleotide
  Sense strand starting at position 725 of SEQ ID NO: 1564313
aucuguucugaauaagcau

SEQ ID NO: 1870560 - RNA, 19 nt, Artificial Sequence
  Description of Artificial Sequence: Synthetic oligonucleotide
  Antisense strand to SEQ ID NO: 1870559
augcuuauucagaacagau

SEQ ID NO: 1870561 - RNA, 19 nt, Artificial Sequence
  Description of Artificial Sequence: Synthetic oligonucleotide
  Sense strand starting at position 864 of SEQ ID NO: 1564313
gggagaccauuaucagugu

SEQ ID NO: 1870562 - RNA, 19 nt, Artificial Sequence
  Description of Artificial Sequence: Synthetic oligonucleotide
  Antisense strand to SEQ ID NO: 1870561
acacugauaauggucuccc

SEQ ID NO: 1870563 - RNA, 19 nt, Artificial Sequence
  Description of Artificial Sequence: Synthetic oligonucleotide
  Sense strand starting at position 867 of SEQ ID NO: 1564313
agaccauuaucaguguauc

SEQ ID NO: 1870564 - RNA, 19 nt, Artificial Sequence
  Description of Artificial Sequence: Synthetic oligonucleotide
  Antisense strand to SEQ ID NO: 1870563
gauacacugauaauggucu

SEQ ID NO: 1870565 - RNA, 19 nt, Artificial Sequence
  Description of Artificial Sequence: Synthetic oligonucleotide
  Sense strand starting at position 870 of SEQ ID NO: 1564313
ccauuaucaguguauccau

SEQ ID NO: 1870566 - RNA, 19 nt, Artificial Sequence
  Description of Artificial Sequence: Synthetic oligonucleotide
  Antisense strand to SEQ ID NO: 1870565
auggauacacugauaaugg

SEQ ID NO: 1870567 - RNA, 19 nt, Artificial Sequence
  Description of Artificial Sequence: Synthetic oligonucleotide
  Sense strand starting at position 873 of SEQ ID NO: 1564313
uuaucaguguauccauacu

SEQ ID NO: 1870568 - RNA, 19 nt, Artificial Sequence
  Description of Artificial Sequence: Synthetic oligonucleotide
  Antisense strand to SEQ ID NO: 1870567
aguauggauacacugauaa

SEQ ID NO: 1870569 - RNA, 19 nt, Artificial Sequence
  Description of Artificial Sequence: Synthetic oligonucleotide
  Sense strand starting at position 1010 of SEQ ID NO: 1564313
auauguugaucguccucau

SEQ ID NO: 1870570 - RNA, 19 nt, Artificial Sequence
  Description of Artificial Sequence: Synthetic oligonucleotide
  Antisense strand to SEQ ID NO: 1870569
augaggacgaucaacauau

SEQ ID NO: 1870571 - RNA, 19 nt, Artificial Sequence
  Description of Artificial Sequence: Synthetic oligonucleotide
  Sense strand starting at position 1013 of SEQ ID NO: 1564313
uguugaucguccucaucaa

SEQ ID NO: 1870572 - RNA, 19 nt, Artificial Sequence
  Description of Artificial Sequence: Synthetic oligonucleotide
  Antisense strand to SEQ ID NO: 1870571
uugaugaggacgaucaaca

SEQ ID NO: 1870573 - RNA, 19 nt, Artificial Sequence
  Description of Artificial Sequence: Synthetic oligonucleotide
  Sense strand starting at position 1014 of SEQ ID NO: 1564313
guugaucguccucaucaac

SEQ ID NO: 1870574 - RNA, 19 nt, Artificial Sequence
  Description of Artificial Sequence: Synthetic oligonucleotide
  Antisense strand to SEQ ID NO: 1870573
guugaugaggacgaucaac

SEQ ID NO: 1870575 - RNA, 19 nt, Artificial Sequence
  Description of Artificial Sequence: Synthetic oligonucleotide
  Sense strand starting at position 1054 of SEQ ID NO: 1564313
gaauacugcgauugggaaa

SEQ ID NO: 1870576 - RNA, 19 nt, Artificial Sequence
  Description of Artificial Sequence: Synthetic oligonucleotide
  Antisense strand to SEQ ID NO: 1870575
uuucccaaucgcaguauuc

SEQ ID NO: 1870577 - RNA, 19 nt, Artificial Sequence
  Description of Artificial Sequence: Synthetic oligonucleotide
  Sense strand starting at position 1321 of SEQ ID NO: 1564313
ggagacaaguaggaaauua

SEQ ID NO: 1870578 - RNA, 19 nt, Artificial Sequence
  Description of Artificial Sequence: Synthetic oligonucleotide
  Antisense strand to SEQ ID NO: 1870577
uaauuuccuacuugucucc

SEQ ID NO: 1870579 - RNA, 19 nt, Artificial Sequence
  Description of Artificial Sequence: Synthetic oligonucleotide
  Sense strand starting at position 1472 of SEQ ID NO: 1564313
uugagaauuugcuacacag

SEQ ID NO: 1870580 - RNA, 19 nt, Artificial Sequence
  Description of Artificial Sequence: Synthetic oligonucleotide
  Antisense strand to SEQ ID NO: 1870579
cuguguagcaaauucucaa

SEQ ID NO: 1870581 - RNA, 19 nt, Artificial Sequence
  Description of Artificial Sequence: Synthetic oligonucleotide
  Sense strand starting at position 2766 of SEQ ID NO: 1564313
aagucauagucagcacgaa

SEQ ID NO: 1870582 - RNA, 19 nt, Artificial Sequence
  Description of Artificial Sequence: Synthetic oligonucleotide
  Antisense strand to SEQ ID NO: 1870581
uucgugcugacuaugacuu

SEQ ID NO: 1870583 - RNA, 19 nt, Artificial Sequence
  Description of Artificial Sequence: Synthetic oligonucleotide
  Sense strand starting at position 2767 of SEQ ID NO: 1564313
agucauagucagcacgaaa

SEQ ID NO: 1870584 - RNA, 19 nt, Artificial Sequence
  Description of Artificial Sequence: Synthetic oligonucleotide
  Antisense strand to SEQ ID NO: 1870583
uuucgugcugacuaugacu

SEQ ID NO: 1870585 - RNA, 19 nt, Artificial Sequence
  Description of Artificial Sequence: Synthetic oligonucleotide
  Sense strand starting at position 2770 of SEQ ID NO: 1564313
cauagucagcacgaaagaa

SEQ ID NO: 1870586 - RNA, 19 nt, Artificial Sequence
  Description of Artificial Sequence: Synthetic oligonucleotide
  Antisense strand to SEQ ID NO: 1870585
uucuuucgugcugacuaug

SEQ ID NO: 1870587 - RNA, 19 nt, Artificial Sequence
  Description of Artificial Sequence: Synthetic oligonucleotide
  Sense strand starting at position 3308 of SEQ ID NO: 1564313
uuuagauaguggucucacu

SEQ ID NO: 1870588 - RNA, 19 nt, Artificial Sequence
  Description of Artificial Sequence: Synthetic oligonucleotide
  Antisense strand to SEQ ID NO: 1870587
agugagaccacuaucuaaa

SEQ ID NO: 1870589 - RNA, 19 nt, Artificial Sequence
  Description of Artificial Sequence: Synthetic oligonucleotide
  Sense strand starting at position 3436 of SEQ ID NO: 1564313
ccaugcuuccaauaaacgu

SEQ ID NO: 1870590 - RNA, 19 nt, Artificial Sequence
  Description of Artificial Sequence: Synthetic oligonucleotide
  Antisense strand to SEQ ID NO: 1870589
acguuuauuggaagcaugg

SEQ ID NO: 1870591 - RNA, 19 nt, Artificial Sequence
  Description of Artificial Sequence: Synthetic oligonucleotide
  Sense strand starting at position 3458 of SEQ ID NO: 1564313
ugaauaaauucuucuguag

SEQ ID NO: 1870592 - RNA, 19 nt, Artificial Sequence
  Description of Artificial Sequence: Synthetic oligonucleotide
  Antisense strand to SEQ ID NO: 1870591
cuacagaagaauuuauuca

SEQ ID NO: 1870593 - RNA, 19 nt, Artificial Sequence
  Description of Artificial Sequence: Synthetic oligonucleotide
  Sense strand starting at position 3626 of SEQ ID NO: 1564313
aggcucuaggcucaguuau

SEQ ID NO: 1870594 - RNA, 19 nt, Artificial Sequence
  Description of Artificial Sequence: Synthetic oligonucleotide
  Antisense strand to SEQ ID NO: 1870593
auaacugagccuagagccu

SEQ ID NO: 1870595 - RNA, 19 nt, Artificial Sequence
  Description of Artificial Sequence: Synthetic oligonucleotide
  Sense strand starting at position 3677 of SEQ ID NO: 1564313
ucaaauguauguuugugua

SEQ ID NO: 1870596 - RNA, 19 nt, Artificial Sequence
  Description of Artificial Sequence: Synthetic oligonucleotide
  Antisense strand to SEQ ID NO: 1870595
uacacaaacauacauuuga

SEQ ID NO: 1870597 - RNA, 19 nt, Artificial Sequence
  Description of Artificial Sequence: Synthetic oligonucleotide
  Sense strand starting at position 3691 of SEQ ID NO: 1564313
guguauugaccugaucccu

SEQ ID NO: 1870598 - RNA, 19 nt, Artificial Sequence
  Description of Artificial Sequence: Synthetic oligonucleotide
  Antisense strand to SEQ ID NO: 1870597
agggaucaggucaauacac

SEQ ID NO: 1870599 - RNA, 19 nt, Artificial Sequence
  Description of Artificial Sequence: Synthetic oligonucleotide
  Sense strand starting at position 3697 of SEQ ID NO: 1564313
ugaccugaucccugggaca

SEQ ID NO: 1870600 - RNA, 19 nt, Artificial Sequence
  Description of Artificial Sequence: Synthetic oligonucleotide
  Antisense strand to SEQ ID NO: 1870599
ugucccagggaucagguca

SEQ ID NO: 1870601 - RNA, 19 nt, Artificial Sequence
  Description of Artificial Sequence: Synthetic oligonucleotide
  Sense strand starting at position 3725 of SEQ ID NO: 1564313
gacugaaaucaugguauca

SEQ ID NO: 1870602 - RNA, 19 nt, Artificial Sequence
  Description of Artificial Sequence: Synthetic oligonucleotide
  Antisense strand to SEQ ID NO: 1870601
ugauaccaugauuucaguc

SEQ ID NO: 1870603 - RNA, 19 nt, Artificial Sequence
  Description of Artificial Sequence: Synthetic oligonucleotide
  Sense strand starting at position 3789 of SEQ ID NO: 1564313
ucaauccguguguaaauaa

SEQ ID NO: 1870604 - RNA, 19 nt, Artificial Sequence
  Description of Artificial Sequence: Synthetic oligonucleotide
  Antisense strand to SEQ ID NO: 1870603
uuauuuacacacggauuga

SEQ ID NO: 1870605 - RNA, 19 nt, Artificial Sequence
  Description of Artificial Sequence: Synthetic oligonucleotide
  Sense strand starting at position 3826 of SEQ ID NO: 1564313
agauguaugcaauaaugca

SEQ ID NO: 1870606 - RNA, 19 nt, Artificial Sequence
  Description of Artificial Sequence: Synthetic oligonucleotide
  Antisense strand to SEQ ID NO: 1870605
ugcauuauugcauacaucu

SEQ ID NO: 1870607 - RNA, 19 nt, Artificial Sequence
  Description of Artificial Sequence: Synthetic oligonucleotide
  Sense strand starting at position 3895 of SEQ ID NO: 1564313
aacagaucugaucguaauu

SEQ ID NO: 1870608 - RNA, 19 nt, Artificial Sequence
  Description of Artificial Sequence: Synthetic oligonucleotide
  Antisense strand to SEQ ID NO: 1870607
aauuacgaucagaucuguu

SEQ ID NO: 1870609 - RNA, 19 nt, Artificial Sequence
  Description of Artificial Sequence: Synthetic oligonucleotide
  Sense strand starting at position 3935 of SEQ ID NO: 1564313
guaguuucuguggcguagu

SEQ ID NO: 1870610 - RNA, 19 nt, Artificial Sequence
  Description of Artificial Sequence: Synthetic oligonucleotide
  Antisense strand to SEQ ID NO: 1870609
acuacgccacagaaacuac

SEQ ID NO: 1870611 - RNA, 19 nt, Artificial Sequence
  Description of Artificial Sequence: Synthetic oligonucleotide
  Sense strand starting at position 56 of SEQ ID NO: 1564314
agaugagccucugccacau

SEQ ID NO: 1870612 - RNA, 19 nt, Artificial Sequence
  Description of Artificial Sequence: Synthetic oligonucleotide
  Antisense strand to SEQ ID NO: 1870611
auguggcagaggcucaucu

SEQ ID NO: 1870613 - RNA, 19 nt, Artificial Sequence
  Description of Artificial Sequence: Synthetic oligonucleotide
  Sense strand starting at position 234 of SEQ ID NO: 1564314
gccaacuuugagcaaaugu

SEQ ID NO: 1870614 - RNA, 19 nt, Artificial Sequence
  Description of Artificial Sequence: Synthetic oligonucleotide
  Antisense strand to SEQ ID NO: 1870613
acauuugcucaaaguuggc

SEQ ID NO: 1870615 - RNA, 19 nt, Artificial Sequence
  Description of Artificial Sequence: Synthetic oligonucleotide
  Sense strand starting at position 241 of SEQ ID NO: 1564314
uugagcaaauguuugguau

SEQ ID NO: 1870616 - RNA, 19 nt, Artificial Sequence
  Description of Artificial Sequence: Synthetic oligonucleotide
  Antisense strand to SEQ ID NO: 1870615
auaccaaacauuugcucaa

SEQ ID NO: 1870617 - RNA, 19 nt, Artificial Sequence
  Description of Artificial Sequence: Synthetic oligonucleotide
  Sense strand starting at position 242 of SEQ ID NO: 1564314
ugagcaaauguuugguauc

SEQ ID NO: 1870618 - RNA, 19 nt, Artificial Sequence
  Description of Artificial Sequence: Synthetic oligonucleotide
  Antisense strand to SEQ ID NO: 1870617
gauaccaaacauuugcuca

SEQ ID NO: 1870619 - RNA, 19 nt, Artificial Sequence
  Description of Artificial Sequence: Synthetic oligonucleotide
  Sense strand starting at position 244 of SEQ ID NO: 1564314
agcaaauguuugguaucuu

SEQ ID NO: 1870620 - RNA, 19 nt, Artificial Sequence
  Description of Artificial Sequence: Synthetic oligonucleotide
  Antisense strand to SEQ ID NO: 1870619
aagauaccaaacauuugcu

SEQ ID NO: 1870621 - RNA, 19 nt, Artificial Sequence
  Description of Artificial Sequence: Synthetic oligonucleotide
  Sense strand starting at position 271 of SEQ ID NO: 1564314
guucucuuugcuccuguua

SEQ ID NO: 1870622 - RNA, 19 nt, Artificial Sequence
  Description of Artificial Sequence: Synthetic oligonucleotide
  Antisense strand to SEQ ID NO: 1870621
uaacaggagcaaagagaac

SEQ ID NO: 1870623 - RNA, 19 nt, Artificial Sequence
  Description of Artificial Sequence: Synthetic oligonucleotide
  Sense strand starting at position 563 of SEQ ID NO: 1564314
agguaugucuuauuauaag

SEQ ID NO: 1870624 - RNA, 19 nt, Artificial Sequence
  Description of Artificial Sequence: Synthetic oligonucleotide
  Antisense strand to SEQ ID NO: 1870623
cuuauaauaagacauaccu

SEQ ID NO: 1870625 - RNA, 19 nt, Artificial Sequence
  Description of Artificial Sequence: Synthetic oligonucleotide
  Sense strand starting at position 575 of SEQ ID NO: 1564314
uuauaaguaugucuagaga

SEQ ID NO: 1870626 - RNA, 19 nt, Artificial Sequence
  Description of Artificial Sequence: Synthetic oligonucleotide
  Antisense strand to SEQ ID NO: 1870625
ucucuagacauacuuauaa

SEQ ID NO: 1870627 - RNA, 19 nt, Artificial Sequence
  Description of Artificial Sequence: Synthetic oligonucleotide
  Sense strand starting at position 667 of SEQ ID NO: 1564314
agauauccucagggacuuu

SEQ ID NO: 1870628 - RNA, 19 nt, Artificial Sequence
  Description of Artificial Sequence: Synthetic oligonucleotide
  Antisense strand to SEQ ID NO: 1870627
aaagucccugaggauaucu

SEQ ID NO: 1870629 - RNA, 19 nt, Artificial Sequence
  Description of Artificial Sequence: Synthetic oligonucleotide
  Sense strand starting at position 696 of SEQ ID NO: 1564314
uuaaucaauguugggauga

SEQ ID NO: 1870630 - RNA, 19 nt, Artificial Sequence
  Description of Artificial Sequence: Synthetic oligonucleotide
  Antisense strand to SEQ ID NO: 1870629
ucaucccaacauugauuaa

SEQ ID NO: 1870631 - RNA, 19 nt, Artificial Sequence
  Description of Artificial Sequence: Synthetic oligonucleotide
  Sense strand starting at position 710 of SEQ ID NO: 1564314
gaugaauguguguaaucug

SEQ ID NO: 1870632 - RNA, 19 nt, Artificial Sequence
  Description of Artificial Sequence: Synthetic oligonucleotide
  Antisense strand to SEQ ID NO: 1870631
cagauuacacacauucauc

SEQ ID NO: 1870633 - RNA, 19 nt, Artificial Sequence
  Description of Artificial Sequence: Synthetic oligonucleotide
  Sense strand starting at position 718 of SEQ ID NO: 1564314
uguguaaucuguucugaau

SEQ ID NO: 1870634 - RNA, 19 nt, Artificial Sequence
  Description of Artificial Sequence: Synthetic oligonucleotide
  Antisense strand to SEQ ID NO: 1870633
auucagaacagauuacaca

SEQ ID NO: 1870635 - RNA, 19 nt, Artificial Sequence
  Description of Artificial Sequence: Synthetic oligonucleotide
  Sense strand starting at position 724 of SEQ ID NO: 1564314
aucuguucugaauaagcau

SEQ ID NO: 1870636 - RNA, 19 nt, Artificial Sequence
  Description of Artificial Sequence: Synthetic oligonucleotide
  Antisense strand to SEQ ID NO: 1870635
augcuuauucagaacagau

SEQ ID NO: 1870637 - RNA, 19 nt, Artificial Sequence
  Description of Artificial Sequence: Synthetic oligonucleotide
  Sense strand starting at position 866 of SEQ ID NO: 1564314
agaccauuaucaguguauc

SEQ ID NO: 1870638 - RNA, 19 nt, Artificial Sequence
  Description of Artificial Sequence: Synthetic oligonucleotide
  Antisense strand to SEQ ID NO: 1870637
gauacacugauaauggucu

SEQ ID NO: 1870639 - RNA, 19 nt, Artificial Sequence
  Description of Artificial Sequence: Synthetic oligonucleotide
  Sense strand starting at position 869 of SEQ ID NO: 1564314
ccauuaucaguguauccau

SEQ ID NO: 1870640 - RNA, 19 nt, Artificial Sequence
  Description of Artificial Sequence: Synthetic oligonucleotide
  Antisense strand to SEQ ID NO: 1870639
auggauacacugauaaugg

SEQ ID NO: 1870641 - RNA, 19 nt, Artificial Sequence
  Description of Artificial Sequence: Synthetic oligonucleotide
  Sense strand starting at position 872 of SEQ ID NO: 1564314
uuaucaguguauccauacu

SEQ ID NO: 1870642 - RNA, 19 nt, Artificial Sequence
  Description of Artificial Sequence: Synthetic oligonucleotide
  Antisense strand to SEQ ID NO: 1870641
aguauggauacacugauaa

SEQ ID NO: 1870643 - RNA, 19 nt, Artificial Sequence
  Description of Artificial Sequence: Synthetic oligonucleotide
  Sense strand starting at position 1009 of SEQ ID NO: 1564314
auauguugaucguccucau

SEQ ID NO: 1870644 - RNA, 19 nt, Artificial Sequence
  Description of Artificial Sequence: Synthetic oligonucleotide
  Antisense strand to SEQ ID NO: 1870643
augaggacgaucaacauau

SEQ ID NO: 1870645 - RNA, 19 nt, Artificial Sequence
  Description of Artificial Sequence: Synthetic oligonucleotide
  Sense strand starting at position 1012 of SEQ ID NO: 1564314
uguugaucguccucaucaa

SEQ ID NO: 1870646 - RNA, 19 nt, Artificial Sequence
  Description of Artificial Sequence: Synthetic oligonucleotide
  Antisense strand to SEQ ID NO: 1870645
uugaugaggacgaucaaca

SEQ ID NO: 1870647 - RNA, 19 nt, Artificial Sequence
  Description of Artificial Sequence: Synthetic oligonucleotide
  Sense strand starting at position 1013 of SEQ ID NO: 1564314
guugaucguccucaucaac

SEQ ID NO: 1870648 - RNA, 19 nt, Artificial Sequence
  Description of Artificial Sequence: Synthetic oligonucleotide
  Antisense strand to SEQ ID NO: 1870647
guugaugaggacgaucaac

SEQ ID NO: 1870649 - RNA, 19 nt, Artificial Sequence
  Description of Artificial Sequence: Synthetic oligonucleotide
  Sense strand starting at position 1197 of SEQ ID NO: 1564314
ugaaucgaaugcuugcaaa

SEQ ID NO: 1870650 - RNA, 19 nt, Artificial Sequence
  Description of Artificial Sequence: Synthetic oligonucleotide
  Antisense strand to SEQ ID NO: 1870649
uuugcaagcauucgauuca

SEQ ID NO: 1870651 - RNA, 19 nt, Artificial Sequence
  Description of Artificial Sequence: Synthetic oligonucleotide
  Sense strand starting at position 1320 of SEQ ID NO: 1564314
ggagacaaguaggaaauua

SEQ ID NO: 1870652 - RNA, 19 nt, Artificial Sequence
  Description of Artificial Sequence: Synthetic oligonucleotide
  Antisense strand to SEQ ID NO: 1870651
uaauuuccuacuugucucc

SEQ ID NO: 1870653 - RNA, 19 nt, Artificial Sequence
  Description of Artificial Sequence: Synthetic oligonucleotide
  Sense strand starting at position 1471 of SEQ ID NO: 1564314
uugagaauuugcuacacag

SEQ ID NO: 1870654 - RNA, 19 nt, Artificial Sequence
  Description of Artificial Sequence: Synthetic oligonucleotide
  Antisense strand to SEQ ID NO: 1870653
cuguguagcaaauucucaa

SEQ ID NO: 1870655 - RNA, 19 nt, Artificial Sequence
  Description of Artificial Sequence: Synthetic oligonucleotide
  Sense strand starting at position 1735 of SEQ ID NO: 1564314
aguuauggccgugacgaga

SEQ ID NO: 1870656 - RNA, 19 nt, Artificial Sequence
  Description of Artificial Sequence: Synthetic oligonucleotide
  Antisense strand to SEQ ID NO: 1870655
ucucgucacggccauaacu

SEQ ID NO: 1870657 - RNA, 19 nt, Artificial Sequence
  Description of Artificial Sequence: Synthetic oligonucleotide
  Sense strand starting at position 2737 of SEQ ID NO: 1564314
ggaggacugaucugcagac

SEQ ID NO: 1870658 - RNA, 19 nt, Artificial Sequence
  Description of Artificial Sequence: Synthetic oligonucleotide
  Antisense strand to SEQ ID NO: 1870657
gucugcagaucaguccucc

SEQ ID NO: 1870659 - RNA, 19 nt, Artificial Sequence
  Description of Artificial Sequence: Synthetic oligonucleotide
  Sense strand starting at position 2765 of SEQ ID NO: 1564314
aagucauagucagcacgaa

SEQ ID NO: 1870660 - RNA, 19 nt, Artificial Sequence
  Description of Artificial Sequence: Synthetic oligonucleotide
  Antisense strand to SEQ ID NO: 1870659
uucgugcugacuaugacuu

SEQ ID NO: 1870661 - RNA, 19 nt, Artificial Sequence
  Description of Artificial Sequence: Synthetic oligonucleotide
  Sense strand starting at position 2766 of SEQ ID NO: 1564314
agucauagucagcacgaaa

SEQ ID NO: 1870662 - RNA, 19 nt, Artificial Sequence
  Description of Artificial Sequence: Synthetic oligonucleotide
  Antisense strand to SEQ ID NO: 1870661
uuucgugcugacuaugacu

SEQ ID NO: 1870663 - RNA, 19 nt, Artificial Sequence
  Description of Artificial Sequence: Synthetic oligonucleotide
  Sense strand starting at position 2769 of SEQ ID NO: 1564314
cauagucagcacgaaagaa

SEQ ID NO: 1870664 - RNA, 19 nt, Artificial Sequence
  Description of Artificial Sequence: Synthetic oligonucleotide
  Antisense strand to SEQ ID NO: 1870663
uucuuucgugcugacuaug

SEQ ID NO: 1870665 - RNA, 19 nt, Artificial Sequence
  Description of Artificial Sequence: Synthetic oligonucleotide
  Sense strand starting at position 3307 of SEQ ID NO: 1564314
uuuagauaguggucucacu

SEQ ID NO: 1870666 - RNA, 19 nt, Artificial Sequence
  Description of Artificial Sequence: Synthetic oligonucleotide
  Antisense strand to SEQ ID NO: 1870665
agugagaccacuaucuaaa

SEQ ID NO: 1870667 - RNA, 19 nt, Artificial Sequence
  Description of Artificial Sequence: Synthetic oligonucleotide
  Sense strand starting at position 3435 of SEQ ID NO: 1564314
ccaugcuuccaauaaacgu

SEQ ID NO: 1870668 - RNA, 19 nt, Artificial Sequence
  Description of Artificial Sequence: Synthetic oligonucleotide
  Antisense strand to SEQ ID NO: 1870667
acguuuauuggaagcaugg

SEQ ID NO: 1870669 - RNA, 19 nt, Artificial Sequence
  Description of Artificial Sequence: Synthetic oligonucleotide
  Sense strand starting at position 3457 of SEQ ID NO: 1564314
ugaauaaauucuucuguag

SEQ ID NO: 1870670 - RNA, 19 nt, Artificial Sequence
  Description of Artificial Sequence: Synthetic oligonucleotide
  Antisense strand to SEQ ID NO: 1870669
cuacagaagaauuuauuca

SEQ ID NO: 1870671 - RNA, 19 nt, Artificial Sequence
  Description of Artificial Sequence: Synthetic oligonucleotide
  Sense strand starting at position 3562 of SEQ ID NO: 1564314
ugaauauaccuguagguca

SEQ ID NO: 1870672 - RNA, 19 nt, Artificial Sequence
  Description of Artificial Sequence: Synthetic oligonucleotide
  Antisense strand to SEQ ID NO: 1870671
ugaccuacagguauauuca

SEQ ID NO: 1870673 - RNA, 19 nt, Artificial Sequence
  Description of Artificial Sequence: Synthetic oligonucleotide
  Sense strand starting at position 3625 of SEQ ID NO: 1564314
aggcucuaggcucaguuau

SEQ ID NO: 1870674 - RNA, 19 nt, Artificial Sequence
  Description of Artificial Sequence: Synthetic oligonucleotide
  Antisense strand to SEQ ID NO: 1870673
auaacugagccuagagccu

SEQ ID NO: 1870675 - RNA, 19 nt, Artificial Sequence
  Description of Artificial Sequence: Synthetic oligonucleotide
  Sense strand starting at position 3690 of SEQ ID NO: 1564314
guguauugaccugaucccu

SEQ ID NO: 1870676 - RNA, 19 nt, Artificial Sequence
  Description of Artificial Sequence: Synthetic oligonucleotide
  Antisense strand to SEQ ID NO: 1870675
agggaucaggucaauacac

SEQ ID NO: 1870677 - RNA, 19 nt, Artificial Sequence
  Description of Artificial Sequence: Synthetic oligonucleotide
  Sense strand starting at position 3696 of SEQ ID NO: 1564314
ugaccugaucccugggaca

SEQ ID NO: 1870678 - RNA, 19 nt, Artificial Sequence
  Description of Artificial Sequence: Synthetic oligonucleotide
  Antisense strand to SEQ ID NO: 1870677
ugucccagggaucagguca

SEQ ID NO: 1870679 - RNA, 19 nt, Artificial Sequence
  Description of Artificial Sequence: Synthetic oligonucleotide
  Sense strand starting at position 3709 of SEQ ID NO: 1564314
gggacaaguuucccagacu

SEQ ID NO: 1870680 - RNA, 19 nt, Artificial Sequence
  Description of Artificial Sequence: Synthetic oligonucleotide
  Antisense strand to SEQ ID NO: 1870679
agucugggaaacuuguccc

SEQ ID NO: 1870681 - RNA, 19 nt, Artificial Sequence
  Description of Artificial Sequence: Synthetic oligonucleotide
  Sense strand starting at position 3724 of SEQ ID NO: 1564314
gacugaaaucaugguauca

SEQ ID NO: 1870682 - RNA, 19 nt, Artificial Sequence
  Description of Artificial Sequence: Synthetic oligonucleotide
  Antisense strand to SEQ ID NO: 1870681
ugauaccaugauuucaguc

SEQ ID NO: 1870683 - RNA, 19 nt, Artificial Sequence
  Description of Artificial Sequence: Synthetic oligonucleotide
  Sense strand starting at position 3788 of SEQ ID NO: 1564314
ucaauccguguguaaauaa

SEQ ID NO: 1870684 - RNA, 19 nt, Artificial Sequence
  Description of Artificial Sequence: Synthetic oligonucleotide
  Antisense strand to SEQ ID NO: 1870683
uuauuuacacacggauuga

SEQ ID NO: 1870685 - RNA, 19 nt, Artificial Sequence
  Description of Artificial Sequence: Synthetic oligonucleotide
  Sense strand starting at position 3825 of SEQ ID NO: 1564314
agauguaugcaauaaugca

SEQ ID NO: 1870686 - RNA, 19 nt, Artificial Sequence
  Description of Artificial Sequence: Synthetic oligonucleotide
  Antisense strand to SEQ ID NO: 1870685
ugcauuauugcauacaucu

SEQ ID NO: 1870687 - RNA, 19 nt, Artificial Sequence
  Description of Artificial Sequence: Synthetic oligonucleotide
  Sense strand starting at position 3894 of SEQ ID NO: 1564314
aacagaucugaucguaauu

SEQ ID NO: 1870688 - RNA, 19 nt, Artificial Sequence
  Description of Artificial Sequence: Synthetic oligonucleotide
  Antisense strand to SEQ ID NO: 1870687
aauuacgaucagaucuguu

SEQ ID NO: 1870689 - RNA, 19 nt, Artificial Sequence
  Description of Artificial Sequence: Synthetic oligonucleotide
  Sense strand starting at position 3934 of SEQ ID NO: 1564314
guaguuucuguggcguagu

SEQ ID NO: 1870690 - RNA, 19 nt, Artificial Sequence
  Description of Artificial Sequence: Synthetic oligonucleotide
  Antisense strand to SEQ ID NO: 1870689
acuacgccacagaaacuac

SEQ ID NO: 1870691 - RNA, 19 nt, Artificial Sequence
  Description of Artificial Sequence: Synthetic oligonucleotide
  Sense strand starting at position 153 of SEQ ID NO: 1564315
uuauuauauccagggacug

SEQ ID NO: 1870692 - RNA, 19 nt, Artificial Sequence
  Description of Artificial Sequence: Synthetic oligonucleotide
  Antisense strand to SEQ ID NO: 1870691
cagucccuggauauaauaa

SEQ ID NO: 1870693 - RNA, 19 nt, Artificial Sequence
  Description of Artificial Sequence: Synthetic oligonucleotide
  Sense strand starting at position 225 of SEQ ID NO: 1564315
uugagauccuuuccuaaug

SEQ ID NO: 1870694 - RNA, 19 nt, Artificial Sequence
  Description of Artificial Sequence: Synthetic oligonucleotide
  Antisense strand to SEQ ID NO: 1870693
cauuaggaaaggaucucaa

SEQ ID NO: 1870695 - RNA, 19 nt, Artificial Sequence
  Description of Artificial Sequence: Synthetic oligonucleotide
  Sense strand starting at position 226 of SEQ ID NO: 1564315
ugagauccuuuccuaaugu

SEQ ID NO: 1870696 - RNA, 19 nt, Artificial Sequence
  Description of Artificial Sequence: Synthetic oligonucleotide
  Antisense strand to SEQ ID NO: 1870695
acauuaggaaaggaucuca

SEQ ID NO: 1870697 - RNA, 19 nt, Artificial Sequence
  Description of Artificial Sequence: Synthetic oligonucleotide
  Sense strand starting at position 255 of SEQ ID NO: 1564315
ccuauuacuggucauggca

SEQ ID NO: 1870698 - RNA, 19 nt, Artificial Sequence
  Description of Artificial Sequence: Synthetic oligonucleotide
  Antisense strand to SEQ ID NO: 1870697
ugccaugaccaguaauagg

SEQ ID NO: 1870699 - RNA, 19 nt, Artificial Sequence
  Description of Artificial Sequence: Synthetic oligonucleotide
  Sense strand starting at position 258 of SEQ ID NO: 1564315
auuacuggucauggcauaa

SEQ ID NO: 1870700 - RNA, 19 nt, Artificial Sequence
  Description of Artificial Sequence: Synthetic oligonucleotide
  Antisense strand to SEQ ID NO: 1870699
uuaugccaugaccaguaau

SEQ ID NO: 1870701 - RNA, 19 nt, Artificial Sequence
  Description of Artificial Sequence: Synthetic oligonucleotide
  Sense strand starting at position 664 of SEQ ID NO: 1564315
aaucuauguuggguuggau

SEQ ID NO: 1870702 - RNA, 19 nt, Artificial Sequence
  Description of Artificial Sequence: Synthetic oligonucleotide
  Antisense strand to SEQ ID NO: 1870701
auccaacccaacauagauu

SEQ ID NO: 1870703 - RNA, 19 nt, Artificial Sequence
  Description of Artificial Sequence: Synthetic oligonucleotide
  Sense strand starting at position 690 of SEQ ID NO: 1564315
aucuguuaucaguaagcau

SEQ ID NO: 1870704 - RNA, 19 nt, Artificial Sequence
  Description of Artificial Sequence: Synthetic oligonucleotide
  Antisense strand to SEQ ID NO: 1870703
augcuuacugauaacagau

SEQ ID NO: 1870705 - RNA, 19 nt, Artificial Sequence
  Description of Artificial Sequence: Synthetic oligonucleotide
  Sense strand starting at position 763 of SEQ ID NO: 1564315
uguaauacucuuggauuag

SEQ ID NO: 1870706 - RNA, 19 nt, Artificial Sequence
  Description of Artificial Sequence: Synthetic oligonucleotide
  Antisense strand to SEQ ID NO: 1870705
cuaauccaagaguauuaca

SEQ ID NO: 1870707 - RNA, 19 nt, Artificial Sequence
  Description of Artificial Sequence: Synthetic oligonucleotide
  Sense strand starting at position 790 of SEQ ID NO: 1564315
ucaugagaugcaugaucau

SEQ ID NO: 1870708 - RNA, 19 nt, Artificial Sequence
  Description of Artificial Sequence: Synthetic oligonucleotide
  Antisense strand to SEQ ID NO: 1870707
augaucaugcaucucauga

SEQ ID NO: 1870709 - RNA, 19 nt, Artificial Sequence
  Description of Artificial Sequence: Synthetic oligonucleotide
  Sense strand starting at position 821 of SEQ ID NO: 1564315
ggaagaccuuuaucagugu

SEQ ID NO: 1870710 - RNA, 19 nt, Artificial Sequence
  Description of Artificial Sequence: Synthetic oligonucleotide
  Antisense strand to SEQ ID NO: 1870709
acacugauaaaggucuucc

SEQ ID NO: 1870711 - RNA, 19 nt, Artificial Sequence
  Description of Artificial Sequence: Synthetic oligonucleotide
  Sense strand starting at position 1027 of SEQ ID NO: 1564315
gggaaaguguguuugagag

SEQ ID NO: 1870712 - RNA, 19 nt, Artificial Sequence
  Description of Artificial Sequence: Synthetic oligonucleotide
  Antisense strand to SEQ ID NO: 1870711
cucucaaacacacuuuccc

SEQ ID NO: 1870713 - RNA, 19 nt, Artificial Sequence
  Description of Artificial Sequence: Synthetic oligonucleotide
  Sense strand starting at position 1034 of SEQ ID NO: 1564315
uguguuugagaggauagcu

SEQ ID NO: 1870714 - RNA, 19 nt, Artificial Sequence
  Description of Artificial Sequence: Synthetic oligonucleotide
  Antisense strand to SEQ ID NO: 1870713
agcuauccucucaaacaca

SEQ ID NO: 1870715 - RNA, 19 nt, Artificial Sequence
  Description of Artificial Sequence: Synthetic oligonucleotide
  Sense strand starting at position 1039 of SEQ ID NO: 1564315
uugagaggauagcuguauu

SEQ ID NO: 1870716 - RNA, 19 nt, Artificial Sequence
  Description of Artificial Sequence: Synthetic oligonucleotide
  Antisense strand to SEQ ID NO: 1870715
aauacagcuauccucucaa

SEQ ID NO: 1870717 - RNA, 19 nt, Artificial Sequence
  Description of Artificial Sequence: Synthetic oligonucleotide
  Sense strand starting at position 1049 of SEQ ID NO: 1564315
agcuguauuugaccacuuu

SEQ ID NO: 1870718 - RNA, 19 nt, Artificial Sequence
  Description of Artificial Sequence: Synthetic oligonucleotide
  Antisense strand to SEQ ID NO: 1870717
aaaguggucaaauacagcu

SEQ ID NO: 1870719 - RNA, 19 nt, Artificial Sequence
  Description of Artificial Sequence: Synthetic oligonucleotide
  Sense strand starting at position 1134 of SEQ ID NO: 1564315
caacuagaaguguguacau

SEQ ID NO: 1870720 - RNA, 19 nt, Artificial Sequence
  Description of Artificial Sequence: Synthetic oligonucleotide
  Antisense strand to SEQ ID NO: 1870719
auguacacacuucuaguug

SEQ ID NO: 1870721 - RNA, 19 nt, Artificial Sequence
  Description of Artificial Sequence: Synthetic oligonucleotide
  Sense strand starting at position 1136 of SEQ ID NO: 1564315
acuagaaguguguacaucu

SEQ ID NO: 1870722 - RNA, 19 nt, Artificial Sequence
  Description of Artificial Sequence: Synthetic oligonucleotide
  Antisense strand to SEQ ID NO: 1870721
agauguacacacuucuagu

SEQ ID NO: 1870723 - RNA, 19 nt, Artificial Sequence
  Description of Artificial Sequence: Synthetic oligonucleotide
  Sense strand starting at position 1179 of SEQ ID NO: 1564315
acuuaaguugggcaaucua

SEQ ID NO: 1870724 - RNA, 19 nt, Artificial Sequence
  Description of Artificial Sequence: Synthetic oligonucleotide
  Antisense strand to SEQ ID NO: 1870723
uagauugcccaacuuaagu

SEQ ID NO: 1870725 - RNA, 19 nt, Artificial Sequence
  Description of Artificial Sequence: Synthetic oligonucleotide
  Sense strand starting at position 1189 of SEQ ID NO: 1564315
ggcaaucuagcagagcaau

SEQ ID NO: 1870726 - RNA, 19 nt, Artificial Sequence
  Description of Artificial Sequence: Synthetic oligonucleotide
  Antisense strand to SEQ ID NO: 1870725
auugcucugcuagauugcc

SEQ ID NO: 1870727 - RNA, 19 nt, Artificial Sequence
  Description of Artificial Sequence: Synthetic oligonucleotide
  Sense strand starting at position 1232 of SEQ ID NO: 1564315
acaggauauuucugaugag

SEQ ID NO: 1870728 - RNA, 19 nt, Artificial Sequence
  Description of Artificial Sequence: Synthetic oligonucleotide
  Antisense strand to SEQ ID NO: 1870727
cucaucagaaauauccugu

SEQ ID NO: 1870729 - RNA, 19 nt, Artificial Sequence
  Description of Artificial Sequence: Synthetic oligonucleotide
  Sense strand starting at position 1233 of SEQ ID NO: 1564315
caggauauuucugaugaga

SEQ ID NO: 1870730 - RNA, 19 nt, Artificial Sequence
  Description of Artificial Sequence: Synthetic oligonucleotide
  Antisense strand to SEQ ID NO: 1870729
ucucaucagaaauauccug

SEQ ID NO: 1870731 - RNA, 19 nt, Artificial Sequence
  Description of Artificial Sequence: Synthetic oligonucleotide
  Sense strand starting at position 1235 of SEQ ID NO: 1564315
ggauauuucugaugagauu

SEQ ID NO: 1870732 - RNA, 19 nt, Artificial Sequence
  Description of Artificial Sequence: Synthetic oligonucleotide
  Antisense strand to SEQ ID NO: 1870731
aaucucaucagaaauaucc

SEQ ID NO: 1870733 - RNA, 19 nt, Artificial Sequence
  Description of Artificial Sequence: Synthetic oligonucleotide
  Sense strand starting at position 1704 of SEQ ID NO: 1564315
ccuuaugaccuggaagcuu

SEQ ID NO: 1870734 - RNA, 19 nt, Artificial Sequence
  Description of Artificial Sequence: Synthetic oligonucleotide
  Antisense strand to SEQ ID NO: 1870733
aagcuuccaggucauaagg

SEQ ID NO: 1870735 - RNA, 19 nt, Artificial Sequence
  Description of Artificial Sequence: Synthetic oligonucleotide
  Sense strand starting at position 2114 of SEQ ID NO: 1564315
guuucauaugccucgcgga

SEQ ID NO: 1870736 - RNA, 19 nt, Artificial Sequence
  Description of Artificial Sequence: Synthetic oligonucleotide
  Antisense strand to SEQ ID NO: 1870735
uccgcgaggcauaugaaac

SEQ ID NO: 1870737 - RNA, 19 nt, Artificial Sequence
  Description of Artificial Sequence: Synthetic oligonucleotide
  Sense strand starting at position 2389 of SEQ ID NO: 1564315
acuccuagucggcaagaca

SEQ ID NO: 1870738 - RNA, 19 nt, Artificial Sequence
  Description of Artificial Sequence: Synthetic oligonucleotide
  Antisense strand to SEQ ID NO: 1870737
ugucuugccgacuaggagu

SEQ ID NO: 1870739 - RNA, 19 nt, Artificial Sequence
  Description of Artificial Sequence: Synthetic oligonucleotide
  Sense strand starting at position 2408 of SEQ ID NO: 1564315
gaaggaagucacgaugucu

SEQ ID NO: 1870740 - RNA, 19 nt, Artificial Sequence
  Description of Artificial Sequence: Synthetic oligonucleotide
  Antisense strand to SEQ ID NO: 1870739
agacaucgugacuuccuuc

SEQ ID NO: 1870741 - RNA, 19 nt, Artificial Sequence
  Description of Artificial Sequence: Synthetic oligonucleotide
  Sense strand starting at position 2800 of SEQ ID NO: 1564315
agggcaauggcaugacuuu

SEQ ID NO: 1870742 - RNA, 19 nt, Artificial Sequence
  Description of Artificial Sequence: Synthetic oligonucleotide
  Antisense strand to SEQ ID NO: 1870741
aaagucaugccauugcccu

SEQ ID NO: 1870743 - RNA, 19 nt, Artificial Sequence
  Description of Artificial Sequence: Synthetic oligonucleotide
  Sense strand starting at position 2801 of SEQ ID NO: 1564315
gggcaauggcaugacuuua

SEQ ID NO: 1870744 - RNA, 19 nt, Artificial Sequence
  Description of Artificial Sequence: Synthetic oligonucleotide
  Antisense strand to SEQ ID NO: 1870743
uaaagucaugccauugccc

SEQ ID NO: 1870745 - RNA, 19 nt, Artificial Sequence
  Description of Artificial Sequence: Synthetic oligonucleotide
  Sense strand starting at position 2831 of SEQ ID NO: 1564315
ccuggaucuccugggcaua

SEQ ID NO: 1870746 - RNA, 19 nt, Artificial Sequence
  Description of Artificial Sequence: Synthetic oligonucleotide
  Antisense strand to SEQ ID NO: 1870745
uaugcccaggagauccagg

SEQ ID NO: 1870747 - RNA, 19 nt, Artificial Sequence
  Description of Artificial Sequence: Synthetic oligonucleotide
  Sense strand starting at position 2832 of SEQ ID NO: 1564315
cuggaucuccugggcauaa

SEQ ID NO: 1870748 - RNA, 19 nt, Artificial Sequence
  Description of Artificial Sequence: Synthetic oligonucleotide
  Antisense strand to SEQ ID NO: 1870747
uuaugcccaggagauccag

SEQ ID NO: 1870749 - RNA, 19 nt, Artificial Sequence
  Description of Artificial Sequence: Synthetic oligonucleotide
  Sense strand starting at position 2843 of SEQ ID NO: 1564315
gggcauaagcaauacucaa

SEQ ID NO: 1870750 - RNA, 19 nt, Artificial Sequence
  Description of Artificial Sequence: Synthetic oligonucleotide
  Antisense strand to SEQ ID NO: 1870749
uugaguauugcuuaugccc

SEQ ID NO: 1870751 - RNA, 19 nt, Artificial Sequence
  Description of Artificial Sequence: Synthetic oligonucleotide
  Sense strand starting at position 2970 of SEQ ID NO: 1564315
cucaauuucugggaucgag

SEQ ID NO: 1870752 - RNA, 19 nt, Artificial Sequence
  Description of Artificial Sequence: Synthetic oligonucleotide
  Antisense strand to SEQ ID NO: 1870751
cucgaucccagaaauugag

SEQ ID NO: 1870753 - RNA, 19 nt, Artificial Sequence
  Description of Artificial Sequence: Synthetic oligonucleotide
  Sense strand starting at position 3308 of SEQ ID NO: 1564315
cccugugggagguaaugua

SEQ ID NO: 1870754 - RNA, 19 nt, Artificial Sequence
  Description of Artificial Sequence: Synthetic oligonucleotide
  Antisense strand to SEQ ID NO: 1870753
uacauuaccucccacaggg

SEQ ID NO: 1870755 - RNA, 19 nt, Artificial Sequence
  Description of Artificial Sequence: Synthetic oligonucleotide
  Sense strand starting at position 3356 of SEQ ID NO: 1564315
cccugauagugaguaaguu

SEQ ID NO: 1870756 - RNA, 19 nt, Artificial Sequence
  Description of Artificial Sequence: Synthetic oligonucleotide
  Antisense strand to SEQ ID NO: 1870755
aacuuacucacuaucaggg

SEQ ID NO: 1870757 - RNA, 19 nt, Artificial Sequence
  Description of Artificial Sequence: Synthetic oligonucleotide
  Sense strand starting at position 3357 of SEQ ID NO: 1564315
ccugauagugaguaaguuu

SEQ ID NO: 1870758 - RNA, 19 nt, Artificial Sequence
  Description of Artificial Sequence: Synthetic oligonucleotide
  Antisense strand to SEQ ID NO: 1870757
aaacuuacucacuaucagg

SEQ ID NO: 1870759 - RNA, 19 nt, Artificial Sequence
  Description of Artificial Sequence: Synthetic oligonucleotide
  Sense strand starting at position 3654 of SEQ ID NO: 1564315
ggugacugugcucaucaua

SEQ ID NO: 1870760 - RNA, 19 nt, Artificial Sequence
  Description of Artificial Sequence: Synthetic oligonucleotide
  Antisense strand to SEQ ID NO: 1870759
uaugaugagcacagucacc

SEQ ID NO: 1870761 - RNA, 19 nt, Artificial Sequence
  Description of Artificial Sequence: Synthetic oligonucleotide
  Sense strand starting at position 3767 of SEQ ID NO: 1564315
gaggcacuaguaugucaga

SEQ ID NO: 1870762 - RNA, 19 nt, Artificial Sequence
  Description of Artificial Sequence: Synthetic oligonucleotide
  Antisense strand to SEQ ID NO: 1870761
ucugacauacuagugccuc

SEQ ID NO: 1870763 - RNA, 19 nt, Artificial Sequence
  Description of Artificial Sequence: Synthetic oligonucleotide
  Sense strand starting at position 3774 of SEQ ID NO: 1564315
uaguaugucagauguggaa

SEQ ID NO: 1870764 - RNA, 19 nt, Artificial Sequence
  Description of Artificial Sequence: Synthetic oligonucleotide
  Antisense strand to SEQ ID NO: 1870763
uuccacaucugacauacua

SEQ ID NO: 1870765 - RNA, 19 nt, Artificial Sequence
  Description of Artificial Sequence: Synthetic oligonucleotide
  Sense strand starting at position 3893 of SEQ ID NO: 1564315
uuaggauugguggaugcaa

SEQ ID NO: 1870766 - RNA, 19 nt, Artificial Sequence
  Description of Artificial Sequence: Synthetic oligonucleotide
  Antisense strand to SEQ ID NO: 1870765
uugcauccaccaauccuaa

SEQ ID NO: 1870767 - RNA, 19 nt, Artificial Sequence
  Description of Artificial Sequence: Synthetic oligonucleotide
  Sense strand starting at position 3895 of SEQ ID NO: 1564315
aggauugguggaugcaaca

SEQ ID NO: 1870768 - RNA, 19 nt, Artificial Sequence
  Description of Artificial Sequence: Synthetic oligonucleotide
  Antisense strand to SEQ ID NO: 1870767
uguugcauccaccaauccu

SEQ ID NO: 1870769 - RNA, 19 nt, Artificial Sequence
  Description of Artificial Sequence: Synthetic oligonucleotide
  Sense strand starting at position 3978 of SEQ ID NO: 1564315
ugaggaguugauggaucuu

SEQ ID NO: 1870770 - RNA, 19 nt, Artificial Sequence
  Description of Artificial Sequence: Synthetic oligonucleotide
  Antisense strand to SEQ ID NO: 1870769
aagauccaucaacuccuca

SEQ ID NO: 1870771 - RNA, 19 nt, Artificial Sequence
  Description of Artificial Sequence: Synthetic oligonucleotide
  Sense strand starting at position 101 of SEQ ID NO: 1564316
aucgcugucuuccacaaga

SEQ ID NO: 1870772 - RNA, 19 nt, Artificial Sequence
  Description of Artificial Sequence: Synthetic oligonucleotide
  Antisense strand to SEQ ID NO: 1870771
ucuuguggaagacagcgau

SEQ ID NO: 1870773 - RNA, 19 nt, Artificial Sequence
  Description of Artificial Sequence: Synthetic oligonucleotide
  Sense strand starting at position 103 of SEQ ID NO: 1564316
cgcugucuuccacaagagu

SEQ ID NO: 1870774 - RNA, 19 nt, Artificial Sequence
  Description of Artificial Sequence: Synthetic oligonucleotide
  Antisense strand to SEQ ID NO: 1870773
acucuuguggaagacagcg

SEQ ID NO: 1870775 - RNA, 19 nt, Artificial Sequence
  Description of Artificial Sequence: Synthetic oligonucleotide
  Sense strand starting at position 106 of SEQ ID NO: 1564316
ugucuuccacaagaguaca

SEQ ID NO: 1870776 - RNA, 19 nt, Artificial Sequence
  Description of Artificial Sequence: Synthetic oligonucleotide
  Antisense strand to SEQ ID NO: 1870775
uguacucuuguggaagaca

SEQ ID NO: 1870777 - RNA, 19 nt, Artificial Sequence
  Description of Artificial Sequence: Synthetic oligonucleotide
  Sense strand starting at position 119 of SEQ ID NO: 1564316
aguacagaaacuugaguga

SEQ ID NO: 1870778 - RNA, 19 nt, Artificial Sequence
  Description of Artificial Sequence: Synthetic oligonucleotide
  Antisense strand to SEQ ID NO: 1870777
ucacucaaguuucuguacu

SEQ ID NO: 1870779 - RNA, 19 nt, Artificial Sequence
  Description of Artificial Sequence: Synthetic oligonucleotide
  Sense strand starting at position 186 of SEQ ID NO: 1564316
aacagugaauugcuaaagu

SEQ ID NO: 1870780 - RNA, 19 nt, Artificial Sequence
  Description of Artificial Sequence: Synthetic oligonucleotide
  Antisense strand to SEQ ID NO: 1870779
acuuuagcaauucacuguu

SEQ ID NO: 1870781 - RNA, 19 nt, Artificial Sequence
  Description of Artificial Sequence: Synthetic oligonucleotide
  Sense strand starting at position 242 of SEQ ID NO: 1564316
aaugcucucuguugaggaa

SEQ ID NO: 1870782 - RNA, 19 nt, Artificial Sequence
  Description of Artificial Sequence: Synthetic oligonucleotide
  Antisense strand to SEQ ID NO: 1870781
uuccucaacagagagcauu

SEQ ID NO: 1870783 - RNA, 19 nt, Artificial Sequence
  Description of Artificial Sequence: Synthetic oligonucleotide
  Sense strand starting at position 245 of SEQ ID NO: 1564316
gcucucuguugaggaaaua

SEQ ID NO: 1870784 - RNA, 19 nt, Artificial Sequence
  Description of Artificial Sequence: Synthetic oligonucleotide
  Antisense strand to SEQ ID NO: 1870783
uauuuccucaacagagagc

SEQ ID NO: 1870785 - RNA, 19 nt, Artificial Sequence
  Description of Artificial Sequence: Synthetic oligonucleotide
  Sense strand starting at position 281 of SEQ ID NO: 1564316
aucuuaucguacuucgagu

SEQ ID NO: 1870786 - RNA, 19 nt, Artificial Sequence
  Description of Artificial Sequence: Synthetic oligonucleotide
  Antisense strand to SEQ ID NO: 1870785
acucgaaguacgauaagau

SEQ ID NO: 1870787 - RNA, 19 nt, Artificial Sequence
  Description of Artificial Sequence: Synthetic oligonucleotide
  Sense strand starting at position 283 of SEQ ID NO: 1564316
cuuaucguacuucgaguuu

SEQ ID NO: 1870788 - RNA, 19 nt, Artificial Sequence
  Description of Artificial Sequence: Synthetic oligonucleotide
  Antisense strand to SEQ ID NO: 1870787
aaacucgaaguacgauaag

SEQ ID NO: 1870789 - RNA, 19 nt, Artificial Sequence
  Description of Artificial Sequence: Synthetic oligonucleotide
  Sense strand starting at position 368 of SEQ ID NO: 1564316
guaugccaauguccugaau

SEQ ID NO: 1870790 - RNA, 19 nt, Artificial Sequence
  Description of Artificial Sequence: Synthetic oligonucleotide
  Antisense strand to SEQ ID NO: 1870789
auucaggacauuggcauac

SEQ ID NO: 1870791 - RNA, 19 nt, Artificial Sequence
  Description of Artificial Sequence: Synthetic oligonucleotide
  Sense strand starting at position 370 of SEQ ID NO: 1564316
augccaauguccugaauua

SEQ ID NO: 1870792 - RNA, 19 nt, Artificial Sequence
  Description of Artificial Sequence: Synthetic oligonucleotide
  Antisense strand to SEQ ID NO: 1870791
uaauucaggacauuggcau

SEQ ID NO: 1870793 - RNA, 19 nt, Artificial Sequence
  Description of Artificial Sequence: Synthetic oligonucleotide
  Sense strand starting at position 371 of SEQ ID NO: 1564316
ugccaauguccugaauuau

SEQ ID NO: 1870794 - RNA, 19 nt, Artificial Sequence
  Description of Artificial Sequence: Synthetic oligonucleotide
  Antisense strand to SEQ ID NO: 1870793
auaauucaggacauuggca

SEQ ID NO: 1870795 - RNA, 19 nt, Artificial Sequence
  Description of Artificial Sequence: Synthetic oligonucleotide
  Sense strand starting at position 429 of SEQ ID NO: 1564316
aggaaagaguggcugucau

SEQ ID NO: 1870796 - RNA, 19 nt, Artificial Sequence
  Description of Artificial Sequence: Synthetic oligonucleotide
  Antisense strand to SEQ ID NO: 1870795
augacagccacucuuuccu

SEQ ID NO: 1870797 - RNA, 19 nt, Artificial Sequence
  Description of Artificial Sequence: Synthetic oligonucleotide
  Sense strand starting at position 637 of SEQ ID NO: 1564316
acucaacuguucuugguaa

SEQ ID NO: 1870798 - RNA, 19 nt, Artificial Sequence
  Description of Artificial Sequence: Synthetic oligonucleotide
  Antisense strand to SEQ ID NO: 1870797
uuaccaagaacaguugagu

SEQ ID NO: 1870799 - RNA, 19 nt, Artificial Sequence
  Description of Artificial Sequence: Synthetic oligonucleotide
  Sense strand starting at position 696 of SEQ ID NO: 1564316
gggcuaacauccuuaugca

SEQ ID NO: 1870800 - RNA, 19 nt, Artificial Sequence
  Description of Artificial Sequence: Synthetic oligonucleotide
  Antisense strand to SEQ ID NO: 1870799
ugcauaaggauguuagccc

SEQ ID NO: 1870801 - RNA, 19 nt, Artificial Sequence
  Description of Artificial Sequence: Synthetic oligonucleotide
  Sense strand starting at position 697 of SEQ ID NO: 1564316
ggcuaacauccuuaugcaa

SEQ ID NO: 1870802 - RNA, 19 nt, Artificial Sequence
  Description of Artificial Sequence: Synthetic oligonucleotide
  Antisense strand to SEQ ID NO: 1870801
uugcauaaggauguuagcc

SEQ ID NO: 1870803 - RNA, 19 nt, Artificial Sequence
  Description of Artificial Sequence: Synthetic oligonucleotide
  Sense strand starting at position 997 of SEQ ID NO: 1564316
gccaacucucagcaaaugu

SEQ ID NO: 1870804 - RNA, 19 nt, Artificial Sequence
  Description of Artificial Sequence: Synthetic oligonucleotide
  Antisense strand to SEQ ID NO: 1870803
acauuugcugagaguuggc

SEQ ID NO: 1870805 - RNA, 19 nt, Artificial Sequence
  Description of Artificial Sequence: Synthetic oligonucleotide
  Sense strand starting at position 1461 of SEQ ID NO: 1564316
uaaucuaagcugggaugaa

SEQ ID NO: 1870806 - RNA, 19 nt, Artificial Sequence
  Description of Artificial Sequence: Synthetic oligonucleotide
  Antisense strand to SEQ ID NO: 1870805
uucaucccagcuuagauua

SEQ ID NO: 1870807 - RNA, 19 nt, Artificial Sequence
  Description of Artificial Sequence: Synthetic oligonucleotide
  Sense strand starting at position 1462 of SEQ ID NO: 1564316
aaucuaagcugggaugaau

SEQ ID NO: 1870808 - RNA, 19 nt, Artificial Sequence
  Description of Artificial Sequence: Synthetic oligonucleotide
  Antisense strand to SEQ ID NO: 1870807
auucaucccagcuuagauu

SEQ ID NO: 1870809 - RNA, 19 nt, Artificial Sequence
  Description of Artificial Sequence: Synthetic oligonucleotide
  Sense strand starting at position 1470 of SEQ ID NO: 1564316
cugggaugaauguguguaa

SEQ ID NO: 1870810 - RNA, 19 nt, Artificial Sequence
  Description of Artificial Sequence: Synthetic oligonucleotide
  Antisense strand to SEQ ID NO: 1870809
uuacacacauucaucccag

SEQ ID NO: 1870811 - RNA, 19 nt, Artificial Sequence
  Description of Artificial Sequence: Synthetic oligonucleotide
  Sense strand starting at position 1628 of SEQ ID NO: 1564316
gggagaccuuuauugguau

SEQ ID NO: 1870812 - RNA, 19 nt, Artificial Sequence
  Description of Artificial Sequence: Synthetic oligonucleotide
  Antisense strand to SEQ ID NO: 1870811
auaccaauaaaggucuccc

SEQ ID NO: 1870813 - RNA, 19 nt, Artificial Sequence
  Description of Artificial Sequence: Synthetic oligonucleotide
  Sense strand starting at position 1629 of SEQ ID NO: 1564316
ggagaccuuuauugguaua

SEQ ID NO: 1870814 - RNA, 19 nt, Artificial Sequence
  Description of Artificial Sequence: Synthetic oligonucleotide
  Antisense strand to SEQ ID NO: 1870813
uauaccaauaaaggucucc

SEQ ID NO: 1870815 - RNA, 19 nt, Artificial Sequence
  Description of Artificial Sequence: Synthetic oligonucleotide
  Sense strand starting at position 1631 of SEQ ID NO: 1564316
agaccuuuauugguauauc

SEQ ID NO: 1870816 - RNA, 19 nt, Artificial Sequence
  Description of Artificial Sequence: Synthetic oligonucleotide
  Antisense strand to SEQ ID NO: 1870815
gauauaccaauaaaggucu

SEQ ID NO: 1870817 - RNA, 19 nt, Artificial Sequence
  Description of Artificial Sequence: Synthetic oligonucleotide
  Sense strand starting at position 1634 of SEQ ID NO: 1564316
ccuuuauugguauaucuau

SEQ ID NO: 1870818 - RNA, 19 nt, Artificial Sequence
  Description of Artificial Sequence: Synthetic oligonucleotide
  Antisense strand to SEQ ID NO: 1870817
auagauauaccaauaaagg

SEQ ID NO: 1870819 - RNA, 19 nt, Artificial Sequence
  Description of Artificial Sequence: Synthetic oligonucleotide
  Sense strand starting at position 1640 of SEQ ID NO: 1564316
uugguauaucuauacuggu

SEQ ID NO: 1870820 - RNA, 19 nt, Artificial Sequence
  Description of Artificial Sequence: Synthetic oligonucleotide
  Antisense strand to SEQ ID NO: 1870819
accaguauagauauaccaa

SEQ ID NO: 1870821 - RNA, 19 nt, Artificial Sequence
  Description of Artificial Sequence: Synthetic oligonucleotide
  Sense strand starting at position 1812 of SEQ ID NO: 1564316
ugaucuuccucgccaaauc

SEQ ID NO: 1870822 - RNA, 19 nt, Artificial Sequence
  Description of Artificial Sequence: Synthetic oligonucleotide
  Antisense strand to SEQ ID NO: 1870821
gauuuggcgaggaagauca

SEQ ID NO: 1870823 - RNA, 19 nt, Artificial Sequence
  Description of Artificial Sequence: Synthetic oligonucleotide
  Sense strand starting at position 1976 of SEQ ID NO: 1564316
aaguaugugugccuucuga

SEQ ID NO: 1870824 - RNA, 19 nt, Artificial Sequence
  Description of Artificial Sequence: Synthetic oligonucleotide
  Antisense strand to SEQ ID NO: 1870823
ucagaaggcacacauacuu

SEQ ID NO: 1870825 - RNA, 19 nt, Artificial Sequence
  Description of Artificial Sequence: Synthetic oligonucleotide
  Sense strand starting at position 1987 of SEQ ID NO: 1564316
ccuucugaaugcuugggaa

SEQ ID NO: 1870826 - RNA, 19 nt, Artificial Sequence
  Description of Artificial Sequence: Synthetic oligonucleotide
  Antisense strand to SEQ ID NO: 1870825
uucccaagcauucagaagg

SEQ ID NO: 1870827 - RNA, 19 nt, Artificial Sequence
  Description of Artificial Sequence: Synthetic oligonucleotide
  Sense strand starting at position 2007 of SEQ ID NO: 1564316
ccauuaaguuggucaagcu

SEQ ID NO: 1870828 - RNA, 19 nt, Artificial Sequence
  Description of Artificial Sequence: Synthetic oligonucleotide
  Antisense strand to SEQ ID NO: 1870827
agcuugaccaacuuaaugg

SEQ ID NO: 1870829 - RNA, 19 nt, Artificial Sequence
  Description of Artificial Sequence: Synthetic oligonucleotide
  Sense strand starting at position 2008 of SEQ ID NO: 1564316
cauuaaguuggucaagcua

SEQ ID NO: 1870830 - RNA, 19 nt, Artificial Sequence
  Description of Artificial Sequence: Synthetic oligonucleotide
  Antisense strand to SEQ ID NO: 1870829
uagcuugaccaacuuaaug

SEQ ID NO: 1870831 - RNA, 19 nt, Artificial Sequence
  Description of Artificial Sequence: Synthetic oligonucleotide
  Sense strand starting at position 2029 of SEQ ID NO: 1564316
ugagcaauuucuuaaggcu

SEQ ID NO: 1870832 - RNA, 19 nt, Artificial Sequence
  Description of Artificial Sequence: Synthetic oligonucleotide
  Antisense strand to SEQ ID NO: 1870831
agccuuaagaaauugcuca

SEQ ID NO: 1870833 - RNA, 19 nt, Artificial Sequence
  Description of Artificial Sequence: Synthetic oligonucleotide
  Sense strand starting at position 2399 of SEQ ID NO: 1564316
ggaggagucuggaauccgu

SEQ ID NO: 1870834 - RNA, 19 nt, Artificial Sequence
  Description of Artificial Sequence: Synthetic oligonucleotide
  Antisense strand to SEQ ID NO: 1870833
acggauuccagacuccucc

SEQ ID NO: 1870835 - RNA, 19 nt, Artificial Sequence
  Description of Artificial Sequence: Synthetic oligonucleotide
  Sense strand starting at position 2923 of SEQ ID NO: 1564316
cacugaagacuucggaaug

SEQ ID NO: 1870836 - RNA, 19 nt, Artificial Sequence
  Description of Artificial Sequence: Synthetic oligonucleotide
  Antisense strand to SEQ ID NO: 1870835
cauuccgaagucuucagug

SEQ ID NO: 1870837 - RNA, 19 nt, Artificial Sequence
  Description of Artificial Sequence: Synthetic oligonucleotide
  Sense strand starting at position 2924 of SEQ ID NO: 1564316
acugaagacuucggaaugu

SEQ ID NO: 1870838 - RNA, 19 nt, Artificial Sequence
  Description of Artificial Sequence: Synthetic oligonucleotide
  Antisense strand to SEQ ID NO: 1870837
acauuccgaagucuucagu

SEQ ID NO: 1870839 - RNA, 19 nt, Artificial Sequence
  Description of Artificial Sequence: Synthetic oligonucleotide
  Sense strand starting at position 3499 of SEQ ID NO: 1564316
gucccaugucaccaugagu

SEQ ID NO: 1870840 - RNA, 19 nt, Artificial Sequence
  Description of Artificial Sequence: Synthetic oligonucleotide
  Antisense strand to SEQ ID NO: 1870839
acucauggugacaugggac

SEQ ID NO: 1870841 - RNA, 19 nt, Artificial Sequence
  Description of Artificial Sequence: Synthetic oligonucleotide
  Sense strand starting at position 3519 of SEQ ID NO: 1564316
gaggaugugucucagaccu

SEQ ID NO: 1870842 - RNA, 19 nt, Artificial Sequence
  Description of Artificial Sequence: Synthetic oligonucleotide
  Antisense strand to SEQ ID NO: 1870841
aggucugagacacauccuc

SEQ ID NO: 1870843 - RNA, 19 nt, Artificial Sequence
  Description of Artificial Sequence: Synthetic oligonucleotide
  Sense strand starting at position 3521 of SEQ ID NO: 1564316
ggaugugucucagaccuuu

SEQ ID NO: 1870844 - RNA, 19 nt, Artificial Sequence
  Description of Artificial Sequence: Synthetic oligonucleotide
  Antisense strand to SEQ ID NO: 1870843
aaaggucugagacacaucc

SEQ ID NO: 1870845 - RNA, 19 nt, Artificial Sequence
  Description of Artificial Sequence: Synthetic oligonucleotide
  Sense strand starting at position 3606 of SEQ ID NO: 1564316
gggugucugccauguugca

SEQ ID NO: 1870846 - RNA, 19 nt, Artificial Sequence
  Description of Artificial Sequence: Synthetic oligonucleotide
  Antisense strand to SEQ ID NO: 1870845
ugcaacauggcagacaccc

SEQ ID NO: 1870847 - RNA, 19 nt, Artificial Sequence
  Description of Artificial Sequence: Synthetic oligonucleotide
  Sense strand starting at position 3784 of SEQ ID NO: 1564316
caaugaaugucguggccaa

SEQ ID NO: 1870848 - RNA, 19 nt, Artificial Sequence
  Description of Artificial Sequence: Synthetic oligonucleotide
  Antisense strand to SEQ ID NO: 1870847
uuggccacgacauucauug

SEQ ID NO: 1870849 - RNA, 19 nt, Artificial Sequence
  Description of Artificial Sequence: Synthetic oligonucleotide
  Sense strand starting at position 3939 of SEQ ID NO: 1564316
guaccacauucccuggauu

SEQ ID NO: 1870850 - RNA, 19 nt, Artificial Sequence
  Description of Artificial Sequence: Synthetic oligonucleotide
  Antisense strand to SEQ ID NO: 1870849
aauccagggaaugugguac

SEQ ID NO: 1870851 - RNA, 19 nt, Artificial Sequence
  Description of Artificial Sequence: Synthetic oligonucleotide
  Sense strand starting at position 210 of SEQ ID NO: 1564317
gccaacucucagcaaaugu

SEQ ID NO: 1870852 - RNA, 19 nt, Artificial Sequence
  Description of Artificial Sequence: Synthetic oligonucleotide
  Antisense strand to SEQ ID NO: 1870851
acauuugcugagaguuggc

SEQ ID NO: 1870853 - RNA, 19 nt, Artificial Sequence
  Description of Artificial Sequence: Synthetic oligonucleotide
  Sense strand starting at position 674 of SEQ ID NO: 1564317
uaaucuaagcugggaugaa

SEQ ID NO: 1870854 - RNA, 19 nt, Artificial Sequence
  Description of Artificial Sequence: Synthetic oligonucleotide
  Antisense strand to SEQ ID NO: 1870853
uucaucccagcuuagauua

SEQ ID NO: 1870855 - RNA, 19 nt, Artificial Sequence
  Description of Artificial Sequence: Synthetic oligonucleotide
  Sense strand starting at position 675 of SEQ ID NO: 1564317
aaucuaagcugggaugaau

SEQ ID NO: 1870856 - RNA, 19 nt, Artificial Sequence
  Description of Artificial Sequence: Synthetic oligonucleotide
  Antisense strand to SEQ ID NO: 1870855
auucaucccagcuuagauu

SEQ ID NO: 1870857 - RNA, 19 nt, Artificial Sequence
  Description of Artificial Sequence: Synthetic oligonucleotide
  Sense strand starting at position 683 of SEQ ID NO: 1564317
cugggaugaauguguguaa

SEQ ID NO: 1870858 - RNA, 19 nt, Artificial Sequence
  Description of Artificial Sequence: Synthetic oligonucleotide
  Antisense strand to SEQ ID NO: 1870857
uuacacacauucaucccag

SEQ ID NO: 1870859 - RNA, 19 nt, Artificial Sequence
  Description of Artificial Sequence: Synthetic oligonucleotide
  Sense strand starting at position 841 of SEQ ID NO: 1564317
gggagaccuuuauugguau

SEQ ID NO: 1870860 - RNA, 19 nt, Artificial Sequence
  Description of Artificial Sequence: Synthetic oligonucleotide
  Antisense strand to SEQ ID NO: 1870859
auaccaauaaaggucuccc

SEQ ID NO: 1870861 - RNA, 19 nt, Artificial Sequence
  Description of Artificial Sequence: Synthetic oligonucleotide
  Sense strand starting at position 842 of SEQ ID NO: 1564317
ggagaccuuuauugguaua

SEQ ID NO: 1870862 - RNA, 19 nt, Artificial Sequence
  Description of Artificial Sequence: Synthetic oligonucleotide
  Antisense strand to SEQ ID NO: 1870861
uauaccaauaaaggucucc

SEQ ID NO: 1870863 - RNA, 19 nt, Artificial Sequence
  Description of Artificial Sequence: Synthetic oligonucleotide
  Sense strand starting at position 844 of SEQ ID NO: 1564317
agaccuuuauugguauauc

SEQ ID NO: 1870864 - RNA, 19 nt, Artificial Sequence
  Description of Artificial Sequence: Synthetic oligonucleotide
  Antisense strand to SEQ ID NO: 1870863
gauauaccaauaaaggucu

SEQ ID NO: 1870865 - RNA, 19 nt, Artificial Sequence
  Description of Artificial Sequence: Synthetic oligonucleotide
  Sense strand starting at position 847 of SEQ ID NO: 1564317
ccuuuauugguauaucuau

SEQ ID NO: 1870866 - RNA, 19 nt, Artificial Sequence
  Description of Artificial Sequence: Synthetic oligonucleotide
  Antisense strand to SEQ ID NO: 1870865
auagauauaccaauaaagg

SEQ ID NO: 1870867 - RNA, 19 nt, Artificial Sequence
  Description of Artificial Sequence: Synthetic oligonucleotide
  Sense strand starting at position 853 of SEQ ID NO: 1564317
uugguauaucuauacuggu

SEQ ID NO: 1870868 - RNA, 19 nt, Artificial Sequence
  Description of Artificial Sequence: Synthetic oligonucleotide
  Antisense strand to SEQ ID NO: 1870867
accaguauagauauaccaa

SEQ ID NO: 1870869 - RNA, 19 nt, Artificial Sequence
  Description of Artificial Sequence: Synthetic oligonucleotide
  Sense strand starting at position 1025 of SEQ ID NO: 1564317
ugaucuuccucgccaaauc

SEQ ID NO: 1870870 - RNA, 19 nt, Artificial Sequence
  Description of Artificial Sequence: Synthetic oligonucleotide
  Antisense strand to SEQ ID NO: 1870869
gauuuggcgaggaagauca

SEQ ID NO: 1870871 - RNA, 19 nt, Artificial Sequence
  Description of Artificial Sequence: Synthetic oligonucleotide
  Sense strand starting at position 1189 of SEQ ID NO: 1564317
aaguaugugugccuucuga

SEQ ID NO: 1870872 - RNA, 19 nt, Artificial Sequence
  Description of Artificial Sequence: Synthetic oligonucleotide
  Antisense strand to SEQ ID NO: 1870871
ucagaaggcacacauacuu

SEQ ID NO: 1870873 - RNA, 19 nt, Artificial Sequence
  Description of Artificial Sequence: Synthetic oligonucleotide
  Sense strand starting at position 1200 of SEQ ID NO: 1564317
ccuucugaaugcuugggaa

SEQ ID NO: 1870874 - RNA, 19 nt, Artificial Sequence
  Description of Artificial Sequence: Synthetic oligonucleotide
  Antisense strand to SEQ ID NO: 1870873
uucccaagcauucagaagg

SEQ ID NO: 1870875 - RNA, 19 nt, Artificial Sequence
  Description of Artificial Sequence: Synthetic oligonucleotide
  Sense strand starting at position 1220 of SEQ ID NO: 1564317
ccauuaaguuggucaagcu

SEQ ID NO: 1870876 - RNA, 19 nt, Artificial Sequence
  Description of Artificial Sequence: Synthetic oligonucleotide
  Antisense strand to SEQ ID NO: 1870875
agcuugaccaacuuaaugg

SEQ ID NO: 1870877 - RNA, 19 nt, Artificial Sequence
  Description of Artificial Sequence: Synthetic oligonucleotide
  Sense strand starting at position 1221 of SEQ ID NO: 1564317
cauuaaguuggucaagcua

SEQ ID NO: 1870878 - RNA, 19 nt, Artificial Sequence
  Description of Artificial Sequence: Synthetic oligonucleotide
  Antisense strand to SEQ ID NO: 1870877
uagcuugaccaacuuaaug

SEQ ID NO: 1870879 - RNA, 19 nt, Artificial Sequence
  Description of Artificial Sequence: Synthetic oligonucleotide
  Sense strand starting at position 1242 of SEQ ID NO: 1564317
ugagcaauuucuuaaggcu

SEQ ID NO: 1870880 - RNA, 19 nt, Artificial Sequence
  Description of Artificial Sequence: Synthetic oligonucleotide
  Antisense strand to SEQ ID NO: 1870879
agccuuaagaaauugcuca

SEQ ID NO: 1870881 - RNA, 19 nt, Artificial Sequence
  Description of Artificial Sequence: Synthetic oligonucleotide
  Sense strand starting at position 1612 of SEQ ID NO: 1564317
ggaggagucuggaauccgu

SEQ ID NO: 1870882 - RNA, 19 nt, Artificial Sequence
  Description of Artificial Sequence: Synthetic oligonucleotide
  Antisense strand to SEQ ID NO: 1870881
acggauuccagacuccucc

SEQ ID NO: 1870883 - RNA, 19 nt, Artificial Sequence
  Description of Artificial Sequence: Synthetic oligonucleotide
  Sense strand starting at position 2136 of SEQ ID NO: 1564317
cacugaagacuucggaaug

SEQ ID NO: 1870884 - RNA, 19 nt, Artificial Sequence
  Description of Artificial Sequence: Synthetic oligonucleotide
  Antisense strand to SEQ ID NO: 1870883
cauuccgaagucuucagug

SEQ ID NO: 1870885 - RNA, 19 nt, Artificial Sequence
  Description of Artificial Sequence: Synthetic oligonucleotide
  Sense strand starting at position 2137 of SEQ ID NO: 1564317
acugaagacuucggaaugu

SEQ ID NO: 1870886 - RNA, 19 nt, Artificial Sequence
  Description of Artificial Sequence: Synthetic oligonucleotide
  Antisense strand to SEQ ID NO: 1870885
acauuccgaagucuucagu

SEQ ID NO: 1870887 - RNA, 19 nt, Artificial Sequence
  Description of Artificial Sequence: Synthetic oligonucleotide
  Sense strand starting at position 2712 of SEQ ID NO: 1564317
gucccaugucaccaugagu

SEQ ID NO: 1870888 - RNA, 19 nt, Artificial Sequence
  Description of Artificial Sequence: Synthetic oligonucleotide
  Antisense strand to SEQ ID NO: 1870887
acucauggugacaugggac

SEQ ID NO: 1870889 - RNA, 19 nt, Artificial Sequence
  Description of Artificial Sequence: Synthetic oligonucleotide
  Sense strand starting at position 2732 of SEQ ID NO: 1564317
gaggaugugucucagaccu

SEQ ID NO: 1870890 - RNA, 19 nt, Artificial Sequence
  Description of Artificial Sequence: Synthetic oligonucleotide
  Antisense strand to SEQ ID NO: 1870889
aggucugagacacauccuc

SEQ ID NO: 1870891 - RNA, 19 nt, Artificial Sequence
  Description of Artificial Sequence: Synthetic oligonucleotide
  Sense strand starting at position 2734 of SEQ ID NO: 1564317
ggaugugucucagaccuuu

SEQ ID NO: 1870892 - RNA, 19 nt, Artificial Sequence
  Description of Artificial Sequence: Synthetic oligonucleotide
  Antisense strand to SEQ ID NO: 1870891
aaaggucugagacacaucc

SEQ ID NO: 1870893 - RNA, 19 nt, Artificial Sequence
  Description of Artificial Sequence: Synthetic oligonucleotide
  Sense strand starting at position 2819 of SEQ ID NO: 1564317
gggugucugccauguugca

SEQ ID NO: 1870894 - RNA, 19 nt, Artificial Sequence
  Description of Artificial Sequence: Synthetic oligonucleotide
  Antisense strand to SEQ ID NO: 1870893
ugcaacauggcagacaccc

SEQ ID NO: 1870895 - RNA, 19 nt, Artificial Sequence
  Description of Artificial Sequence: Synthetic oligonucleotide
  Sense strand starting at position 2997 of SEQ ID NO: 1564317
caaugaaugucguggccaa

SEQ ID NO: 1870896 - RNA, 19 nt, Artificial Sequence
  Description of Artificial Sequence: Synthetic oligonucleotide
  Antisense strand to SEQ ID NO: 1870895
uuggccacgacauucauug

SEQ ID NO: 1870897 - RNA, 19 nt, Artificial Sequence
  Description of Artificial Sequence: Synthetic oligonucleotide
  Sense strand starting at position 3152 of SEQ ID NO: 1564317
guaccacauucccuggauu

SEQ ID NO: 1870898 - RNA, 19 nt, Artificial Sequence
  Description of Artificial Sequence: Synthetic oligonucleotide
  Antisense strand to SEQ ID NO: 1870897
aauccagggaaugugguac

SEQ ID NO: 1870899 - RNA, 19 nt, Artificial Sequence
  Description of Artificial Sequence: Synthetic oligonucleotide
  Sense strand starting at position 3294 of SEQ ID NO: 1564317
ugaaguggguuguauaagu

SEQ ID NO: 1870900 - RNA, 19 nt, Artificial Sequence
  Description of Artificial Sequence: Synthetic oligonucleotide
  Antisense strand to SEQ ID NO: 1870899
acuuauacaacccacuuca

SEQ ID NO: 1870901 - RNA, 19 nt, Artificial Sequence
  Description of Artificial Sequence: Synthetic oligonucleotide
  Sense strand starting at position 3314 of SEQ ID NO: 1564317
caugcaguuucgcuuugaa

SEQ ID NO: 1870902 - RNA, 19 nt, Artificial Sequence
  Description of Artificial Sequence: Synthetic oligonucleotide
  Antisense strand to SEQ ID NO: 1870901
uucaaagcgaaacugcaug

SEQ ID NO: 1870903 - RNA, 19 nt, Artificial Sequence
  Description of Artificial Sequence: Synthetic oligonucleotide
  Sense strand starting at position 3317 of SEQ ID NO: 1564317
gcaguuucgcuuugaaagg

SEQ ID NO: 1870904 - RNA, 19 nt, Artificial Sequence
  Description of Artificial Sequence: Synthetic oligonucleotide
  Antisense strand to SEQ ID NO: 1870903
ccuuucaaagcgaaacugc

SEQ ID NO: 1870905 - RNA, 19 nt, Artificial Sequence
  Description of Artificial Sequence: Synthetic oligonucleotide
  Sense strand starting at position 3347 of SEQ ID NO: 1564317
uguguuaguagcuauagga

SEQ ID NO: 1870906 - RNA, 19 nt, Artificial Sequence
  Description of Artificial Sequence: Synthetic oligonucleotide
  Antisense strand to SEQ ID NO: 1870905
uccuauagcuacuaacaca

SEQ ID NO: 1870907 - RNA, 19 nt, Artificial Sequence
  Description of Artificial Sequence: Synthetic oligonucleotide
  Sense strand starting at position 3400 of SEQ ID NO: 1564317
cuuggagaaugaucccauu

SEQ ID NO: 1870908 - RNA, 19 nt, Artificial Sequence
  Description of Artificial Sequence: Synthetic oligonucleotide
  Antisense strand to SEQ ID NO: 1870907
aaugggaucauucuccaag

SEQ ID NO: 1870909 - RNA, 19 nt, Artificial Sequence
  Description of Artificial Sequence: Synthetic oligonucleotide
  Sense strand starting at position 3403 of SEQ ID NO: 1564317
ggagaaugaucccauuuag

SEQ ID NO: 1870910 - RNA, 19 nt, Artificial Sequence
  Description of Artificial Sequence: Synthetic oligonucleotide
  Antisense strand to SEQ ID NO: 1870909
cuaaaugggaucauucucc

SEQ ID NO: 1870911 - RNA, 19 nt, Artificial Sequence
  Description of Artificial Sequence: Synthetic oligonucleotide
  Sense strand starting at position 3426 of SEQ ID NO: 1564317
aagaguuggugguucagga

SEQ ID NO: 1870912 - RNA, 19 nt, Artificial Sequence
  Description of Artificial Sequence: Synthetic oligonucleotide
  Antisense strand to SEQ ID NO: 1870911
uccugaaccaccaacucuu

SEQ ID NO: 1870913 - RNA, 19 nt, Artificial Sequence
  Description of Artificial Sequence: Synthetic oligonucleotide
  Sense strand starting at position 3452 of SEQ ID NO: 1564317
augaucauugcaggagcaa

SEQ ID NO: 1870914 - RNA, 19 nt, Artificial Sequence
  Description of Artificial Sequence: Synthetic oligonucleotide
  Antisense strand to SEQ ID NO: 1870913
uugcuccugcaaugaucau

SEQ ID NO: 1870915 - RNA, 19 nt, Artificial Sequence
  Description of Artificial Sequence: Synthetic oligonucleotide
  Sense strand starting at position 3521 of SEQ ID NO: 1564317
ggcuuuaguuaggagcauu

SEQ ID NO: 1870916 - RNA, 19 nt, Artificial Sequence
  Description of Artificial Sequence: Synthetic oligonucleotide
  Antisense strand to SEQ ID NO: 1870915
aaugcuccuaacuaaagcc

SEQ ID NO: 1870917 - RNA, 19 nt, Artificial Sequence
  Description of Artificial Sequence: Synthetic oligonucleotide
  Sense strand starting at position 3524 of SEQ ID NO: 1564317
uuuaguuaggagcauugua

SEQ ID NO: 1870918 - RNA, 19 nt, Artificial Sequence
  Description of Artificial Sequence: Synthetic oligonucleotide
  Antisense strand to SEQ ID NO: 1870917
uacaaugcuccuaacuaaa

SEQ ID NO: 1870919 - RNA, 19 nt, Artificial Sequence
  Description of Artificial Sequence: Synthetic oligonucleotide
  Sense strand starting at position 3638 of SEQ ID NO: 1564317
gaaucauuaugggagguca

SEQ ID NO: 1870920 - RNA, 19 nt, Artificial Sequence
  Description of Artificial Sequence: Synthetic oligonucleotide
  Antisense strand to SEQ ID NO: 1870919
ugaccucccauaaugauuc

SEQ ID NO: 1870921 - RNA, 19 nt, Artificial Sequence
  Description of Artificial Sequence: Synthetic oligonucleotide
  Sense strand starting at position 3640 of SEQ ID NO: 1564317
aucauuaugggaggucauu

SEQ ID NO: 1870922 - RNA, 19 nt, Artificial Sequence
  Description of Artificial Sequence: Synthetic oligonucleotide
  Antisense strand to SEQ ID NO: 1870921
aaugaccucccauaaugau

SEQ ID NO: 1870923 - RNA, 19 nt, Artificial Sequence
  Description of Artificial Sequence: Synthetic oligonucleotide
  Sense strand starting at position 3664 of SEQ ID NO: 1564317
ggaggagaguuucuagcau

SEQ ID NO: 1870924 - RNA, 19 nt, Artificial Sequence
  Description of Artificial Sequence: Synthetic oligonucleotide
  Antisense strand to SEQ ID NO: 1870923
augcuagaaacucuccucc

SEQ ID NO: 1870925 - RNA, 19 nt, Artificial Sequence
  Description of Artificial Sequence: Synthetic oligonucleotide
  Sense strand starting at position 3668 of SEQ ID NO: 1564317
gagaguuucuagcauugug

SEQ ID NO: 1870926 - RNA, 19 nt, Artificial Sequence
  Description of Artificial Sequence: Synthetic oligonucleotide
  Antisense strand to SEQ ID NO: 1870925
cacaaugcuagaaacucuc

SEQ ID NO: 1870927 - RNA, 19 nt, Artificial Sequence
  Description of Artificial Sequence: Synthetic oligonucleotide
  Sense strand starting at position 7 of SEQ ID NO: 1564318
aucgaaguaccuuauagua

SEQ ID NO: 1870928 - RNA, 19 nt, Artificial Sequence
  Description of Artificial Sequence: Synthetic oligonucleotide
  Antisense strand to SEQ ID NO: 1870927
uacuauaagguacuucgau

SEQ ID NO: 1870929 - RNA, 19 nt, Artificial Sequence
  Description of Artificial Sequence: Synthetic oligonucleotide
  Sense strand starting at position 25 of SEQ ID NO: 1564318
acagacacauuugaguauu

SEQ ID NO: 1870930 - RNA, 19 nt, Artificial Sequence
  Description of Artificial Sequence: Synthetic oligonucleotide
  Antisense strand to SEQ ID NO: 1870929
aauacucaaaugugucugu

SEQ ID NO: 1870931 - RNA, 19 nt, Artificial Sequence
  Description of Artificial Sequence: Synthetic oligonucleotide
  Sense strand starting at position 31 of SEQ ID NO: 1564318
acauuugaguauuaagcau

SEQ ID NO: 1870932 - RNA, 19 nt, Artificial Sequence
  Description of Artificial Sequence: Synthetic oligonucleotide
  Antisense strand to SEQ ID NO: 1870931
augcuuaauacucaaaugu

SEQ ID NO: 1870933 - RNA, 19 nt, Artificial Sequence
  Description of Artificial Sequence: Synthetic oligonucleotide
  Sense strand starting at position 619 of SEQ ID NO: 1564318
agaggaucucacugcaaca

SEQ ID NO: 1870934 - RNA, 19 nt, Artificial Sequence
  Description of Artificial Sequence: Synthetic oligonucleotide
  Antisense strand to SEQ ID NO: 1870933
uguugcagugagauccucu

SEQ ID NO: 1870935 - RNA, 19 nt, Artificial Sequence
  Description of Artificial Sequence: Synthetic oligonucleotide
  Sense strand starting at position 847 of SEQ ID NO: 1564318
uugagauccuuuccuauug

SEQ ID NO: 1870936 - RNA, 19 nt, Artificial Sequence
  Description of Artificial Sequence: Synthetic oligonucleotide
  Antisense strand to SEQ ID NO: 1870935
caauaggaaaggaucucaa

SEQ ID NO: 1870937 - RNA, 19 nt, Artificial Sequence
  Description of Artificial Sequence: Synthetic oligonucleotide
  Sense strand starting at position 1236 of SEQ ID NO: 1564318
uuaaguuacuguucccaua

SEQ ID NO: 1870938 - RNA, 19 nt, Artificial Sequence
  Description of Artificial Sequence: Synthetic oligonucleotide
  Antisense strand to SEQ ID NO: 1870937
uaugggaacaguaacuuaa

SEQ ID NO: 1870939 - RNA, 19 nt, Artificial Sequence
  Description of Artificial Sequence: Synthetic oligonucleotide
  Sense strand starting at position 1312 of SEQ ID NO: 1564318
uuggguugaauggguguaa

SEQ ID NO: 1870940 - RNA, 19 nt, Artificial Sequence
  Description of Artificial Sequence: Synthetic oligonucleotide
  Antisense strand to SEQ ID NO: 1870939
uuacacccauucaacccaa

SEQ ID NO: 1870941 - RNA, 19 nt, Artificial Sequence
  Description of Artificial Sequence: Synthetic oligonucleotide
  Sense strand starting at position 1313 of SEQ ID NO: 1564318
uggguugaauggguguaau

SEQ ID NO: 1870942 - RNA, 19 nt, Artificial Sequence
  Description of Artificial Sequence: Synthetic oligonucleotide
  Antisense strand to SEQ ID NO: 1870941
auuacacccauucaaccca

SEQ ID NO: 1870943 - RNA, 19 nt, Artificial Sequence
  Description of Artificial Sequence: Synthetic oligonucleotide
  Sense strand starting at position 1314 of SEQ ID NO: 1564318
ggguugaauggguguaaug

SEQ ID NO: 1870944 - RNA, 19 nt, Artificial Sequence
  Description of Artificial Sequence: Synthetic oligonucleotide
  Antisense strand to SEQ ID NO: 1870943
cauuacacccauucaaccc

SEQ ID NO: 1870945 - RNA, 19 nt, Artificial Sequence
  Description of Artificial Sequence: Synthetic oligonucleotide
  Sense strand starting at position 1316 of SEQ ID NO: 1564318
guugaauggguguaaugug

SEQ ID NO: 1870946 - RNA, 19 nt, Artificial Sequence
  Description of Artificial Sequence: Synthetic oligonucleotide
  Antisense strand to SEQ ID NO: 1870945
cacauuacacccauucaac

SEQ ID NO: 1870947 - RNA, 19 nt, Artificial Sequence
  Description of Artificial Sequence: Synthetic oligonucleotide
  Sense strand starting at position 1326 of SEQ ID NO: 1564318
uguaaugugcuaugaauaa

SEQ ID NO: 1870948 - RNA, 19 nt, Artificial Sequence
  Description of Artificial Sequence: Synthetic oligonucleotide
  Antisense strand to SEQ ID NO: 1870947
uuauucauagcacauuaca

SEQ ID NO: 1870949 - RNA, 19 nt, Artificial Sequence
  Description of Artificial Sequence: Synthetic oligonucleotide
  Sense strand starting at position 1330 of SEQ ID NO: 1564318
augugcuaugaauaagcau

SEQ ID NO: 1870950 - RNA, 19 nt, Artificial Sequence
  Description of Artificial Sequence: Synthetic oligonucleotide
  Antisense strand to SEQ ID NO: 1870949
augcuuauucauagcacau

SEQ ID NO: 1870951 - RNA, 19 nt, Artificial Sequence
  Description of Artificial Sequence: Synthetic oligonucleotide
  Sense strand starting at position 1408 of SEQ ID NO: 1564318
uauguagucuucuuggguu

SEQ ID NO: 1870952 - RNA, 19 nt, Artificial Sequence
  Description of Artificial Sequence: Synthetic oligonucleotide
  Antisense strand to SEQ ID NO: 1870951
aacccaagaagacuacaua

SEQ ID NO: 1870953 - RNA, 19 nt, Artificial Sequence
  Description of Artificial Sequence: Synthetic oligonucleotide
  Sense strand starting at position 1470 of SEQ ID NO: 1564318
gggagaccuuuaucagugu

SEQ ID NO: 1870954 - RNA, 19 nt, Artificial Sequence
  Description of Artificial Sequence: Synthetic oligonucleotide
  Antisense strand to SEQ ID NO: 1870953
acacugauaaaggucuccc

SEQ ID NO: 1870955 - RNA, 19 nt, Artificial Sequence
  Description of Artificial Sequence: Synthetic oligonucleotide
  Sense strand starting at position 1990 of SEQ ID NO: 1564318
ugagcacuuccauggccaa

SEQ ID NO: 1870956 - RNA, 19 nt, Artificial Sequence
  Description of Artificial Sequence: Synthetic oligonucleotide
  Antisense strand to SEQ ID NO: 1870955
uuggccauggaagugcuca

SEQ ID NO: 1870957 - RNA, 19 nt, Artificial Sequence
  Description of Artificial Sequence: Synthetic oligonucleotide
  Sense strand starting at position 2004 of SEQ ID NO: 1564318
gccaaaugcuaacuugcaa

SEQ ID NO: 1870958 - RNA, 19 nt, Artificial Sequence
  Description of Artificial Sequence: Synthetic oligonucleotide
  Antisense strand to SEQ ID NO: 1870957
uugcaaguuagcauuuggc

SEQ ID NO: 1870959 - RNA, 19 nt, Artificial Sequence
  Description of Artificial Sequence: Synthetic oligonucleotide
  Sense strand starting at position 2085 of SEQ ID NO: 1564318
uucugaaucgaauacuugu

SEQ ID NO: 1870960 - RNA, 19 nt, Artificial Sequence
  Description of Artificial Sequence: Synthetic oligonucleotide
  Antisense strand to SEQ ID NO: 1870959
acaaguauucgauucagaa

SEQ ID NO: 1870961 - RNA, 19 nt, Artificial Sequence
  Description of Artificial Sequence: Synthetic oligonucleotide
  Sense strand starting at position 2110 of SEQ ID NO: 1564318
acuuauguucgucaagcua

SEQ ID NO: 1870962 - RNA, 19 nt, Artificial Sequence
  Description of Artificial Sequence: Synthetic oligonucleotide
  Antisense strand to SEQ ID NO: 1870961
uagcuugacgaacauaagu

SEQ ID NO: 1870963 - RNA, 19 nt, Artificial Sequence
  Description of Artificial Sequence: Synthetic oligonucleotide
  Sense strand starting at position 2153 of SEQ ID NO: 1564318
gcaagagacacacgguauu

SEQ ID NO: 1870964 - RNA, 19 nt, Artificial Sequence
  Description of Artificial Sequence: Synthetic oligonucleotide
  Antisense strand to SEQ ID NO: 1870963
aauaccgugugucucuugc

SEQ ID NO: 1870965 - RNA, 19 nt, Artificial Sequence
  Description of Artificial Sequence: Synthetic oligonucleotide
  Sense strand starting at position 2165 of SEQ ID NO: 1564318
cgguauuuccaaugagguu

SEQ ID NO: 1870966 - RNA, 19 nt, Artificial Sequence
  Description of Artificial Sequence: Synthetic oligonucleotide
  Antisense strand to SEQ ID NO: 1870965
aaccucauuggaaauaccg

SEQ ID NO: 1870967 - RNA, 19 nt, Artificial Sequence
  Description of Artificial Sequence: Synthetic oligonucleotide
  Sense strand starting at position 2196 of SEQ ID NO: 1564318
uggacucuccaucgugaga

SEQ ID NO: 1870968 - RNA, 19 nt, Artificial Sequence
  Description of Artificial Sequence: Synthetic oligonucleotide
  Antisense strand to SEQ ID NO: 1870967
ucucacgauggagagucca

SEQ ID NO: 1870969 - RNA, 19 nt, Artificial Sequence
  Description of Artificial Sequence: Synthetic oligonucleotide
  Sense strand starting at position 2199 of SEQ ID NO: 1564318
acucuccaucgugagacau

SEQ ID NO: 1870970 - RNA, 19 nt, Artificial Sequence
  Description of Artificial Sequence: Synthetic oligonucleotide
  Antisense strand to SEQ ID NO: 1870969
augucucacgauggagagu

SEQ ID NO: 1870971 - RNA, 19 nt, Artificial Sequence
  Description of Artificial Sequence: Synthetic oligonucleotide
  Sense strand starting at position 2201 of SEQ ID NO: 1564318
ucuccaucgugagacauuu

SEQ ID NO: 1870972 - RNA, 19 nt, Artificial Sequence
  Description of Artificial Sequence: Synthetic oligonucleotide
  Antisense strand to SEQ ID NO: 1870971
aaaugucucacgauggaga

SEQ ID NO: 1870973 - RNA, 19 nt, Artificial Sequence
  Description of Artificial Sequence: Synthetic oligonucleotide
  Sense strand starting at position 2504 of SEQ ID NO: 1564318
cuugaugucccuugaggag

SEQ ID NO: 1870974 - RNA, 19 nt, Artificial Sequence
  Description of Artificial Sequence: Synthetic oligonucleotide
  Antisense strand to SEQ ID NO: 1870973
cuccucaagggacaucaag

SEQ ID NO: 1870975 - RNA, 19 nt, Artificial Sequence
  Description of Artificial Sequence: Synthetic oligonucleotide
  Sense strand starting at position 2513 of SEQ ID NO: 1564318
ccuugaggagucuggaauu

SEQ ID NO: 1870976 - RNA, 19 nt, Artificial Sequence
  Description of Artificial Sequence: Synthetic oligonucleotide
  Antisense strand to SEQ ID NO: 1870975
aauuccagacuccucaagg

SEQ ID NO: 1870977 - RNA, 19 nt, Artificial Sequence
  Description of Artificial Sequence: Synthetic oligonucleotide
  Sense strand starting at position 2555 of SEQ ID NO: 1564318
cguuucugggacuggaaua

SEQ ID NO: 1870978 - RNA, 19 nt, Artificial Sequence
  Description of Artificial Sequence: Synthetic oligonucleotide
  Antisense strand to SEQ ID NO: 1870977
uauuccagucccagaaacg

SEQ ID NO: 1870979 - RNA, 19 nt, Artificial Sequence
  Description of Artificial Sequence: Synthetic oligonucleotide
  Sense strand starting at position 3096 of SEQ ID NO: 1564318
ugccucugagacugaaaua

SEQ ID NO: 1870980 - RNA, 19 nt, Artificial Sequence
  Description of Artificial Sequence: Synthetic oligonucleotide
  Antisense strand to SEQ ID NO: 1870979
uauuucagucucagaggca

SEQ ID NO: 1870981 - RNA, 19 nt, Artificial Sequence
  Description of Artificial Sequence: Synthetic oligonucleotide
  Sense strand starting at position 3271 of SEQ ID NO: 1564318
gaccgagugguccaaacca

SEQ ID NO: 1870982 - RNA, 19 nt, Artificial Sequence
  Description of Artificial Sequence: Synthetic oligonucleotide
  Antisense strand to SEQ ID NO: 1870981
ugguuuggaccacucgguc

SEQ ID NO: 1870983 - RNA, 19 nt, Artificial Sequence
  Description of Artificial Sequence: Synthetic oligonucleotide
  Sense strand starting at position 3361 of SEQ ID NO: 1564318
ugcugugucauaguuggca

SEQ ID NO: 1870984 - RNA, 19 nt, Artificial Sequence
  Description of Artificial Sequence: Synthetic oligonucleotide
  Antisense strand to SEQ ID NO: 1870983
ugccaacuaugacacagca

SEQ ID NO: 1870985 - RNA, 19 nt, Artificial Sequence
  Description of Artificial Sequence: Synthetic oligonucleotide
  Sense strand starting at position 3364 of SEQ ID NO: 1564318
ugugucauaguuggcaaga

SEQ ID NO: 1870986 - RNA, 19 nt, Artificial Sequence
  Description of Artificial Sequence: Synthetic oligonucleotide
  Antisense strand to SEQ ID NO: 1870985
ucuugccaacuaugacaca

SEQ ID NO: 1870987 - RNA, 19 nt, Artificial Sequence
  Description of Artificial Sequence: Synthetic oligonucleotide
  Sense strand starting at position 3365 of SEQ ID NO: 1564318
gugucauaguuggcaagaa

SEQ ID NO: 1870988 - RNA, 19 nt, Artificial Sequence
  Description of Artificial Sequence: Synthetic oligonucleotide
  Antisense strand to SEQ ID NO: 1870987
uucuugccaacuaugacac

SEQ ID NO: 1870989 - RNA, 19 nt, Artificial Sequence
  Description of Artificial Sequence: Synthetic oligonucleotide
  Sense strand starting at position 3381 of SEQ ID NO: 1564318
gaaagaagucaugacguuu

SEQ ID NO: 1870990 - RNA, 19 nt, Artificial Sequence
  Description of Artificial Sequence: Synthetic oligonucleotide
  Antisense strand to SEQ ID NO: 1870989
aaacgucaugacuucuuuc

SEQ ID NO: 1870991 - RNA, 19 nt, Artificial Sequence
  Description of Artificial Sequence: Synthetic oligonucleotide
  Sense strand starting at position 3406 of SEQ ID NO: 1564318
acagcucugcagggauaga

SEQ ID NO: 1870992 - RNA, 19 nt, Artificial Sequence
  Description of Artificial Sequence: Synthetic oligonucleotide
  Antisense strand to SEQ ID NO: 1870991
ucuaucccugcagagcugu

SEQ ID NO: 1870993 - RNA, 19 nt, Artificial Sequence
  Description of Artificial Sequence: Synthetic oligonucleotide
  Sense strand starting at position 3543 of SEQ ID NO: 1564318
gguguuuguaguggaaaua

SEQ ID NO: 1870994 - RNA, 19 nt, Artificial Sequence
  Description of Artificial Sequence: Synthetic oligonucleotide
  Antisense strand to SEQ ID NO: 1870993
uauuuccacuacaaacacc

SEQ ID NO: 1870995 - RNA, 19 nt, Artificial Sequence
  Description of Artificial Sequence: Synthetic oligonucleotide
  Sense strand starting at position 3544 of SEQ ID NO: 1564318
guguuuguaguggaaauaa

SEQ ID NO: 1870996 - RNA, 19 nt, Artificial Sequence
  Description of Artificial Sequence: Synthetic oligonucleotide
  Antisense strand to SEQ ID NO: 1870995
uuauuuccacuacaaacac

SEQ ID NO: 1870997 - RNA, 19 nt, Artificial Sequence
  Description of Artificial Sequence: Synthetic oligonucleotide
  Sense strand starting at position 3613 of SEQ ID NO: 1564318
uugagaaacguugggaaca

SEQ ID NO: 1870998 - RNA, 19 nt, Artificial Sequence
  Description of Artificial Sequence: Synthetic oligonucleotide
  Antisense strand to SEQ ID NO: 1870997
uguucccaacguuucucaa

SEQ ID NO: 1870999 - RNA, 19 nt, Artificial Sequence
  Description of Artificial Sequence: Synthetic oligonucleotide
  Sense strand starting at position 3795 of SEQ ID NO: 1564318
ugggucucuugggcucaaa

SEQ ID NO: 1871000 - RNA, 19 nt, Artificial Sequence
  Description of Artificial Sequence: Synthetic oligonucleotide
  Antisense strand to SEQ ID NO: 1870999
uuugagcccaagagaccca

SEQ ID NO: 1871001 - RNA, 19 nt, Artificial Sequence
  Description of Artificial Sequence: Synthetic oligonucleotide
  Sense strand starting at position 3798 of SEQ ID NO: 1564318
gucucuugggcucaaauaa

SEQ ID NO: 1871002 - RNA, 19 nt, Artificial Sequence
  Description of Artificial Sequence: Synthetic oligonucleotide
  Antisense strand to SEQ ID NO: 1871001
uuauuugagcccaagagac

SEQ ID NO: 1871003 - RNA, 19 nt, Artificial Sequence
  Description of Artificial Sequence: Synthetic oligonucleotide
  Sense strand starting at position 3911 of SEQ ID NO: 1564318
augccaugcuggucuugaa

SEQ ID NO: 1871004 - RNA, 19 nt, Artificial Sequence
  Description of Artificial Sequence: Synthetic oligonucleotide
  Antisense strand to SEQ ID NO: 1871003
uucaagaccagcauggcau

SEQ ID NO: 1871005 - RNA, 19 nt, Artificial Sequence
  Description of Artificial Sequence: Synthetic oligonucleotide
  Sense strand starting at position 3975 of SEQ ID NO: 1564318
ugcuuugauuagucacuuu

SEQ ID NO: 1871006 - RNA, 19 nt, Artificial Sequence
  Description of Artificial Sequence: Synthetic oligonucleotide
  Antisense strand to SEQ ID NO: 1871005
aaagugacuaaucaaagca

SEQ ID NO: 1871007 - RNA, 19 nt, Artificial Sequence
  Description of Artificial Sequence: Synthetic oligonucleotide
  Sense strand starting at position 116 of SEQ ID NO: 1564320
gcuaaucuucuuugaauug

SEQ ID NO: 1871008 - RNA, 19 nt, Artificial Sequence
  Description of Artificial Sequence: Synthetic oligonucleotide
  Antisense strand to SEQ ID NO: 1871007
caauucaaagaagauuagc

SEQ ID NO: 1871009 - RNA, 19 nt, Artificial Sequence
  Description of Artificial Sequence: Synthetic oligonucleotide
  Sense strand starting at position 123 of SEQ ID NO: 1564320
uucuuugaauuguucgaau

SEQ ID NO: 1871010 - RNA, 19 nt, Artificial Sequence
  Description of Artificial Sequence: Synthetic oligonucleotide
  Antisense strand to SEQ ID NO: 1871009
auucgaacaauucaaagaa

SEQ ID NO: 1871011 - RNA, 19 nt, Artificial Sequence
  Description of Artificial Sequence: Synthetic oligonucleotide
  Sense strand starting at position 343 of SEQ ID NO: 1564320
cugcuuugucagcugaguu

SEQ ID NO: 1871012 - RNA, 19 nt, Artificial Sequence
  Description of Artificial Sequence: Synthetic oligonucleotide
  Antisense strand to SEQ ID NO: 1871011
aacucagcugacaaagcag

SEQ ID NO: 1871013 - RNA, 19 nt, Artificial Sequence
  Description of Artificial Sequence: Synthetic oligonucleotide
  Sense strand starting at position 420 of SEQ ID NO: 1564320
gcacauaaauguguacaua

SEQ ID NO: 1871014 - RNA, 19 nt, Artificial Sequence
  Description of Artificial Sequence: Synthetic oligonucleotide
  Antisense strand to SEQ ID NO: 1871013
uauguacacauuuaugugc

SEQ ID NO: 1871015 - RNA, 19 nt, Artificial Sequence
  Description of Artificial Sequence: Synthetic oligonucleotide
  Sense strand starting at position 431 of SEQ ID NO: 1564320
uguacauaccauugguaua

SEQ ID NO: 1871016 - RNA, 19 nt, Artificial Sequence
  Description of Artificial Sequence: Synthetic oligonucleotide
  Antisense strand to SEQ ID NO: 1871015
uauaccaaugguauguaca

SEQ ID NO: 1871017 - RNA, 19 nt, Artificial Sequence
  Description of Artificial Sequence: Synthetic oligonucleotide
  Sense strand starting at position 441 of SEQ ID NO: 1564320
auugguauauacuugcuua

SEQ ID NO: 1871018 - RNA, 19 nt, Artificial Sequence
  Description of Artificial Sequence: Synthetic oligonucleotide
  Antisense strand to SEQ ID NO: 1871017
uaagcaaguauauaccaau

SEQ ID NO: 1871019 - RNA, 19 nt, Artificial Sequence
  Description of Artificial Sequence: Synthetic oligonucleotide
  Sense strand starting at position 449 of SEQ ID NO: 1564320
auacuugcuuauguugaua

SEQ ID NO: 1871020 - RNA, 19 nt, Artificial Sequence
  Description of Artificial Sequence: Synthetic oligonucleotide
  Antisense strand to SEQ ID NO: 1871019
uaucaacauaagcaaguau

SEQ ID NO: 1871021 - RNA, 19 nt, Artificial Sequence
  Description of Artificial Sequence: Synthetic oligonucleotide
  Sense strand starting at position 452 of SEQ ID NO: 1564320
cuugcuuauguugauauau

SEQ ID NO: 1871022 - RNA, 19 nt, Artificial Sequence
  Description of Artificial Sequence: Synthetic oligonucleotide
  Antisense strand to SEQ ID NO: 1871021
auauaucaacauaagcaag

SEQ ID NO: 1871023 - RNA, 19 nt, Artificial Sequence
  Description of Artificial Sequence: Synthetic oligonucleotide
  Sense strand starting at position 546 of SEQ ID NO: 1564320
cguacauuagaucauguga

SEQ ID NO: 1871024 - RNA, 19 nt, Artificial Sequence
  Description of Artificial Sequence: Synthetic oligonucleotide
  Antisense strand to SEQ ID NO: 1871023
ucacaugaucuaauguacg

SEQ ID NO: 1871025 - RNA, 19 nt, Artificial Sequence
  Description of Artificial Sequence: Synthetic oligonucleotide
  Sense strand starting at position 640 of SEQ ID NO: 1564320
ucaagaaacuaucugagca

SEQ ID NO: 1871026 - RNA, 19 nt, Artificial Sequence
  Description of Artificial Sequence: Synthetic oligonucleotide
  Antisense strand to SEQ ID NO: 1871025
ugcucagauaguuucuuga

SEQ ID NO: 1871027 - RNA, 19 nt, Artificial Sequence
  Description of Artificial Sequence: Synthetic oligonucleotide
  Sense strand starting at position 827 of SEQ ID NO: 1564320
ucagaaauguguguugaau

SEQ ID NO: 1871028 - RNA, 19 nt, Artificial Sequence
  Description of Artificial Sequence: Synthetic oligonucleotide
  Antisense strand to SEQ ID NO: 1871027
auucaacacacauuucuga

SEQ ID NO: 1871029 - RNA, 19 nt, Artificial Sequence
  Description of Artificial Sequence: Synthetic oligonucleotide
  Sense strand starting at position 835 of SEQ ID NO: 1564320
guguguugaauugaauaca

SEQ ID NO: 1871030 - RNA, 19 nt, Artificial Sequence
  Description of Artificial Sequence: Synthetic oligonucleotide
  Antisense strand to SEQ ID NO: 1871029
uguauucaauucaacacac

SEQ ID NO: 1871031 - RNA, 19 nt, Artificial Sequence
  Description of Artificial Sequence: Synthetic oligonucleotide
  Sense strand starting at position 881 of SEQ ID NO: 1564320
ggagcaauugcgcaguaag

SEQ ID NO: 1871032 - RNA, 19 nt, Artificial Sequence
  Description of Artificial Sequence: Synthetic oligonucleotide
  Antisense strand to SEQ ID NO: 1871031
cuuacugcgcaauugcucc

SEQ ID NO: 1871033 - RNA, 19 nt, Artificial Sequence
  Description of Artificial Sequence: Synthetic oligonucleotide
  Sense strand starting at position 915 of SEQ ID NO: 1564320
gccagauaacauggguucu

SEQ ID NO: 1871034 - RNA, 19 nt, Artificial Sequence
  Description of Artificial Sequence: Synthetic oligonucleotide
  Antisense strand to SEQ ID NO: 1871033
agaacccauguuaucuggc

SEQ ID NO: 1871035 - RNA, 19 nt, Artificial Sequence
  Description of Artificial Sequence: Synthetic oligonucleotide
  Sense strand starting at position 917 of SEQ ID NO: 1564320
cagauaacauggguucuaa

SEQ ID NO: 1871036 - RNA, 19 nt, Artificial Sequence
  Description of Artificial Sequence: Synthetic oligonucleotide
  Antisense strand to SEQ ID NO: 1871035
uuagaacccauguuaucug

SEQ ID NO: 1871037 - RNA, 19 nt, Artificial Sequence
  Description of Artificial Sequence: Synthetic oligonucleotide
  Sense strand starting at position 929 of SEQ ID NO: 1564320
guucuaaucuaacuaguug

SEQ ID NO: 1871038 - RNA, 19 nt, Artificial Sequence
  Description of Artificial Sequence: Synthetic oligonucleotide
  Antisense strand to SEQ ID NO: 1871037
caacuaguuagauuagaac

SEQ ID NO: 1871039 - RNA, 19 nt, Artificial Sequence
  Description of Artificial Sequence: Synthetic oligonucleotide
  Sense strand starting at position 955 of SEQ ID NO: 1564320
uuuagcaagcuaugaaauc

SEQ ID NO: 1871040 - RNA, 19 nt, Artificial Sequence
  Description of Artificial Sequence: Synthetic oligonucleotide
  Antisense strand to SEQ ID NO: 1871039
gauuucauagcuugcuaaa

SEQ ID NO: 1871041 - RNA, 19 nt, Artificial Sequence
  Description of Artificial Sequence: Synthetic oligonucleotide
  Sense strand starting at position 1148 of SEQ ID NO: 1564320
acaaauuucugugagucau

SEQ ID NO: 1871042 - RNA, 19 nt, Artificial Sequence
  Description of Artificial Sequence: Synthetic oligonucleotide
  Antisense strand to SEQ ID NO: 1871041
augacucacagaaauuugu

SEQ ID NO: 1871043 - RNA, 19 nt, Artificial Sequence
  Description of Artificial Sequence: Synthetic oligonucleotide
  Sense strand starting at position 1154 of SEQ ID NO: 1564320
uucugugagucauuaaacu

SEQ ID NO: 1871044 - RNA, 19 nt, Artificial Sequence
  Description of Artificial Sequence: Synthetic oligonucleotide
  Antisense strand to SEQ ID NO: 1871043
aguuuaaugacucacagaa

SEQ ID NO: 1871045 - RNA, 19 nt, Artificial Sequence
  Description of Artificial Sequence: Synthetic oligonucleotide
  Sense strand starting at position 1199 of SEQ ID NO: 1564320
gcgacauaauuauauuuga

SEQ ID NO: 1871046 - RNA, 19 nt, Artificial Sequence
  Description of Artificial Sequence: Synthetic oligonucleotide
  Antisense strand to SEQ ID NO: 1871045
ucaaauauaauuaugucgc

SEQ ID NO: 1871047 - RNA, 19 nt, Artificial Sequence
  Description of Artificial Sequence: Synthetic oligonucleotide
  Sense strand starting at position 1241 of SEQ ID NO: 1564320
aucugauagguuggaguuu

SEQ ID NO: 1871048 - RNA, 19 nt, Artificial Sequence
  Description of Artificial Sequence: Synthetic oligonucleotide
  Antisense strand to SEQ ID NO: 1871047
aaacuccaaccuaucagau

SEQ ID NO: 1871049 - RNA, 19 nt, Artificial Sequence
  Description of Artificial Sequence: Synthetic oligonucleotide
  Sense strand starting at position 1310 of SEQ ID NO: 1564320
uacugcuuaguuugagaau

SEQ ID NO: 1871050 - RNA, 19 nt, Artificial Sequence
  Description of Artificial Sequence: Synthetic oligonucleotide
  Antisense strand to SEQ ID NO: 1871049
auucucaaacuaagcagua

SEQ ID NO: 1871051 - RNA, 19 nt, Artificial Sequence
  Description of Artificial Sequence: Synthetic oligonucleotide
  Sense strand starting at position 1355 of SEQ ID NO: 1564320
caauuuaaguguuauggag

SEQ ID NO: 1871052 - RNA, 19 nt, Artificial Sequence
  Description of Artificial Sequence: Synthetic oligonucleotide
  Antisense strand to SEQ ID NO: 1871051
cuccauaacacuuaaauug

SEQ ID NO: 1871053 - RNA, 19 nt, Artificial Sequence
  Description of Artificial Sequence: Synthetic oligonucleotide
  Sense strand starting at position 1359 of SEQ ID NO: 1564320
uuaaguguuauggaguuaa

SEQ ID NO: 1871054 - RNA, 19 nt, Artificial Sequence
  Description of Artificial Sequence: Synthetic oligonucleotide
  Antisense strand to SEQ ID NO: 1871053
uuaacuccauaacacuuaa

SEQ ID NO: 1871055 - RNA, 19 nt, Artificial Sequence
  Description of Artificial Sequence: Synthetic oligonucleotide
  Sense strand starting at position 1572 of SEQ ID NO: 1564320
aggaaaucccuuugaucau

SEQ ID NO: 1871056 - RNA, 19 nt, Artificial Sequence
  Description of Artificial Sequence: Synthetic oligonucleotide
  Antisense strand to SEQ ID NO: 1871055
augaucaaagggauuuccu

SEQ ID NO: 1871057 - RNA, 19 nt, Artificial Sequence
  Description of Artificial Sequence: Synthetic oligonucleotide
  Sense strand starting at position 1624 of SEQ ID NO: 1564320
uuaggugucacaggguuua

SEQ ID NO: 1871058 - RNA, 19 nt, Artificial Sequence
  Description of Artificial Sequence: Synthetic oligonucleotide
  Antisense strand to SEQ ID NO: 1871057
uaaacccugugacaccuaa

SEQ ID NO: 1871059 - RNA, 19 nt, Artificial Sequence
  Description of Artificial Sequence: Synthetic oligonucleotide
  Sense strand starting at position 2082 of SEQ ID NO: 1564320
cgugaaacccgaagugugu

SEQ ID NO: 1871060 - RNA, 19 nt, Artificial Sequence
  Description of Artificial Sequence: Synthetic oligonucleotide
  Antisense strand to SEQ ID NO: 1871059
acacacuucggguuucacg

SEQ ID NO: 1871061 - RNA, 19 nt, Artificial Sequence
  Description of Artificial Sequence: Synthetic oligonucleotide
  Sense strand starting at position 2649 of SEQ ID NO: 1564320
guguucuuuguuguaaugu

SEQ ID NO: 1871062 - RNA, 19 nt, Artificial Sequence
  Description of Artificial Sequence: Synthetic oligonucleotide
  Antisense strand to SEQ ID NO: 1871061
acauuacaacaaagaacac

SEQ ID NO: 1871063 - RNA, 19 nt, Artificial Sequence
  Description of Artificial Sequence: Synthetic oligonucleotide
  Sense strand starting at position 2665 of SEQ ID NO: 1564320
uguugacaacccuguaaga

SEQ ID NO: 1871064 - RNA, 19 nt, Artificial Sequence
  Description of Artificial Sequence: Synthetic oligonucleotide
  Antisense strand to SEQ ID NO: 1871063
ucuuacaggguugucaaca

SEQ ID NO: 1871065 - RNA, 19 nt, Artificial Sequence
  Description of Artificial Sequence: Synthetic oligonucleotide
  Sense strand starting at position 2793 of SEQ ID NO: 1564320
ucggaucuguuuccaagaa

SEQ ID NO: 1871066 - RNA, 19 nt, Artificial Sequence
  Description of Artificial Sequence: Synthetic oligonucleotide
  Antisense strand to SEQ ID NO: 1871065
uucuuggaaacagauccga

SEQ ID NO: 1871067 - RNA, 19 nt, Artificial Sequence
  Description of Artificial Sequence: Synthetic oligonucleotide
  Sense strand starting at position 2926 of SEQ ID NO: 1564320
aaaggaagucuguguacau

SEQ ID NO: 1871068 - RNA, 19 nt, Artificial Sequence
  Description of Artificial Sequence: Synthetic oligonucleotide
  Antisense strand to SEQ ID NO: 1871067
auguacacagacuuccuuu

SEQ ID NO: 1871069 - RNA, 19 nt, Artificial Sequence
  Description of Artificial Sequence: Synthetic oligonucleotide
  Sense strand starting at position 2927 of SEQ ID NO: 1564320
aaggaagucuguguacaua

SEQ ID NO: 1871070 - RNA, 19 nt, Artificial Sequence
  Description of Artificial Sequence: Synthetic oligonucleotide
  Antisense strand to SEQ ID NO: 1871069
uauguacacagacuuccuu

SEQ ID NO: 1871071 - RNA, 19 nt, Artificial Sequence
  Description of Artificial Sequence: Synthetic oligonucleotide
  Sense strand starting at position 2981 of SEQ ID NO: 1564320
guuguaggauugucagauc

SEQ ID NO: 1871072 - RNA, 19 nt, Artificial Sequence
  Description of Artificial Sequence: Synthetic oligonucleotide
  Antisense strand to SEQ ID NO: 1871071
gaucugacaauccuacaac

SEQ ID NO: 1871073 - RNA, 19 nt, Artificial Sequence
  Description of Artificial Sequence: Synthetic oligonucleotide
  Sense strand starting at position 3027 of SEQ ID NO: 1564320
ugggaucuuacaggguaau

SEQ ID NO: 1871074 - RNA, 19 nt, Artificial Sequence
  Description of Artificial Sequence: Synthetic oligonucleotide
  Antisense strand to SEQ ID NO: 1871073
auuacccuguaagauccca

SEQ ID NO: 1871075 - RNA, 19 nt, Artificial Sequence
  Description of Artificial Sequence: Synthetic oligonucleotide
  Sense strand starting at position 3028 of SEQ ID NO: 1564320
gggaucuuacaggguaaug

SEQ ID NO: 1871076 - RNA, 19 nt, Artificial Sequence
  Description of Artificial Sequence: Synthetic oligonucleotide
  Antisense strand to SEQ ID NO: 1871075
cauuacccuguaagauccc

SEQ ID NO: 1871077 - RNA, 19 nt, Artificial Sequence
  Description of Artificial Sequence: Synthetic oligonucleotide
  Sense strand starting at position 3039 of SEQ ID NO: 1564320
ggguaauguggugagauga

SEQ ID NO: 1871078 - RNA, 19 nt, Artificial Sequence
  Description of Artificial Sequence: Synthetic oligonucleotide
  Antisense strand to SEQ ID NO: 1871077
ucaucucaccacauuaccc

SEQ ID NO: 1871079 - RNA, 19 nt, Artificial Sequence
  Description of Artificial Sequence: Synthetic oligonucleotide
  Sense strand starting at position 3047 of SEQ ID NO: 1564320
uggugagaugauggauucu

SEQ ID NO: 1871080 - RNA, 19 nt, Artificial Sequence
  Description of Artificial Sequence: Synthetic oligonucleotide
  Antisense strand to SEQ ID NO: 1871079
agaauccaucaucucacca

SEQ ID NO: 1871081 - RNA, 19 nt, Artificial Sequence
  Description of Artificial Sequence: Synthetic oligonucleotide
  Sense strand starting at position 3427 of SEQ ID NO: 1564320
aguggcacuucucuaauau

SEQ ID NO: 1871082 - RNA, 19 nt, Artificial Sequence
  Description of Artificial Sequence: Synthetic oligonucleotide
  Antisense strand to SEQ ID NO: 1871081
auauuagagaagugccacu

SEQ ID NO: 1871083 - RNA, 19 nt, Artificial Sequence
  Description of Artificial Sequence: Synthetic oligonucleotide
  Sense strand starting at position 3428 of SEQ ID NO: 1564320
guggcacuucucuaauauu

SEQ ID NO: 1871084 - RNA, 19 nt, Artificial Sequence
  Description of Artificial Sequence: Synthetic oligonucleotide
  Antisense strand to SEQ ID NO: 1871083
aauauuagagaagugccac

SEQ ID NO: 1871085 - RNA, 19 nt, Artificial Sequence
  Description of Artificial Sequence: Synthetic oligonucleotide
  Sense strand starting at position 3582 of SEQ ID NO: 1564320
agaagucaguaguucgaga

SEQ ID NO: 1871086 - RNA, 19 nt, Artificial Sequence
  Description of Artificial Sequence: Synthetic oligonucleotide
  Antisense strand to SEQ ID NO: 1871085
ucucgaacuacugacuucu

SEQ ID NO: 1871087 - RNA, 19 nt, Artificial Sequence
  Description of Artificial Sequence: Synthetic oligonucleotide
  Sense strand starting at position 65 of SEQ ID NO: 1564321
gcacauaaauguguacaua

SEQ ID NO: 1871088 - RNA, 19 nt, Artificial Sequence
  Description of Artificial Sequence: Synthetic oligonucleotide
  Antisense strand to SEQ ID NO: 1871087
uauguacacauuuaugugc

SEQ ID NO: 1871089 - RNA, 19 nt, Artificial Sequence
  Description of Artificial Sequence: Synthetic oligonucleotide
  Sense strand starting at position 76 of SEQ ID NO: 1564321
uguacauaccauugguaua

SEQ ID NO: 1871090 - RNA, 19 nt, Artificial Sequence
  Description of Artificial Sequence: Synthetic oligonucleotide
  Antisense strand to SEQ ID NO: 1871089
uauaccaaugguauguaca

SEQ ID NO: 1871091 - RNA, 19 nt, Artificial Sequence
  Description of Artificial Sequence: Synthetic oligonucleotide
  Sense strand starting at position 86 of SEQ ID NO: 1564321
auugguauauacuugcuua

SEQ ID NO: 1871092 - RNA, 19 nt, Artificial Sequence
  Description of Artificial Sequence: Synthetic oligonucleotide
  Antisense strand to SEQ ID NO: 1871091
uaagcaaguauauaccaau

SEQ ID NO: 1871093 - RNA, 19 nt, Artificial Sequence
  Description of Artificial Sequence: Synthetic oligonucleotide
  Sense strand starting at position 94 of SEQ ID NO: 1564321
auacuugcuuauguugaua

SEQ ID NO: 1871094 - RNA, 19 nt, Artificial Sequence
  Description of Artificial Sequence: Synthetic oligonucleotide
  Antisense strand to SEQ ID NO: 1871093
uaucaacauaagcaaguau

SEQ ID NO: 1871095 - RNA, 19 nt, Artificial Sequence
  Description of Artificial Sequence: Synthetic oligonucleotide
  Sense strand starting at position 97 of SEQ ID NO: 1564321
cuugcuuauguugauauau

SEQ ID NO: 1871096 - RNA, 19 nt, Artificial Sequence
  Description of Artificial Sequence: Synthetic oligonucleotide
  Antisense strand to SEQ ID NO: 1871095
auauaucaacauaagcaag

SEQ ID NO: 1871097 - RNA, 19 nt, Artificial Sequence
  Description of Artificial Sequence: Synthetic oligonucleotide
  Sense strand starting at position 191 of SEQ ID NO: 1564321
cguacauuagaucauguga

SEQ ID NO: 1871098 - RNA, 19 nt, Artificial Sequence
  Description of Artificial Sequence: Synthetic oligonucleotide
  Antisense strand to SEQ ID NO: 1871097
ucacaugaucuaauguacg

SEQ ID NO: 1871099 - RNA, 19 nt, Artificial Sequence
  Description of Artificial Sequence: Synthetic oligonucleotide
  Sense strand starting at position 285 of SEQ ID NO: 1564321
ucaagaaacuaucugagca

SEQ ID NO: 1871100 - RNA, 19 nt, Artificial Sequence
  Description of Artificial Sequence: Synthetic oligonucleotide
  Antisense strand to SEQ ID NO: 1871099
ugcucagauaguuucuuga

SEQ ID NO: 1871101 - RNA, 19 nt, Artificial Sequence
  Description of Artificial Sequence: Synthetic oligonucleotide
  Sense strand starting at position 472 of SEQ ID NO: 1564321
ucagaaauguguguugaau

SEQ ID NO: 1871102 - RNA, 19 nt, Artificial Sequence
  Description of Artificial Sequence: Synthetic oligonucleotide
  Antisense strand to SEQ ID NO: 1871101
auucaacacacauuucuga

SEQ ID NO: 1871103 - RNA, 19 nt, Artificial Sequence
  Description of Artificial Sequence: Synthetic oligonucleotide
  Sense strand starting at position 480 of SEQ ID NO: 1564321
guguguugaauugaauaca

SEQ ID NO: 1871104 - RNA, 19 nt, Artificial Sequence
  Description of Artificial Sequence: Synthetic oligonucleotide
  Antisense strand to SEQ ID NO: 1871103
uguauucaauucaacacac

SEQ ID NO: 1871105 - RNA, 19 nt, Artificial Sequence
  Description of Artificial Sequence: Synthetic oligonucleotide
  Sense strand starting at position 526 of SEQ ID NO: 1564321
ggagcaauugcgcaguaag

SEQ ID NO: 1871106 - RNA, 19 nt, Artificial Sequence
  Description of Artificial Sequence: Synthetic oligonucleotide
  Antisense strand to SEQ ID NO: 1871105
cuuacugcgcaauugcucc

SEQ ID NO: 1871107 - RNA, 19 nt, Artificial Sequence
  Description of Artificial Sequence: Synthetic oligonucleotide
  Sense strand starting at position 560 of SEQ ID NO: 1564321
gccagauaacauggguucu

SEQ ID NO: 1871108 - RNA, 19 nt, Artificial Sequence
  Description of Artificial Sequence: Synthetic oligonucleotide
  Antisense strand to SEQ ID NO: 1871107
agaacccauguuaucuggc

SEQ ID NO: 1871109 - RNA, 19 nt, Artificial Sequence
  Description of Artificial Sequence: Synthetic oligonucleotide
  Sense strand starting at position 562 of SEQ ID NO: 1564321
cagauaacauggguucuaa

SEQ ID NO: 1871110 - RNA, 19 nt, Artificial Sequence
  Description of Artificial Sequence: Synthetic oligonucleotide
  Antisense strand to SEQ ID NO: 1871109
uuagaacccauguuaucug

SEQ ID NO: 1871111 - RNA, 19 nt, Artificial Sequence
  Description of Artificial Sequence: Synthetic oligonucleotide
  Sense strand starting at position 574 of SEQ ID NO: 1564321
guucuaaucuaacuaguug

SEQ ID NO: 1871112 - RNA, 19 nt, Artificial Sequence
  Description of Artificial Sequence: Synthetic oligonucleotide
  Antisense strand to SEQ ID NO: 1871111
caacuaguuagauuagaac

SEQ ID NO: 1871113 - RNA, 19 nt, Artificial Sequence
  Description of Artificial Sequence: Synthetic oligonucleotide
  Sense strand starting at position 600 of SEQ ID NO: 1564321
uuuagcaagcuaugaaauc

SEQ ID NO: 1871114 - RNA, 19 nt, Artificial Sequence
  Description of Artificial Sequence: Synthetic oligonucleotide
  Antisense strand to SEQ ID NO: 1871113
gauuucauagcuugcuaaa

SEQ ID NO: 1871115 - RNA, 19 nt, Artificial Sequence
  Description of Artificial Sequence: Synthetic oligonucleotide
  Sense strand starting at position 793 of SEQ ID NO: 1564321
acaaauuucugugagucau

SEQ ID NO: 1871116 - RNA, 19 nt, Artificial Sequence
  Description of Artificial Sequence: Synthetic oligonucleotide
  Antisense strand to SEQ ID NO: 1871115
augacucacagaaauuugu

SEQ ID NO: 1871117 - RNA, 19 nt, Artificial Sequence
  Description of Artificial Sequence: Synthetic oligonucleotide
  Sense strand starting at position 799 of SEQ ID NO: 1564321
uucugugagucauuaaacu

SEQ ID NO: 1871118 - RNA, 19 nt, Artificial Sequence
  Description of Artificial Sequence: Synthetic oligonucleotide
  Antisense strand to SEQ ID NO: 1871117
aguuuaaugacucacagaa

SEQ ID NO: 1871119 - RNA, 19 nt, Artificial Sequence
  Description of Artificial Sequence: Synthetic oligonucleotide
  Sense strand starting at position 844 of SEQ ID NO: 1564321
gcgacauaauuauauuuga

SEQ ID NO: 1871120 - RNA, 19 nt, Artificial Sequence
  Description of Artificial Sequence: Synthetic oligonucleotide
  Antisense strand to SEQ ID NO: 1871119
ucaaauauaauuaugucgc

SEQ ID NO: 1871121 - RNA, 19 nt, Artificial Sequence
  Description of Artificial Sequence: Synthetic oligonucleotide
  Sense strand starting at position 886 of SEQ ID NO: 1564321
aucugauagguuggaguuu

SEQ ID NO: 1871122 - RNA, 19 nt, Artificial Sequence
  Description of Artificial Sequence: Synthetic oligonucleotide
  Antisense strand to SEQ ID NO: 1871121
aaacuccaaccuaucagau

SEQ ID NO: 1871123 - RNA, 19 nt, Artificial Sequence
  Description of Artificial Sequence: Synthetic oligonucleotide
  Sense strand starting at position 955 of SEQ ID NO: 1564321
uacugcuuaguuugagaau

SEQ ID NO: 1871124 - RNA, 19 nt, Artificial Sequence
  Description of Artificial Sequence: Synthetic oligonucleotide
  Antisense strand to SEQ ID NO: 1871123
auucucaaacuaagcagua

SEQ ID NO: 1871125 - RNA, 19 nt, Artificial Sequence
  Description of Artificial Sequence: Synthetic oligonucleotide
  Sense strand starting at position 1000 of SEQ ID NO: 1564321
caauuuaaguguuauggag

SEQ ID NO: 1871126 - RNA, 19 nt, Artificial Sequence
  Description of Artificial Sequence: Synthetic oligonucleotide
  Antisense strand to SEQ ID NO: 1871125
cuccauaacacuuaaauug

SEQ ID NO: 1871127 - RNA, 19 nt, Artificial Sequence
  Description of Artificial Sequence: Synthetic oligonucleotide
  Sense strand starting at position 1004 of SEQ ID NO: 1564321
uuaaguguuauggaguuaa

SEQ ID NO: 1871128 - RNA, 19 nt, Artificial Sequence
  Description of Artificial Sequence: Synthetic oligonucleotide
  Antisense strand to SEQ ID NO: 1871127
uuaacuccauaacacuuaa

SEQ ID NO: 1871129 - RNA, 19 nt, Artificial Sequence
  Description of Artificial Sequence: Synthetic oligonucleotide
  Sense strand starting at position 1217 of SEQ ID NO: 1564321
aggaaaucccuuugaucau

SEQ ID NO: 1871130 - RNA, 19 nt, Artificial Sequence
  Description of Artificial Sequence: Synthetic oligonucleotide
  Antisense strand to SEQ ID NO: 1871129
augaucaaagggauuuccu

SEQ ID NO: 1871131 - RNA, 19 nt, Artificial Sequence
  Description of Artificial Sequence: Synthetic oligonucleotide
  Sense strand starting at position 1269 of SEQ ID NO: 1564321
uuaggugucacaggguuua

SEQ ID NO: 1871132 - RNA, 19 nt, Artificial Sequence
  Description of Artificial Sequence: Synthetic oligonucleotide
  Antisense strand to SEQ ID NO: 1871131
uaaacccugugacaccuaa

SEQ ID NO: 1871133 - RNA, 19 nt, Artificial Sequence
  Description of Artificial Sequence: Synthetic oligonucleotide
  Sense strand starting at position 1727 of SEQ ID NO: 1564321
cgugaaacccgaagugugu

SEQ ID NO: 1871134 - RNA, 19 nt, Artificial Sequence
  Description of Artificial Sequence: Synthetic oligonucleotide
  Antisense strand to SEQ ID NO: 1871133
acacacuucggguuucacg

SEQ ID NO: 1871135 - RNA, 19 nt, Artificial Sequence
  Description of Artificial Sequence: Synthetic oligonucleotide
  Sense strand starting at position 2294 of SEQ ID NO: 1564321
guguucuuuguuguaaugu

SEQ ID NO: 1871136 - RNA, 19 nt, Artificial Sequence
  Description of Artificial Sequence: Synthetic oligonucleotide
  Antisense strand to SEQ ID NO: 1871135
acauuacaacaaagaacac

SEQ ID NO: 1871137 - RNA, 19 nt, Artificial Sequence
  Description of Artificial Sequence: Synthetic oligonucleotide
  Sense strand starting at position 2310 of SEQ ID NO: 1564321
uguugacaacccuguaaga

SEQ ID NO: 1871138 - RNA, 19 nt, Artificial Sequence
  Description of Artificial Sequence: Synthetic oligonucleotide
  Antisense strand to SEQ ID NO: 1871137
ucuuacaggguugucaaca

SEQ ID NO: 1871139 - RNA, 19 nt, Artificial Sequence
  Description of Artificial Sequence: Synthetic oligonucleotide
  Sense strand starting at position 2438 of SEQ ID NO: 1564321
ucggaucuguuuccaagaa

SEQ ID NO: 1871140 - RNA, 19 nt, Artificial Sequence
  Description of Artificial Sequence: Synthetic oligonucleotide
  Antisense strand to SEQ ID NO: 1871139
uucuuggaaacagauccga

SEQ ID NO: 1871141 - RNA, 19 nt, Artificial Sequence
  Description of Artificial Sequence: Synthetic oligonucleotide
  Sense strand starting at position 2571 of SEQ ID NO: 1564321
aaaggaagucuguguacau

SEQ ID NO: 1871142 - RNA, 19 nt, Artificial Sequence
  Description of Artificial Sequence: Synthetic oligonucleotide
  Antisense strand to SEQ ID NO: 1871141
auguacacagacuuccuuu

SEQ ID NO: 1871143 - RNA, 19 nt, Artificial Sequence
  Description of Artificial Sequence: Synthetic oligonucleotide
  Sense strand starting at position 2572 of SEQ ID NO: 1564321
aaggaagucuguguacaua

SEQ ID NO: 1871144 - RNA, 19 nt, Artificial Sequence
  Description of Artificial Sequence: Synthetic oligonucleotide
  Antisense strand to SEQ ID NO: 1871143
uauguacacagacuuccuu

SEQ ID NO: 1871145 - RNA, 19 nt, Artificial Sequence
  Description of Artificial Sequence: Synthetic oligonucleotide
  Sense strand starting at position 2626 of SEQ ID NO: 1564321
guuguaggauugucagauc

SEQ ID NO: 1871146 - RNA, 19 nt, Artificial Sequence
  Description of Artificial Sequence: Synthetic oligonucleotide
  Antisense strand to SEQ ID NO: 1871145
gaucugacaauccuacaac

SEQ ID NO: 1871147 - RNA, 19 nt, Artificial Sequence
  Description of Artificial Sequence: Synthetic oligonucleotide
  Sense strand starting at position 2672 of SEQ ID NO: 1564321
ugggaucuuacaggguaau

SEQ ID NO: 1871148 - RNA, 19 nt, Artificial Sequence
  Description of Artificial Sequence: Synthetic oligonucleotide
  Antisense strand to SEQ ID NO: 1871147
auuacccuguaagauccca

SEQ ID NO: 1871149 - RNA, 19 nt, Artificial Sequence
  Description of Artificial Sequence: Synthetic oligonucleotide
  Sense strand starting at position 2673 of SEQ ID NO: 1564321
gggaucuuacaggguaaug

SEQ ID NO: 1871150 - RNA, 19 nt, Artificial Sequence
  Description of Artificial Sequence: Synthetic oligonucleotide
  Antisense strand to SEQ ID NO: 1871149
cauuacccuguaagauccc

SEQ ID NO: 1871151 - RNA, 19 nt, Artificial Sequence
  Description of Artificial Sequence: Synthetic oligonucleotide
  Sense strand starting at position 2684 of SEQ ID NO: 1564321
ggguaauguggugagauga

SEQ ID NO: 1871152 - RNA, 19 nt, Artificial Sequence
  Description of Artificial Sequence: Synthetic oligonucleotide
  Antisense strand to SEQ ID NO: 1871151
ucaucucaccacauuaccc

SEQ ID NO: 1871153 - RNA, 19 nt, Artificial Sequence
  Description of Artificial Sequence: Synthetic oligonucleotide
  Sense strand starting at position 2692 of SEQ ID NO: 1564321
uggugagaugauggauucu

SEQ ID NO: 1871154 - RNA, 19 nt, Artificial Sequence
  Description of Artificial Sequence: Synthetic oligonucleotide
  Antisense strand to SEQ ID NO: 1871153
agaauccaucaucucacca

SEQ ID NO: 1871155 - RNA, 19 nt, Artificial Sequence
  Description of Artificial Sequence: Synthetic oligonucleotide
  Sense strand starting at position 2931 of SEQ ID NO: 1564321
ucccucugccuaugugaaa

SEQ ID NO: 1871156 - RNA, 19 nt, Artificial Sequence
  Description of Artificial Sequence: Synthetic oligonucleotide
  Antisense strand to SEQ ID NO: 1871155
uuucacauaggcagaggga

SEQ ID NO: 1871157 - RNA, 19 nt, Artificial Sequence
  Description of Artificial Sequence: Synthetic oligonucleotide
  Sense strand starting at position 3072 of SEQ ID NO: 1564321
aguggcacuucucuaauau

SEQ ID NO: 1871158 - RNA, 19 nt, Artificial Sequence
  Description of Artificial Sequence: Synthetic oligonucleotide
  Antisense strand to SEQ ID NO: 1871157
auauuagagaagugccacu

SEQ ID NO: 1871159 - RNA, 19 nt, Artificial Sequence
  Description of Artificial Sequence: Synthetic oligonucleotide
  Sense strand starting at position 3073 of SEQ ID NO: 1564321
guggcacuucucuaauauu

SEQ ID NO: 1871160 - RNA, 19 nt, Artificial Sequence
  Description of Artificial Sequence: Synthetic oligonucleotide
  Antisense strand to SEQ ID NO: 1871159
aauauuagagaagugccac

SEQ ID NO: 1871161 - RNA, 19 nt, Artificial Sequence
  Description of Artificial Sequence: Synthetic oligonucleotide
  Sense strand starting at position 3227 of SEQ ID NO: 1564321
agaagucaguaguucgaga

SEQ ID NO: 1871162 - RNA, 19 nt, Artificial Sequence
  Description of Artificial Sequence: Synthetic oligonucleotide
  Antisense strand to SEQ ID NO: 1871161
ucucgaacuacugacuucu

SEQ ID NO: 1871163 - RNA, 19 nt, Artificial Sequence
  Description of Artificial Sequence: Synthetic oligonucleotide
  Sense strand starting at position 3953 of SEQ ID NO: 1564321
uagugcuuucugccaugua

SEQ ID NO: 1871164 - RNA, 19 nt, Artificial Sequence
  Description of Artificial Sequence: Synthetic oligonucleotide
  Antisense strand to SEQ ID NO: 1871163
uacauggcagaaagcacua

SEQ ID NO: 1871165 - RNA, 19 nt, Artificial Sequence
  Description of Artificial Sequence: Synthetic oligonucleotide
  Sense strand starting at position 3957 of SEQ ID NO: 1564321
gcuuucugccauguaguau

SEQ ID NO: 1871166 - RNA, 19 nt, Artificial Sequence
  Description of Artificial Sequence: Synthetic oligonucleotide
  Antisense strand to SEQ ID NO: 1871165
auacuacauggcagaaagc

SEQ ID NO: 1871167 - RNA, 19 nt, Artificial Sequence
  Description of Artificial Sequence: Synthetic oligonucleotide
  Sense strand starting at position 26 of SEQ ID NO: 1564322
cccagcuaucaagaaguca

SEQ ID NO: 1871168 - RNA, 19 nt, Artificial Sequence
  Description of Artificial Sequence: Synthetic oligonucleotide
  Antisense strand to SEQ ID NO: 1871167
ugacuucuugauagcuggg

SEQ ID NO: 1871169 - RNA, 19 nt, Artificial Sequence
  Description of Artificial Sequence: Synthetic oligonucleotide
  Sense strand starting at position 103 of SEQ ID NO: 1564322
gcuucuggaggcugagaaa

SEQ ID NO: 1871170 - RNA, 19 nt, Artificial Sequence
  Description of Artificial Sequence: Synthetic oligonucleotide
  Antisense strand to SEQ ID NO: 1871169
uuucucagccuccagaagc

SEQ ID NO: 1871171 - RNA, 19 nt, Artificial Sequence
  Description of Artificial Sequence: Synthetic oligonucleotide
  Sense strand starting at position 140 of SEQ ID NO: 1564322
ugugacugugugcaaacua

SEQ ID NO: 1871172 - RNA, 19 nt, Artificial Sequence
  Description of Artificial Sequence: Synthetic oligonucleotide
  Antisense strand to SEQ ID NO: 1871171
uaguuugcacacagucaca

SEQ ID NO: 1871173 - RNA, 19 nt, Artificial Sequence
  Description of Artificial Sequence: Synthetic oligonucleotide
  Sense strand starting at position 939 of SEQ ID NO: 1564322
auguauuucuacuugcuuu

SEQ ID NO: 1871174 - RNA, 19 nt, Artificial Sequence
  Description of Artificial Sequence: Synthetic oligonucleotide
  Antisense strand to SEQ ID NO: 1871173
aaagcaaguagaaauacau

SEQ ID NO: 1871175 - RNA, 19 nt, Artificial Sequence
  Description of Artificial Sequence: Synthetic oligonucleotide
  Sense strand starting at position 1056 of SEQ ID NO: 1564322
aauggcuacguuuauaagu

SEQ ID NO: 1871176 - RNA, 19 nt, Artificial Sequence
  Description of Artificial Sequence: Synthetic oligonucleotide
  Antisense strand to SEQ ID NO: 1871175
acuuauaaacguagccauu

SEQ ID NO: 1871177 - RNA, 19 nt, Artificial Sequence
  Description of Artificial Sequence: Synthetic oligonucleotide
  Sense strand starting at position 1086 of SEQ ID NO: 1564322
ggaagacauuucuagaacc

SEQ ID NO: 1871178 - RNA, 19 nt, Artificial Sequence
  Description of Artificial Sequence: Synthetic oligonucleotide
  Antisense strand to SEQ ID NO: 1871177
gguucuagaaaugucuucc

SEQ ID NO: 1871179 - RNA, 19 nt, Artificial Sequence
  Description of Artificial Sequence: Synthetic oligonucleotide
  Sense strand starting at position 1171 of SEQ ID NO: 1564322
uugacuucccuaugagaau

SEQ ID NO: 1871180 - RNA, 19 nt, Artificial Sequence
  Description of Artificial Sequence: Synthetic oligonucleotide
  Antisense strand to SEQ ID NO: 1871179
auucucauagggaagucaa

SEQ ID NO: 1871181 - RNA, 19 nt, Artificial Sequence
  Description of Artificial Sequence: Synthetic oligonucleotide
  Sense strand starting at position 1307 of SEQ ID NO: 1564322
uucccaaggguuugugaca

SEQ ID NO: 1871182 - RNA, 19 nt, Artificial Sequence
  Description of Artificial Sequence: Synthetic oligonucleotide
  Antisense strand to SEQ ID NO: 1871181
ugucacaaacccuugggaa

SEQ ID NO: 1871183 - RNA, 19 nt, Artificial Sequence
  Description of Artificial Sequence: Synthetic oligonucleotide
  Sense strand starting at position 1308 of SEQ ID NO: 1564322
ucccaaggguuugugacaa

SEQ ID NO: 1871184 - RNA, 19 nt, Artificial Sequence
  Description of Artificial Sequence: Synthetic oligonucleotide
  Antisense strand to SEQ ID NO: 1871183
uugucacaaacccuuggga

SEQ ID NO: 1871185 - RNA, 19 nt, Artificial Sequence
  Description of Artificial Sequence: Synthetic oligonucleotide
  Sense strand starting at position 1375 of SEQ ID NO: 1564322
cuuuaaugagguugaacca

SEQ ID NO: 1871186 - RNA, 19 nt, Artificial Sequence
  Description of Artificial Sequence: Synthetic oligonucleotide
  Antisense strand to SEQ ID NO: 1871185
ugguucaaccucauuaaag

SEQ ID NO: 1871187 - RNA, 19 nt, Artificial Sequence
  Description of Artificial Sequence: Synthetic oligonucleotide
  Sense strand starting at position 1425 of SEQ ID NO: 1564322
aguugaauguuggcuauuu

SEQ ID NO: 1871188 - RNA, 19 nt, Artificial Sequence
  Description of Artificial Sequence: Synthetic oligonucleotide
  Antisense strand to SEQ ID NO: 1871187
aaauagccaacauucaacu

SEQ ID NO: 1871189 - RNA, 19 nt, Artificial Sequence
  Description of Artificial Sequence: Synthetic oligonucleotide
  Sense strand starting at position 1426 of SEQ ID NO: 1564322
guugaauguuggcuauuuc

SEQ ID NO: 1871190 - RNA, 19 nt, Artificial Sequence
  Description of Artificial Sequence: Synthetic oligonucleotide
  Antisense strand to SEQ ID NO: 1871189
gaaauagccaacauucaac

SEQ ID NO: 1871191 - RNA, 19 nt, Artificial Sequence
  Description of Artificial Sequence: Synthetic oligonucleotide
  Sense strand starting at position 1490 of SEQ ID NO: 1564322
ccauuaugccaugauucgu

SEQ ID NO: 1871192 - RNA, 19 nt, Artificial Sequence
  Description of Artificial Sequence: Synthetic oligonucleotide
  Antisense strand to SEQ ID NO: 1871191
acgaaucauggcauaaugg

SEQ ID NO: 1871193 - RNA, 19 nt, Artificial Sequence
  Description of Artificial Sequence: Synthetic oligonucleotide
  Sense strand starting at position 1501 of SEQ ID NO: 1564322
ugauucgucgcguuccuga

SEQ ID NO: 1871194 - RNA, 19 nt, Artificial Sequence
  Description of Artificial Sequence: Synthetic oligonucleotide
  Antisense strand to SEQ ID NO: 1871193
ucaggaacgcgacgaauca

SEQ ID NO: 1871195 - RNA, 19 nt, Artificial Sequence
  Description of Artificial Sequence: Synthetic oligonucleotide
  Sense strand starting at position 1511 of SEQ ID NO: 1564322
cguuccugacuggaauaau

SEQ ID NO: 1871196 - RNA, 19 nt, Artificial Sequence
  Description of Artificial Sequence: Synthetic oligonucleotide
  Antisense strand to SEQ ID NO: 1871195
auuauuccagucaggaacg

SEQ ID NO: 1871197 - RNA, 19 nt, Artificial Sequence
  Description of Artificial Sequence: Synthetic oligonucleotide
  Sense strand starting at position 2355 of SEQ ID NO: 1564322
ggguccuaucuugggaaac

SEQ ID NO: 1871198 - RNA, 19 nt, Artificial Sequence
  Description of Artificial Sequence: Synthetic oligonucleotide
  Antisense strand to SEQ ID NO: 1871197
guuucccaagauaggaccc

SEQ ID NO: 1871199 - RNA, 19 nt, Artificial Sequence
  Description of Artificial Sequence: Synthetic oligonucleotide
  Sense strand starting at position 2460 of SEQ ID NO: 1564322
gaggaaacgcgugauucuu

SEQ ID NO: 1871200 - RNA, 19 nt, Artificial Sequence
  Description of Artificial Sequence: Synthetic oligonucleotide
  Antisense strand to SEQ ID NO: 1871199
aagaaucacgcguuuccuc

SEQ ID NO: 1871201 - RNA, 19 nt, Artificial Sequence
  Description of Artificial Sequence: Synthetic oligonucleotide
  Sense strand starting at position 2624 of SEQ ID NO: 1564322
caaauacaguggucugaag

SEQ ID NO: 1871202 - RNA, 19 nt, Artificial Sequence
  Description of Artificial Sequence: Synthetic oligonucleotide
  Antisense strand to SEQ ID NO: 1871201
cuucagaccacuguauuug

SEQ ID NO: 1871203 - RNA, 19 nt, Artificial Sequence
  Description of Artificial Sequence: Synthetic oligonucleotide
  Sense strand starting at position 2626 of SEQ ID NO: 1564322
aauacaguggucugaagca

SEQ ID NO: 1871204 - RNA, 19 nt, Artificial Sequence
  Description of Artificial Sequence: Synthetic oligonucleotide
  Antisense strand to SEQ ID NO: 1871203
ugcuucagaccacuguauu

SEQ ID NO: 1871205 - RNA, 19 nt, Artificial Sequence
  Description of Artificial Sequence: Synthetic oligonucleotide
  Sense strand starting at position 2669 of SEQ ID NO: 1564322
caaagaucgucucuaggaa

SEQ ID NO: 1871206 - RNA, 19 nt, Artificial Sequence
  Description of Artificial Sequence: Synthetic oligonucleotide
  Antisense strand to SEQ ID NO: 1871205
uuccuagagacgaucuuug

SEQ ID NO: 1871207 - RNA, 19 nt, Artificial Sequence
  Description of Artificial Sequence: Synthetic oligonucleotide
  Sense strand starting at position 2920 of SEQ ID NO: 1564322
cgaucaagucacuaaaucu

SEQ ID NO: 1871208 - RNA, 19 nt, Artificial Sequence
  Description of Artificial Sequence: Synthetic oligonucleotide
  Antisense strand to SEQ ID NO: 1871207
agauuuagugacuugaucg

SEQ ID NO: 1871209 - RNA, 19 nt, Artificial Sequence
  Description of Artificial Sequence: Synthetic oligonucleotide
  Sense strand starting at position 3271 of SEQ ID NO: 1564322
cauguccugggccaagaua

SEQ ID NO: 1871210 - RNA, 19 nt, Artificial Sequence
  Description of Artificial Sequence: Synthetic oligonucleotide
  Antisense strand to SEQ ID NO: 1871209
uaucuuggcccaggacaug

SEQ ID NO: 1871211 - RNA, 19 nt, Artificial Sequence
  Description of Artificial Sequence: Synthetic oligonucleotide
  Sense strand starting at position 3330 of SEQ ID NO: 1564322
cagaguauuuguguaaugu

SEQ ID NO: 1871212 - RNA, 19 nt, Artificial Sequence
  Description of Artificial Sequence: Synthetic oligonucleotide
  Antisense strand to SEQ ID NO: 1871211
acauuacacaaauacucug

SEQ ID NO: 1871213 - RNA, 19 nt, Artificial Sequence
  Description of Artificial Sequence: Synthetic oligonucleotide
  Sense strand starting at position 3354 of SEQ ID NO: 1564322
uugacaucaugguuagcuu

SEQ ID NO: 1871214 - RNA, 19 nt, Artificial Sequence
  Description of Artificial Sequence: Synthetic oligonucleotide
  Antisense strand to SEQ ID NO: 1871213
aagcuaaccaugaugucaa

SEQ ID NO: 1871215 - RNA, 19 nt, Artificial Sequence
  Description of Artificial Sequence: Synthetic oligonucleotide
  Sense strand starting at position 3357 of SEQ ID NO: 1564322
acaucaugguuagcuuuaa

SEQ ID NO: 1871216 - RNA, 19 nt, Artificial Sequence
  Description of Artificial Sequence: Synthetic oligonucleotide
  Antisense strand to SEQ ID NO: 1871215
uuaaagcuaaccaugaugu

SEQ ID NO: 1871217 - RNA, 19 nt, Artificial Sequence
  Description of Artificial Sequence: Synthetic oligonucleotide
  Sense strand starting at position 3361 of SEQ ID NO: 1564322
caugguuagcuuuaaagga

SEQ ID NO: 1871218 - RNA, 19 nt, Artificial Sequence
  Description of Artificial Sequence: Synthetic oligonucleotide
  Antisense strand to SEQ ID NO: 1871217
uccuuuaaagcuaaccaug

SEQ ID NO: 1871219 - RNA, 19 nt, Artificial Sequence
  Description of Artificial Sequence: Synthetic oligonucleotide
  Sense strand starting at position 3413 of SEQ ID NO: 1564322
cugaauauuuagcauuaga

SEQ ID NO: 1871220 - RNA, 19 nt, Artificial Sequence
  Description of Artificial Sequence: Synthetic oligonucleotide
  Antisense strand to SEQ ID NO: 1871219
ucuaaugcuaaauauucag

SEQ ID NO: 1871221 - RNA, 19 nt, Artificial Sequence
  Description of Artificial Sequence: Synthetic oligonucleotide
  Sense strand starting at position 3464 of SEQ ID NO: 1564322
uuacauuaaguguacugua

SEQ ID NO: 1871222 - RNA, 19 nt, Artificial Sequence
  Description of Artificial Sequence: Synthetic oligonucleotide
  Antisense strand to SEQ ID NO: 1871221
uacaguacacuuaauguaa

SEQ ID NO: 1871223 - RNA, 19 nt, Artificial Sequence
  Description of Artificial Sequence: Synthetic oligonucleotide
  Sense strand starting at position 3469 of SEQ ID NO: 1564322
uuaaguguacuguacauaa

SEQ ID NO: 1871224 - RNA, 19 nt, Artificial Sequence
  Description of Artificial Sequence: Synthetic oligonucleotide
  Antisense strand to SEQ ID NO: 1871223
uuauguacaguacacuuaa

SEQ ID NO: 1871225 - RNA, 19 nt, Artificial Sequence
  Description of Artificial Sequence: Synthetic oligonucleotide
  Sense strand starting at position 3527 of SEQ ID NO: 1564322
cgcuuuaaacacuauaaag

SEQ ID NO: 1871226 - RNA, 19 nt, Artificial Sequence
  Description of Artificial Sequence: Synthetic oligonucleotide
  Antisense strand to SEQ ID NO: 1871225
cuuuauaguguuuaaagcg

SEQ ID NO: 1871227 - RNA, 19 nt, Artificial Sequence
  Description of Artificial Sequence: Synthetic oligonucleotide
  Sense strand starting at position 3606 of SEQ ID NO: 1564322
agaucacaguguuuagaac

SEQ ID NO: 1871228 - RNA, 19 nt, Artificial Sequence
  Description of Artificial Sequence: Synthetic oligonucleotide
  Antisense strand to SEQ ID NO: 1871227
guucuaaacacugugaucu

SEQ ID NO: 1871229 - RNA, 19 nt, Artificial Sequence
  Description of Artificial Sequence: Synthetic oligonucleotide
  Sense strand starting at position 3615 of SEQ ID NO: 1564322
uguuuagaacauuguaaca

SEQ ID NO: 1871230 - RNA, 19 nt, Artificial Sequence
  Description of Artificial Sequence: Synthetic oligonucleotide
  Antisense strand to SEQ ID NO: 1871229
uguuacaauguucuaaaca

SEQ ID NO: 1871231 - RNA, 19 nt, Artificial Sequence
  Description of Artificial Sequence: Synthetic oligonucleotide
  Sense strand starting at position 3674 of SEQ ID NO: 1564322
cucuaucuugcuuauagag

SEQ ID NO: 1871232 - RNA, 19 nt, Artificial Sequence
  Description of Artificial Sequence: Synthetic oligonucleotide
  Antisense strand to SEQ ID NO: 1871231
cucuauaagcaagauagag

SEQ ID NO: 1871233 - RNA, 19 nt, Artificial Sequence
  Description of Artificial Sequence: Synthetic oligonucleotide
  Sense strand starting at position 3796 of SEQ ID NO: 1564322
cuaaauucugaugagcauu

SEQ ID NO: 1871234 - RNA, 19 nt, Artificial Sequence
  Description of Artificial Sequence: Synthetic oligonucleotide
  Antisense strand to SEQ ID NO: 1871233
aaugcucaucagaauuuag

SEQ ID NO: 1871235 - RNA, 19 nt, Artificial Sequence
  Description of Artificial Sequence: Synthetic oligonucleotide
  Sense strand starting at position 3804 of SEQ ID NO: 1564322
ugaugagcauuugcaaguu

SEQ ID NO: 1871236 - RNA, 19 nt, Artificial Sequence
  Description of Artificial Sequence: Synthetic oligonucleotide
  Antisense strand to SEQ ID NO: 1871235
aacuugcaaaugcucauca

SEQ ID NO: 1871237 - RNA, 19 nt, Artificial Sequence
  Description of Artificial Sequence: Synthetic oligonucleotide
  Sense strand starting at position 3816 of SEQ ID NO: 1564322
gcaaguugauccuucuuag

SEQ ID NO: 1871238 - RNA, 19 nt, Artificial Sequence
  Description of Artificial Sequence: Synthetic oligonucleotide
  Antisense strand to SEQ ID NO: 1871237
cuaagaaggaucaacuugc

SEQ ID NO: 1871239 - RNA, 19 nt, Artificial Sequence
  Description of Artificial Sequence: Synthetic oligonucleotide
  Sense strand starting at position 3846 of SEQ ID NO: 1564322
gcuaacuugcuccagugau

SEQ ID NO: 1871240 - RNA, 19 nt, Artificial Sequence
  Description of Artificial Sequence: Synthetic oligonucleotide
  Antisense strand to SEQ ID NO: 1871239
aucacuggagcaaguuagc

SEQ ID NO: 1871241 - RNA, 19 nt, Artificial Sequence
  Description of Artificial Sequence: Synthetic oligonucleotide
  Sense strand starting at position 3873 of SEQ ID NO: 1564322
ucuguauuaucauuugcca

SEQ ID NO: 1871242 - RNA, 19 nt, Artificial Sequence
  Description of Artificial Sequence: Synthetic oligonucleotide
  Antisense strand to SEQ ID NO: 1871241
uggcaaaugauaauacaga

SEQ ID NO: 1871243 - RNA, 19 nt, Artificial Sequence
  Description of Artificial Sequence: Synthetic oligonucleotide
  Sense strand starting at position 3920 of SEQ ID NO: 1564322
auagcuuaugauugcuaau

SEQ ID NO: 1871244 - RNA, 19 nt, Artificial Sequence
  Description of Artificial Sequence: Synthetic oligonucleotide
  Antisense strand to SEQ ID NO: 1871243
auuagcaaucauaagcuau

SEQ ID NO: 1871245 - RNA, 19 nt, Artificial Sequence
  Description of Artificial Sequence: Synthetic oligonucleotide
  Sense strand starting at position 3932 of SEQ ID NO: 1564322
ugcuaauuucccugucaga

SEQ ID NO: 1871246 - RNA, 19 nt, Artificial Sequence
  Description of Artificial Sequence: Synthetic oligonucleotide
  Antisense strand to SEQ ID NO: 1871245
ucugacagggaaauuagca

SEQ ID NO: 1871247 - RNA, 19 nt, Artificial Sequence
  Description of Artificial Sequence: Synthetic oligonucleotide
  Sense strand starting at position 63 of SEQ ID NO: 1564323
augucacauuacucuggaa

SEQ ID NO: 1871248 - RNA, 19 nt, Artificial Sequence
  Description of Artificial Sequence: Synthetic oligonucleotide
  Antisense strand to SEQ ID NO: 1871247
uuccagaguaaugugacau

SEQ ID NO: 1871249 - RNA, 19 nt, Artificial Sequence
  Description of Artificial Sequence: Synthetic oligonucleotide
  Sense strand starting at position 637 of SEQ ID NO: 1564323
ggagguucgcuugauccca

SEQ ID NO: 1871250 - RNA, 19 nt, Artificial Sequence
  Description of Artificial Sequence: Synthetic oligonucleotide
  Antisense strand to SEQ ID NO: 1871249
ugggaucaagcgaaccucc

SEQ ID NO: 1871251 - RNA, 19 nt, Artificial Sequence
  Description of Artificial Sequence: Synthetic oligonucleotide
  Sense strand starting at position 878 of SEQ ID NO: 1564323
ucaucaugguggcauuuaa

SEQ ID NO: 1871252 - RNA, 19 nt, Artificial Sequence
  Description of Artificial Sequence: Synthetic oligonucleotide
  Antisense strand to SEQ ID NO: 1871251
uuaaaugccaccaugauga

SEQ ID NO: 1871253 - RNA, 19 nt, Artificial Sequence
  Description of Artificial Sequence: Synthetic oligonucleotide
  Sense strand starting at position 960 of SEQ ID NO: 1564323
ugauuagagccauaguauc

SEQ ID NO: 1871254 - RNA, 19 nt, Artificial Sequence
  Description of Artificial Sequence: Synthetic oligonucleotide
  Antisense strand to SEQ ID NO: 1871253
gauacuauggcucuaauca

SEQ ID NO: 1871255 - RNA, 19 nt, Artificial Sequence
  Description of Artificial Sequence: Synthetic oligonucleotide
  Sense strand starting at position 1051 of SEQ ID NO: 1564323
aguugcucaccugauaaca

SEQ ID NO: 1871256 - RNA, 19 nt, Artificial Sequence
  Description of Artificial Sequence: Synthetic oligonucleotide
  Antisense strand to SEQ ID NO: 1871255
uguuaucaggugagcaacu

SEQ ID NO: 1871257 - RNA, 19 nt, Artificial Sequence
  Description of Artificial Sequence: Synthetic oligonucleotide
  Sense strand starting at position 1098 of SEQ ID NO: 1564323
augauagcgguuuaucuuu

SEQ ID NO: 1871258 - RNA, 19 nt, Artificial Sequence
  Description of Artificial Sequence: Synthetic oligonucleotide
  Antisense strand to SEQ ID NO: 1871257
aaagauaaaccgcuaucau

SEQ ID NO: 1871259 - RNA, 19 nt, Artificial Sequence
  Description of Artificial Sequence: Synthetic oligonucleotide
  Sense strand starting at position 1106 of SEQ ID NO: 1564323
gguuuaucuuuggcuagau

SEQ ID NO: 1871260 - RNA, 19 nt, Artificial Sequence
  Description of Artificial Sequence: Synthetic oligonucleotide
  Antisense strand to SEQ ID NO: 1871259
aucuagccaaagauaaacc

SEQ ID NO: 1871261 - RNA, 19 nt, Artificial Sequence
  Description of Artificial Sequence: Synthetic oligonucleotide
  Sense strand starting at position 1107 of SEQ ID NO: 1564323
guuuaucuuuggcuagauc

SEQ ID NO: 1871262 - RNA, 19 nt, Artificial Sequence
  Description of Artificial Sequence: Synthetic oligonucleotide
  Antisense strand to SEQ ID NO: 1871261
gaucuagccaaagauaaac

SEQ ID NO: 1871263 - RNA, 19 nt, Artificial Sequence
  Description of Artificial Sequence: Synthetic oligonucleotide
  Sense strand starting at position 1118 of SEQ ID NO: 1564323
gcuagaucucuguggacaa

SEQ ID NO: 1871264 - RNA, 19 nt, Artificial Sequence
  Description of Artificial Sequence: Synthetic oligonucleotide
  Antisense strand to SEQ ID NO: 1871263
uuguccacagagaucuagc

SEQ ID NO: 1871265 - RNA, 19 nt, Artificial Sequence
  Description of Artificial Sequence: Synthetic oligonucleotide
  Sense strand starting at position 1185 of SEQ ID NO: 1564323
agguguaugucauccagua

SEQ ID NO: 1871266 - RNA, 19 nt, Artificial Sequence
  Description of Artificial Sequence: Synthetic oligonucleotide
  Antisense strand to SEQ ID NO: 1871265
uacuggaugacauacaccu

SEQ ID NO: 1871267 - RNA, 19 nt, Artificial Sequence
  Description of Artificial Sequence: Synthetic oligonucleotide
  Sense strand starting at position 1187 of SEQ ID NO: 1564323
guguaugucauccaguaag

SEQ ID NO: 1871268 - RNA, 19 nt, Artificial Sequence
  Description of Artificial Sequence: Synthetic oligonucleotide
  Antisense strand to SEQ ID NO: 1871267
cuuacuggaugacauacac

SEQ ID NO: 1871269 - RNA, 19 nt, Artificial Sequence
  Description of Artificial Sequence: Synthetic oligonucleotide
  Sense strand starting at position 1211 of SEQ ID NO: 1564323
cuauucuuucgauagauuc

SEQ ID NO: 1871270 - RNA, 19 nt, Artificial Sequence
  Description of Artificial Sequence: Synthetic oligonucleotide
  Antisense strand to SEQ ID NO: 1871269
gaaucuaucgaaagaauag

SEQ ID NO: 1871271 - RNA, 19 nt, Artificial Sequence
  Description of Artificial Sequence: Synthetic oligonucleotide
  Sense strand starting at position 1396 of SEQ ID NO: 1564323
ugucgagguucuuucugaa

SEQ ID NO: 1871272 - RNA, 19 nt, Artificial Sequence
  Description of Artificial Sequence: Synthetic oligonucleotide
  Antisense strand to SEQ ID NO: 1871271
uucagaaagaaccucgaca

SEQ ID NO: 1871273 - RNA, 19 nt, Artificial Sequence
  Description of Artificial Sequence: Synthetic oligonucleotide
  Sense strand starting at position 1492 of SEQ ID NO: 1564323
ugaggagagcucugucaag

SEQ ID NO: 1871274 - RNA, 19 nt, Artificial Sequence
  Description of Artificial Sequence: Synthetic oligonucleotide
  Antisense strand to SEQ ID NO: 1871273
cuugacagagcucuccuca

SEQ ID NO: 1871275 - RNA, 19 nt, Artificial Sequence
  Description of Artificial Sequence: Synthetic oligonucleotide
  Sense strand starting at position 1602 of SEQ ID NO: 1564323
ggaguaccacuuugaacuu

SEQ ID NO: 1871276 - RNA, 19 nt, Artificial Sequence
  Description of Artificial Sequence: Synthetic oligonucleotide
  Antisense strand to SEQ ID NO: 1871275
aaguucaaagugguacucc

SEQ ID NO: 1871277 - RNA, 19 nt, Artificial Sequence
  Description of Artificial Sequence: Synthetic oligonucleotide
  Sense strand starting at position 1611 of SEQ ID NO: 1564323
cuuugaacuugacucuuga

SEQ ID NO: 1871278 - RNA, 19 nt, Artificial Sequence
  Description of Artificial Sequence: Synthetic oligonucleotide
  Antisense strand to SEQ ID NO: 1871277
ucaagagucaaguucaaag

SEQ ID NO: 1871279 - RNA, 19 nt, Artificial Sequence
  Description of Artificial Sequence: Synthetic oligonucleotide
  Sense strand starting at position 1637 of SEQ ID NO: 1564323
cgauuccaaucgucaacau

SEQ ID NO: 1871280 - RNA, 19 nt, Artificial Sequence
  Description of Artificial Sequence: Synthetic oligonucleotide
  Antisense strand to SEQ ID NO: 1871279
auguugacgauuggaaucg

SEQ ID NO: 1871281 - RNA, 19 nt, Artificial Sequence
  Description of Artificial Sequence: Synthetic oligonucleotide
  Sense strand starting at position 1652 of SEQ ID NO: 1564323
acauacuugcugugaaacu

SEQ ID NO: 1871282 - RNA, 19 nt, Artificial Sequence
  Description of Artificial Sequence: Synthetic oligonucleotide
  Antisense strand to SEQ ID NO: 1871281
aguuucacagcaaguaugu

SEQ ID NO: 1871283 - RNA, 19 nt, Artificial Sequence
  Description of Artificial Sequence: Synthetic oligonucleotide
  Sense strand starting at position 1843 of SEQ ID NO: 1564323
accaguguguccucucaag

SEQ ID NO: 1871284 - RNA, 19 nt, Artificial Sequence
  Description of Artificial Sequence: Synthetic oligonucleotide
  Antisense strand to SEQ ID NO: 1871283
cuugagaggacacacuggu

SEQ ID NO: 1871285 - RNA, 19 nt, Artificial Sequence
  Description of Artificial Sequence: Synthetic oligonucleotide
  Sense strand starting at position 2012 of SEQ ID NO: 1564323
aguccaggguucucaggau

SEQ ID NO: 1871286 - RNA, 19 nt, Artificial Sequence
  Description of Artificial Sequence: Synthetic oligonucleotide
  Antisense strand to SEQ ID NO: 1871285
auccugagaacccuggacu

SEQ ID NO: 1871287 - RNA, 19 nt, Artificial Sequence
  Description of Artificial Sequence: Synthetic oligonucleotide
  Sense strand starting at position 2016 of SEQ ID NO: 1564323
caggguucucaggauagcu

SEQ ID NO: 1871288 - RNA, 19 nt, Artificial Sequence
  Description of Artificial Sequence: Synthetic oligonucleotide
  Antisense strand to SEQ ID NO: 1871287
agcuauccugagaacccug

SEQ ID NO: 1871289 - RNA, 19 nt, Artificial Sequence
  Description of Artificial Sequence: Synthetic oligonucleotide
  Sense strand starting at position 2025 of SEQ ID NO: 1564323
caggauagcuccucggauu

SEQ ID NO: 1871290 - RNA, 19 nt, Artificial Sequence
  Description of Artificial Sequence: Synthetic oligonucleotide
  Antisense strand to SEQ ID NO: 1871289
aauccgaggagcuauccug

SEQ ID NO: 1871291 - RNA, 19 nt, Artificial Sequence
  Description of Artificial Sequence: Synthetic oligonucleotide
  Sense strand starting at position 2026 of SEQ ID NO: 1564323
aggauagcuccucggauuc

SEQ ID NO: 1871292 - RNA, 19 nt, Artificial Sequence
  Description of Artificial Sequence: Synthetic oligonucleotide
  Antisense strand to SEQ ID NO: 1871291
gaauccgaggagcuauccu

SEQ ID NO: 1871293 - RNA, 19 nt, Artificial Sequence
  Description of Artificial Sequence: Synthetic oligonucleotide
  Sense strand starting at position 2083 of SEQ ID NO: 1564323
ggaguauugucaccacccu

SEQ ID NO: 1871294 - RNA, 19 nt, Artificial Sequence
  Description of Artificial Sequence: Synthetic oligonucleotide
  Antisense strand to SEQ ID NO: 1871293
aggguggugacaauacucc

SEQ ID NO: 1871295 - RNA, 19 nt, Artificial Sequence
  Description of Artificial Sequence: Synthetic oligonucleotide
  Sense strand starting at position 2175 of SEQ ID NO: 1564323
cugcuucuccucggagaaa

SEQ ID NO: 1871296 - RNA, 19 nt, Artificial Sequence
  Description of Artificial Sequence: Synthetic oligonucleotide
  Antisense strand to SEQ ID NO: 1871295
uuucuccgaggagaagcag

SEQ ID NO: 1871297 - RNA, 19 nt, Artificial Sequence
  Description of Artificial Sequence: Synthetic oligonucleotide
  Sense strand starting at position 2178 of SEQ ID NO: 1564323
cuucuccucggagaaacuu

SEQ ID NO: 1871298 - RNA, 19 nt, Artificial Sequence
  Description of Artificial Sequence: Synthetic oligonucleotide
  Antisense strand to SEQ ID NO: 1871297
aaguuucuccgaggagaag

SEQ ID NO: 1871299 - RNA, 19 nt, Artificial Sequence
  Description of Artificial Sequence: Synthetic oligonucleotide
  Sense strand starting at position 2186 of SEQ ID NO: 1564323
cggagaaacuuugcuagug

SEQ ID NO: 1871300 - RNA, 19 nt, Artificial Sequence
  Description of Artificial Sequence: Synthetic oligonucleotide
  Antisense strand to SEQ ID NO: 1871299
cacuagcaaaguuucuccg

SEQ ID NO: 1871301 - RNA, 19 nt, Artificial Sequence
  Description of Artificial Sequence: Synthetic oligonucleotide
  Sense strand starting at position 2187 of SEQ ID NO: 1564323
ggagaaacuuugcuaguga

SEQ ID NO: 1871302 - RNA, 19 nt, Artificial Sequence
  Description of Artificial Sequence: Synthetic oligonucleotide
  Antisense strand to SEQ ID NO: 1871301
ucacuagcaaaguuucucc

SEQ ID NO: 1871303 - RNA, 19 nt, Artificial Sequence
  Description of Artificial Sequence: Synthetic oligonucleotide
  Sense strand starting at position 2422 of SEQ ID NO: 1564323
gagggaugcucguugugga

SEQ ID NO: 1871304 - RNA, 19 nt, Artificial Sequence
  Description of Artificial Sequence: Synthetic oligonucleotide
  Antisense strand to SEQ ID NO: 1871303
uccacaacgagcaucccuc

SEQ ID NO: 1871305 - RNA, 19 nt, Artificial Sequence
  Description of Artificial Sequence: Synthetic oligonucleotide
  Sense strand starting at position 2673 of SEQ ID NO: 1564323
uccagauaauaucaugaag

SEQ ID NO: 1871306 - RNA, 19 nt, Artificial Sequence
  Description of Artificial Sequence: Synthetic oligonucleotide
  Antisense strand to SEQ ID NO: 1871305
cuucaugauauuaucugga

SEQ ID NO: 1871307 - RNA, 19 nt, Artificial Sequence
  Description of Artificial Sequence: Synthetic oligonucleotide
  Sense strand starting at position 2837 of SEQ ID NO: 1564323
ggagcuuuagaaugaacuu

SEQ ID NO: 1871308 - RNA, 19 nt, Artificial Sequence
  Description of Artificial Sequence: Synthetic oligonucleotide
  Antisense strand to SEQ ID NO: 1871307
aaguucauucuaaagcucc

SEQ ID NO: 1871309 - RNA, 19 nt, Artificial Sequence
  Description of Artificial Sequence: Synthetic oligonucleotide
  Sense strand starting at position 2853 of SEQ ID NO: 1564323
cuuacaggucuuugguuga

SEQ ID NO: 1871310 - RNA, 19 nt, Artificial Sequence
  Description of Artificial Sequence: Synthetic oligonucleotide
  Antisense strand to SEQ ID NO: 1871309
ucaaccaaagaccuguaag

SEQ ID NO: 1871311 - RNA, 19 nt, Artificial Sequence
  Description of Artificial Sequence: Synthetic oligonucleotide
  Sense strand starting at position 2856 of SEQ ID NO: 1564323
acaggucuuugguugaaag

SEQ ID NO: 1871312 - RNA, 19 nt, Artificial Sequence
  Description of Artificial Sequence: Synthetic oligonucleotide
  Antisense strand to SEQ ID NO: 1871311
cuuucaaccaaagaccugu

SEQ ID NO: 1871313 - RNA, 19 nt, Artificial Sequence
  Description of Artificial Sequence: Synthetic oligonucleotide
  Sense strand starting at position 2858 of SEQ ID NO: 1564323
aggucuuugguugaaaggu

SEQ ID NO: 1871314 - RNA, 19 nt, Artificial Sequence
  Description of Artificial Sequence: Synthetic oligonucleotide
  Antisense strand to SEQ ID NO: 1871313
accuuucaaccaaagaccu

SEQ ID NO: 1871315 - RNA, 19 nt, Artificial Sequence
  Description of Artificial Sequence: Synthetic oligonucleotide
  Sense strand starting at position 2947 of SEQ ID NO: 1564323
gggugucuuaaagagcuuu

SEQ ID NO: 1871316 - RNA, 19 nt, Artificial Sequence
  Description of Artificial Sequence: Synthetic oligonucleotide
  Antisense strand to SEQ ID NO: 1871315
aaagcucuuuaagacaccc

SEQ ID NO: 1871317 - RNA, 19 nt, Artificial Sequence
  Description of Artificial Sequence: Synthetic oligonucleotide
  Sense strand starting at position 2975 of SEQ ID NO: 1564323
cuguauucuuaaguguaau

SEQ ID NO: 1871318 - RNA, 19 nt, Artificial Sequence
  Description of Artificial Sequence: Synthetic oligonucleotide
  Antisense strand to SEQ ID NO: 1871317
auuacacuuaagaauacag

SEQ ID NO: 1871319 - RNA, 19 nt, Artificial Sequence
  Description of Artificial Sequence: Synthetic oligonucleotide
  Sense strand starting at position 3363 of SEQ ID NO: 1564323
gagcaagauuacgucuuaa

SEQ ID NO: 1871320 - RNA, 19 nt, Artificial Sequence
  Description of Artificial Sequence: Synthetic oligonucleotide
  Antisense strand to SEQ ID NO: 1871319
uuaagacguaaucuugcuc

SEQ ID NO: 1871321 - RNA, 19 nt, Artificial Sequence
  Description of Artificial Sequence: Synthetic oligonucleotide
  Sense strand starting at position 3562 of SEQ ID NO: 1564323
uaagguuuccaugauugcu

SEQ ID NO: 1871322 - RNA, 19 nt, Artificial Sequence
  Description of Artificial Sequence: Synthetic oligonucleotide
  Antisense strand to SEQ ID NO: 1871321
agcaaucauggaaaccuua

SEQ ID NO: 1871323 - RNA, 19 nt, Artificial Sequence
  Description of Artificial Sequence: Synthetic oligonucleotide
  Sense strand starting at position 3620 of SEQ ID NO: 1564323
aucuaaagguugucaccuu

SEQ ID NO: 1871324 - RNA, 19 nt, Artificial Sequence
  Description of Artificial Sequence: Synthetic oligonucleotide
  Antisense strand to SEQ ID NO: 1871323
aaggugacaaccuuuagau

SEQ ID NO: 1871325 - RNA, 19 nt, Artificial Sequence
  Description of Artificial Sequence: Synthetic oligonucleotide
  Sense strand starting at position 3765 of SEQ ID NO: 1564323
uucuuauuaguugggacau

SEQ ID NO: 1871326 - RNA, 19 nt, Artificial Sequence
  Description of Artificial Sequence: Synthetic oligonucleotide
  Antisense strand to SEQ ID NO: 1871325
augucccaacuaauaagaa

SEQ ID NO: 1871327 - RNA, 19 nt, Artificial Sequence
  Description of Artificial Sequence: Synthetic oligonucleotide
  Sense strand starting at position 683 of SEQ ID NO: 1564324
augaacguccugugugauu

SEQ ID NO: 1871328 - RNA, 19 nt, Artificial Sequence
  Description of Artificial Sequence: Synthetic oligonucleotide
  Antisense strand to SEQ ID NO: 1871327
aaucacacaggacguucau

SEQ ID NO: 1871329 - RNA, 19 nt, Artificial Sequence
  Description of Artificial Sequence: Synthetic oligonucleotide
  Sense strand starting at position 796 of SEQ ID NO: 1564324
aaauguuggcacugauaug

SEQ ID NO: 1871330 - RNA, 19 nt, Artificial Sequence
  Description of Artificial Sequence: Synthetic oligonucleotide
  Antisense strand to SEQ ID NO: 1871329
cauaucagugccaacauuu

SEQ ID NO: 1871331 - RNA, 19 nt, Artificial Sequence
  Description of Artificial Sequence: Synthetic oligonucleotide
  Sense strand starting at position 807 of SEQ ID NO: 1564324
cugauaugcuaacauaaga

SEQ ID NO: 1871332 - RNA, 19 nt, Artificial Sequence
  Description of Artificial Sequence: Synthetic oligonucleotide
  Antisense strand to SEQ ID NO: 1871331
ucuuauguuagcauaucag

SEQ ID NO: 1871333 - RNA, 19 nt, Artificial Sequence
  Description of Artificial Sequence: Synthetic oligonucleotide
  Sense strand starting at position 841 of SEQ ID NO: 1564324
acuuaugucucucuggaca

SEQ ID NO: 1871334 - RNA, 19 nt, Artificial Sequence
  Description of Artificial Sequence: Synthetic oligonucleotide
  Antisense strand to SEQ ID NO: 1871333
uguccagagagacauaagu

SEQ ID NO: 1871335 - RNA, 19 nt, Artificial Sequence
  Description of Artificial Sequence: Synthetic oligonucleotide
  Sense strand starting at position 916 of SEQ ID NO: 1564324
gcugaaugacucugugguc

SEQ ID NO: 1871336 - RNA, 19 nt, Artificial Sequence
  Description of Artificial Sequence: Synthetic oligonucleotide
  Antisense strand to SEQ ID NO: 1871335
gaccacagagucauucagc

SEQ ID NO: 1871337 - RNA, 19 nt, Artificial Sequence
  Description of Artificial Sequence: Synthetic oligonucleotide
  Sense strand starting at position 976 of SEQ ID NO: 1564324
gacauugagugacugauca

SEQ ID NO: 1871338 - RNA, 19 nt, Artificial Sequence
  Description of Artificial Sequence: Synthetic oligonucleotide
  Antisense strand to SEQ ID NO: 1871337
ugaucagucacucaauguc

SEQ ID NO: 1871339 - RNA, 19 nt, Artificial Sequence
  Description of Artificial Sequence: Synthetic oligonucleotide
  Sense strand starting at position 1287 of SEQ ID NO: 1564324
cuguucagucgguuuagca

SEQ ID NO: 1871340 - RNA, 19 nt, Artificial Sequence
  Description of Artificial Sequence: Synthetic oligonucleotide
  Antisense strand to SEQ ID NO: 1871339
ugcuaaaccgacugaacag

SEQ ID NO: 1871341 - RNA, 19 nt, Artificial Sequence
  Description of Artificial Sequence: Synthetic oligonucleotide
  Sense strand starting at position 1376 of SEQ ID NO: 1564324
gcuacagaucccuggaagu

SEQ ID NO: 1871342 - RNA, 19 nt, Artificial Sequence
  Description of Artificial Sequence: Synthetic oligonucleotide
  Antisense strand to SEQ ID NO: 1871341
acuuccagggaucuguagc

SEQ ID NO: 1871343 - RNA, 19 nt, Artificial Sequence
  Description of Artificial Sequence: Synthetic oligonucleotide
  Sense strand starting at position 1429 of SEQ ID NO: 1564324
ccucuauugcaaugcggua

SEQ ID NO: 1871344 - RNA, 19 nt, Artificial Sequence
  Description of Artificial Sequence: Synthetic oligonucleotide
  Antisense strand to SEQ ID NO: 1871343
uaccgcauugcaauagagg

SEQ ID NO: 1871345 - RNA, 19 nt, Artificial Sequence
  Description of Artificial Sequence: Synthetic oligonucleotide
  Sense strand starting at position 1572 of SEQ ID NO: 1564324
ugaggugucucuuccucaa

SEQ ID NO: 1871346 - RNA, 19 nt, Artificial Sequence
  Description of Artificial Sequence: Synthetic oligonucleotide
  Antisense strand to SEQ ID NO: 1871345
uugaggaagagacaccuca

SEQ ID NO: 1871347 - RNA, 19 nt, Artificial Sequence
  Description of Artificial Sequence: Synthetic oligonucleotide
  Sense strand starting at position 1574 of SEQ ID NO: 1564324
aggugucucuuccucaagu

SEQ ID NO: 1871348 - RNA, 19 nt, Artificial Sequence
  Description of Artificial Sequence: Synthetic oligonucleotide
  Antisense strand to SEQ ID NO: 1871347
acuugaggaagagacaccu

SEQ ID NO: 1871349 - RNA, 19 nt, Artificial Sequence
  Description of Artificial Sequence: Synthetic oligonucleotide
  Sense strand starting at position 1576 of SEQ ID NO: 1564324
gugucucuuccucaaguca

SEQ ID NO: 1871350 - RNA, 19 nt, Artificial Sequence
  Description of Artificial Sequence: Synthetic oligonucleotide
  Antisense strand to SEQ ID NO: 1871349
ugacuugaggaagagacac

SEQ ID NO: 1871351 - RNA, 19 nt, Artificial Sequence
  Description of Artificial Sequence: Synthetic oligonucleotide
  Sense strand starting at position 1991 of SEQ ID NO: 1564324
gugcaaguuccuagucgug

SEQ ID NO: 1871352 - RNA, 19 nt, Artificial Sequence
  Description of Artificial Sequence: Synthetic oligonucleotide
  Antisense strand to SEQ ID NO: 1871351
cacgacuaggaacuugcac

SEQ ID NO: 1871353 - RNA, 19 nt, Artificial Sequence
  Description of Artificial Sequence: Synthetic oligonucleotide
  Sense strand starting at position 1998 of SEQ ID NO: 1564324
uuccuagucguguaggaua

SEQ ID NO: 1871354 - RNA, 19 nt, Artificial Sequence
  Description of Artificial Sequence: Synthetic oligonucleotide
  Antisense strand to SEQ ID NO: 1871353
uauccuacacgacuaggaa

SEQ ID NO: 1871355 - RNA, 19 nt, Artificial Sequence
  Description of Artificial Sequence: Synthetic oligonucleotide
  Sense strand starting at position 2024 of SEQ ID NO: 1564324
aggcuauccugggcagagu

SEQ ID NO: 1871356 - RNA, 19 nt, Artificial Sequence
  Description of Artificial Sequence: Synthetic oligonucleotide
  Antisense strand to SEQ ID NO: 1871355
acucugcccaggauagccu

SEQ ID NO: 1871357 - RNA, 19 nt, Artificial Sequence
  Description of Artificial Sequence: Synthetic oligonucleotide
  Sense strand starting at position 2041 of SEQ ID NO: 1564324
guccaaagaucucagagac

SEQ ID NO: 1871358 - RNA, 19 nt, Artificial Sequence
  Description of Artificial Sequence: Synthetic oligonucleotide
  Antisense strand to SEQ ID NO: 1871357
gucucugagaucuuuggac

SEQ ID NO: 1871359 - RNA, 19 nt, Artificial Sequence
  Description of Artificial Sequence: Synthetic oligonucleotide
  Sense strand starting at position 2476 of SEQ ID NO: 1564324
gccaguguccucucuucuu

SEQ ID NO: 1871360 - RNA, 19 nt, Artificial Sequence
  Description of Artificial Sequence: Synthetic oligonucleotide
  Antisense strand to SEQ ID NO: 1871359
aagaagagaggacacuggc

SEQ ID NO: 1871361 - RNA, 19 nt, Artificial Sequence
  Description of Artificial Sequence: Synthetic oligonucleotide
  Sense strand starting at position 2524 of SEQ ID NO: 1564324
uugggaaaguugguuguga

SEQ ID NO: 1871362 - RNA, 19 nt, Artificial Sequence
  Description of Artificial Sequence: Synthetic oligonucleotide
  Antisense strand to SEQ ID NO: 1871361
ucacaaccaacuuucccaa

SEQ ID NO: 1871363 - RNA, 19 nt, Artificial Sequence
  Description of Artificial Sequence: Synthetic oligonucleotide
  Sense strand starting at position 2526 of SEQ ID NO: 1564324
gggaaaguugguugugacu

SEQ ID NO: 1871364 - RNA, 19 nt, Artificial Sequence
  Description of Artificial Sequence: Synthetic oligonucleotide
  Antisense strand to SEQ ID NO: 1871363
agucacaaccaacuuuccc

SEQ ID NO: 1871365 - RNA, 19 nt, Artificial Sequence
  Description of Artificial Sequence: Synthetic oligonucleotide
  Sense strand starting at position 2535 of SEQ ID NO: 1564324
gguugugacuggagaguua

SEQ ID NO: 1871366 - RNA, 19 nt, Artificial Sequence
  Description of Artificial Sequence: Synthetic oligonucleotide
  Antisense strand to SEQ ID NO: 1871365
uaacucuccagucacaacc

SEQ ID NO: 1871367 - RNA, 19 nt, Artificial Sequence
  Description of Artificial Sequence: Synthetic oligonucleotide
  Sense strand starting at position 2542 of SEQ ID NO: 1564324
acuggagaguuacuuucuu

SEQ ID NO: 1871368 - RNA, 19 nt, Artificial Sequence
  Description of Artificial Sequence: Synthetic oligonucleotide
  Antisense strand to SEQ ID NO: 1871367
aagaaaguaacucuccagu

SEQ ID NO: 1871369 - RNA, 19 nt, Artificial Sequence
  Description of Artificial Sequence: Synthetic oligonucleotide
  Sense strand starting at position 2546 of SEQ ID NO: 1564324
gagaguuacuuucuugagc

SEQ ID NO: 1871370 - RNA, 19 nt, Artificial Sequence
  Description of Artificial Sequence: Synthetic oligonucleotide
  Antisense strand to SEQ ID NO: 1871369
gcucaagaaaguaacucuc

SEQ ID NO: 1871371 - RNA, 19 nt, Artificial Sequence
  Description of Artificial Sequence: Synthetic oligonucleotide
  Sense strand starting at position 2547 of SEQ ID NO: 1564324
agaguuacuuucuugagcu

SEQ ID NO: 1871372 - RNA, 19 nt, Artificial Sequence
  Description of Artificial Sequence: Synthetic oligonucleotide
  Antisense strand to SEQ ID NO: 1871371
agcucaagaaaguaacucu

SEQ ID NO: 1871373 - RNA, 19 nt, Artificial Sequence
  Description of Artificial Sequence: Synthetic oligonucleotide
  Sense strand starting at position 2583 of SEQ ID NO: 1564324
gagugcccacucugaagaa

SEQ ID NO: 1871374 - RNA, 19 nt, Artificial Sequence
  Description of Artificial Sequence: Synthetic oligonucleotide
  Antisense strand to SEQ ID NO: 1871373
uucuucagagugggcacuc

SEQ ID NO: 1871375 - RNA, 19 nt, Artificial Sequence
  Description of Artificial Sequence: Synthetic oligonucleotide
  Sense strand starting at position 2792 of SEQ ID NO: 1564324
gcgcucugagaagacuaau

SEQ ID NO: 1871376 - RNA, 19 nt, Artificial Sequence
  Description of Artificial Sequence: Synthetic oligonucleotide
  Antisense strand to SEQ ID NO: 1871375
auuagucuucucagagcgc

SEQ ID NO: 1871377 - RNA, 19 nt, Artificial Sequence
  Description of Artificial Sequence: Synthetic oligonucleotide
  Sense strand starting at position 2803 of SEQ ID NO: 1564324
agacuaauuuggugaacug

SEQ ID NO: 1871378 - RNA, 19 nt, Artificial Sequence
  Description of Artificial Sequence: Synthetic oligonucleotide
  Antisense strand to SEQ ID NO: 1871377
caguucaccaaauuagucu

SEQ ID NO: 1871379 - RNA, 19 nt, Artificial Sequence
  Description of Artificial Sequence: Synthetic oligonucleotide
  Sense strand starting at position 2858 of SEQ ID NO: 1564324
uuugguuacccugaagugu

SEQ ID NO: 1871380 - RNA, 19 nt, Artificial Sequence
  Description of Artificial Sequence: Synthetic oligonucleotide
  Antisense strand to SEQ ID NO: 1871379
acacuucaggguaaccaaa

SEQ ID NO: 1871381 - RNA, 19 nt, Artificial Sequence
  Description of Artificial Sequence: Synthetic oligonucleotide
  Sense strand starting at position 2873 of SEQ ID NO: 1564324
gugugagucacucguaaac

SEQ ID NO: 1871382 - RNA, 19 nt, Artificial Sequence
  Description of Artificial Sequence: Synthetic oligonucleotide
  Antisense strand to SEQ ID NO: 1871381
guuuacgagugacucacac

SEQ ID NO: 1871383 - RNA, 19 nt, Artificial Sequence
  Description of Artificial Sequence: Synthetic oligonucleotide
  Sense strand starting at position 3006 of SEQ ID NO: 1564324
gcucuuuggguucgaggaa

SEQ ID NO: 1871384 - RNA, 19 nt, Artificial Sequence
  Description of Artificial Sequence: Synthetic oligonucleotide
  Antisense strand to SEQ ID NO: 1871383
uuccucgaacccaaagagc

SEQ ID NO: 1871385 - RNA, 19 nt, Artificial Sequence
  Description of Artificial Sequence: Synthetic oligonucleotide
  Sense strand starting at position 3033 of SEQ ID NO: 1564324
cccagagaggaaugcuuua

SEQ ID NO: 1871386 - RNA, 19 nt, Artificial Sequence
  Description of Artificial Sequence: Synthetic oligonucleotide
  Antisense strand to SEQ ID NO: 1871385
uaaagcauuccucucuggg

SEQ ID NO: 1871387 - RNA, 19 nt, Artificial Sequence
  Description of Artificial Sequence: Synthetic oligonucleotide
  Sense strand starting at position 3333 of SEQ ID NO: 1564324
ugcuuauguccacaucaag

SEQ ID NO: 1871388 - RNA, 19 nt, Artificial Sequence
  Description of Artificial Sequence: Synthetic oligonucleotide
  Antisense strand to SEQ ID NO: 1871387
cuugauguggacauaagca

SEQ ID NO: 1871389 - RNA, 19 nt, Artificial Sequence
  Description of Artificial Sequence: Synthetic oligonucleotide
  Sense strand starting at position 3633 of SEQ ID NO: 1564324
ugaaauuauucccagagac

SEQ ID NO: 1871390 - RNA, 19 nt, Artificial Sequence
  Description of Artificial Sequence: Synthetic oligonucleotide
  Antisense strand to SEQ ID NO: 1871389
gucucugggaauaauuuca

SEQ ID NO: 1871391 - RNA, 19 nt, Artificial Sequence
  Description of Artificial Sequence: Synthetic oligonucleotide
  Sense strand starting at position 3768 of SEQ ID NO: 1564324
gaagauagccuuugaggac

SEQ ID NO: 1871392 - RNA, 19 nt, Artificial Sequence
  Description of Artificial Sequence: Synthetic oligonucleotide
  Antisense strand to SEQ ID NO: 1871391
guccucaaaggcuaucuuc

SEQ ID NO: 1871393 - RNA, 19 nt, Artificial Sequence
  Description of Artificial Sequence: Synthetic oligonucleotide
  Sense strand starting at position 3769 of SEQ ID NO: 1564324
aagauagccuuugaggaca

SEQ ID NO: 1871394 - RNA, 19 nt, Artificial Sequence
  Description of Artificial Sequence: Synthetic oligonucleotide
  Antisense strand to SEQ ID NO: 1871393
uguccucaaaggcuaucuu

SEQ ID NO: 1871395 - RNA, 19 nt, Artificial Sequence
  Description of Artificial Sequence: Synthetic oligonucleotide
  Sense strand starting at position 3799 of SEQ ID NO: 1564324
gucuuucugucagugaacu

SEQ ID NO: 1871396 - RNA, 19 nt, Artificial Sequence
  Description of Artificial Sequence: Synthetic oligonucleotide
  Antisense strand to SEQ ID NO: 1871395
aguucacugacagaaagac

SEQ ID NO: 1871397 - RNA, 19 nt, Artificial Sequence
  Description of Artificial Sequence: Synthetic oligonucleotide
  Sense strand starting at position 3812 of SEQ ID NO: 1564324
ugaacugagccuugaaaca

SEQ ID NO: 1871398 - RNA, 19 nt, Artificial Sequence
  Description of Artificial Sequence: Synthetic oligonucleotide
  Antisense strand to SEQ ID NO: 1871397
uguuucaaggcucaguuca

SEQ ID NO: 1871399 - RNA, 19 nt, Artificial Sequence
  Description of Artificial Sequence: Synthetic oligonucleotide
  Sense strand starting at position 3841 of SEQ ID NO: 1564324
agccaaucagccugaguuu

SEQ ID NO: 1871400 - RNA, 19 nt, Artificial Sequence
  Description of Artificial Sequence: Synthetic oligonucleotide
  Antisense strand to SEQ ID NO: 1871399
aaacucaggcugauuggcu

SEQ ID NO: 1871401 - RNA, 19 nt, Artificial Sequence
  Description of Artificial Sequence: Synthetic oligonucleotide
  Sense strand starting at position 3934 of SEQ ID NO: 1564324
ucaccugugaguuggcaua

SEQ ID NO: 1871402 - RNA, 19 nt, Artificial Sequence
  Description of Artificial Sequence: Synthetic oligonucleotide
  Antisense strand to SEQ ID NO: 1871401
uaugccaacucacagguga

SEQ ID NO: 1871403 - RNA, 19 nt, Artificial Sequence
  Description of Artificial Sequence: Synthetic oligonucleotide
  Sense strand starting at position 3936 of SEQ ID NO: 1564324
accugugaguuggcauaau

SEQ ID NO: 1871404 - RNA, 19 nt, Artificial Sequence
  Description of Artificial Sequence: Synthetic oligonucleotide
  Antisense strand to SEQ ID NO: 1871403
auuaugccaacucacaggu

SEQ ID NO: 1871405 - RNA, 19 nt, Artificial Sequence
  Description of Artificial Sequence: Synthetic oligonucleotide
  Sense strand starting at position 3965 of SEQ ID NO: 1564324
gcuucuuaggguuguuaug

SEQ ID NO: 1871406 - RNA, 19 nt, Artificial Sequence
  Description of Artificial Sequence: Synthetic oligonucleotide
  Antisense strand to SEQ ID NO: 1871405
cauaacaacccuaagaagc

SEQ ID NO: 1871407 - RNA, 19 nt, Artificial Sequence
  Description of Artificial Sequence: Synthetic oligonucleotide
  Sense strand starting at position 485 of SEQ ID NO: 1564325
agaaccauuuacugagcaa

SEQ ID NO: 1871408 - RNA, 19 nt, Artificial Sequence
  Description of Artificial Sequence: Synthetic oligonucleotide
  Antisense strand to SEQ ID NO: 1871407
uugcucaguaaaugguucu

SEQ ID NO: 1871409 - RNA, 19 nt, Artificial Sequence
  Description of Artificial Sequence: Synthetic oligonucleotide
  Sense strand starting at position 542 of SEQ ID NO: 1564325
gcagaauauugaccucauu

SEQ ID NO: 1871410 - RNA, 19 nt, Artificial Sequence
  Description of Artificial Sequence: Synthetic oligonucleotide
  Antisense strand to SEQ ID NO: 1871409
aaugaggucaauauucugc

SEQ ID NO: 1871411 - RNA, 19 nt, Artificial Sequence
  Description of Artificial Sequence: Synthetic oligonucleotide
  Sense strand starting at position 782 of SEQ ID NO: 1564325
uugggcuugcaguggaaau

SEQ ID NO: 1871412 - RNA, 19 nt, Artificial Sequence
  Description of Artificial Sequence: Synthetic oligonucleotide
  Antisense strand to SEQ ID NO: 1871411
auuuccacugcaagcccaa

SEQ ID NO: 1871413 - RNA, 19 nt, Artificial Sequence
  Description of Artificial Sequence: Synthetic oligonucleotide
  Sense strand starting at position 783 of SEQ ID NO: 1564325
ugggcuugcaguggaaauu

SEQ ID NO: 1871414 - RNA, 19 nt, Artificial Sequence
  Description of Artificial Sequence: Synthetic oligonucleotide
  Antisense strand to SEQ ID NO: 1871413
aauuuccacugcaagccca

SEQ ID NO: 1871415 - RNA, 19 nt, Artificial Sequence
  Description of Artificial Sequence: Synthetic oligonucleotide
  Sense strand starting at position 1262 of SEQ ID NO: 1564325
guuaaugucccacgggaag

SEQ ID NO: 1871416 - RNA, 19 nt, Artificial Sequence
  Description of Artificial Sequence: Synthetic oligonucleotide
  Antisense strand to SEQ ID NO: 1871415
cuucccgugggacauuaac

SEQ ID NO: 1871417 - RNA, 19 nt, Artificial Sequence
  Description of Artificial Sequence: Synthetic oligonucleotide
  Sense strand starting at position 1368 of SEQ ID NO: 1564325
accuaaaguucgccauuua

SEQ ID NO: 1871418 - RNA, 19 nt, Artificial Sequence
  Description of Artificial Sequence: Synthetic oligonucleotide
  Antisense strand to SEQ ID NO: 1871417
uaaauggcgaacuuuaggu

SEQ ID NO: 1871419 - RNA, 19 nt, Artificial Sequence
  Description of Artificial Sequence: Synthetic oligonucleotide
  Sense strand starting at position 2509 of SEQ ID NO: 1564325
agguauuucuggucccagu

SEQ ID NO: 1871420 - RNA, 19 nt, Artificial Sequence
  Description of Artificial Sequence: Synthetic oligonucleotide
  Antisense strand to SEQ ID NO: 1871419
acugggaccagaaauaccu

SEQ ID NO: 1871421 - RNA, 19 nt, Artificial Sequence
  Description of Artificial Sequence: Synthetic oligonucleotide
  Sense strand starting at position 2694 of SEQ ID NO: 1564325
uaguaaauuuaaggaggaa

SEQ ID NO: 1871422 - RNA, 19 nt, Artificial Sequence
  Description of Artificial Sequence: Synthetic oligonucleotide
  Antisense strand to SEQ ID NO: 1871421
uuccuccuuaaauuuacua

SEQ ID NO: 1871423 - RNA, 19 nt, Artificial Sequence
  Description of Artificial Sequence: Synthetic oligonucleotide
  Sense strand starting at position 2874 of SEQ ID NO: 1564325
gccaguagacaugaaaucu

SEQ ID NO: 1871424 - RNA, 19 nt, Artificial Sequence
  Description of Artificial Sequence: Synthetic oligonucleotide
  Antisense strand to SEQ ID NO: 1871423
agauuucaugucuacuggc

SEQ ID NO: 1871425 - RNA, 19 nt, Artificial Sequence
  Description of Artificial Sequence: Synthetic oligonucleotide
  Sense strand starting at position 2895 of SEQ ID NO: 1564325
uugcaauugcaagggaaua

SEQ ID NO: 1871426 - RNA, 19 nt, Artificial Sequence
  Description of Artificial Sequence: Synthetic oligonucleotide
  Antisense strand to SEQ ID NO: 1871425
uauucccuugcaauugcaa

SEQ ID NO: 1871427 - RNA, 19 nt, Artificial Sequence
  Description of Artificial Sequence: Synthetic oligonucleotide
  Sense strand starting at position 3002 of SEQ ID NO: 1564325
cccugaggccauugauaac

SEQ ID NO: 1871428 - RNA, 19 nt, Artificial Sequence
  Description of Artificial Sequence: Synthetic oligonucleotide
  Antisense strand to SEQ ID NO: 1871427
guuaucaauggccucaggg

SEQ ID NO: 1871429 - RNA, 19 nt, Artificial Sequence
  Description of Artificial Sequence: Synthetic oligonucleotide
  Sense strand starting at position 3012 of SEQ ID NO: 1564325
auugauaacgucugcuauu

SEQ ID NO: 1871430 - RNA, 19 nt, Artificial Sequence
  Description of Artificial Sequence: Synthetic oligonucleotide
  Antisense strand to SEQ ID NO: 1871429
aauagcagacguuaucaau

SEQ ID NO: 1871431 - RNA, 19 nt, Artificial Sequence
  Description of Artificial Sequence: Synthetic oligonucleotide
  Sense strand starting at position 3013 of SEQ ID NO: 1564325
uugauaacgucugcuauuu

SEQ ID NO: 1871432 - RNA, 19 nt, Artificial Sequence
  Description of Artificial Sequence: Synthetic oligonucleotide
  Antisense strand to SEQ ID NO: 1871431
aaauagcagacguuaucaa

SEQ ID NO: 1871433 - RNA, 19 nt, Artificial Sequence
  Description of Artificial Sequence: Synthetic oligonucleotide
  Sense strand starting at position 3130 of SEQ ID NO: 1564325
caagguagccuuggugaua

SEQ ID NO: 1871434 - RNA, 19 nt, Artificial Sequence
  Description of Artificial Sequence: Synthetic oligonucleotide
  Antisense strand to SEQ ID NO: 1871433
uaucaccaaggcuaccuug

SEQ ID NO: 1871435 - RNA, 19 nt, Artificial Sequence
  Description of Artificial Sequence: Synthetic oligonucleotide
  Sense strand starting at position 3490 of SEQ ID NO: 1564325
gcaggcagugcucagguua

SEQ ID NO: 1871436 - RNA, 19 nt, Artificial Sequence
  Description of Artificial Sequence: Synthetic oligonucleotide
  Antisense strand to SEQ ID NO: 1871435
uaaccugagcacugccugc

SEQ ID NO: 1871437 - RNA, 19 nt, Artificial Sequence
  Description of Artificial Sequence: Synthetic oligonucleotide
  Sense strand starting at position 3502 of SEQ ID NO: 1564325
cagguuaguugggcauuau

SEQ ID NO: 1871438 - RNA, 19 nt, Artificial Sequence
  Description of Artificial Sequence: Synthetic oligonucleotide
  Antisense strand to SEQ ID NO: 1871437
auaaugcccaacuaaccug

SEQ ID NO: 1871439 - RNA, 19 nt, Artificial Sequence
  Description of Artificial Sequence: Synthetic oligonucleotide
  Sense strand starting at position 3503 of SEQ ID NO: 1564325
agguuaguugggcauuauu

SEQ ID NO: 1871440 - RNA, 19 nt, Artificial Sequence
  Description of Artificial Sequence: Synthetic oligonucleotide
  Antisense strand to SEQ ID NO: 1871439
aauaaugcccaacuaaccu

SEQ ID NO: 1871441 - RNA, 19 nt, Artificial Sequence
  Description of Artificial Sequence: Synthetic oligonucleotide
  Sense strand starting at position 3546 of SEQ ID NO: 1564325
ccauuuaacuaauagggua

SEQ ID NO: 1871442 - RNA, 19 nt, Artificial Sequence
  Description of Artificial Sequence: Synthetic oligonucleotide
  Antisense strand to SEQ ID NO: 1871441
uacccuauuaguuaaaugg

SEQ ID NO: 1871443 - RNA, 19 nt, Artificial Sequence
  Description of Artificial Sequence: Synthetic oligonucleotide
  Sense strand starting at position 3562 of SEQ ID NO: 1564325
guacugguugggugugaga

SEQ ID NO: 1871444 - RNA, 19 nt, Artificial Sequence
  Description of Artificial Sequence: Synthetic oligonucleotide
  Antisense strand to SEQ ID NO: 1871443
ucucacacccaaccaguac

SEQ ID NO: 1871445 - RNA, 19 nt, Artificial Sequence
  Description of Artificial Sequence: Synthetic oligonucleotide
  Sense strand starting at position 3577 of SEQ ID NO: 1564325
gagacaauaugcuuuguag

SEQ ID NO: 1871446 - RNA, 19 nt, Artificial Sequence
  Description of Artificial Sequence: Synthetic oligonucleotide
  Antisense strand to SEQ ID NO: 1871445
cuacaaagcauauugucuc

SEQ ID NO: 1871447 - RNA, 19 nt, Artificial Sequence
  Description of Artificial Sequence: Synthetic oligonucleotide
  Sense strand starting at position 3579 of SEQ ID NO: 1564325
gacaauaugcuuuguagaa

SEQ ID NO: 1871448 - RNA, 19 nt, Artificial Sequence
  Description of Artificial Sequence: Synthetic oligonucleotide
  Antisense strand to SEQ ID NO: 1871447
uucuacaaagcauauuguc

SEQ ID NO: 1871449 - RNA, 19 nt, Artificial Sequence
  Description of Artificial Sequence: Synthetic oligonucleotide
  Sense strand starting at position 3580 of SEQ ID NO: 1564325
acaauaugcuuuguagaaa

SEQ ID NO: 1871450 - RNA, 19 nt, Artificial Sequence
  Description of Artificial Sequence: Synthetic oligonucleotide
  Antisense strand to SEQ ID NO: 1871449
uuucuacaaagcauauugu

SEQ ID NO: 1871451 - RNA, 19 nt, Artificial Sequence
  Description of Artificial Sequence: Synthetic oligonucleotide
  Sense strand starting at position 3675 of SEQ ID NO: 1564325
uuuaguugcaaguguaucu

SEQ ID NO: 1871452 - RNA, 19 nt, Artificial Sequence
  Description of Artificial Sequence: Synthetic oligonucleotide
  Antisense strand to SEQ ID NO: 1871451
agauacacuugcaacuaaa

SEQ ID NO: 1871453 - RNA, 19 nt, Artificial Sequence
  Description of Artificial Sequence: Synthetic oligonucleotide
  Sense strand starting at position 3738 of SEQ ID NO: 1564325
gucauuacuguuugccaga

SEQ ID NO: 1871454 - RNA, 19 nt, Artificial Sequence
  Description of Artificial Sequence: Synthetic oligonucleotide
  Antisense strand to SEQ ID NO: 1871453
ucuggcaaacaguaaugac

SEQ ID NO: 1871455 - RNA, 19 nt, Artificial Sequence
  Description of Artificial Sequence: Synthetic oligonucleotide
  Sense strand starting at position 3739 of SEQ ID NO: 1564325
ucauuacuguuugccagau

SEQ ID NO: 1871456 - RNA, 19 nt, Artificial Sequence
  Description of Artificial Sequence: Synthetic oligonucleotide
  Antisense strand to SEQ ID NO: 1871455
aucuggcaaacaguaauga

SEQ ID NO: 1871457 - RNA, 19 nt, Artificial Sequence
  Description of Artificial Sequence: Synthetic oligonucleotide
  Sense strand starting at position 3743 of SEQ ID NO: 1564325
uacuguuugccagaucaug

SEQ ID NO: 1871458 - RNA, 19 nt, Artificial Sequence
  Description of Artificial Sequence: Synthetic oligonucleotide
  Antisense strand to SEQ ID NO: 1871457
caugaucuggcaaacagua

SEQ ID NO: 1871459 - RNA, 19 nt, Artificial Sequence
  Description of Artificial Sequence: Synthetic oligonucleotide
  Sense strand starting at position 3749 of SEQ ID NO: 1564325
uugccagaucauggauauu

SEQ ID NO: 1871460 - RNA, 19 nt, Artificial Sequence
  Description of Artificial Sequence: Synthetic oligonucleotide
  Antisense strand to SEQ ID NO: 1871459
aauauccaugaucuggcaa

SEQ ID NO: 1871461 - RNA, 19 nt, Artificial Sequence
  Description of Artificial Sequence: Synthetic oligonucleotide
  Sense strand starting at position 3784 of SEQ ID NO: 1564325
uugcaugacuuguccaaag

SEQ ID NO: 1871462 - RNA, 19 nt, Artificial Sequence
  Description of Artificial Sequence: Synthetic oligonucleotide
  Antisense strand to SEQ ID NO: 1871461
cuuuggacaagucaugcaa

SEQ ID NO: 1871463 - RNA, 19 nt, Artificial Sequence
  Description of Artificial Sequence: Synthetic oligonucleotide
  Sense strand starting at position 3786 of SEQ ID NO: 1564325
gcaugacuuguccaaaguu

SEQ ID NO: 1871464 - RNA, 19 nt, Artificial Sequence
  Description of Artificial Sequence: Synthetic oligonucleotide
  Antisense strand to SEQ ID NO: 1871463
aacuuuggacaagucaugc

SEQ ID NO: 1871465 - RNA, 19 nt, Artificial Sequence
  Description of Artificial Sequence: Synthetic oligonucleotide
  Sense strand starting at position 3794 of SEQ ID NO: 1564325
uguccaaaguuacuuagaa

SEQ ID NO: 1871466 - RNA, 19 nt, Artificial Sequence
  Description of Artificial Sequence: Synthetic oligonucleotide
  Antisense strand to SEQ ID NO: 1871465
uucuaaguaacuuuggaca

SEQ ID NO: 1871467 - RNA, 19 nt, Artificial Sequence
  Description of Artificial Sequence: Synthetic oligonucleotide
  Sense strand starting at position 3795 of SEQ ID NO: 1564325
guccaaaguuacuuagaac

SEQ ID NO: 1871468 - RNA, 19 nt, Artificial Sequence
  Description of Artificial Sequence: Synthetic oligonucleotide
  Antisense strand to SEQ ID NO: 1871467
guucuaaguaacuuuggac

SEQ ID NO: 1871469 - RNA, 19 nt, Artificial Sequence
  Description of Artificial Sequence: Synthetic oligonucleotide
  Sense strand starting at position 3806 of SEQ ID NO: 1564325
cuuagaaccuuuguaagug

SEQ ID NO: 1871470 - RNA, 19 nt, Artificial Sequence
  Description of Artificial Sequence: Synthetic oligonucleotide
  Antisense strand to SEQ ID NO: 1871469
cacuuacaaagguucuaag

SEQ ID NO: 1871471 - RNA, 19 nt, Artificial Sequence
  Description of Artificial Sequence: Synthetic oligonucleotide
  Sense strand starting at position 3812 of SEQ ID NO: 1564325
accuuuguaagugguagaa

SEQ ID NO: 1871472 - RNA, 19 nt, Artificial Sequence
  Description of Artificial Sequence: Synthetic oligonucleotide
  Antisense strand to SEQ ID NO: 1871471
uucuaccacuuacaaaggu

SEQ ID NO: 1871473 - RNA, 19 nt, Artificial Sequence
  Description of Artificial Sequence: Synthetic oligonucleotide
  Sense strand starting at position 3821 of SEQ ID NO: 1564325
agugguagaaguggaauua

SEQ ID NO: 1871474 - RNA, 19 nt, Artificial Sequence
  Description of Artificial Sequence: Synthetic oligonucleotide
  Antisense strand to SEQ ID NO: 1871473
uaauuccacuucuaccacu

SEQ ID NO: 1871475 - RNA, 19 nt, Artificial Sequence
  Description of Artificial Sequence: Synthetic oligonucleotide
  Sense strand starting at position 3844 of SEQ ID NO: 1564325
uuaagucaauagguaugaa

SEQ ID NO: 1871476 - RNA, 19 nt, Artificial Sequence
  Description of Artificial Sequence: Synthetic oligonucleotide
  Antisense strand to SEQ ID NO: 1871475
uucauaccuauugacuuaa

SEQ ID NO: 1871477 - RNA, 19 nt, Artificial Sequence
  Description of Artificial Sequence: Synthetic oligonucleotide
  Sense strand starting at position 3848 of SEQ ID NO: 1564325
gucaauagguaugaagaac

SEQ ID NO: 1871478 - RNA, 19 nt, Artificial Sequence
  Description of Artificial Sequence: Synthetic oligonucleotide
  Antisense strand to SEQ ID NO: 1871477
guucuucauaccuauugac

SEQ ID NO: 1871479 - RNA, 19 nt, Artificial Sequence
  Description of Artificial Sequence: Synthetic oligonucleotide
  Sense strand starting at position 3859 of SEQ ID NO: 1564325
ugaagaacuuuguuggcua

SEQ ID NO: 1871480 - RNA, 19 nt, Artificial Sequence
  Description of Artificial Sequence: Synthetic oligonucleotide
  Antisense strand to SEQ ID NO: 1871479
uagccaacaaaguucuuca

SEQ ID NO: 1871481 - RNA, 19 nt, Artificial Sequence
  Description of Artificial Sequence: Synthetic oligonucleotide
  Sense strand starting at position 3862 of SEQ ID NO: 1564325
agaacuuuguuggcuaauc

SEQ ID NO: 1871482 - RNA, 19 nt, Artificial Sequence
  Description of Artificial Sequence: Synthetic oligonucleotide
  Antisense strand to SEQ ID NO: 1871481
gauuagccaacaaaguucu

SEQ ID NO: 1871483 - RNA, 19 nt, Artificial Sequence
  Description of Artificial Sequence: Synthetic oligonucleotide
  Sense strand starting at position 3863 of SEQ ID NO: 1564325
gaacuuuguuggcuaaucu

SEQ ID NO: 1871484 - RNA, 19 nt, Artificial Sequence
  Description of Artificial Sequence: Synthetic oligonucleotide
  Antisense strand to SEQ ID NO: 1871483
agauuagccaacaaaguuc

SEQ ID NO: 1871485 - RNA, 19 nt, Artificial Sequence
  Description of Artificial Sequence: Synthetic oligonucleotide
  Sense strand starting at position 3867 of SEQ ID NO: 1564325
uuuguuggcuaaucuguau

SEQ ID NO: 1871486 - RNA, 19 nt, Artificial Sequence
  Description of Artificial Sequence: Synthetic oligonucleotide
  Antisense strand to SEQ ID NO: 1871485
auacagauuagccaacaaa

SEQ ID NO: 1871487 - RNA, 19 nt, Artificial Sequence
  Description of Artificial Sequence: Synthetic oligonucleotide
  Sense strand starting at position 2023 of SEQ ID NO: 1564326
aucaguaauaguugauagu

SEQ ID NO: 1871488 - RNA, 19 nt, Artificial Sequence
  Description of Artificial Sequence: Synthetic oligonucleotide
  Antisense strand to SEQ ID NO: 1871487
acuaucaacuauuacugau

SEQ ID NO: 1871489 - RNA, 19 nt, Artificial Sequence
  Description of Artificial Sequence: Synthetic oligonucleotide
  Sense strand starting at position 2024 of SEQ ID NO: 1564326
ucaguaauaguugauagua

SEQ ID NO: 1871490 - RNA, 19 nt, Artificial Sequence
  Description of Artificial Sequence: Synthetic oligonucleotide
  Antisense strand to SEQ ID NO: 1871489
uacuaucaacuauuacuga

SEQ ID NO: 1871491 - RNA, 19 nt, Artificial Sequence
  Description of Artificial Sequence: Synthetic oligonucleotide
  Sense strand starting at position 2026 of SEQ ID NO: 1564326
aguaauaguugauaguaga

SEQ ID NO: 1871492 - RNA, 19 nt, Artificial Sequence
  Description of Artificial Sequence: Synthetic oligonucleotide
  Antisense strand to SEQ ID NO: 1871491
ucuacuaucaacuauuacu

SEQ ID NO: 1871493 - RNA, 19 nt, Artificial Sequence
  Description of Artificial Sequence: Synthetic oligonucleotide
  Sense strand starting at position 2046 of SEQ ID NO: 1564326
uuugucuuguccuuuaaua

SEQ ID NO: 1871494 - RNA, 19 nt, Artificial Sequence
  Description of Artificial Sequence: Synthetic oligonucleotide
  Antisense strand to SEQ ID NO: 1871493
uauuaaaggacaagacaaa

SEQ ID NO: 1871495 - RNA, 19 nt, Artificial Sequence
  Description of Artificial Sequence: Synthetic oligonucleotide
  Sense strand starting at position 2048 of SEQ ID NO: 1564326
ugucuuguccuuuaauagg

SEQ ID NO: 1871496 - RNA, 19 nt, Artificial Sequence
  Description of Artificial Sequence: Synthetic oligonucleotide
  Antisense strand to SEQ ID NO: 1871495
ccuauuaaaggacaagaca

SEQ ID NO: 1871497 - RNA, 19 nt, Artificial Sequence
  Description of Artificial Sequence: Synthetic oligonucleotide
  Sense strand starting at position 2051 of SEQ ID NO: 1564326
cuuguccuuuaauaggaau

SEQ ID NO: 1871498 - RNA, 19 nt, Artificial Sequence
  Description of Artificial Sequence: Synthetic oligonucleotide
  Antisense strand to SEQ ID NO: 1871497
auuccuauuaaaggacaag

SEQ ID NO: 1871499 - RNA, 19 nt, Artificial Sequence
  Description of Artificial Sequence: Synthetic oligonucleotide
  Sense strand starting at position 2082 of SEQ ID NO: 1564326
gcuauuaugauguaugcag

SEQ ID NO: 1871500 - RNA, 19 nt, Artificial Sequence
  Description of Artificial Sequence: Synthetic oligonucleotide
  Antisense strand to SEQ ID NO: 1871499
cugcauacaucauaauagc

SEQ ID NO: 1871501 - RNA, 19 nt, Artificial Sequence
  Description of Artificial Sequence: Synthetic oligonucleotide
  Sense strand starting at position 2549 of SEQ ID NO: 1564326
gggcguucuuuaucaacuu

SEQ ID NO: 1871502 - RNA, 19 nt, Artificial Sequence
  Description of Artificial Sequence: Synthetic oligonucleotide
  Antisense strand to SEQ ID NO: 1871501
aaguugauaaagaacgccc

SEQ ID NO: 1871503 - RNA, 19 nt, Artificial Sequence
  Description of Artificial Sequence: Synthetic oligonucleotide
  Sense strand starting at position 2614 of SEQ ID NO: 1564326
auugccucuuggguuaauu

SEQ ID NO: 1871504 - RNA, 19 nt, Artificial Sequence
  Description of Artificial Sequence: Synthetic oligonucleotide
  Antisense strand to SEQ ID NO: 1871503
aauuaacccaagaggcaau

SEQ ID NO: 1871505 - RNA, 19 nt, Artificial Sequence
  Description of Artificial Sequence: Synthetic oligonucleotide
  Sense strand starting at position 2753 of SEQ ID NO: 1564326
auugcuaauugucuuuaga

SEQ ID NO: 1871506 - RNA, 19 nt, Artificial Sequence
  Description of Artificial Sequence: Synthetic oligonucleotide
  Antisense strand to SEQ ID NO: 1871505
ucuaaagacaauuagcaau

SEQ ID NO: 1871507 - RNA, 19 nt, Artificial Sequence
  Description of Artificial Sequence: Synthetic oligonucleotide
  Sense strand starting at position 2755 of SEQ ID NO: 1564326
ugcuaauugucuuuagaug

SEQ ID NO: 1871508 - RNA, 19 nt, Artificial Sequence
  Description of Artificial Sequence: Synthetic oligonucleotide
  Antisense strand to SEQ ID NO: 1871507
caucuaaagacaauuagca

SEQ ID NO: 1871509 - RNA, 19 nt, Artificial Sequence
  Description of Artificial Sequence: Synthetic oligonucleotide
  Sense strand starting at position 3077 of SEQ ID NO: 1564326
auugauccaaggugugauu

SEQ ID NO: 1871510 - RNA, 19 nt, Artificial Sequence
  Description of Artificial Sequence: Synthetic oligonucleotide
  Antisense strand to SEQ ID NO: 1871509
aaucacaccuuggaucaau

SEQ ID NO: 1871511 - RNA, 19 nt, Artificial Sequence
  Description of Artificial Sequence: Synthetic oligonucleotide
  Sense strand starting at position 3079 of SEQ ID NO: 1564326
ugauccaaggugugauuaa

SEQ ID NO: 1871512 - RNA, 19 nt, Artificial Sequence
  Description of Artificial Sequence: Synthetic oligonucleotide
  Antisense strand to SEQ ID NO: 1871511
uuaaucacaccuuggauca

SEQ ID NO: 1871513 - RNA, 19 nt, Artificial Sequence
  Description of Artificial Sequence: Synthetic oligonucleotide
  Sense strand starting at position 3080 of SEQ ID NO: 1564326
gauccaaggugugauuaag

SEQ ID NO: 1871514 - RNA, 19 nt, Artificial Sequence
  Description of Artificial Sequence: Synthetic oligonucleotide
  Antisense strand to SEQ ID NO: 1871513
cuuaaucacaccuuggauc

SEQ ID NO: 1871515 - RNA, 19 nt, Artificial Sequence
  Description of Artificial Sequence: Synthetic oligonucleotide
  Sense strand starting at position 3138 of SEQ ID NO: 1564326
uagucuucucuugggaauu

SEQ ID NO: 1871516 - RNA, 19 nt, Artificial Sequence
  Description of Artificial Sequence: Synthetic oligonucleotide
  Antisense strand to SEQ ID NO: 1871515
aauucccaagagaagacua

SEQ ID NO: 1871517 - RNA, 19 nt, Artificial Sequence
  Description of Artificial Sequence: Synthetic oligonucleotide
  Sense strand starting at position 3140 of SEQ ID NO: 1564326
gucuucucuugggaauuua

SEQ ID NO: 1871518 - RNA, 19 nt, Artificial Sequence
  Description of Artificial Sequence: Synthetic oligonucleotide
  Antisense strand to SEQ ID NO: 1871517
uaaauucccaagagaagac

SEQ ID NO: 1871519 - RNA, 19 nt, Artificial Sequence
  Description of Artificial Sequence: Synthetic oligonucleotide
  Sense strand starting at position 3148 of SEQ ID NO: 1564326
uugggaauuuacugugacu

SEQ ID NO: 1871520 - RNA, 19 nt, Artificial Sequence
  Description of Artificial Sequence: Synthetic oligonucleotide
  Antisense strand to SEQ ID NO: 1871519
agucacaguaaauucccaa

SEQ ID NO: 1871521 - RNA, 19 nt, Artificial Sequence
  Description of Artificial Sequence: Synthetic oligonucleotide
  Sense strand starting at position 3151 of SEQ ID NO: 1564326
ggaauuuacugugacuuua

SEQ ID NO: 1871522 - RNA, 19 nt, Artificial Sequence
  Description of Artificial Sequence: Synthetic oligonucleotide
  Antisense strand to SEQ ID NO: 1871521
uaaagucacaguaaauucc

SEQ ID NO: 1871523 - RNA, 19 nt, Artificial Sequence
  Description of Artificial Sequence: Synthetic oligonucleotide
  Sense strand starting at position 3197 of SEQ ID NO: 1564326
gucuucuguguucacggua

SEQ ID NO: 1871524 - RNA, 19 nt, Artificial Sequence
  Description of Artificial Sequence: Synthetic oligonucleotide
  Antisense strand to SEQ ID NO: 1871523
uaccgugaacacagaagac

SEQ ID NO: 1871525 - RNA, 19 nt, Artificial Sequence
  Description of Artificial Sequence: Synthetic oligonucleotide
  Sense strand starting at position 3202 of SEQ ID NO: 1564326
cuguguucacgguauagag

SEQ ID NO: 1871526 - RNA, 19 nt, Artificial Sequence
  Description of Artificial Sequence: Synthetic oligonucleotide
  Antisense strand to SEQ ID NO: 1871525
cucuauaccgugaacacag

SEQ ID NO: 1871527 - RNA, 19 nt, Artificial Sequence
  Description of Artificial Sequence: Synthetic oligonucleotide
  Sense strand starting at position 3204 of SEQ ID NO: 1564326
guguucacgguauagaguu

SEQ ID NO: 1871528 - RNA, 19 nt, Artificial Sequence
  Description of Artificial Sequence: Synthetic oligonucleotide
  Antisense strand to SEQ ID NO: 1871527
aacucuauaccgugaacac

SEQ ID NO: 1871529 - RNA, 19 nt, Artificial Sequence
  Description of Artificial Sequence: Synthetic oligonucleotide
  Sense strand starting at position 3211 of SEQ ID NO: 1564326
cgguauagaguuugacaua

SEQ ID NO: 1871530 - RNA, 19 nt, Artificial Sequence
  Description of Artificial Sequence: Synthetic oligonucleotide
  Antisense strand to SEQ ID NO: 1871529
uaugucaaacucuauaccg

SEQ ID NO: 1871531 - RNA, 19 nt, Artificial Sequence
  Description of Artificial Sequence: Synthetic oligonucleotide
  Sense strand starting at position 3212 of SEQ ID NO: 1564326
gguauagaguuugacauac

SEQ ID NO: 1871532 - RNA, 19 nt, Artificial Sequence
  Description of Artificial Sequence: Synthetic oligonucleotide
  Antisense strand to SEQ ID NO: 1871531
guaugucaaacucuauacc

SEQ ID NO: 1871533 - RNA, 19 nt, Artificial Sequence
  Description of Artificial Sequence: Synthetic oligonucleotide
  Sense strand starting at position 3260 of SEQ ID NO: 1564326
acuuaucugccauguauua

SEQ ID NO: 1871534 - RNA, 19 nt, Artificial Sequence
  Description of Artificial Sequence: Synthetic oligonucleotide
  Antisense strand to SEQ ID NO: 1871533
uaauacauggcagauaagu

SEQ ID NO: 1871535 - RNA, 19 nt, Artificial Sequence
  Description of Artificial Sequence: Synthetic oligonucleotide
  Sense strand starting at position 3270 of SEQ ID NO: 1564326
cauguauuaaagcgugagu

SEQ ID NO: 1871536 - RNA, 19 nt, Artificial Sequence
  Description of Artificial Sequence: Synthetic oligonucleotide
  Antisense strand to SEQ ID NO: 1871535
acucacgcuuuaauacaug

SEQ ID NO: 1871537 - RNA, 19 nt, Artificial Sequence
  Description of Artificial Sequence: Synthetic oligonucleotide
  Sense strand starting at position 3272 of SEQ ID NO: 1564326
uguauuaaagcgugagucu

SEQ ID NO: 1871538 - RNA, 19 nt, Artificial Sequence
  Description of Artificial Sequence: Synthetic oligonucleotide
  Antisense strand to SEQ ID NO: 1871537
agacucacgcuuuaauaca

SEQ ID NO: 1871539 - RNA, 19 nt, Artificial Sequence
  Description of Artificial Sequence: Synthetic oligonucleotide
  Sense strand starting at position 3273 of SEQ ID NO: 1564326
guauuaaagcgugagucuu

SEQ ID NO: 1871540 - RNA, 19 nt, Artificial Sequence
  Description of Artificial Sequence: Synthetic oligonucleotide
  Antisense strand to SEQ ID NO: 1871539
aagacucacgcuuuaauac

SEQ ID NO: 1871541 - RNA, 19 nt, Artificial Sequence
  Description of Artificial Sequence: Synthetic oligonucleotide
  Sense strand starting at position 3332 of SEQ ID NO: 1564326
uugcuuugaugguuuguua

SEQ ID NO: 1871542 - RNA, 19 nt, Artificial Sequence
  Description of Artificial Sequence: Synthetic oligonucleotide
  Antisense strand to SEQ ID NO: 1871541
uaacaaaccaucaaagcaa

SEQ ID NO: 1871543 - RNA, 19 nt, Artificial Sequence
  Description of Artificial Sequence: Synthetic oligonucleotide
  Sense strand starting at position 3335 of SEQ ID NO: 1564326
cuuugaugguuuguuacuu

SEQ ID NO: 1871544 - RNA, 19 nt, Artificial Sequence
  Description of Artificial Sequence: Synthetic oligonucleotide
  Antisense strand to SEQ ID NO: 1871543
aaguaacaaaccaucaaag

SEQ ID NO: 1871545 - RNA, 19 nt, Artificial Sequence
  Description of Artificial Sequence: Synthetic oligonucleotide
  Sense strand starting at position 3339 of SEQ ID NO: 1564326
gaugguuuguuacuugaua

SEQ ID NO: 1871546 - RNA, 19 nt, Artificial Sequence
  Description of Artificial Sequence: Synthetic oligonucleotide
  Antisense strand to SEQ ID NO: 1871545
uaucaaguaacaaaccauc

SEQ ID NO: 1871547 - RNA, 19 nt, Artificial Sequence
  Description of Artificial Sequence: Synthetic oligonucleotide
  Sense strand starting at position 3340 of SEQ ID NO: 1564326
augguuuguuacuugauac

SEQ ID NO: 1871548 - RNA, 19 nt, Artificial Sequence
  Description of Artificial Sequence: Synthetic oligonucleotide
  Antisense strand to SEQ ID NO: 1871547
guaucaaguaacaaaccau

SEQ ID NO: 1871549 - RNA, 19 nt, Artificial Sequence
  Description of Artificial Sequence: Synthetic oligonucleotide
  Sense strand starting at position 3469 of SEQ ID NO: 1564326
gcauguuauguucugcuca

SEQ ID NO: 1871550 - RNA, 19 nt, Artificial Sequence
  Description of Artificial Sequence: Synthetic oligonucleotide
  Antisense strand to SEQ ID NO: 1871549
ugagcagaacauaacaugc

SEQ ID NO: 1871551 - RNA, 19 nt, Artificial Sequence
  Description of Artificial Sequence: Synthetic oligonucleotide
  Sense strand starting at position 3474 of SEQ ID NO: 1564326
uuauguucugcucaucauu

SEQ ID NO: 1871552 - RNA, 19 nt, Artificial Sequence
  Description of Artificial Sequence: Synthetic oligonucleotide
  Antisense strand to SEQ ID NO: 1871551
aaugaugagcagaacauaa

SEQ ID NO: 1871553 - RNA, 19 nt, Artificial Sequence
  Description of Artificial Sequence: Synthetic oligonucleotide
  Sense strand starting at position 3542 of SEQ ID NO: 1564326
ucacauauuugggacaugu

SEQ ID NO: 1871554 - RNA, 19 nt, Artificial Sequence
  Description of Artificial Sequence: Synthetic oligonucleotide
  Antisense strand to SEQ ID NO: 1871553
acaugucccaaauauguga

SEQ ID NO: 1871555 - RNA, 19 nt, Artificial Sequence
  Description of Artificial Sequence: Synthetic oligonucleotide
  Sense strand starting at position 3839 of SEQ ID NO: 1564326
cuaugaaguugaggaaauu

SEQ ID NO: 1871556 - RNA, 19 nt, Artificial Sequence
  Description of Artificial Sequence: Synthetic oligonucleotide
  Antisense strand to SEQ ID NO: 1871555
aauuuccucaacuucauag

SEQ ID NO: 1871557 - RNA, 19 nt, Artificial Sequence
  Description of Artificial Sequence: Synthetic oligonucleotide
  Sense strand starting at position 3909 of SEQ ID NO: 1564326
guuguugucguuguuaguu

SEQ ID NO: 1871558 - RNA, 19 nt, Artificial Sequence
  Description of Artificial Sequence: Synthetic oligonucleotide
  Antisense strand to SEQ ID NO: 1871557
aacuaacaacgacaacaac

SEQ ID NO: 1871559 - RNA, 19 nt, Artificial Sequence
  Description of Artificial Sequence: Synthetic oligonucleotide
  Sense strand starting at position 3914 of SEQ ID NO: 1564326
ugucguuguuaguuugaga

SEQ ID NO: 1871560 - RNA, 19 nt, Artificial Sequence
  Description of Artificial Sequence: Synthetic oligonucleotide
  Antisense strand to SEQ ID NO: 1871559
ucucaaacuaacaacgaca

SEQ ID NO: 1871561 - RNA, 19 nt, Artificial Sequence
  Description of Artificial Sequence: Synthetic oligonucleotide
  Sense strand starting at position 3947 of SEQ ID NO: 1564326
cuugcuuagccucaguuau

SEQ ID NO: 1871562 - RNA, 19 nt, Artificial Sequence
  Description of Artificial Sequence: Synthetic oligonucleotide
  Antisense strand to SEQ ID NO: 1871561
auaacugaggcuaagcaag

SEQ ID NO: 1871563 - RNA, 19 nt, Artificial Sequence
  Description of Artificial Sequence: Synthetic oligonucleotide
  Sense strand starting at position 3949 of SEQ ID NO: 1564326
ugcuuagccucaguuauuc

SEQ ID NO: 1871564 - RNA, 19 nt, Artificial Sequence
  Description of Artificial Sequence: Synthetic oligonucleotide
  Antisense strand to SEQ ID NO: 1871563
gaauaacugaggcuaagca

SEQ ID NO: 1871565 - RNA, 19 nt, Artificial Sequence
  Description of Artificial Sequence: Synthetic oligonucleotide
  Sense strand starting at position 3954 of SEQ ID NO: 1564326
agccucaguuauuccauua

SEQ ID NO: 1871566 - RNA, 19 nt, Artificial Sequence
  Description of Artificial Sequence: Synthetic oligonucleotide
  Antisense strand to SEQ ID NO: 1871565
uaauggaauaacugaggcu

SEQ ID NO: 1871567 - RNA, 19 nt, Artificial Sequence
  Description of Artificial Sequence: Synthetic oligonucleotide
  Sense strand starting at position 116 of SEQ ID NO: 1564329
aggaaaguuuaccauuucu

SEQ ID NO: 1871568 - RNA, 19 nt, Artificial Sequence
  Description of Artificial Sequence: Synthetic oligonucleotide
  Antisense strand to SEQ ID NO: 1871567
agaaaugguaaacuuuccu

SEQ ID NO: 1871569 - RNA, 19 nt, Artificial Sequence
  Description of Artificial Sequence: Synthetic oligonucleotide
  Sense strand starting at position 190 of SEQ ID NO: 1564329
uaugcauugguaugagaau

SEQ ID NO: 1871570 - RNA, 19 nt, Artificial Sequence
  Description of Artificial Sequence: Synthetic oligonucleotide
  Antisense strand to SEQ ID NO: 1871569
auucucauaccaaugcaua

SEQ ID NO: 1871571 - RNA, 19 nt, Artificial Sequence
  Description of Artificial Sequence: Synthetic oligonucleotide
  Sense strand starting at position 332 of SEQ ID NO: 1564329
uugcacuuugcagaagaua

SEQ ID NO: 1871572 - RNA, 19 nt, Artificial Sequence
  Description of Artificial Sequence: Synthetic oligonucleotide
  Antisense strand to SEQ ID NO: 1871571
uaucuucugcaaagugcaa

SEQ ID NO: 1871573 - RNA, 19 nt, Artificial Sequence
  Description of Artificial Sequence: Synthetic oligonucleotide
  Sense strand starting at position 343 of SEQ ID NO: 1564329
agaagauauuuccaguaac

SEQ ID NO: 1871574 - RNA, 19 nt, Artificial Sequence
  Description of Artificial Sequence: Synthetic oligonucleotide
  Antisense strand to SEQ ID NO: 1871573
guuacuggaaauaucuucu

SEQ ID NO: 1871575 - RNA, 19 nt, Artificial Sequence
  Description of Artificial Sequence: Synthetic oligonucleotide
  Sense strand starting at position 540 of SEQ ID NO: 1564329
augucacaaugcuuaaguu

SEQ ID NO: 1871576 - RNA, 19 nt, Artificial Sequence
  Description of Artificial Sequence: Synthetic oligonucleotide
  Antisense strand to SEQ ID NO: 1871575
aacuuaagcauugugacau

SEQ ID NO: 1871577 - RNA, 19 nt, Artificial Sequence
  Description of Artificial Sequence: Synthetic oligonucleotide
  Sense strand starting at position 541 of SEQ ID NO: 1564329
ugucacaaugcuuaaguua

SEQ ID NO: 1871578 - RNA, 19 nt, Artificial Sequence
  Description of Artificial Sequence: Synthetic oligonucleotide
  Antisense strand to SEQ ID NO: 1871577
uaacuuaagcauugugaca

SEQ ID NO: 1871579 - RNA, 19 nt, Artificial Sequence
  Description of Artificial Sequence: Synthetic oligonucleotide
  Sense strand starting at position 570 of SEQ ID NO: 1564329
gagggcaguucugucucaa

SEQ ID NO: 1871580 - RNA, 19 nt, Artificial Sequence
  Description of Artificial Sequence: Synthetic oligonucleotide
  Antisense strand to SEQ ID NO: 1871579
uugagacagaacugcccuc

SEQ ID NO: 1871581 - RNA, 19 nt, Artificial Sequence
  Description of Artificial Sequence: Synthetic oligonucleotide
  Sense strand starting at position 665 of SEQ ID NO: 1564329
auuauuagaagguguugca

SEQ ID NO: 1871582 - RNA, 19 nt, Artificial Sequence
  Description of Artificial Sequence: Synthetic oligonucleotide
  Antisense strand to SEQ ID NO: 1871581
ugcaacaccuucuaauaau

SEQ ID NO: 1871583 - RNA, 19 nt, Artificial Sequence
  Description of Artificial Sequence: Synthetic oligonucleotide
  Sense strand starting at position 681 of SEQ ID NO: 1564329
gcauguuaacaguaccaag

SEQ ID NO: 1871584 - RNA, 19 nt, Artificial Sequence
  Description of Artificial Sequence: Synthetic oligonucleotide
  Antisense strand to SEQ ID NO: 1871583
cuugguacuguuaacaugc

SEQ ID NO: 1871585 - RNA, 19 nt, Artificial Sequence
  Description of Artificial Sequence: Synthetic oligonucleotide
  Sense strand starting at position 790 of SEQ ID NO: 1564329
uucgacagaagucgauauu

SEQ ID NO: 1871586 - RNA, 19 nt, Artificial Sequence
  Description of Artificial Sequence: Synthetic oligonucleotide
  Antisense strand to SEQ ID NO: 1871585
aauaucgacuucugucgaa

SEQ ID NO: 1871587 - RNA, 19 nt, Artificial Sequence
  Description of Artificial Sequence: Synthetic oligonucleotide
  Sense strand starting at position 791 of SEQ ID NO: 1564329
ucgacagaagucgauauua

SEQ ID NO: 1871588 - RNA, 19 nt, Artificial Sequence
  Description of Artificial Sequence: Synthetic oligonucleotide
  Antisense strand to SEQ ID NO: 1871587
uaauaucgacuucugucga

SEQ ID NO: 1871589 - RNA, 19 nt, Artificial Sequence
  Description of Artificial Sequence: Synthetic oligonucleotide
  Sense strand starting at position 799 of SEQ ID NO: 1564329
agucgauauuaaguggaaa

SEQ ID NO: 1871590 - RNA, 19 nt, Artificial Sequence
  Description of Artificial Sequence: Synthetic oligonucleotide
  Antisense strand to SEQ ID NO: 1871589
uuuccacuuaauaucgacu

SEQ ID NO: 1871591 - RNA, 19 nt, Artificial Sequence
  Description of Artificial Sequence: Synthetic oligonucleotide
  Sense strand starting at position 800 of SEQ ID NO: 1564329
gucgauauuaaguggaaag

SEQ ID NO: 1871592 - RNA, 19 nt, Artificial Sequence
  Description of Artificial Sequence: Synthetic oligonucleotide
  Antisense strand to SEQ ID NO: 1871591
cuuuccacuuaauaucgac

SEQ ID NO: 1871593 - RNA, 19 nt, Artificial Sequence
  Description of Artificial Sequence: Synthetic oligonucleotide
  Sense strand starting at position 801 of SEQ ID NO: 1564329
ucgauauuaaguggaaaga

SEQ ID NO: 1871594 - RNA, 19 nt, Artificial Sequence
  Description of Artificial Sequence: Synthetic oligonucleotide
  Antisense strand to SEQ ID NO: 1871593
ucuuuccacuuaauaucga

SEQ ID NO: 1871595 - RNA, 19 nt, Artificial Sequence
  Description of Artificial Sequence: Synthetic oligonucleotide
  Sense strand starting at position 871 of SEQ ID NO: 1564329
ccaauaugggaaugcguca

SEQ ID NO: 1871596 - RNA, 19 nt, Artificial Sequence
  Description of Artificial Sequence: Synthetic oligonucleotide
  Antisense strand to SEQ ID NO: 1871595
ugacgcauucccauauugg

SEQ ID NO: 1871597 - RNA, 19 nt, Artificial Sequence
  Description of Artificial Sequence: Synthetic oligonucleotide
  Sense strand starting at position 876 of SEQ ID NO: 1564329
augggaaugcgucaaaugu

SEQ ID NO: 1871598 - RNA, 19 nt, Artificial Sequence
  Description of Artificial Sequence: Synthetic oligonucleotide
  Antisense strand to SEQ ID NO: 1871597
acauuugacgcauucccau

SEQ ID NO: 1871599 - RNA, 19 nt, Artificial Sequence
  Description of Artificial Sequence: Synthetic oligonucleotide
  Sense strand starting at position 917 of SEQ ID NO: 1564329
cucgguuucguuucguuua

SEQ ID NO: 1871600 - RNA, 19 nt, Artificial Sequence
  Description of Artificial Sequence: Synthetic oligonucleotide
  Antisense strand to SEQ ID NO: 1871599
uaaacgaaacgaaaccgag

SEQ ID NO: 1871601 - RNA, 19 nt, Artificial Sequence
  Description of Artificial Sequence: Synthetic oligonucleotide
  Sense strand starting at position 1041 of SEQ ID NO: 1564329
cugugaaacccuugaccga

SEQ ID NO: 1871602 - RNA, 19 nt, Artificial Sequence
  Description of Artificial Sequence: Synthetic oligonucleotide
  Antisense strand to SEQ ID NO: 1871601
ucggucaaggguuucacag

SEQ ID NO: 1871603 - RNA, 19 nt, Artificial Sequence
  Description of Artificial Sequence: Synthetic oligonucleotide
  Sense strand starting at position 2250 of SEQ ID NO: 1564329
ugugaacuucuagggcaua

SEQ ID NO: 1871604 - RNA, 19 nt, Artificial Sequence
  Description of Artificial Sequence: Synthetic oligonucleotide
  Antisense strand to SEQ ID NO: 1871603
uaugcccuagaaguucaca

SEQ ID NO: 1871605 - RNA, 19 nt, Artificial Sequence
  Description of Artificial Sequence: Synthetic oligonucleotide
  Sense strand starting at position 2311 of SEQ ID NO: 1564329
uugaaucugcucuauuaga

SEQ ID NO: 1871606 - RNA, 19 nt, Artificial Sequence
  Description of Artificial Sequence: Synthetic oligonucleotide
  Antisense strand to SEQ ID NO: 1871605
ucuaauagagcagauucaa

SEQ ID NO: 1871607 - RNA, 19 nt, Artificial Sequence
  Description of Artificial Sequence: Synthetic oligonucleotide
  Sense strand starting at position 2322 of SEQ ID NO: 1564329
cuauuagacuguuugcuag

SEQ ID NO: 1871608 - RNA, 19 nt, Artificial Sequence
  Description of Artificial Sequence: Synthetic oligonucleotide
  Antisense strand to SEQ ID NO: 1871607
cuagcaaacagucuaauag

SEQ ID NO: 1871609 - RNA, 19 nt, Artificial Sequence
  Description of Artificial Sequence: Synthetic oligonucleotide
  Sense strand starting at position 2324 of SEQ ID NO: 1564329
auuagacuguuugcuagau

SEQ ID NO: 1871610 - RNA, 19 nt, Artificial Sequence
  Description of Artificial Sequence: Synthetic oligonucleotide
  Antisense strand to SEQ ID NO: 1871609
aucuagcaaacagucuaau

SEQ ID NO: 1871611 - RNA, 19 nt, Artificial Sequence
  Description of Artificial Sequence: Synthetic oligonucleotide
  Sense strand starting at position 2328 of SEQ ID NO: 1564329
gacuguuugcuagaugaua

SEQ ID NO: 1871612 - RNA, 19 nt, Artificial Sequence
  Description of Artificial Sequence: Synthetic oligonucleotide
  Antisense strand to SEQ ID NO: 1871611
uaucaucuagcaaacaguc

SEQ ID NO: 1871613 - RNA, 19 nt, Artificial Sequence
  Description of Artificial Sequence: Synthetic oligonucleotide
  Sense strand starting at position 2562 of SEQ ID NO: 1564329
cugcuugaucuguagcaaa

SEQ ID NO: 1871614 - RNA, 19 nt, Artificial Sequence
  Description of Artificial Sequence: Synthetic oligonucleotide
  Antisense strand to SEQ ID NO: 1871613
uuugcuacagaucaagcag

SEQ ID NO: 1871615 - RNA, 19 nt, Artificial Sequence
  Description of Artificial Sequence: Synthetic oligonucleotide
  Sense strand starting at position 2590 of SEQ ID NO: 1564329
uuaggcucucgggaauaca

SEQ ID NO: 1871616 - RNA, 19 nt, Artificial Sequence
  Description of Artificial Sequence: Synthetic oligonucleotide
  Antisense strand to SEQ ID NO: 1871615
uguauucccgagagccuaa

SEQ ID NO: 1871617 - RNA, 19 nt, Artificial Sequence
  Description of Artificial Sequence: Synthetic oligonucleotide
  Sense strand starting at position 2627 of SEQ ID NO: 1564329
gucucuaccucuuuaggga

SEQ ID NO: 1871618 - RNA, 19 nt, Artificial Sequence
  Description of Artificial Sequence: Synthetic oligonucleotide
  Antisense strand to SEQ ID NO: 1871617
ucccuaaagagguagagac

SEQ ID NO: 1871619 - RNA, 19 nt, Artificial Sequence
  Description of Artificial Sequence: Synthetic oligonucleotide
  Sense strand starting at position 2728 of SEQ ID NO: 1564329
gcugucauuugaccuguau

SEQ ID NO: 1871620 - RNA, 19 nt, Artificial Sequence
  Description of Artificial Sequence: Synthetic oligonucleotide
  Antisense strand to SEQ ID NO: 1871619
auacaggucaaaugacagc

SEQ ID NO: 1871621 - RNA, 19 nt, Artificial Sequence
  Description of Artificial Sequence: Synthetic oligonucleotide
  Sense strand starting at position 2735 of SEQ ID NO: 1564329
uuugaccuguaucuugaaa

SEQ ID NO: 1871622 - RNA, 19 nt, Artificial Sequence
  Description of Artificial Sequence: Synthetic oligonucleotide
  Antisense strand to SEQ ID NO: 1871621
uuucaagauacaggucaaa

SEQ ID NO: 1871623 - RNA, 19 nt, Artificial Sequence
  Description of Artificial Sequence: Synthetic oligonucleotide
  Sense strand starting at position 2865 of SEQ ID NO: 1564329
auaguauguguucagugau

SEQ ID NO: 1871624 - RNA, 19 nt, Artificial Sequence
  Description of Artificial Sequence: Synthetic oligonucleotide
  Antisense strand to SEQ ID NO: 1871623
aucacugaacacauacuau

SEQ ID NO: 1871625 - RNA, 19 nt, Artificial Sequence
  Description of Artificial Sequence: Synthetic oligonucleotide
  Sense strand starting at position 2979 of SEQ ID NO: 1564329
caggauggguguuuggaga

SEQ ID NO: 1871626 - RNA, 19 nt, Artificial Sequence
  Description of Artificial Sequence: Synthetic oligonucleotide
  Antisense strand to SEQ ID NO: 1871625
ucuccaaacacccauccug

SEQ ID NO: 1871627 - RNA, 19 nt, Artificial Sequence
  Description of Artificial Sequence: Synthetic oligonucleotide
  Sense strand starting at position 3163 of SEQ ID NO: 1564329
cuauuaauaccuugcagug

SEQ ID NO: 1871628 - RNA, 19 nt, Artificial Sequence
  Description of Artificial Sequence: Synthetic oligonucleotide
  Antisense strand to SEQ ID NO: 1871627
cacugcaagguauuaauag

SEQ ID NO: 1871629 - RNA, 19 nt, Artificial Sequence
  Description of Artificial Sequence: Synthetic oligonucleotide
  Sense strand starting at position 3168 of SEQ ID NO: 1564329
aauaccuugcaguggaauu

SEQ ID NO: 1871630 - RNA, 19 nt, Artificial Sequence
  Description of Artificial Sequence: Synthetic oligonucleotide
  Antisense strand to SEQ ID NO: 1871629
aauuccacugcaagguauu

SEQ ID NO: 1871631 - RNA, 19 nt, Artificial Sequence
  Description of Artificial Sequence: Synthetic oligonucleotide
  Sense strand starting at position 3344 of SEQ ID NO: 1564329
aaaguaaagccacauggua

SEQ ID NO: 1871632 - RNA, 19 nt, Artificial Sequence
  Description of Artificial Sequence: Synthetic oligonucleotide
  Antisense strand to SEQ ID NO: 1871631
uaccauguggcuuuacuuu

SEQ ID NO: 1871633 - RNA, 19 nt, Artificial Sequence
  Description of Artificial Sequence: Synthetic oligonucleotide
  Sense strand starting at position 3380 of SEQ ID NO: 1564329
gguauaauauagcuguauu

SEQ ID NO: 1871634 - RNA, 19 nt, Artificial Sequence
  Description of Artificial Sequence: Synthetic oligonucleotide
  Antisense strand to SEQ ID NO: 1871633
aauacagcuauauuauacc

SEQ ID NO: 1871635 - RNA, 19 nt, Artificial Sequence
  Description of Artificial Sequence: Synthetic oligonucleotide
  Sense strand starting at position 3461 of SEQ ID NO: 1564329
cuaugugggaauuauugca

SEQ ID NO: 1871636 - RNA, 19 nt, Artificial Sequence
  Description of Artificial Sequence: Synthetic oligonucleotide
  Antisense strand to SEQ ID NO: 1871635
ugcaauaauucccacauag

SEQ ID NO: 1871637 - RNA, 19 nt, Artificial Sequence
  Description of Artificial Sequence: Synthetic oligonucleotide
  Sense strand starting at position 3598 of SEQ ID NO: 1564329
ccuggcaacugaguacuua

SEQ ID NO: 1871638 - RNA, 19 nt, Artificial Sequence
  Description of Artificial Sequence: Synthetic oligonucleotide
  Antisense strand to SEQ ID NO: 1871637
uaaguacucaguugccagg

SEQ ID NO: 1871639 - RNA, 19 nt, Artificial Sequence
  Description of Artificial Sequence: Synthetic oligonucleotide
  Sense strand starting at position 3599 of SEQ ID NO: 1564329
cuggcaacugaguacuuaa

SEQ ID NO: 1871640 - RNA, 19 nt, Artificial Sequence
  Description of Artificial Sequence: Synthetic oligonucleotide
  Antisense strand to SEQ ID NO: 1871639
uuaaguacucaguugccag

SEQ ID NO: 1871641 - RNA, 19 nt, Artificial Sequence
  Description of Artificial Sequence: Synthetic oligonucleotide
  Sense strand starting at position 3602 of SEQ ID NO: 1564329
gcaacugaguacuuaauaa

SEQ ID NO: 1871642 - RNA, 19 nt, Artificial Sequence
  Description of Artificial Sequence: Synthetic oligonucleotide
  Antisense strand to SEQ ID NO: 1871641
uuauuaaguacucaguugc

SEQ ID NO: 1871643 - RNA, 19 nt, Artificial Sequence
  Description of Artificial Sequence: Synthetic oligonucleotide
  Sense strand starting at position 3767 of SEQ ID NO: 1564329
uacagaucacaguggcaau

SEQ ID NO: 1871644 - RNA, 19 nt, Artificial Sequence
  Description of Artificial Sequence: Synthetic oligonucleotide
  Antisense strand to SEQ ID NO: 1871643
auugccacugugaucugua

SEQ ID NO: 1871645 - RNA, 19 nt, Artificial Sequence
  Description of Artificial Sequence: Synthetic oligonucleotide
  Sense strand starting at position 3887 of SEQ ID NO: 1564329
acagaauugccaugccauu

SEQ ID NO: 1871646 - RNA, 19 nt, Artificial Sequence
  Description of Artificial Sequence: Synthetic oligonucleotide
  Antisense strand to SEQ ID NO: 1871645
aauggcauggcaauucugu

SEQ ID NO: 1871647 - RNA, 19 nt, Artificial Sequence
  Description of Artificial Sequence: Synthetic oligonucleotide
  Sense strand starting at position 113 of SEQ ID NO: 1564330
aggaaaguuuaccauuucu

SEQ ID NO: 1871648 - RNA, 19 nt, Artificial Sequence
  Description of Artificial Sequence: Synthetic oligonucleotide
  Antisense strand to SEQ ID NO: 1871647
agaaaugguaaacuuuccu

SEQ ID NO: 1871649 - RNA, 19 nt, Artificial Sequence
  Description of Artificial Sequence: Synthetic oligonucleotide
  Sense strand starting at position 187 of SEQ ID NO: 1564330
uaugcauugguaugagaau

SEQ ID NO: 1871650 - RNA, 19 nt, Artificial Sequence
  Description of Artificial Sequence: Synthetic oligonucleotide
  Antisense strand to SEQ ID NO: 1871649
auucucauaccaaugcaua

SEQ ID NO: 1871651 - RNA, 19 nt, Artificial Sequence
  Description of Artificial Sequence: Synthetic oligonucleotide
  Sense strand starting at position 329 of SEQ ID NO: 1564330
uugcacuuugcagaagaua

SEQ ID NO: 1871652 - RNA, 19 nt, Artificial Sequence
  Description of Artificial Sequence: Synthetic oligonucleotide
  Antisense strand to SEQ ID NO: 1871651
uaucuucugcaaagugcaa

SEQ ID NO: 1871653 - RNA, 19 nt, Artificial Sequence
  Description of Artificial Sequence: Synthetic oligonucleotide
  Sense strand starting at position 340 of SEQ ID NO: 1564330
agaagauauuuccaguaac

SEQ ID NO: 1871654 - RNA, 19 nt, Artificial Sequence
  Description of Artificial Sequence: Synthetic oligonucleotide
  Antisense strand to SEQ ID NO: 1871653
guuacuggaaauaucuucu

SEQ ID NO: 1871655 - RNA, 19 nt, Artificial Sequence
  Description of Artificial Sequence: Synthetic oligonucleotide
  Sense strand starting at position 537 of SEQ ID NO: 1564330
augucacaaugcuuaaguu

SEQ ID NO: 1871656 - RNA, 19 nt, Artificial Sequence
  Description of Artificial Sequence: Synthetic oligonucleotide
  Antisense strand to SEQ ID NO: 1871655
aacuuaagcauugugacau

SEQ ID NO: 1871657 - RNA, 19 nt, Artificial Sequence
  Description of Artificial Sequence: Synthetic oligonucleotide
  Sense strand starting at position 538 of SEQ ID NO: 1564330
ugucacaaugcuuaaguua

SEQ ID NO: 1871658 - RNA, 19 nt, Artificial Sequence
  Description of Artificial Sequence: Synthetic oligonucleotide
  Antisense strand to SEQ ID NO: 1871657
uaacuuaagcauugugaca

SEQ ID NO: 1871659 - RNA, 19 nt, Artificial Sequence
  Description of Artificial Sequence: Synthetic oligonucleotide
  Sense strand starting at position 567 of SEQ ID NO: 1564330
gagggcaguucugucucaa

SEQ ID NO: 1871660 - RNA, 19 nt, Artificial Sequence
  Description of Artificial Sequence: Synthetic oligonucleotide
  Antisense strand to SEQ ID NO: 1871659
uugagacagaacugcccuc

SEQ ID NO: 1871661 - RNA, 19 nt, Artificial Sequence
  Description of Artificial Sequence: Synthetic oligonucleotide
  Sense strand starting at position 662 of SEQ ID NO: 1564330
auuauuagaagguguugca

SEQ ID NO: 1871662 - RNA, 19 nt, Artificial Sequence
  Description of Artificial Sequence: Synthetic oligonucleotide
  Antisense strand to SEQ ID NO: 1871661
ugcaacaccuucuaauaau

SEQ ID NO: 1871663 - RNA, 19 nt, Artificial Sequence
  Description of Artificial Sequence: Synthetic oligonucleotide
  Sense strand starting at position 678 of SEQ ID NO: 1564330
gcauguuaacaguaccaag

SEQ ID NO: 1871664 - RNA, 19 nt, Artificial Sequence
  Description of Artificial Sequence: Synthetic oligonucleotide
  Antisense strand to SEQ ID NO: 1871663
cuugguacuguuaacaugc

SEQ ID NO: 1871665 - RNA, 19 nt, Artificial Sequence
  Description of Artificial Sequence: Synthetic oligonucleotide
  Sense strand starting at position 787 of SEQ ID NO: 1564330
uucgacagaagucgauauu

SEQ ID NO: 1871666 - RNA, 19 nt, Artificial Sequence
  Description of Artificial Sequence: Synthetic oligonucleotide
  Antisense strand to SEQ ID NO: 1871665
aauaucgacuucugucgaa

SEQ ID NO: 1871667 - RNA, 19 nt, Artificial Sequence
  Description of Artificial Sequence: Synthetic oligonucleotide
  Sense strand starting at position 788 of SEQ ID NO: 1564330
ucgacagaagucgauauua

SEQ ID NO: 1871668 - RNA, 19 nt, Artificial Sequence
  Description of Artificial Sequence: Synthetic oligonucleotide
  Antisense strand to SEQ ID NO: 1871667
uaauaucgacuucugucga

SEQ ID NO: 1871669 - RNA, 19 nt, Artificial Sequence
  Description of Artificial Sequence: Synthetic oligonucleotide
  Sense strand starting at position 796 of SEQ ID NO: 1564330
agucgauauuaaguggaaa

SEQ ID NO: 1871670 - RNA, 19 nt, Artificial Sequence
  Description of Artificial Sequence: Synthetic oligonucleotide
  Antisense strand to SEQ ID NO: 1871669
uuuccacuuaauaucgacu

SEQ ID NO: 1871671 - RNA, 19 nt, Artificial Sequence
  Description of Artificial Sequence: Synthetic oligonucleotide
  Sense strand starting at position 797 of SEQ ID NO: 1564330
gucgauauuaaguggaaag

SEQ ID NO: 1871672 - RNA, 19 nt, Artificial Sequence
  Description of Artificial Sequence: Synthetic oligonucleotide
  Antisense strand to SEQ ID NO: 1871671
cuuuccacuuaauaucgac

SEQ ID NO: 1871673 - RNA, 19 nt, Artificial Sequence
  Description of Artificial Sequence: Synthetic oligonucleotide
  Sense strand starting at position 798 of SEQ ID NO: 1564330
ucgauauuaaguggaaaga

SEQ ID NO: 1871674 - RNA, 19 nt, Artificial Sequence
  Description of Artificial Sequence: Synthetic oligonucleotide
  Antisense strand to SEQ ID NO: 1871673
ucuuuccacuuaauaucga

SEQ ID NO: 1871675 - RNA, 19 nt, Artificial Sequence
  Description of Artificial Sequence: Synthetic oligonucleotide
  Sense strand starting at position 868 of SEQ ID NO: 1564330
ccaauaugggaaugcguca

SEQ ID NO: 1871676 - RNA, 19 nt, Artificial Sequence
  Description of Artificial Sequence: Synthetic oligonucleotide
  Antisense strand to SEQ ID NO: 1871675
ugacgcauucccauauugg

SEQ ID NO: 1871677 - RNA, 19 nt, Artificial Sequence
  Description of Artificial Sequence: Synthetic oligonucleotide
  Sense strand starting at position 873 of SEQ ID NO: 1564330
augggaaugcgucaaaugu

SEQ ID NO: 1871678 - RNA, 19 nt, Artificial Sequence
  Description of Artificial Sequence: Synthetic oligonucleotide
  Antisense strand to SEQ ID NO: 1871677
acauuugacgcauucccau

SEQ ID NO: 1871679 - RNA, 19 nt, Artificial Sequence
  Description of Artificial Sequence: Synthetic oligonucleotide
  Sense strand starting at position 914 of SEQ ID NO: 1564330
cucgguuucguuucguuua

SEQ ID NO: 1871680 - RNA, 19 nt, Artificial Sequence
  Description of Artificial Sequence: Synthetic oligonucleotide
  Antisense strand to SEQ ID NO: 1871679
uaaacgaaacgaaaccgag

SEQ ID NO: 1871681 - RNA, 19 nt, Artificial Sequence
  Description of Artificial Sequence: Synthetic oligonucleotide
  Sense strand starting at position 1038 of SEQ ID NO: 1564330
cugugaaacccuugaccga

SEQ ID NO: 1871682 - RNA, 19 nt, Artificial Sequence
  Description of Artificial Sequence: Synthetic oligonucleotide
  Antisense strand to SEQ ID NO: 1871681
ucggucaaggguuucacag

SEQ ID NO: 1871683 - RNA, 19 nt, Artificial Sequence
  Description of Artificial Sequence: Synthetic oligonucleotide
  Sense strand starting at position 2247 of SEQ ID NO: 1564330
ugugaacuucuagggcaua

SEQ ID NO: 1871684 - RNA, 19 nt, Artificial Sequence
  Description of Artificial Sequence: Synthetic oligonucleotide
  Antisense strand to SEQ ID NO: 1871683
uaugcccuagaaguucaca

SEQ ID NO: 1871685 - RNA, 19 nt, Artificial Sequence
  Description of Artificial Sequence: Synthetic oligonucleotide
  Sense strand starting at position 2308 of SEQ ID NO: 1564330
uugaaucugcucuauuaga

SEQ ID NO: 1871686 - RNA, 19 nt, Artificial Sequence
  Description of Artificial Sequence: Synthetic oligonucleotide
  Antisense strand to SEQ ID NO: 1871685
ucuaauagagcagauucaa

SEQ ID NO: 1871687 - RNA, 19 nt, Artificial Sequence
  Description of Artificial Sequence: Synthetic oligonucleotide
  Sense strand starting at position 2319 of SEQ ID NO: 1564330
cuauuagacuguuugcuag

SEQ ID NO: 1871688 - RNA, 19 nt, Artificial Sequence
  Description of Artificial Sequence: Synthetic oligonucleotide
  Antisense strand to SEQ ID NO: 1871687
cuagcaaacagucuaauag

SEQ ID NO: 1871689 - RNA, 19 nt, Artificial Sequence
  Description of Artificial Sequence: Synthetic oligonucleotide
  Sense strand starting at position 2321 of SEQ ID NO: 1564330
auuagacuguuugcuagau

SEQ ID NO: 1871690 - RNA, 19 nt, Artificial Sequence
  Description of Artificial Sequence: Synthetic oligonucleotide
  Antisense strand to SEQ ID NO: 1871689
aucuagcaaacagucuaau

SEQ ID NO: 1871691 - RNA, 19 nt, Artificial Sequence
  Description of Artificial Sequence: Synthetic oligonucleotide
  Sense strand starting at position 2325 of SEQ ID NO: 1564330
gacuguuugcuagaugaua

SEQ ID NO: 1871692 - RNA, 19 nt, Artificial Sequence
  Description of Artificial Sequence: Synthetic oligonucleotide
  Antisense strand to SEQ ID NO: 1871691
uaucaucuagcaaacaguc

SEQ ID NO: 1871693 - RNA, 19 nt, Artificial Sequence
  Description of Artificial Sequence: Synthetic oligonucleotide
  Sense strand starting at position 2559 of SEQ ID NO: 1564330
cugcuugaucuguagcaaa

SEQ ID NO: 1871694 - RNA, 19 nt, Artificial Sequence
  Description of Artificial Sequence: Synthetic oligonucleotide
  Antisense strand to SEQ ID NO: 1871693
uuugcuacagaucaagcag

SEQ ID NO: 1871695 - RNA, 19 nt, Artificial Sequence
  Description of Artificial Sequence: Synthetic oligonucleotide
  Sense strand starting at position 2587 of SEQ ID NO: 1564330
uuaggcucucgggaauaca

SEQ ID NO: 1871696 - RNA, 19 nt, Artificial Sequence
  Description of Artificial Sequence: Synthetic oligonucleotide
  Antisense strand to SEQ ID NO: 1871695
uguauucccgagagccuaa

SEQ ID NO: 1871697 - RNA, 19 nt, Artificial Sequence
  Description of Artificial Sequence: Synthetic oligonucleotide
  Sense strand starting at position 2624 of SEQ ID NO: 1564330
gucucuaccucuuuaggga

SEQ ID NO: 1871698 - RNA, 19 nt, Artificial Sequence
  Description of Artificial Sequence: Synthetic oligonucleotide
  Antisense strand to SEQ ID NO: 1871697
ucccuaaagagguagagac

SEQ ID NO: 1871699 - RNA, 19 nt, Artificial Sequence
  Description of Artificial Sequence: Synthetic oligonucleotide
  Sense strand starting at position 2725 of SEQ ID NO: 1564330
gcugucauuugaccuguau

SEQ ID NO: 1871700 - RNA, 19 nt, Artificial Sequence
  Description of Artificial Sequence: Synthetic oligonucleotide
  Antisense strand to SEQ ID NO: 1871699
auacaggucaaaugacagc

SEQ ID NO: 1871701 - RNA, 19 nt, Artificial Sequence
  Description of Artificial Sequence: Synthetic oligonucleotide
  Sense strand starting at position 2732 of SEQ ID NO: 1564330
uuugaccuguaucuugaaa

SEQ ID NO: 1871702 - RNA, 19 nt, Artificial Sequence
  Description of Artificial Sequence: Synthetic oligonucleotide
  Antisense strand to SEQ ID NO: 1871701
uuucaagauacaggucaaa

SEQ ID NO: 1871703 - RNA, 19 nt, Artificial Sequence
  Description of Artificial Sequence: Synthetic oligonucleotide
  Sense strand starting at position 2862 of SEQ ID NO: 1564330
auaguauguguucagugau

SEQ ID NO: 1871704 - RNA, 19 nt, Artificial Sequence
  Description of Artificial Sequence: Synthetic oligonucleotide
  Antisense strand to SEQ ID NO: 1871703
aucacugaacacauacuau

SEQ ID NO: 1871705 - RNA, 19 nt, Artificial Sequence
  Description of Artificial Sequence: Synthetic oligonucleotide
  Sense strand starting at position 2976 of SEQ ID NO: 1564330
caggauggguguuuggaga

SEQ ID NO: 1871706 - RNA, 19 nt, Artificial Sequence
  Description of Artificial Sequence: Synthetic oligonucleotide
  Antisense strand to SEQ ID NO: 1871705
ucuccaaacacccauccug

SEQ ID NO: 1871707 - RNA, 19 nt, Artificial Sequence
  Description of Artificial Sequence: Synthetic oligonucleotide
  Sense strand starting at position 3160 of SEQ ID NO: 1564330
cuauuaauaccuugcagug

SEQ ID NO: 1871708 - RNA, 19 nt, Artificial Sequence
  Description of Artificial Sequence: Synthetic oligonucleotide
  Antisense strand to SEQ ID NO: 1871707
cacugcaagguauuaauag

SEQ ID NO: 1871709 - RNA, 19 nt, Artificial Sequence
  Description of Artificial Sequence: Synthetic oligonucleotide
  Sense strand starting at position 3165 of SEQ ID NO: 1564330
aauaccuugcaguggaauu

SEQ ID NO: 1871710 - RNA, 19 nt, Artificial Sequence
  Description of Artificial Sequence: Synthetic oligonucleotide
  Antisense strand to SEQ ID NO: 1871709
aauuccacugcaagguauu

SEQ ID NO: 1871711 - RNA, 19 nt, Artificial Sequence
  Description of Artificial Sequence: Synthetic oligonucleotide
  Sense strand starting at position 3341 of SEQ ID NO: 1564330
aaaguaaagccacauggua

SEQ ID NO: 1871712 - RNA, 19 nt, Artificial Sequence
  Description of Artificial Sequence: Synthetic oligonucleotide
  Antisense strand to SEQ ID NO: 1871711
uaccauguggcuuuacuuu

SEQ ID NO: 1871713 - RNA, 19 nt, Artificial Sequence
  Description of Artificial Sequence: Synthetic oligonucleotide
  Sense strand starting at position 3377 of SEQ ID NO: 1564330
gguauaauauagcuguauu

SEQ ID NO: 1871714 - RNA, 19 nt, Artificial Sequence
  Description of Artificial Sequence: Synthetic oligonucleotide
  Antisense strand to SEQ ID NO: 1871713
aauacagcuauauuauacc

SEQ ID NO: 1871715 - RNA, 19 nt, Artificial Sequence
  Description of Artificial Sequence: Synthetic oligonucleotide
  Sense strand starting at position 3458 of SEQ ID NO: 1564330
cuaugugggaauuauugca

SEQ ID NO: 1871716 - RNA, 19 nt, Artificial Sequence
  Description of Artificial Sequence: Synthetic oligonucleotide
  Antisense strand to SEQ ID NO: 1871715
ugcaauaauucccacauag

SEQ ID NO: 1871717 - RNA, 19 nt, Artificial Sequence
  Description of Artificial Sequence: Synthetic oligonucleotide
  Sense strand starting at position 3595 of SEQ ID NO: 1564330
ccuggcaacugaguacuua

SEQ ID NO: 1871718 - RNA, 19 nt, Artificial Sequence
  Description of Artificial Sequence: Synthetic oligonucleotide
  Antisense strand to SEQ ID NO: 1871717
uaaguacucaguugccagg

SEQ ID NO: 1871719 - RNA, 19 nt, Artificial Sequence
  Description of Artificial Sequence: Synthetic oligonucleotide
  Sense strand starting at position 3596 of SEQ ID NO: 1564330
cuggcaacugaguacuuaa

SEQ ID NO: 1871720 - RNA, 19 nt, Artificial Sequence
  Description of Artificial Sequence: Synthetic oligonucleotide
  Antisense strand to SEQ ID NO: 1871719
uuaaguacucaguugccag

SEQ ID NO: 1871721 - RNA, 19 nt, Artificial Sequence
  Description of Artificial Sequence: Synthetic oligonucleotide
  Sense strand starting at position 3599 of SEQ ID NO: 1564330
gcaacugaguacuuaauaa

SEQ ID NO: 1871722 - RNA, 19 nt, Artificial Sequence
  Description of Artificial Sequence: Synthetic oligonucleotide
  Antisense strand to SEQ ID NO: 1871721
uuauuaaguacucaguugc

SEQ ID NO: 1871723 - RNA, 19 nt, Artificial Sequence
  Description of Artificial Sequence: Synthetic oligonucleotide
  Sense strand starting at position 3764 of SEQ ID NO: 1564330
uacagaucacaguggcaau

SEQ ID NO: 1871724 - RNA, 19 nt, Artificial Sequence
  Description of Artificial Sequence: Synthetic oligonucleotide
  Antisense strand to SEQ ID NO: 1871723
auugccacugugaucugua

SEQ ID NO: 1871725 - RNA, 19 nt, Artificial Sequence
  Description of Artificial Sequence: Synthetic oligonucleotide
  Sense strand starting at position 3884 of SEQ ID NO: 1564330
acagaauugccaugccauu

SEQ ID NO: 1871726 - RNA, 19 nt, Artificial Sequence
  Description of Artificial Sequence: Synthetic oligonucleotide
  Antisense strand to SEQ ID NO: 1871725
aauggcauggcaauucugu

SEQ ID NO: 1871727 - RNA, 19 nt, Artificial Sequence
  Description of Artificial Sequence: Synthetic oligonucleotide
  Sense strand starting at position 54 of SEQ ID NO: 1564331
aagggauuccuauggcucu

SEQ ID NO: 1871728 - RNA, 19 nt, Artificial Sequence
  Description of Artificial Sequence: Synthetic oligonucleotide
  Antisense strand to SEQ ID NO: 1871727
agagccauaggaaucccuu

SEQ ID NO: 1871729 - RNA, 19 nt, Artificial Sequence
  Description of Artificial Sequence: Synthetic oligonucleotide
  Sense strand starting at position 130 of SEQ ID NO: 1564331
auagguauuaugugagucu

SEQ ID NO: 1871730 - RNA, 19 nt, Artificial Sequence
  Description of Artificial Sequence: Synthetic oligonucleotide
  Antisense strand to SEQ ID NO: 1871729
agacucacauaauaccuau

SEQ ID NO: 1871731 - RNA, 19 nt, Artificial Sequence
  Description of Artificial Sequence: Synthetic oligonucleotide
  Sense strand starting at position 257 of SEQ ID NO: 1564331
agcuguguucuuucugcaa

SEQ ID NO: 1871732 - RNA, 19 nt, Artificial Sequence
  Description of Artificial Sequence: Synthetic oligonucleotide
  Antisense strand to SEQ ID NO: 1871731
uugcagaaagaacacagcu

SEQ ID NO: 1871733 - RNA, 19 nt, Artificial Sequence
  Description of Artificial Sequence: Synthetic oligonucleotide
  Sense strand starting at position 360 of SEQ ID NO: 1564331
gaaacaguccaauggguga

SEQ ID NO: 1871734 - RNA, 19 nt, Artificial Sequence
  Description of Artificial Sequence: Synthetic oligonucleotide
  Antisense strand to SEQ ID NO: 1871733
ucacccauuggacuguuuc

SEQ ID NO: 1871735 - RNA, 19 nt, Artificial Sequence
  Description of Artificial Sequence: Synthetic oligonucleotide
  Sense strand starting at position 364 of SEQ ID NO: 1564331
caguccaaugggugagaaa

SEQ ID NO: 1871736 - RNA, 19 nt, Artificial Sequence
  Description of Artificial Sequence: Synthetic oligonucleotide
  Antisense strand to SEQ ID NO: 1871735
uuucucacccauuggacug

SEQ ID NO: 1871737 - RNA, 19 nt, Artificial Sequence
  Description of Artificial Sequence: Synthetic oligonucleotide
  Sense strand starting at position 494 of SEQ ID NO: 1564331
aggcacuugugauuacauu

SEQ ID NO: 1871738 - RNA, 19 nt, Artificial Sequence
  Description of Artificial Sequence: Synthetic oligonucleotide
  Antisense strand to SEQ ID NO: 1871737
aauguaaucacaagugccu

SEQ ID NO: 1871739 - RNA, 19 nt, Artificial Sequence
  Description of Artificial Sequence: Synthetic oligonucleotide
  Sense strand starting at position 495 of SEQ ID NO: 1564331
ggcacuugugauuacauua

SEQ ID NO: 1871740 - RNA, 19 nt, Artificial Sequence
  Description of Artificial Sequence: Synthetic oligonucleotide
  Antisense strand to SEQ ID NO: 1871739
uaauguaaucacaagugcc

SEQ ID NO: 1871741 - RNA, 19 nt, Artificial Sequence
  Description of Artificial Sequence: Synthetic oligonucleotide
  Sense strand starting at position 511 of SEQ ID NO: 1564331
uuaggcccacuuugauaau

SEQ ID NO: 1871742 - RNA, 19 nt, Artificial Sequence
  Description of Artificial Sequence: Synthetic oligonucleotide
  Antisense strand to SEQ ID NO: 1871741
auuaucaaagugggccuaa

SEQ ID NO: 1871743 - RNA, 19 nt, Artificial Sequence
  Description of Artificial Sequence: Synthetic oligonucleotide
  Sense strand starting at position 521 of SEQ ID NO: 1564331
uuugauaauccaggguaau

SEQ ID NO: 1871744 - RNA, 19 nt, Artificial Sequence
  Description of Artificial Sequence: Synthetic oligonucleotide
  Antisense strand to SEQ ID NO: 1871743
auuacccuggauuaucaaa

SEQ ID NO: 1871745 - RNA, 19 nt, Artificial Sequence
  Description of Artificial Sequence: Synthetic oligonucleotide
  Sense strand starting at position 532 of SEQ ID NO: 1564331
aggguaaucucucccaucu

SEQ ID NO: 1871746 - RNA, 19 nt, Artificial Sequence
  Description of Artificial Sequence: Synthetic oligonucleotide
  Antisense strand to SEQ ID NO: 1871745
agaugggagagauuacccu

SEQ ID NO: 1871747 - RNA, 19 nt, Artificial Sequence
  Description of Artificial Sequence: Synthetic oligonucleotide
  Sense strand starting at position 704 of SEQ ID NO: 1564331
uuaggaaguucuuugugga

SEQ ID NO: 1871748 - RNA, 19 nt, Artificial Sequence
  Description of Artificial Sequence: Synthetic oligonucleotide
  Antisense strand to SEQ ID NO: 1871747
uccacaaagaacuuccuaa

SEQ ID NO: 1871749 - RNA, 19 nt, Artificial Sequence
  Description of Artificial Sequence: Synthetic oligonucleotide
  Sense strand starting at position 705 of SEQ ID NO: 1564331
uaggaaguucuuuguggag

SEQ ID NO: 1871750 - RNA, 19 nt, Artificial Sequence
  Description of Artificial Sequence: Synthetic oligonucleotide
  Antisense strand to SEQ ID NO: 1871749
cuccacaaagaacuuccua

SEQ ID NO: 1871751 - RNA, 19 nt, Artificial Sequence
  Description of Artificial Sequence: Synthetic oligonucleotide
  Sense strand starting at position 732 of SEQ ID NO: 1564331
uucugaaggcuaugaagau

SEQ ID NO: 1871752 - RNA, 19 nt, Artificial Sequence
  Description of Artificial Sequence: Synthetic oligonucleotide
  Antisense strand to SEQ ID NO: 1871751
aucuucauagccuucagaa

SEQ ID NO: 1871753 - RNA, 19 nt, Artificial Sequence
  Description of Artificial Sequence: Synthetic oligonucleotide
  Sense strand starting at position 846 of SEQ ID NO: 1564331
auguaaaugcaguaagcau

SEQ ID NO: 1871754 - RNA, 19 nt, Artificial Sequence
  Description of Artificial Sequence: Synthetic oligonucleotide
  Antisense strand to SEQ ID NO: 1871753
augcuuacugcauuuacau

SEQ ID NO: 1871755 - RNA, 19 nt, Artificial Sequence
  Description of Artificial Sequence: Synthetic oligonucleotide
  Sense strand starting at position 853 of SEQ ID NO: 1564331
ugcaguaagcaugagagau

SEQ ID NO: 1871756 - RNA, 19 nt, Artificial Sequence
  Description of Artificial Sequence: Synthetic oligonucleotide
  Antisense strand to SEQ ID NO: 1871755
aucucucaugcuuacugca

SEQ ID NO: 1871757 - RNA, 19 nt, Artificial Sequence
  Description of Artificial Sequence: Synthetic oligonucleotide
  Sense strand starting at position 857 of SEQ ID NO: 1564331
guaagcaugagagaugcaa

SEQ ID NO: 1871758 - RNA, 19 nt, Artificial Sequence
  Description of Artificial Sequence: Synthetic oligonucleotide
  Antisense strand to SEQ ID NO: 1871757
uugcaucucucaugcuuac

SEQ ID NO: 1871759 - RNA, 19 nt, Artificial Sequence
  Description of Artificial Sequence: Synthetic oligonucleotide
  Sense strand starting at position 953 of SEQ ID NO: 1564331
aguugagaguuacugaaag

SEQ ID NO: 1871760 - RNA, 19 nt, Artificial Sequence
  Description of Artificial Sequence: Synthetic oligonucleotide
  Antisense strand to SEQ ID NO: 1871759
cuuucaguaacucucaacu

SEQ ID NO: 1871761 - RNA, 19 nt, Artificial Sequence
  Description of Artificial Sequence: Synthetic oligonucleotide
  Sense strand starting at position 1014 of SEQ ID NO: 1564331
ucaggaugguuagucuagu

SEQ ID NO: 1871762 - RNA, 19 nt, Artificial Sequence
  Description of Artificial Sequence: Synthetic oligonucleotide
  Antisense strand to SEQ ID NO: 1871761
acuagacuaaccauccuga

SEQ ID NO: 1871763 - RNA, 19 nt, Artificial Sequence
  Description of Artificial Sequence: Synthetic oligonucleotide
  Sense strand starting at position 1015 of SEQ ID NO: 1564331
caggaugguuagucuagua

SEQ ID NO: 1871764 - RNA, 19 nt, Artificial Sequence
  Description of Artificial Sequence: Synthetic oligonucleotide
  Antisense strand to SEQ ID NO: 1871763
uacuagacuaaccauccug

SEQ ID NO: 1871765 - RNA, 19 nt, Artificial Sequence
  Description of Artificial Sequence: Synthetic oligonucleotide
  Sense strand starting at position 1025 of SEQ ID NO: 1564331
agucuaguaaaguagggau

SEQ ID NO: 1871766 - RNA, 19 nt, Artificial Sequence
  Description of Artificial Sequence: Synthetic oligonucleotide
  Antisense strand to SEQ ID NO: 1871765
aucccuacuuuacuagacu

SEQ ID NO: 1871767 - RNA, 19 nt, Artificial Sequence
  Description of Artificial Sequence: Synthetic oligonucleotide
  Sense strand starting at position 1078 of SEQ ID NO: 1564331
ggcuaugucuccucugaag

SEQ ID NO: 1871768 - RNA, 19 nt, Artificial Sequence
  Description of Artificial Sequence: Synthetic oligonucleotide
  Antisense strand to SEQ ID NO: 1871767
cuucagaggagacauagcc

SEQ ID NO: 1871769 - RNA, 19 nt, Artificial Sequence
  Description of Artificial Sequence: Synthetic oligonucleotide
  Sense strand starting at position 1093 of SEQ ID NO: 1564331
gaagcaucaucacugaugu

SEQ ID NO: 1871770 - RNA, 19 nt, Artificial Sequence
  Description of Artificial Sequence: Synthetic oligonucleotide
  Antisense strand to SEQ ID NO: 1871769
acaucagugaugaugcuuc

SEQ ID NO: 1871771 - RNA, 19 nt, Artificial Sequence
  Description of Artificial Sequence: Synthetic oligonucleotide
  Sense strand starting at position 1112 of SEQ ID NO: 1564331
cgaagcugccuuuagaaca

SEQ ID NO: 1871772 - RNA, 19 nt, Artificial Sequence
  Description of Artificial Sequence: Synthetic oligonucleotide
  Antisense strand to SEQ ID NO: 1871771
uguucuaaaggcagcuucg

SEQ ID NO: 1871773 - RNA, 19 nt, Artificial Sequence
  Description of Artificial Sequence: Synthetic oligonucleotide
  Sense strand starting at position 2035 of SEQ ID NO: 1564331
agcgauggugcaagaguuu

SEQ ID NO: 1871774 - RNA, 19 nt, Artificial Sequence
  Description of Artificial Sequence: Synthetic oligonucleotide
  Antisense strand to SEQ ID NO: 1871773
aaacucuugcaccaucgcu

SEQ ID NO: 1871775 - RNA, 19 nt, Artificial Sequence
  Description of Artificial Sequence: Synthetic oligonucleotide
  Sense strand starting at position 2154 of SEQ ID NO: 1564331
agagguuucuucuuaagaa

SEQ ID NO: 1871776 - RNA, 19 nt, Artificial Sequence
  Description of Artificial Sequence: Synthetic oligonucleotide
  Antisense strand to SEQ ID NO: 1871775
uucuuaagaagaaaccucu

SEQ ID NO: 1871777 - RNA, 19 nt, Artificial Sequence
  Description of Artificial Sequence: Synthetic oligonucleotide
  Sense strand starting at position 2427 of SEQ ID NO: 1564331
ggugcaagaauauguauau

SEQ ID NO: 1871778 - RNA, 19 nt, Artificial Sequence
  Description of Artificial Sequence: Synthetic oligonucleotide
  Antisense strand to SEQ ID NO: 1871777
auauacauauucuugcacc

SEQ ID NO: 1871779 - RNA, 19 nt, Artificial Sequence
  Description of Artificial Sequence: Synthetic oligonucleotide
  Sense strand starting at position 2428 of SEQ ID NO: 1564331
gugcaagaauauguauaua

SEQ ID NO: 1871780 - RNA, 19 nt, Artificial Sequence
  Description of Artificial Sequence: Synthetic oligonucleotide
  Antisense strand to SEQ ID NO: 1871779
uauauacauauucuugcac

SEQ ID NO: 1871781 - RNA, 19 nt, Artificial Sequence
  Description of Artificial Sequence: Synthetic oligonucleotide
  Sense strand starting at position 2465 of SEQ ID NO: 1564331
uggaaagacucucuuucuu

SEQ ID NO: 1871782 - RNA, 19 nt, Artificial Sequence
  Description of Artificial Sequence: Synthetic oligonucleotide
  Antisense strand to SEQ ID NO: 1871781
aagaaagagagucuuucca

SEQ ID NO: 1871783 - RNA, 19 nt, Artificial Sequence
  Description of Artificial Sequence: Synthetic oligonucleotide
  Sense strand starting at position 2493 of SEQ ID NO: 1564331
caggaaguguuuccagauc

SEQ ID NO: 1871784 - RNA, 19 nt, Artificial Sequence
  Description of Artificial Sequence: Synthetic oligonucleotide
  Antisense strand to SEQ ID NO: 1871783
gaucuggaaacacuuccug

SEQ ID NO: 1871785 - RNA, 19 nt, Artificial Sequence
  Description of Artificial Sequence: Synthetic oligonucleotide
  Sense strand starting at position 2973 of SEQ ID NO: 1564331
ggcuguaaggguuaacaga

SEQ ID NO: 1871786 - RNA, 19 nt, Artificial Sequence
  Description of Artificial Sequence: Synthetic oligonucleotide
  Antisense strand to SEQ ID NO: 1871785
ucuguuaacccuuacagcc

SEQ ID NO: 1871787 - RNA, 19 nt, Artificial Sequence
  Description of Artificial Sequence: Synthetic oligonucleotide
  Sense strand starting at position 2984 of SEQ ID NO: 1564331
uuaacagagagguguguuu

SEQ ID NO: 1871788 - RNA, 19 nt, Artificial Sequence
  Description of Artificial Sequence: Synthetic oligonucleotide
  Antisense strand to SEQ ID NO: 1871787
aaacacaccucucuguuaa

SEQ ID NO: 1871789 - RNA, 19 nt, Artificial Sequence
  Description of Artificial Sequence: Synthetic oligonucleotide
  Sense strand starting at position 3506 of SEQ ID NO: 1564331
ccucuaaugguuugaagaa

SEQ ID NO: 1871790 - RNA, 19 nt, Artificial Sequence
  Description of Artificial Sequence: Synthetic oligonucleotide
  Antisense strand to SEQ ID NO: 1871789
uucuucaaaccauuagagg

SEQ ID NO: 1871791 - RNA, 19 nt, Artificial Sequence
  Description of Artificial Sequence: Synthetic oligonucleotide
  Sense strand starting at position 3518 of SEQ ID NO: 1564331
ugaagaaugcuaugcauaa

SEQ ID NO: 1871792 - RNA, 19 nt, Artificial Sequence
  Description of Artificial Sequence: Synthetic oligonucleotide
  Antisense strand to SEQ ID NO: 1871791
uuaugcauagcauucuuca

SEQ ID NO: 1871793 - RNA, 19 nt, Artificial Sequence
  Description of Artificial Sequence: Synthetic oligonucleotide
  Sense strand starting at position 3539 of SEQ ID NO: 1564331
gcaugcuuacuuuaggaau

SEQ ID NO: 1871794 - RNA, 19 nt, Artificial Sequence
  Description of Artificial Sequence: Synthetic oligonucleotide
  Antisense strand to SEQ ID NO: 1871793
auuccuaaaguaagcaugc

SEQ ID NO: 1871795 - RNA, 19 nt, Artificial Sequence
  Description of Artificial Sequence: Synthetic oligonucleotide
  Sense strand starting at position 3553 of SEQ ID NO: 1564331
ggaaucacauuuggaaaca

SEQ ID NO: 1871796 - RNA, 19 nt, Artificial Sequence
  Description of Artificial Sequence: Synthetic oligonucleotide
  Antisense strand to SEQ ID NO: 1871795
uguuuccaaaugugauucc

SEQ ID NO: 1871797 - RNA, 19 nt, Artificial Sequence
  Description of Artificial Sequence: Synthetic oligonucleotide
  Sense strand starting at position 3573 of SEQ ID NO: 1564331
agccaaacguaaucaacau

SEQ ID NO: 1871798 - RNA, 19 nt, Artificial Sequence
  Description of Artificial Sequence: Synthetic oligonucleotide
  Antisense strand to SEQ ID NO: 1871797
auguugauuacguuuggcu

SEQ ID NO: 1871799 - RNA, 19 nt, Artificial Sequence
  Description of Artificial Sequence: Synthetic oligonucleotide
  Sense strand starting at position 3668 of SEQ ID NO: 1564331
cuuagugaauuagucaaca

SEQ ID NO: 1871800 - RNA, 19 nt, Artificial Sequence
  Description of Artificial Sequence: Synthetic oligonucleotide
  Antisense strand to SEQ ID NO: 1871799
uguugacuaauucacuaag

SEQ ID NO: 1871801 - RNA, 19 nt, Artificial Sequence
  Description of Artificial Sequence: Synthetic oligonucleotide
  Sense strand starting at position 3907 of SEQ ID NO: 1564331
uggaccauagaauguuuau

SEQ ID NO: 1871802 - RNA, 19 nt, Artificial Sequence
  Description of Artificial Sequence: Synthetic oligonucleotide
  Antisense strand to SEQ ID NO: 1871801
auaaacauucuauggucca

SEQ ID NO: 1871803 - RNA, 19 nt, Artificial Sequence
  Description of Artificial Sequence: Synthetic oligonucleotide
  Sense strand starting at position 3942 of SEQ ID NO: 1564331
uuuaguucuguccaaauug

SEQ ID NO: 1871804 - RNA, 19 nt, Artificial Sequence
  Description of Artificial Sequence: Synthetic oligonucleotide
  Antisense strand to SEQ ID NO: 1871803
caauuuggacagaacuaaa

SEQ ID NO: 1871805 - RNA, 19 nt, Artificial Sequence
  Description of Artificial Sequence: Synthetic oligonucleotide
  Sense strand starting at position 3958 of SEQ ID NO: 1564331
uugucauuggugugaauaa

SEQ ID NO: 1871806 - RNA, 19 nt, Artificial Sequence
  Description of Artificial Sequence: Synthetic oligonucleotide
  Antisense strand to SEQ ID NO: 1871805
uuauucacaccaaugacaa

SEQ ID NO: 1871807 - RNA, 19 nt, Artificial Sequence
  Description of Artificial Sequence: Synthetic oligonucleotide
  Sense strand starting at position 61 of SEQ ID NO: 1564332
ucuuguugugucgccuaga

SEQ ID NO: 1871808 - RNA, 19 nt, Artificial Sequence
  Description of Artificial Sequence: Synthetic oligonucleotide
  Antisense strand to SEQ ID NO: 1871807
ucuaggcgacacaacaaga

SEQ ID NO: 1871809 - RNA, 19 nt, Artificial Sequence
  Description of Artificial Sequence: Synthetic oligonucleotide
  Sense strand starting at position 634 of SEQ ID NO: 1564332
acuggauauuuacauguua

SEQ ID NO: 1871810 - RNA, 19 nt, Artificial Sequence
  Description of Artificial Sequence: Synthetic oligonucleotide
  Antisense strand to SEQ ID NO: 1871809
uaacauguaaauauccagu

SEQ ID NO: 1871811 - RNA, 19 nt, Artificial Sequence
  Description of Artificial Sequence: Synthetic oligonucleotide
  Sense strand starting at position 648 of SEQ ID NO: 1564332
uguuaauuaacuggagggu

SEQ ID NO: 1871812 - RNA, 19 nt, Artificial Sequence
  Description of Artificial Sequence: Synthetic oligonucleotide
  Antisense strand to SEQ ID NO: 1871811
acccuccaguuaauuaaca

SEQ ID NO: 1871813 - RNA, 19 nt, Artificial Sequence
  Description of Artificial Sequence: Synthetic oligonucleotide
  Sense strand starting at position 649 of SEQ ID NO: 1564332
guuaauuaacuggaggguu

SEQ ID NO: 1871814 - RNA, 19 nt, Artificial Sequence
  Description of Artificial Sequence: Synthetic oligonucleotide
  Antisense strand to SEQ ID NO: 1871813
aacccuccaguuaauuaac

SEQ ID NO: 1871815 - RNA, 19 nt, Artificial Sequence
  Description of Artificial Sequence: Synthetic oligonucleotide
  Sense strand starting at position 651 of SEQ ID NO: 1564332
uaauuaacuggaggguuua

SEQ ID NO: 1871816 - RNA, 19 nt, Artificial Sequence
  Description of Artificial Sequence: Synthetic oligonucleotide
  Antisense strand to SEQ ID NO: 1871815
uaaacccuccaguuaauua

SEQ ID NO: 1871817 - RNA, 19 nt, Artificial Sequence
  Description of Artificial Sequence: Synthetic oligonucleotide
  Sense strand starting at position 652 of SEQ ID NO: 1564332
aauuaacuggaggguuuau

SEQ ID NO: 1871818 - RNA, 19 nt, Artificial Sequence
  Description of Artificial Sequence: Synthetic oligonucleotide
  Antisense strand to SEQ ID NO: 1871817
auaaacccuccaguuaauu

SEQ ID NO: 1871819 - RNA, 19 nt, Artificial Sequence
  Description of Artificial Sequence: Synthetic oligonucleotide
  Sense strand starting at position 697 of SEQ ID NO: 1564332
ugggaaauaugucuaagca

SEQ ID NO: 1871820 - RNA, 19 nt, Artificial Sequence
  Description of Artificial Sequence: Synthetic oligonucleotide
  Antisense strand to SEQ ID NO: 1871819
ugcuuagacauauuuccca

SEQ ID NO: 1871821 - RNA, 19 nt, Artificial Sequence
  Description of Artificial Sequence: Synthetic oligonucleotide
  Sense strand starting at position 707 of SEQ ID NO: 1564332
gucuaagcacuuuauagau

SEQ ID NO: 1871822 - RNA, 19 nt, Artificial Sequence
  Description of Artificial Sequence: Synthetic oligonucleotide
  Antisense strand to SEQ ID NO: 1871821
aucuauaaagugcuuagac

SEQ ID NO: 1871823 - RNA, 19 nt, Artificial Sequence
  Description of Artificial Sequence: Synthetic oligonucleotide
  Sense strand starting at position 717 of SEQ ID NO: 1564332
uuuauagaucuagaugugu

SEQ ID NO: 1871824 - RNA, 19 nt, Artificial Sequence
  Description of Artificial Sequence: Synthetic oligonucleotide
  Antisense strand to SEQ ID NO: 1871823
acacaucuagaucuauaaa

SEQ ID NO: 1871825 - RNA, 19 nt, Artificial Sequence
  Description of Artificial Sequence: Synthetic oligonucleotide
  Sense strand starting at position 819 of SEQ ID NO: 1564332
cuuagaggacuuugaaugu

SEQ ID NO: 1871826 - RNA, 19 nt, Artificial Sequence
  Description of Artificial Sequence: Synthetic oligonucleotide
  Antisense strand to SEQ ID NO: 1871825
acauucaaaguccucuaag

SEQ ID NO: 1871827 - RNA, 19 nt, Artificial Sequence
  Description of Artificial Sequence: Synthetic oligonucleotide
  Sense strand starting at position 1271 of SEQ ID NO: 1564332
gaaguaagagauugcaguu

SEQ ID NO: 1871828 - RNA, 19 nt, Artificial Sequence
  Description of Artificial Sequence: Synthetic oligonucleotide
  Antisense strand to SEQ ID NO: 1871827
aacugcaaucucuuacuuc

SEQ ID NO: 1871829 - RNA, 19 nt, Artificial Sequence
  Description of Artificial Sequence: Synthetic oligonucleotide
  Sense strand starting at position 1445 of SEQ ID NO: 1564332
gccagaaggaagugagauu

SEQ ID NO: 1871830 - RNA, 19 nt, Artificial Sequence
  Description of Artificial Sequence: Synthetic oligonucleotide
  Antisense strand to SEQ ID NO: 1871829
aaucucacuuccuucuggc

SEQ ID NO: 1871831 - RNA, 19 nt, Artificial Sequence
  Description of Artificial Sequence: Synthetic oligonucleotide
  Sense strand starting at position 1481 of SEQ ID NO: 1564332
cugguagaaguaugagaac

SEQ ID NO: 1871832 - RNA, 19 nt, Artificial Sequence
  Description of Artificial Sequence: Synthetic oligonucleotide
  Antisense strand to SEQ ID NO: 1871831
guucucauacuucuaccag

SEQ ID NO: 1871833 - RNA, 19 nt, Artificial Sequence
  Description of Artificial Sequence: Synthetic oligonucleotide
  Sense strand starting at position 1547 of SEQ ID NO: 1564332
uguugcaguagucaagaau

SEQ ID NO: 1871834 - RNA, 19 nt, Artificial Sequence
  Description of Artificial Sequence: Synthetic oligonucleotide
  Antisense strand to SEQ ID NO: 1871833
auucuugacuacugcaaca

SEQ ID NO: 1871835 - RNA, 19 nt, Artificial Sequence
  Description of Artificial Sequence: Synthetic oligonucleotide
  Sense strand starting at position 1560 of SEQ ID NO: 1564332
aagaauuguuaggcccuau

SEQ ID NO: 1871836 - RNA, 19 nt, Artificial Sequence
  Description of Artificial Sequence: Synthetic oligonucleotide
  Antisense strand to SEQ ID NO: 1871835
auagggccuaacaauucuu

SEQ ID NO: 1871837 - RNA, 19 nt, Artificial Sequence
  Description of Artificial Sequence: Synthetic oligonucleotide
  Sense strand starting at position 1564 of SEQ ID NO: 1564332
auuguuaggcccuauuaag

SEQ ID NO: 1871838 - RNA, 19 nt, Artificial Sequence
  Description of Artificial Sequence: Synthetic oligonucleotide
  Antisense strand to SEQ ID NO: 1871837
cuuaauagggccuaacaau

SEQ ID NO: 1871839 - RNA, 19 nt, Artificial Sequence
  Description of Artificial Sequence: Synthetic oligonucleotide
  Sense strand starting at position 1572 of SEQ ID NO: 1564332
gcccuauuaagggagguga

SEQ ID NO: 1871840 - RNA, 19 nt, Artificial Sequence
  Description of Artificial Sequence: Synthetic oligonucleotide
  Antisense strand to SEQ ID NO: 1871839
ucaccucccuuaauagggc

SEQ ID NO: 1871841 - RNA, 19 nt, Artificial Sequence
  Description of Artificial Sequence: Synthetic oligonucleotide
  Sense strand starting at position 1600 of SEQ ID NO: 1564332
accugaguuaugcagacga

SEQ ID NO: 1871842 - RNA, 19 nt, Artificial Sequence
  Description of Artificial Sequence: Synthetic oligonucleotide
  Antisense strand to SEQ ID NO: 1871841
ucgucugcauaacucaggu

SEQ ID NO: 1871843 - RNA, 19 nt, Artificial Sequence
  Description of Artificial Sequence: Synthetic oligonucleotide
  Sense strand starting at position 1608 of SEQ ID NO: 1564332
uaugcagacgagugacaua

SEQ ID NO: 1871844 - RNA, 19 nt, Artificial Sequence
  Description of Artificial Sequence: Synthetic oligonucleotide
  Antisense strand to SEQ ID NO: 1871843
uaugucacucgucugcaua

SEQ ID NO: 1871845 - RNA, 19 nt, Artificial Sequence
  Description of Artificial Sequence: Synthetic oligonucleotide
  Sense strand starting at position 1659 of SEQ ID NO: 1564332
agcccuugugaaggaugaa

SEQ ID NO: 1871846 - RNA, 19 nt, Artificial Sequence
  Description of Artificial Sequence: Synthetic oligonucleotide
  Antisense strand to SEQ ID NO: 1871845
uucauccuucacaagggcu

SEQ ID NO: 1871847 - RNA, 19 nt, Artificial Sequence
  Description of Artificial Sequence: Synthetic oligonucleotide
  Sense strand starting at position 1660 of SEQ ID NO: 1564332
gcccuugugaaggaugaau

SEQ ID NO: 1871848 - RNA, 19 nt, Artificial Sequence
  Description of Artificial Sequence: Synthetic oligonucleotide
  Antisense strand to SEQ ID NO: 1871847
auucauccuucacaagggc

SEQ ID NO: 1871849 - RNA, 19 nt, Artificial Sequence
  Description of Artificial Sequence: Synthetic oligonucleotide
  Sense strand starting at position 1691 of SEQ ID NO: 1564332
gacaaauacguaggcaaau

SEQ ID NO: 1871850 - RNA, 19 nt, Artificial Sequence
  Description of Artificial Sequence: Synthetic oligonucleotide
  Antisense strand to SEQ ID NO: 1871849
auuugccuacguauuuguc

SEQ ID NO: 1871851 - RNA, 19 nt, Artificial Sequence
  Description of Artificial Sequence: Synthetic oligonucleotide
  Sense strand starting at position 1692 of SEQ ID NO: 1564332
acaaauacguaggcaaaua

SEQ ID NO: 1871852 - RNA, 19 nt, Artificial Sequence
  Description of Artificial Sequence: Synthetic oligonucleotide
  Antisense strand to SEQ ID NO: 1871851
uauuugccuacguauuugu

SEQ ID NO: 1871853 - RNA, 19 nt, Artificial Sequence
  Description of Artificial Sequence: Synthetic oligonucleotide
  Sense strand starting at position 1765 of SEQ ID NO: 1564332
uugggacugucacucuuaa

SEQ ID NO: 1871854 - RNA, 19 nt, Artificial Sequence
  Description of Artificial Sequence: Synthetic oligonucleotide
  Antisense strand to SEQ ID NO: 1871853
uuaagagugacagucccaa

SEQ ID NO: 1871855 - RNA, 19 nt, Artificial Sequence
  Description of Artificial Sequence: Synthetic oligonucleotide
  Sense strand starting at position 2592 of SEQ ID NO: 1564332
gagcgaaucgcugcuuucu

SEQ ID NO: 1871856 - RNA, 19 nt, Artificial Sequence
  Description of Artificial Sequence: Synthetic oligonucleotide
  Antisense strand to SEQ ID NO: 1871855
agaaagcagcgauucgcuc

SEQ ID NO: 1871857 - RNA, 19 nt, Artificial Sequence
  Description of Artificial Sequence: Synthetic oligonucleotide
  Sense strand starting at position 2600 of SEQ ID NO: 1564332
cgcugcuuucuccugcaga

SEQ ID NO: 1871858 - RNA, 19 nt, Artificial Sequence
  Description of Artificial Sequence: Synthetic oligonucleotide
  Antisense strand to SEQ ID NO: 1871857
ucugcaggagaaagcagcg

SEQ ID NO: 1871859 - RNA, 19 nt, Artificial Sequence
  Description of Artificial Sequence: Synthetic oligonucleotide
  Sense strand starting at position 2765 of SEQ ID NO: 1564332
gccauagaugcugauaauu

SEQ ID NO: 1871860 - RNA, 19 nt, Artificial Sequence
  Description of Artificial Sequence: Synthetic oligonucleotide
  Antisense strand to SEQ ID NO: 1871859
aauuaucagcaucuauggc

SEQ ID NO: 1871861 - RNA, 19 nt, Artificial Sequence
  Description of Artificial Sequence: Synthetic oligonucleotide
  Sense strand starting at position 2775 of SEQ ID NO: 1564332
cugauaauucuacguacag

SEQ ID NO: 1871862 - RNA, 19 nt, Artificial Sequence
  Description of Artificial Sequence: Synthetic oligonucleotide
  Antisense strand to SEQ ID NO: 1871861
cuguacguagaauuaucag

SEQ ID NO: 1871863 - RNA, 19 nt, Artificial Sequence
  Description of Artificial Sequence: Synthetic oligonucleotide
  Sense strand starting at position 2805 of SEQ ID NO: 1564332
gauuccugauucguggaca

SEQ ID NO: 1871864 - RNA, 19 nt, Artificial Sequence
  Description of Artificial Sequence: Synthetic oligonucleotide
  Antisense strand to SEQ ID NO: 1871863
uguccacgaaucaggaauc

SEQ ID NO: 1871865 - RNA, 19 nt, Artificial Sequence
  Description of Artificial Sequence: Synthetic oligonucleotide
  Sense strand starting at position 2808 of SEQ ID NO: 1564332
uccugauucguggacagac

SEQ ID NO: 1871866 - RNA, 19 nt, Artificial Sequence
  Description of Artificial Sequence: Synthetic oligonucleotide
  Antisense strand to SEQ ID NO: 1871865
gucuguccacgaaucagga

SEQ ID NO: 1871867 - RNA, 19 nt, Artificial Sequence
  Description of Artificial Sequence: Synthetic oligonucleotide
  Sense strand starting at position 2997 of SEQ ID NO: 1564332
guugcuacucgugugcuaa

SEQ ID NO: 1871868 - RNA, 19 nt, Artificial Sequence
  Description of Artificial Sequence: Synthetic oligonucleotide
  Antisense strand to SEQ ID NO: 1871867
uuagcacacgaguagcaac

SEQ ID NO: 1871869 - RNA, 19 nt, Artificial Sequence
  Description of Artificial Sequence: Synthetic oligonucleotide
  Sense strand starting at position 3052 of SEQ ID NO: 1564332
ugacauguacguuaggaag

SEQ ID NO: 1871870 - RNA, 19 nt, Artificial Sequence
  Description of Artificial Sequence: Synthetic oligonucleotide
  Antisense strand to SEQ ID NO: 1871869
cuuccuaacguacauguca

SEQ ID NO: 1871871 - RNA, 19 nt, Artificial Sequence
  Description of Artificial Sequence: Synthetic oligonucleotide
  Sense strand starting at position 3058 of SEQ ID NO: 1564332
guacguuaggaagauagua

SEQ ID NO: 1871872 - RNA, 19 nt, Artificial Sequence
  Description of Artificial Sequence: Synthetic oligonucleotide
  Antisense strand to SEQ ID NO: 1871871
uacuaucuuccuaacguac

SEQ ID NO: 1871873 - RNA, 19 nt, Artificial Sequence
  Description of Artificial Sequence: Synthetic oligonucleotide
  Sense strand starting at position 3066 of SEQ ID NO: 1564332
ggaagauaguacuuauauu

SEQ ID NO: 1871874 - RNA, 19 nt, Artificial Sequence
  Description of Artificial Sequence: Synthetic oligonucleotide
  Antisense strand to SEQ ID NO: 1871873
aauauaaguacuaucuucc

SEQ ID NO: 1871875 - RNA, 19 nt, Artificial Sequence
  Description of Artificial Sequence: Synthetic oligonucleotide
  Sense strand starting at position 3135 of SEQ ID NO: 1564332
gcuaucaaacuugagaagu

SEQ ID NO: 1871876 - RNA, 19 nt, Artificial Sequence
  Description of Artificial Sequence: Synthetic oligonucleotide
  Antisense strand to SEQ ID NO: 1871875
acuucucaaguuugauagc

SEQ ID NO: 1871877 - RNA, 19 nt, Artificial Sequence
  Description of Artificial Sequence: Synthetic oligonucleotide
  Sense strand starting at position 3281 of SEQ ID NO: 1564332
uggguugugauauaucugu

SEQ ID NO: 1871878 - RNA, 19 nt, Artificial Sequence
  Description of Artificial Sequence: Synthetic oligonucleotide
  Antisense strand to SEQ ID NO: 1871877
acagauauaucacaaccca

SEQ ID NO: 1871879 - RNA, 19 nt, Artificial Sequence
  Description of Artificial Sequence: Synthetic oligonucleotide
  Sense strand starting at position 3290 of SEQ ID NO: 1564332
auauaucuguucuuccuga

SEQ ID NO: 1871880 - RNA, 19 nt, Artificial Sequence
  Description of Artificial Sequence: Synthetic oligonucleotide
  Antisense strand to SEQ ID NO: 1871879
ucaggaagaacagauauau

SEQ ID NO: 1871881 - RNA, 19 nt, Artificial Sequence
  Description of Artificial Sequence: Synthetic oligonucleotide
  Sense strand starting at position 3438 of SEQ ID NO: 1564332
aucuuugaugaaugagguu

SEQ ID NO: 1871882 - RNA, 19 nt, Artificial Sequence
  Description of Artificial Sequence: Synthetic oligonucleotide
  Antisense strand to SEQ ID NO: 1871881
aaccucauucaucaaagau

SEQ ID NO: 1871883 - RNA, 19 nt, Artificial Sequence
  Description of Artificial Sequence: Synthetic oligonucleotide
  Sense strand starting at position 3553 of SEQ ID NO: 1564332
uaguucugugagcagacaa

SEQ ID NO: 1871884 - RNA, 19 nt, Artificial Sequence
  Description of Artificial Sequence: Synthetic oligonucleotide
  Antisense strand to SEQ ID NO: 1871883
uugucugcucacagaacua

SEQ ID NO: 1871885 - RNA, 19 nt, Artificial Sequence
  Description of Artificial Sequence: Synthetic oligonucleotide
  Sense strand starting at position 3751 of SEQ ID NO: 1564332
uugggugaaucugucaaga

SEQ ID NO: 1871886 - RNA, 19 nt, Artificial Sequence
  Description of Artificial Sequence: Synthetic oligonucleotide
  Antisense strand to SEQ ID NO: 1871885
ucuugacagauucacccaa

SEQ ID NO: 1871887 - RNA, 19 nt, Artificial Sequence
  Description of Artificial Sequence: Synthetic oligonucleotide
  Sense strand starting at position 65 of SEQ ID NO: 1564333
ugacauccaguuuggagaa

SEQ ID NO: 1871888 - RNA, 19 nt, Artificial Sequence
  Description of Artificial Sequence: Synthetic oligonucleotide
  Antisense strand to SEQ ID NO: 1871887
uucuccaaacuggauguca

SEQ ID NO: 1871889 - RNA, 19 nt, Artificial Sequence
  Description of Artificial Sequence: Synthetic oligonucleotide
  Sense strand starting at position 100 of SEQ ID NO: 1564333
cuguuuagaggugaaaguu

SEQ ID NO: 1871890 - RNA, 19 nt, Artificial Sequence
  Description of Artificial Sequence: Synthetic oligonucleotide
  Antisense strand to SEQ ID NO: 1871889
aacuuucaccucuaaacag

SEQ ID NO: 1871891 - RNA, 19 nt, Artificial Sequence
  Description of Artificial Sequence: Synthetic oligonucleotide
  Sense strand starting at position 174 of SEQ ID NO: 1564333
ccuaguuaccacugguaag

SEQ ID NO: 1871892 - RNA, 19 nt, Artificial Sequence
  Description of Artificial Sequence: Synthetic oligonucleotide
  Antisense strand to SEQ ID NO: 1871891
cuuaccagugguaacuagg

SEQ ID NO: 1871893 - RNA, 19 nt, Artificial Sequence
  Description of Artificial Sequence: Synthetic oligonucleotide
  Sense strand starting at position 249 of SEQ ID NO: 1564333
ggauuaaaguccuugcuca

SEQ ID NO: 1871894 - RNA, 19 nt, Artificial Sequence
  Description of Artificial Sequence: Synthetic oligonucleotide
  Antisense strand to SEQ ID NO: 1871893
ugagcaaggacuuuaaucc

SEQ ID NO: 1871895 - RNA, 19 nt, Artificial Sequence
  Description of Artificial Sequence: Synthetic oligonucleotide
  Sense strand starting at position 313 of SEQ ID NO: 1564333
uggugagaguggaagucua

SEQ ID NO: 1871896 - RNA, 19 nt, Artificial Sequence
  Description of Artificial Sequence: Synthetic oligonucleotide
  Antisense strand to SEQ ID NO: 1871895
uagacuuccacucucacca

SEQ ID NO: 1871897 - RNA, 19 nt, Artificial Sequence
  Description of Artificial Sequence: Synthetic oligonucleotide
  Sense strand starting at position 385 of SEQ ID NO: 1564333
ggcauucuacuguacuaag

SEQ ID NO: 1871898 - RNA, 19 nt, Artificial Sequence
  Description of Artificial Sequence: Synthetic oligonucleotide
  Antisense strand to SEQ ID NO: 1871897
cuuaguacaguagaaugcc

SEQ ID NO: 1871899 - RNA, 19 nt, Artificial Sequence
  Description of Artificial Sequence: Synthetic oligonucleotide
  Sense strand starting at position 492 of SEQ ID NO: 1564333
cagacuuuaccugggacau

SEQ ID NO: 1871900 - RNA, 19 nt, Artificial Sequence
  Description of Artificial Sequence: Synthetic oligonucleotide
  Antisense strand to SEQ ID NO: 1871899
augucccagguaaagucug

SEQ ID NO: 1871901 - RNA, 19 nt, Artificial Sequence
  Description of Artificial Sequence: Synthetic oligonucleotide
  Sense strand starting at position 641 of SEQ ID NO: 1564333
acaggacucuugcugaaug

SEQ ID NO: 1871902 - RNA, 19 nt, Artificial Sequence
  Description of Artificial Sequence: Synthetic oligonucleotide
  Antisense strand to SEQ ID NO: 1871901
cauucagcaagaguccugu

SEQ ID NO: 1871903 - RNA, 19 nt, Artificial Sequence
  Description of Artificial Sequence: Synthetic oligonucleotide
  Sense strand starting at position 730 of SEQ ID NO: 1564333
uuaccucuccuguagaaag

SEQ ID NO: 1871904 - RNA, 19 nt, Artificial Sequence
  Description of Artificial Sequence: Synthetic oligonucleotide
  Antisense strand to SEQ ID NO: 1871903
cuuucuacaggagagguaa

SEQ ID NO: 1871905 - RNA, 19 nt, Artificial Sequence
  Description of Artificial Sequence: Synthetic oligonucleotide
  Sense strand starting at position 819 of SEQ ID NO: 1564333
ggucucauccagcacucua

SEQ ID NO: 1871906 - RNA, 19 nt, Artificial Sequence
  Description of Artificial Sequence: Synthetic oligonucleotide
  Antisense strand to SEQ ID NO: 1871905
uagagugcuggaugagacc

SEQ ID NO: 1871907 - RNA, 19 nt, Artificial Sequence
  Description of Artificial Sequence: Synthetic oligonucleotide
  Sense strand starting at position 999 of SEQ ID NO: 1564333
gaagaaagaccuugugcca

SEQ ID NO: 1871908 - RNA, 19 nt, Artificial Sequence
  Description of Artificial Sequence: Synthetic oligonucleotide
  Antisense strand to SEQ ID NO: 1871907
uggcacaaggucuuucuuc

SEQ ID NO: 1871909 - RNA, 19 nt, Artificial Sequence
  Description of Artificial Sequence: Synthetic oligonucleotide
  Sense strand starting at position 1037 of SEQ ID NO: 1564333
cgcuauuguguucugagca

SEQ ID NO: 1871910 - RNA, 19 nt, Artificial Sequence
  Description of Artificial Sequence: Synthetic oligonucleotide
  Antisense strand to SEQ ID NO: 1871909
ugcucagaacacaauagcg

SEQ ID NO: 1871911 - RNA, 19 nt, Artificial Sequence
  Description of Artificial Sequence: Synthetic oligonucleotide
  Sense strand starting at position 1045 of SEQ ID NO: 1564333
uguucugagcaaggacaau

SEQ ID NO: 1871912 - RNA, 19 nt, Artificial Sequence
  Description of Artificial Sequence: Synthetic oligonucleotide
  Antisense strand to SEQ ID NO: 1871911
auuguccuugcucagaaca

SEQ ID NO: 1871913 - RNA, 19 nt, Artificial Sequence
  Description of Artificial Sequence: Synthetic oligonucleotide
  Sense strand starting at position 1056 of SEQ ID NO: 1564333
aggacaauaucaucgcuuu

SEQ ID NO: 1871914 - RNA, 19 nt, Artificial Sequence
  Description of Artificial Sequence: Synthetic oligonucleotide
  Antisense strand to SEQ ID NO: 1871913
aaagcgaugauauuguccu

SEQ ID NO: 1871915 - RNA, 19 nt, Artificial Sequence
  Description of Artificial Sequence: Synthetic oligonucleotide
  Sense strand starting at position 1263 of SEQ ID NO: 1564333
gcgagugagugaaaggaaa

SEQ ID NO: 1871916 - RNA, 19 nt, Artificial Sequence
  Description of Artificial Sequence: Synthetic oligonucleotide
  Antisense strand to SEQ ID NO: 1871915
uuuccuuucacucacucgc

SEQ ID NO: 1871917 - RNA, 19 nt, Artificial Sequence
  Description of Artificial Sequence: Synthetic oligonucleotide
  Sense strand starting at position 1410 of SEQ ID NO: 1564333
agguucugaaguugaacaa

SEQ ID NO: 1871918 - RNA, 19 nt, Artificial Sequence
  Description of Artificial Sequence: Synthetic oligonucleotide
  Antisense strand to SEQ ID NO: 1871917
uuguucaacuucagaaccu

SEQ ID NO: 1871919 - RNA, 19 nt, Artificial Sequence
  Description of Artificial Sequence: Synthetic oligonucleotide
  Sense strand starting at position 1503 of SEQ ID NO: 1564333
aaacguguccaugaaugca

SEQ ID NO: 1871920 - RNA, 19 nt, Artificial Sequence
  Description of Artificial Sequence: Synthetic oligonucleotide
  Antisense strand to SEQ ID NO: 1871919
ugcauucauggacacguuu

SEQ ID NO: 1871921 - RNA, 19 nt, Artificial Sequence
  Description of Artificial Sequence: Synthetic oligonucleotide
  Sense strand starting at position 1818 of SEQ ID NO: 1564333
gcacaugauuucuugcuca

SEQ ID NO: 1871922 - RNA, 19 nt, Artificial Sequence
  Description of Artificial Sequence: Synthetic oligonucleotide
  Antisense strand to SEQ ID NO: 1871921
ugagcaagaaaucaugugc

SEQ ID NO: 1871923 - RNA, 19 nt, Artificial Sequence
  Description of Artificial Sequence: Synthetic oligonucleotide
  Sense strand starting at position 2518 of SEQ ID NO: 1564333
uugccagucaauggaagaa

SEQ ID NO: 1871924 - RNA, 19 nt, Artificial Sequence
  Description of Artificial Sequence: Synthetic oligonucleotide
  Antisense strand to SEQ ID NO: 1871923
uucuuccauugacuggcaa

SEQ ID NO: 1871925 - RNA, 19 nt, Artificial Sequence
  Description of Artificial Sequence: Synthetic oligonucleotide
  Sense strand starting at position 2533 of SEQ ID NO: 1564333
agaaguacuguaggaguca

SEQ ID NO: 1871926 - RNA, 19 nt, Artificial Sequence
  Description of Artificial Sequence: Synthetic oligonucleotide
  Antisense strand to SEQ ID NO: 1871925
ugacuccuacaguacuucu

SEQ ID NO: 1871927 - RNA, 19 nt, Artificial Sequence
  Description of Artificial Sequence: Synthetic oligonucleotide
  Sense strand starting at position 2552 of SEQ ID NO: 1564333
ccgggcaaggcagauaaau

SEQ ID NO: 1871928 - RNA, 19 nt, Artificial Sequence
  Description of Artificial Sequence: Synthetic oligonucleotide
  Antisense strand to SEQ ID NO: 1871927
auuuaucugccuugcccgg

SEQ ID NO: 1871929 - RNA, 19 nt, Artificial Sequence
  Description of Artificial Sequence: Synthetic oligonucleotide
  Sense strand starting at position 2667 of SEQ ID NO: 1564333
guaaccugugcagagaaga

SEQ ID NO: 1871930 - RNA, 19 nt, Artificial Sequence
  Description of Artificial Sequence: Synthetic oligonucleotide
  Antisense strand to SEQ ID NO: 1871929
ucuucucugcacagguuac

SEQ ID NO: 1871931 - RNA, 19 nt, Artificial Sequence
  Description of Artificial Sequence: Synthetic oligonucleotide
  Sense strand starting at position 2683 of SEQ ID NO: 1564333
agauguaaauaggucucaa

SEQ ID NO: 1871932 - RNA, 19 nt, Artificial Sequence
  Description of Artificial Sequence: Synthetic oligonucleotide
  Antisense strand to SEQ ID NO: 1871931
uugagaccuauuuacaucu

SEQ ID NO: 1871933 - RNA, 19 nt, Artificial Sequence
  Description of Artificial Sequence: Synthetic oligonucleotide
  Sense strand starting at position 2693 of SEQ ID NO: 1564333
aggucucaagagugacuaa

SEQ ID NO: 1871934 - RNA, 19 nt, Artificial Sequence
  Description of Artificial Sequence: Synthetic oligonucleotide
  Antisense strand to SEQ ID NO: 1871933
uuagucacucuugagaccu

SEQ ID NO: 1871935 - RNA, 19 nt, Artificial Sequence
  Description of Artificial Sequence: Synthetic oligonucleotide
  Sense strand starting at position 2708 of SEQ ID NO: 1564333
cuaagaauuugucagacca

SEQ ID NO: 1871936 - RNA, 19 nt, Artificial Sequence
  Description of Artificial Sequence: Synthetic oligonucleotide
  Antisense strand to SEQ ID NO: 1871935
uggucugacaaauucuuag

SEQ ID NO: 1871937 - RNA, 19 nt, Artificial Sequence
  Description of Artificial Sequence: Synthetic oligonucleotide
  Sense strand starting at position 2738 of SEQ ID NO: 1564333
gggcucuccaggugaggau

SEQ ID NO: 1871938 - RNA, 19 nt, Artificial Sequence
  Description of Artificial Sequence: Synthetic oligonucleotide
  Antisense strand to SEQ ID NO: 1871937
auccucaccuggagagccc

SEQ ID NO: 1871939 - RNA, 19 nt, Artificial Sequence
  Description of Artificial Sequence: Synthetic oligonucleotide
  Sense strand starting at position 2778 of SEQ ID NO: 1564333
ggaugagugguucagagug

SEQ ID NO: 1871940 - RNA, 19 nt, Artificial Sequence
  Description of Artificial Sequence: Synthetic oligonucleotide
  Antisense strand to SEQ ID NO: 1871939
cacucugaaccacucaucc

SEQ ID NO: 1871941 - RNA, 19 nt, Artificial Sequence
  Description of Artificial Sequence: Synthetic oligonucleotide
  Sense strand starting at position 2794 of SEQ ID NO: 1564333
gugccugaaauauagguuu

SEQ ID NO: 1871942 - RNA, 19 nt, Artificial Sequence
  Description of Artificial Sequence: Synthetic oligonucleotide
  Antisense strand to SEQ ID NO: 1871941
aaaccuauauuucaggcac

SEQ ID NO: 1871943 - RNA, 19 nt, Artificial Sequence
  Description of Artificial Sequence: Synthetic oligonucleotide
  Sense strand starting at position 2797 of SEQ ID NO: 1564333
ccugaaauauagguuucuu

SEQ ID NO: 1871944 - RNA, 19 nt, Artificial Sequence
  Description of Artificial Sequence: Synthetic oligonucleotide
  Antisense strand to SEQ ID NO: 1871943
aagaaaccuauauuucagg

SEQ ID NO: 1871945 - RNA, 19 nt, Artificial Sequence
  Description of Artificial Sequence: Synthetic oligonucleotide
  Sense strand starting at position 2812 of SEQ ID NO: 1564333
ucuuauaugagguguagag

SEQ ID NO: 1871946 - RNA, 19 nt, Artificial Sequence
  Description of Artificial Sequence: Synthetic oligonucleotide
  Antisense strand to SEQ ID NO: 1871945
cucuacaccucauauaaga

SEQ ID NO: 1871947 - RNA, 19 nt, Artificial Sequence
  Description of Artificial Sequence: Synthetic oligonucleotide
  Sense strand starting at position 2907 of SEQ ID NO: 1564333
gacuaaaggguuuggacuu

SEQ ID NO: 1871948 - RNA, 19 nt, Artificial Sequence
  Description of Artificial Sequence: Synthetic oligonucleotide
  Antisense strand to SEQ ID NO: 1871947
aaguccaaacccuuuaguc

SEQ ID NO: 1871949 - RNA, 19 nt, Artificial Sequence
  Description of Artificial Sequence: Synthetic oligonucleotide
  Sense strand starting at position 2921 of SEQ ID NO: 1564333
gacuuaauccuguaggcag

SEQ ID NO: 1871950 - RNA, 19 nt, Artificial Sequence
  Description of Artificial Sequence: Synthetic oligonucleotide
  Antisense strand to SEQ ID NO: 1871949
cugccuacaggauuaaguc

SEQ ID NO: 1871951 - RNA, 19 nt, Artificial Sequence
  Description of Artificial Sequence: Synthetic oligonucleotide
  Sense strand starting at position 3004 of SEQ ID NO: 1564333
gcccaagcuggcguguaau

SEQ ID NO: 1871952 - RNA, 19 nt, Artificial Sequence
  Description of Artificial Sequence: Synthetic oligonucleotide
  Antisense strand to SEQ ID NO: 1871951
auuacacgccagcuugggc

SEQ ID NO: 1871953 - RNA, 19 nt, Artificial Sequence
  Description of Artificial Sequence: Synthetic oligonucleotide
  Sense strand starting at position 3389 of SEQ ID NO: 1564333
ggagaaugauuagaggaca

SEQ ID NO: 1871954 - RNA, 19 nt, Artificial Sequence
  Description of Artificial Sequence: Synthetic oligonucleotide
  Antisense strand to SEQ ID NO: 1871953
uguccucuaaucauucucc

SEQ ID NO: 1871955 - RNA, 19 nt, Artificial Sequence
  Description of Artificial Sequence: Synthetic oligonucleotide
  Sense strand starting at position 3657 of SEQ ID NO: 1564333
uuuguaggagcuugagaag

SEQ ID NO: 1871956 - RNA, 19 nt, Artificial Sequence
  Description of Artificial Sequence: Synthetic oligonucleotide
  Antisense strand to SEQ ID NO: 1871955
cuucucaagcuccuacaaa

SEQ ID NO: 1871957 - RNA, 19 nt, Artificial Sequence
  Description of Artificial Sequence: Synthetic oligonucleotide
  Sense strand starting at position 3675 of SEQ ID NO: 1564333
guuuguggaacaugaaucu

SEQ ID NO: 1871958 - RNA, 19 nt, Artificial Sequence
  Description of Artificial Sequence: Synthetic oligonucleotide
  Antisense strand to SEQ ID NO: 1871957
agauucauguuccacaaac

SEQ ID NO: 1871959 - RNA, 19 nt, Artificial Sequence
  Description of Artificial Sequence: Synthetic oligonucleotide
  Sense strand starting at position 3702 of SEQ ID NO: 1564333
ucuggauguccacagugau

SEQ ID NO: 1871960 - RNA, 19 nt, Artificial Sequence
  Description of Artificial Sequence: Synthetic oligonucleotide
  Antisense strand to SEQ ID NO: 1871959
aucacuguggacauccaga

SEQ ID NO: 1871961 - RNA, 19 nt, Artificial Sequence
  Description of Artificial Sequence: Synthetic oligonucleotide
  Sense strand starting at position 3821 of SEQ ID NO: 1564333
uccuauugucuugaagguu

SEQ ID NO: 1871962 - RNA, 19 nt, Artificial Sequence
  Description of Artificial Sequence: Synthetic oligonucleotide
  Antisense strand to SEQ ID NO: 1871961
aaccuucaagacaauagga

SEQ ID NO: 1871963 - RNA, 19 nt, Artificial Sequence
  Description of Artificial Sequence: Synthetic oligonucleotide
  Sense strand starting at position 3879 of SEQ ID NO: 1564333
ugaguugguuagucacaaa

SEQ ID NO: 1871964 - RNA, 19 nt, Artificial Sequence
  Description of Artificial Sequence: Synthetic oligonucleotide
  Antisense strand to SEQ ID NO: 1871963
uuugugacuaaccaacuca

SEQ ID NO: 1871965 - RNA, 19 nt, Artificial Sequence
  Description of Artificial Sequence: Synthetic oligonucleotide
  Sense strand starting at position 3966 of SEQ ID NO: 1564333
cugcguuaagugccugaca

SEQ ID NO: 1871966 - RNA, 19 nt, Artificial Sequence
  Description of Artificial Sequence: Synthetic oligonucleotide
  Antisense strand to SEQ ID NO: 1871965
ugucaggcacuuaacgcag

SEQ ID NO: 1871967 - RNA, 19 nt, Artificial Sequence
  Description of Artificial Sequence: Synthetic oligonucleotide
  Sense strand starting at position 756 of SEQ ID NO: 1564334
accugaauauccugcagua

SEQ ID NO: 1871968 - RNA, 19 nt, Artificial Sequence
  Description of Artificial Sequence: Synthetic oligonucleotide
  Antisense strand to SEQ ID NO: 1871967
uacugcaggauauucaggu

SEQ ID NO: 1871969 - RNA, 19 nt, Artificial Sequence
  Description of Artificial Sequence: Synthetic oligonucleotide
  Sense strand starting at position 758 of SEQ ID NO: 1564334
cugaauauccugcaguaca

SEQ ID NO: 1871970 - RNA, 19 nt, Artificial Sequence
  Description of Artificial Sequence: Synthetic oligonucleotide
  Antisense strand to SEQ ID NO: 1871969
uguacugcaggauauucag

SEQ ID NO: 1871971 - RNA, 19 nt, Artificial Sequence
  Description of Artificial Sequence: Synthetic oligonucleotide
  Sense strand starting at position 802 of SEQ ID NO: 1564334
aauaauccuguaggagauu

SEQ ID NO: 1871972 - RNA, 19 nt, Artificial Sequence
  Description of Artificial Sequence: Synthetic oligonucleotide
  Antisense strand to SEQ ID NO: 1871971
aaucuccuacaggauuauu

SEQ ID NO: 1871973 - RNA, 19 nt, Artificial Sequence
  Description of Artificial Sequence: Synthetic oligonucleotide
  Sense strand starting at position 949 of SEQ ID NO: 1564334
agugucuggagcugauauu

SEQ ID NO: 1871974 - RNA, 19 nt, Artificial Sequence
  Description of Artificial Sequence: Synthetic oligonucleotide
  Antisense strand to SEQ ID NO: 1871973
aauaucagcuccagacacu

SEQ ID NO: 1871975 - RNA, 19 nt, Artificial Sequence
  Description of Artificial Sequence: Synthetic oligonucleotide
  Sense strand starting at position 968 of SEQ ID NO: 1564334
gggcucuccaaauagagua

SEQ ID NO: 1871976 - RNA, 19 nt, Artificial Sequence
  Description of Artificial Sequence: Synthetic oligonucleotide
  Antisense strand to SEQ ID NO: 1871975
uacucuauuuggagagccc

SEQ ID NO: 1871977 - RNA, 19 nt, Artificial Sequence
  Description of Artificial Sequence: Synthetic oligonucleotide
  Sense strand starting at position 982 of SEQ ID NO: 1564334
gaguacaaugaucgcagau

SEQ ID NO: 1871978 - RNA, 19 nt, Artificial Sequence
  Description of Artificial Sequence: Synthetic oligonucleotide
  Antisense strand to SEQ ID NO: 1871977
aucugcgaucauuguacuc

SEQ ID NO: 1871979 - RNA, 19 nt, Artificial Sequence
  Description of Artificial Sequence: Synthetic oligonucleotide
  Sense strand starting at position 984 of SEQ ID NO: 1564334
guacaaugaucgcagauuu

SEQ ID NO: 1871980 - RNA, 19 nt, Artificial Sequence
  Description of Artificial Sequence: Synthetic oligonucleotide
  Antisense strand to SEQ ID NO: 1871979
aaaucugcgaucauuguac

SEQ ID NO: 1871981 - RNA, 19 nt, Artificial Sequence
  Description of Artificial Sequence: Synthetic oligonucleotide
  Sense strand starting at position 992 of SEQ ID NO: 1564334
aucgcagauuuguggaaau

SEQ ID NO: 1871982 - RNA, 19 nt, Artificial Sequence
  Description of Artificial Sequence: Synthetic oligonucleotide
  Antisense strand to SEQ ID NO: 1871981
auuuccacaaaucugcgau

SEQ ID NO: 1871983 - RNA, 19 nt, Artificial Sequence
  Description of Artificial Sequence: Synthetic oligonucleotide
  Sense strand starting at position 1089 of SEQ ID NO: 1564334
cuuguuauuucucagauuc

SEQ ID NO: 1871984 - RNA, 19 nt, Artificial Sequence
  Description of Artificial Sequence: Synthetic oligonucleotide
  Antisense strand to SEQ ID NO: 1871983
gaaucugagaaauaacaag

SEQ ID NO: 1871985 - RNA, 19 nt, Artificial Sequence
  Description of Artificial Sequence: Synthetic oligonucleotide
  Sense strand starting at position 1099 of SEQ ID NO: 1564334
cucagauucuuacacgaac

SEQ ID NO: 1871986 - RNA, 19 nt, Artificial Sequence
  Description of Artificial Sequence: Synthetic oligonucleotide
  Antisense strand to SEQ ID NO: 1871985
guucguguaagaaucugag

SEQ ID NO: 1871987 - RNA, 19 nt, Artificial Sequence
  Description of Artificial Sequence: Synthetic oligonucleotide
  Sense strand starting at position 1108 of SEQ ID NO: 1564334
uuacacgaacucugaaaca

SEQ ID NO: 1871988 - RNA, 19 nt, Artificial Sequence
  Description of Artificial Sequence: Synthetic oligonucleotide
  Antisense strand to SEQ ID NO: 1871987
uguuucagaguucguguaa

SEQ ID NO: 1871989 - RNA, 19 nt, Artificial Sequence
  Description of Artificial Sequence: Synthetic oligonucleotide
  Sense strand starting at position 1552 of SEQ ID NO: 1564334
aggagaugcaaaggauguu

SEQ ID NO: 1871990 - RNA, 19 nt, Artificial Sequence
  Description of Artificial Sequence: Synthetic oligonucleotide
  Antisense strand to SEQ ID NO: 1871989
aacauccuuugcaucuccu

SEQ ID NO: 1871991 - RNA, 19 nt, Artificial Sequence
  Description of Artificial Sequence: Synthetic oligonucleotide
  Sense strand starting at position 1573 of SEQ ID NO: 1564334
aagcaaacagcucgagauu

SEQ ID NO: 1871992 - RNA, 19 nt, Artificial Sequence
  Description of Artificial Sequence: Synthetic oligonucleotide
  Antisense strand to SEQ ID NO: 1871991
aaucucgagcuguuugcuu

SEQ ID NO: 1871993 - RNA, 19 nt, Artificial Sequence
  Description of Artificial Sequence: Synthetic oligonucleotide
  Sense strand starting at position 2171 of SEQ ID NO: 1564334
cgucaagugcagcuugauu

SEQ ID NO: 1871994 - RNA, 19 nt, Artificial Sequence
  Description of Artificial Sequence: Synthetic oligonucleotide
  Antisense strand to SEQ ID NO: 1871993
aaucaagcugcacuugacg

SEQ ID NO: 1871995 - RNA, 19 nt, Artificial Sequence
  Description of Artificial Sequence: Synthetic oligonucleotide
  Sense strand starting at position 2182 of SEQ ID NO: 1564334
gcuugauuagaccgaugga

SEQ ID NO: 1871996 - RNA, 19 nt, Artificial Sequence
  Description of Artificial Sequence: Synthetic oligonucleotide
  Antisense strand to SEQ ID NO: 1871995
uccaucggucuaaucaagc

SEQ ID NO: 1871997 - RNA, 19 nt, Artificial Sequence
  Description of Artificial Sequence: Synthetic oligonucleotide
  Sense strand starting at position 2211 of SEQ ID NO: 1564334
cugggaauuugcgacucuu

SEQ ID NO: 1871998 - RNA, 19 nt, Artificial Sequence
  Description of Artificial Sequence: Synthetic oligonucleotide
  Antisense strand to SEQ ID NO: 1871997
aagagucgcaaauucccag

SEQ ID NO: 1871999 - RNA, 19 nt, Artificial Sequence
  Description of Artificial Sequence: Synthetic oligonucleotide
  Sense strand starting at position 2261 of SEQ ID NO: 1564334
ggcucaacucugcaucuua

SEQ ID NO: 1872000 - RNA, 19 nt, Artificial Sequence
  Description of Artificial Sequence: Synthetic oligonucleotide
  Antisense strand to SEQ ID NO: 1871999
uaagaugcagaguugagcc

SEQ ID NO: 1872001 - RNA, 19 nt, Artificial Sequence
  Description of Artificial Sequence: Synthetic oligonucleotide
  Sense strand starting at position 2382 of SEQ ID NO: 1564334
agagcauuagcacgugcau

SEQ ID NO: 1872002 - RNA, 19 nt, Artificial Sequence
  Description of Artificial Sequence: Synthetic oligonucleotide
  Antisense strand to SEQ ID NO: 1872001
augcacgugcuaaugcucu

SEQ ID NO: 1872003 - RNA, 19 nt, Artificial Sequence
  Description of Artificial Sequence: Synthetic oligonucleotide
  Sense strand starting at position 2383 of SEQ ID NO: 1564334
gagcauuagcacgugcauu

SEQ ID NO: 1872004 - RNA, 19 nt, Artificial Sequence
  Description of Artificial Sequence: Synthetic oligonucleotide
  Antisense strand to SEQ ID NO: 1872003
aaugcacgugcuaaugcuc

SEQ ID NO: 1872005 - RNA, 19 nt, Artificial Sequence
  Description of Artificial Sequence: Synthetic oligonucleotide
  Sense strand starting at position 2448 of SEQ ID NO: 1564334
guagcaguauguccauuua

SEQ ID NO: 1872006 - RNA, 19 nt, Artificial Sequence
  Description of Artificial Sequence: Synthetic oligonucleotide
  Antisense strand to SEQ ID NO: 1872005
uaaauggacauacugcuac

SEQ ID NO: 1872007 - RNA, 19 nt, Artificial Sequence
  Description of Artificial Sequence: Synthetic oligonucleotide
  Sense strand starting at position 2562 of SEQ ID NO: 1564334
gcagucuucuggccgggaa

SEQ ID NO: 1872008 - RNA, 19 nt, Artificial Sequence
  Description of Artificial Sequence: Synthetic oligonucleotide
  Antisense strand to SEQ ID NO: 1872007
uucccggccagaagacugc

SEQ ID NO: 1872009 - RNA, 19 nt, Artificial Sequence
  Description of Artificial Sequence: Synthetic oligonucleotide
  Sense strand starting at position 2563 of SEQ ID NO: 1564334
cagucuucuggccgggaau

SEQ ID NO: 1872010 - RNA, 19 nt, Artificial Sequence
  Description of Artificial Sequence: Synthetic oligonucleotide
  Antisense strand to SEQ ID NO: 1872009
auucccggccagaagacug

SEQ ID NO: 1872011 - RNA, 19 nt, Artificial Sequence
  Description of Artificial Sequence: Synthetic oligonucleotide
  Sense strand starting at position 2768 of SEQ ID NO: 1564334
gcuagagaaucucuccaac

SEQ ID NO: 1872012 - RNA, 19 nt, Artificial Sequence
  Description of Artificial Sequence: Synthetic oligonucleotide
  Antisense strand to SEQ ID NO: 1872011
guuggagagauucucuagc

SEQ ID NO: 1872013 - RNA, 19 nt, Artificial Sequence
  Description of Artificial Sequence: Synthetic oligonucleotide
  Sense strand starting at position 3011 of SEQ ID NO: 1564334
uugguucugaguuguagca

SEQ ID NO: 1872014 - RNA, 19 nt, Artificial Sequence
  Description of Artificial Sequence: Synthetic oligonucleotide
  Antisense strand to SEQ ID NO: 1872013
ugcuacaacucagaaccaa

SEQ ID NO: 1872015 - RNA, 19 nt, Artificial Sequence
  Description of Artificial Sequence: Synthetic oligonucleotide
  Sense strand starting at position 3013 of SEQ ID NO: 1564334
gguucugaguuguagcaag

SEQ ID NO: 1872016 - RNA, 19 nt, Artificial Sequence
  Description of Artificial Sequence: Synthetic oligonucleotide
  Antisense strand to SEQ ID NO: 1872015
cuugcuacaacucagaacc

SEQ ID NO: 1872017 - RNA, 19 nt, Artificial Sequence
  Description of Artificial Sequence: Synthetic oligonucleotide
  Sense strand starting at position 3023 of SEQ ID NO: 1564334
uguagcaagguuugugaau

SEQ ID NO: 1872018 - RNA, 19 nt, Artificial Sequence
  Description of Artificial Sequence: Synthetic oligonucleotide
  Antisense strand to SEQ ID NO: 1872017
auucacaaaccuugcuaca

SEQ ID NO: 1872019 - RNA, 19 nt, Artificial Sequence
  Description of Artificial Sequence: Synthetic oligonucleotide
  Sense strand starting at position 3024 of SEQ ID NO: 1564334
guagcaagguuugugaaua

SEQ ID NO: 1872020 - RNA, 19 nt, Artificial Sequence
  Description of Artificial Sequence: Synthetic oligonucleotide
  Antisense strand to SEQ ID NO: 1872019
uauucacaaaccuugcuac

SEQ ID NO: 1872021 - RNA, 19 nt, Artificial Sequence
  Description of Artificial Sequence: Synthetic oligonucleotide
  Sense strand starting at position 3025 of SEQ ID NO: 1564334
uagcaagguuugugaauaa

SEQ ID NO: 1872022 - RNA, 19 nt, Artificial Sequence
  Description of Artificial Sequence: Synthetic oligonucleotide
  Antisense strand to SEQ ID NO: 1872021
uuauucacaaaccuugcua

SEQ ID NO: 1872023 - RNA, 19 nt, Artificial Sequence
  Description of Artificial Sequence: Synthetic oligonucleotide
  Sense strand starting at position 3032 of SEQ ID NO: 1564334
guuugugaauaaguaaaug

SEQ ID NO: 1872024 - RNA, 19 nt, Artificial Sequence
  Description of Artificial Sequence: Synthetic oligonucleotide
  Antisense strand to SEQ ID NO: 1872023
cauuuacuuauucacaaac

SEQ ID NO: 1872025 - RNA, 19 nt, Artificial Sequence
  Description of Artificial Sequence: Synthetic oligonucleotide
  Sense strand starting at position 3048 of SEQ ID NO: 1564334
augagccugucuccaauau

SEQ ID NO: 1872026 - RNA, 19 nt, Artificial Sequence
  Description of Artificial Sequence: Synthetic oligonucleotide
  Antisense strand to SEQ ID NO: 1872025
auauuggagacaggcucau

SEQ ID NO: 1872027 - RNA, 19 nt, Artificial Sequence
  Description of Artificial Sequence: Synthetic oligonucleotide
  Sense strand starting at position 3052 of SEQ ID NO: 1564334
gccugucuccaauaucugu

SEQ ID NO: 1872028 - RNA, 19 nt, Artificial Sequence
  Description of Artificial Sequence: Synthetic oligonucleotide
  Antisense strand to SEQ ID NO: 1872027
acagauauuggagacaggc

SEQ ID NO: 1872029 - RNA, 19 nt, Artificial Sequence
  Description of Artificial Sequence: Synthetic oligonucleotide
  Sense strand starting at position 3060 of SEQ ID NO: 1564334
ccaauaucuguccacaggu

SEQ ID NO: 1872030 - RNA, 19 nt, Artificial Sequence
  Description of Artificial Sequence: Synthetic oligonucleotide
  Antisense strand to SEQ ID NO: 1872029
accuguggacagauauugg

SEQ ID NO: 1872031 - RNA, 19 nt, Artificial Sequence
  Description of Artificial Sequence: Synthetic oligonucleotide
  Sense strand starting at position 3073 of SEQ ID NO: 1564334
acagguaucuguggugaaa

SEQ ID NO: 1872032 - RNA, 19 nt, Artificial Sequence
  Description of Artificial Sequence: Synthetic oligonucleotide
  Antisense strand to SEQ ID NO: 1872031
uuucaccacagauaccugu

SEQ ID NO: 1872033 - RNA, 19 nt, Artificial Sequence
  Description of Artificial Sequence: Synthetic oligonucleotide
  Sense strand starting at position 3075 of SEQ ID NO: 1564334
agguaucuguggugaaaug

SEQ ID NO: 1872034 - RNA, 19 nt, Artificial Sequence
  Description of Artificial Sequence: Synthetic oligonucleotide
  Antisense strand to SEQ ID NO: 1872033
cauuucaccacagauaccu

SEQ ID NO: 1872035 - RNA, 19 nt, Artificial Sequence
  Description of Artificial Sequence: Synthetic oligonucleotide
  Sense strand starting at position 3106 of SEQ ID NO: 1564334
agaugugccuaccuggaau

SEQ ID NO: 1872036 - RNA, 19 nt, Artificial Sequence
  Description of Artificial Sequence: Synthetic oligonucleotide
  Antisense strand to SEQ ID NO: 1872035
auuccagguaggcacaucu

SEQ ID NO: 1872037 - RNA, 19 nt, Artificial Sequence
  Description of Artificial Sequence: Synthetic oligonucleotide
  Sense strand starting at position 3374 of SEQ ID NO: 1564334
agauuagugauguggccau

SEQ ID NO: 1872038 - RNA, 19 nt, Artificial Sequence
  Description of Artificial Sequence: Synthetic oligonucleotide
  Antisense strand to SEQ ID NO: 1872037
auggccacaucacuaaucu

SEQ ID NO: 1872039 - RNA, 19 nt, Artificial Sequence
  Description of Artificial Sequence: Synthetic oligonucleotide
  Sense strand starting at position 3641 of SEQ ID NO: 1564334
gcucauaguucugaagguu

SEQ ID NO: 1872040 - RNA, 19 nt, Artificial Sequence
  Description of Artificial Sequence: Synthetic oligonucleotide
  Antisense strand to SEQ ID NO: 1872039
aaccuucagaacuaugagc

SEQ ID NO: 1872041 - RNA, 19 nt, Artificial Sequence
  Description of Artificial Sequence: Synthetic oligonucleotide
  Sense strand starting at position 3775 of SEQ ID NO: 1564334
guucucucaguguguccaa

SEQ ID NO: 1872042 - RNA, 19 nt, Artificial Sequence
  Description of Artificial Sequence: Synthetic oligonucleotide
  Antisense strand to SEQ ID NO: 1872041
uuggacacacugagagaac

SEQ ID NO: 1872043 - RNA, 19 nt, Artificial Sequence
  Description of Artificial Sequence: Synthetic oligonucleotide
  Sense strand starting at position 3913 of SEQ ID NO: 1564334
ggguuaggauuacaaugaa

SEQ ID NO: 1872044 - RNA, 19 nt, Artificial Sequence
  Description of Artificial Sequence: Synthetic oligonucleotide
  Antisense strand to SEQ ID NO: 1872043
uucauuguaauccuaaccc

SEQ ID NO: 1872045 - RNA, 19 nt, Artificial Sequence
  Description of Artificial Sequence: Synthetic oligonucleotide
  Sense strand starting at position 3974 of SEQ ID NO: 1564334
uacuucugguucugggaaa

SEQ ID NO: 1872046 - RNA, 19 nt, Artificial Sequence
  Description of Artificial Sequence: Synthetic oligonucleotide
  Antisense strand to SEQ ID NO: 1872045
uuucccagaaccagaagua

SEQ ID NO: 1872047 - RNA, 19 nt, Artificial Sequence
  Description of Artificial Sequence: Synthetic oligonucleotide
  Sense strand starting at position 205 of SEQ ID NO: 1564335
gucuauccugggcaacaga

SEQ ID NO: 1872048 - RNA, 19 nt, Artificial Sequence
  Description of Artificial Sequence: Synthetic oligonucleotide
  Antisense strand to SEQ ID NO: 1872047
ucuguugcccaggauagac

SEQ ID NO: 1872049 - RNA, 19 nt, Artificial Sequence
  Description of Artificial Sequence: Synthetic oligonucleotide
  Sense strand starting at position 282 of SEQ ID NO: 1564335
auaucuauauguccaugau

SEQ ID NO: 1872050 - RNA, 19 nt, Artificial Sequence
  Description of Artificial Sequence: Synthetic oligonucleotide
  Antisense strand to SEQ ID NO: 1872049
aucauggacauauagauau

SEQ ID NO: 1872051 - RNA, 19 nt, Artificial Sequence
  Description of Artificial Sequence: Synthetic oligonucleotide
  Sense strand starting at position 291 of SEQ ID NO: 1564335
uguccaugauuugcuguua

SEQ ID NO: 1872052 - RNA, 19 nt, Artificial Sequence
  Description of Artificial Sequence: Synthetic oligonucleotide
  Antisense strand to SEQ ID NO: 1872051
uaacagcaaaucauggaca

SEQ ID NO: 1872053 - RNA, 19 nt, Artificial Sequence
  Description of Artificial Sequence: Synthetic oligonucleotide
  Sense strand starting at position 292 of SEQ ID NO: 1564335
guccaugauuugcuguuaa

SEQ ID NO: 1872054 - RNA, 19 nt, Artificial Sequence
  Description of Artificial Sequence: Synthetic oligonucleotide
  Antisense strand to SEQ ID NO: 1872053
uuaacagcaaaucauggac

SEQ ID NO: 1872055 - RNA, 19 nt, Artificial Sequence
  Description of Artificial Sequence: Synthetic oligonucleotide
  Sense strand starting at position 374 of SEQ ID NO: 1564335
aauggugugauugaucaug

SEQ ID NO: 1872056 - RNA, 19 nt, Artificial Sequence
  Description of Artificial Sequence: Synthetic oligonucleotide
  Antisense strand to SEQ ID NO: 1872055
caugaucaaucacaccauu

SEQ ID NO: 1872057 - RNA, 19 nt, Artificial Sequence
  Description of Artificial Sequence: Synthetic oligonucleotide
  Sense strand starting at position 742 of SEQ ID NO: 1564335
agagaugucucguucaaug

SEQ ID NO: 1872058 - RNA, 19 nt, Artificial Sequence
  Description of Artificial Sequence: Synthetic oligonucleotide
  Antisense strand to SEQ ID NO: 1872057
cauugaacgagacaucucu

SEQ ID NO: 1872059 - RNA, 19 nt, Artificial Sequence
  Description of Artificial Sequence: Synthetic oligonucleotide
  Sense strand starting at position 862 of SEQ ID NO: 1564335
cccuauggaucucugagga

SEQ ID NO: 1872060 - RNA, 19 nt, Artificial Sequence
  Description of Artificial Sequence: Synthetic oligonucleotide
  Antisense strand to SEQ ID NO: 1872059
uccucagagauccauaggg

SEQ ID NO: 1872061 - RNA, 19 nt, Artificial Sequence
  Description of Artificial Sequence: Synthetic oligonucleotide
  Sense strand starting at position 1155 of SEQ ID NO: 1564335
agugauuggugcucagaau

SEQ ID NO: 1872062 - RNA, 19 nt, Artificial Sequence
  Description of Artificial Sequence: Synthetic oligonucleotide
  Antisense strand to SEQ ID NO: 1872061
auucugagcaccaaucacu

SEQ ID NO: 1872063 - RNA, 19 nt, Artificial Sequence
  Description of Artificial Sequence: Synthetic oligonucleotide
  Sense strand starting at position 1987 of SEQ ID NO: 1564335
cgcuuugggcggcuuagaa

SEQ ID NO: 1872064 - RNA, 19 nt, Artificial Sequence
  Description of Artificial Sequence: Synthetic oligonucleotide
  Antisense strand to SEQ ID NO: 1872063
uucuaagccgcccaaagcg

SEQ ID NO: 1872065 - RNA, 19 nt, Artificial Sequence
  Description of Artificial Sequence: Synthetic oligonucleotide
  Sense strand starting at position 2001 of SEQ ID NO: 1564335
uagaaagaauuagcuguuu

SEQ ID NO: 1872066 - RNA, 19 nt, Artificial Sequence
  Description of Artificial Sequence: Synthetic oligonucleotide
  Antisense strand to SEQ ID NO: 1872065
aaacagcuaauucuuucua

SEQ ID NO: 1872067 - RNA, 19 nt, Artificial Sequence
  Description of Artificial Sequence: Synthetic oligonucleotide
  Sense strand starting at position 2026 of SEQ ID NO: 1564335
aggugucucagugauguca

SEQ ID NO: 1872068 - RNA, 19 nt, Artificial Sequence
  Description of Artificial Sequence: Synthetic oligonucleotide
  Antisense strand to SEQ ID NO: 1872067
ugacaucacugagacaccu

SEQ ID NO: 1872069 - RNA, 19 nt, Artificial Sequence
  Description of Artificial Sequence: Synthetic oligonucleotide
  Sense strand starting at position 2035 of SEQ ID NO: 1564335
agugaugucauacaagguu

SEQ ID NO: 1872070 - RNA, 19 nt, Artificial Sequence
  Description of Artificial Sequence: Synthetic oligonucleotide
  Antisense strand to SEQ ID NO: 1872069
aaccuuguaugacaucacu

SEQ ID NO: 1872071 - RNA, 19 nt, Artificial Sequence
  Description of Artificial Sequence: Synthetic oligonucleotide
  Sense strand starting at position 2139 of SEQ ID NO: 1564335
auaaucuguuaacugagua

SEQ ID NO: 1872072 - RNA, 19 nt, Artificial Sequence
  Description of Artificial Sequence: Synthetic oligonucleotide
  Antisense strand to SEQ ID NO: 1872071
uacucaguuaacagauuau

SEQ ID NO: 1872073 - RNA, 19 nt, Artificial Sequence
  Description of Artificial Sequence: Synthetic oligonucleotide
  Sense strand starting at position 2144 of SEQ ID NO: 1564335
cuguuaacugaguaguguu

SEQ ID NO: 1872074 - RNA, 19 nt, Artificial Sequence
  Description of Artificial Sequence: Synthetic oligonucleotide
  Antisense strand to SEQ ID NO: 1872073
aacacuacucaguuaacag

SEQ ID NO: 1872075 - RNA, 19 nt, Artificial Sequence
  Description of Artificial Sequence: Synthetic oligonucleotide
  Sense strand starting at position 2186 of SEQ ID NO: 1564335
acacuugaaucauugaguu

SEQ ID NO: 1872076 - RNA, 19 nt, Artificial Sequence
  Description of Artificial Sequence: Synthetic oligonucleotide
  Antisense strand to SEQ ID NO: 1872075
aacucaaugauucaagugu

SEQ ID NO: 1872077 - RNA, 19 nt, Artificial Sequence
  Description of Artificial Sequence: Synthetic oligonucleotide
  Sense strand starting at position 2227 of SEQ ID NO: 1564335
auuagacuuguagaaguuu

SEQ ID NO: 1872078 - RNA, 19 nt, Artificial Sequence
  Description of Artificial Sequence: Synthetic oligonucleotide
  Antisense strand to SEQ ID NO: 1872077
aaacuucuacaagucuaau

SEQ ID NO: 1872079 - RNA, 19 nt, Artificial Sequence
  Description of Artificial Sequence: Synthetic oligonucleotide
  Sense strand starting at position 2574 of SEQ ID NO: 1564335
gggacaaauugugucgacu

SEQ ID NO: 1872080 - RNA, 19 nt, Artificial Sequence
  Description of Artificial Sequence: Synthetic oligonucleotide
  Antisense strand to SEQ ID NO: 1872079
agucgacacaauuuguccc

SEQ ID NO: 1872081 - RNA, 19 nt, Artificial Sequence
  Description of Artificial Sequence: Synthetic oligonucleotide
  Sense strand starting at position 2586 of SEQ ID NO: 1564335
gucgacuucuaucccauga

SEQ ID NO: 1872082 - RNA, 19 nt, Artificial Sequence
  Description of Artificial Sequence: Synthetic oligonucleotide
  Antisense strand to SEQ ID NO: 1872081
ucaugggauagaagucgac

SEQ ID NO: 1872083 - RNA, 19 nt, Artificial Sequence
  Description of Artificial Sequence: Synthetic oligonucleotide
  Sense strand starting at position 2647 of SEQ ID NO: 1564335
gaacucauaguuugaagca

SEQ ID NO: 1872084 - RNA, 19 nt, Artificial Sequence
  Description of Artificial Sequence: Synthetic oligonucleotide
  Antisense strand to SEQ ID NO: 1872083
ugcuucaaacuaugaguuc

SEQ ID NO: 1872085 - RNA, 19 nt, Artificial Sequence
  Description of Artificial Sequence: Synthetic oligonucleotide
  Sense strand starting at position 2671 of SEQ ID NO: 1564335
uuuagaggcauauguguaa

SEQ ID NO: 1872086 - RNA, 19 nt, Artificial Sequence
  Description of Artificial Sequence: Synthetic oligonucleotide
  Antisense strand to SEQ ID NO: 1872085
uuacacauaugccucuaaa

SEQ ID NO: 1872087 - RNA, 19 nt, Artificial Sequence
  Description of Artificial Sequence: Synthetic oligonucleotide
  Sense strand starting at position 2674 of SEQ ID NO: 1564335
agaggcauauguguaaaca

SEQ ID NO: 1872088 - RNA, 19 nt, Artificial Sequence
  Description of Artificial Sequence: Synthetic oligonucleotide
  Antisense strand to SEQ ID NO: 1872087
uguuuacacauaugccucu

SEQ ID NO: 1872089 - RNA, 19 nt, Artificial Sequence
  Description of Artificial Sequence: Synthetic oligonucleotide
  Sense strand starting at position 2675 of SEQ ID NO: 1564335
gaggcauauguguaaacau

SEQ ID NO: 1872090 - RNA, 19 nt, Artificial Sequence
  Description of Artificial Sequence: Synthetic oligonucleotide
  Antisense strand to SEQ ID NO: 1872089
auguuuacacauaugccuc

SEQ ID NO: 1872091 - RNA, 19 nt, Artificial Sequence
  Description of Artificial Sequence: Synthetic oligonucleotide
  Sense strand starting at position 2966 of SEQ ID NO: 1564335
cacuuaauauugguuggga

SEQ ID NO: 1872092 - RNA, 19 nt, Artificial Sequence
  Description of Artificial Sequence: Synthetic oligonucleotide
  Antisense strand to SEQ ID NO: 1872091
ucccaaccaauauuaagug

SEQ ID NO: 1872093 - RNA, 19 nt, Artificial Sequence
  Description of Artificial Sequence: Synthetic oligonucleotide
  Sense strand starting at position 2968 of SEQ ID NO: 1564335
cuuaauauugguugggaca

SEQ ID NO: 1872094 - RNA, 19 nt, Artificial Sequence
  Description of Artificial Sequence: Synthetic oligonucleotide
  Antisense strand to SEQ ID NO: 1872093
ugucccaaccaauauuaag

SEQ ID NO: 1872095 - RNA, 19 nt, Artificial Sequence
  Description of Artificial Sequence: Synthetic oligonucleotide
  Sense strand starting at position 2969 of SEQ ID NO: 1564335
uuaauauugguugggacaa

SEQ ID NO: 1872096 - RNA, 19 nt, Artificial Sequence
  Description of Artificial Sequence: Synthetic oligonucleotide
  Antisense strand to SEQ ID NO: 1872095
uugucccaaccaauauuaa

SEQ ID NO: 1872097 - RNA, 19 nt, Artificial Sequence
  Description of Artificial Sequence: Synthetic oligonucleotide
  Sense strand starting at position 3022 of SEQ ID NO: 1564335
gauacucaugccugagcca

SEQ ID NO: 1872098 - RNA, 19 nt, Artificial Sequence
  Description of Artificial Sequence: Synthetic oligonucleotide
  Antisense strand to SEQ ID NO: 1872097
uggcucaggcaugaguauc

SEQ ID NO: 1872099 - RNA, 19 nt, Artificial Sequence
  Description of Artificial Sequence: Synthetic oligonucleotide
  Sense strand starting at position 3041 of SEQ ID NO: 1564335
uuuggagaguacucugauc

SEQ ID NO: 1872100 - RNA, 19 nt, Artificial Sequence
  Description of Artificial Sequence: Synthetic oligonucleotide
  Antisense strand to SEQ ID NO: 1872099
gaucagaguacucuccaaa

SEQ ID NO: 1872101 - RNA, 19 nt, Artificial Sequence
  Description of Artificial Sequence: Synthetic oligonucleotide
  Sense strand starting at position 3043 of SEQ ID NO: 1564335
uggagaguacucugaucac

SEQ ID NO: 1872102 - RNA, 19 nt, Artificial Sequence
  Description of Artificial Sequence: Synthetic oligonucleotide
  Antisense strand to SEQ ID NO: 1872101
gugaucagaguacucucca

SEQ ID NO: 1872103 - RNA, 19 nt, Artificial Sequence
  Description of Artificial Sequence: Synthetic oligonucleotide
  Sense strand starting at position 3046 of SEQ ID NO: 1564335
agaguacucugaucacuuc

SEQ ID NO: 1872104 - RNA, 19 nt, Artificial Sequence
  Description of Artificial Sequence: Synthetic oligonucleotide
  Antisense strand to SEQ ID NO: 1872103
gaagugaucagaguacucu

SEQ ID NO: 1872105 - RNA, 19 nt, Artificial Sequence
  Description of Artificial Sequence: Synthetic oligonucleotide
  Sense strand starting at position 3081 of SEQ ID NO: 1564335
uuauguucucuggaguuag

SEQ ID NO: 1872106 - RNA, 19 nt, Artificial Sequence
  Description of Artificial Sequence: Synthetic oligonucleotide
  Antisense strand to SEQ ID NO: 1872105
cuaacuccagagaacauaa

SEQ ID NO: 1872107 - RNA, 19 nt, Artificial Sequence
  Description of Artificial Sequence: Synthetic oligonucleotide
  Sense strand starting at position 3085 of SEQ ID NO: 1564335
guucucuggaguuaguuau

SEQ ID NO: 1872108 - RNA, 19 nt, Artificial Sequence
  Description of Artificial Sequence: Synthetic oligonucleotide
  Antisense strand to SEQ ID NO: 1872107
auaacuaacuccagagaac

SEQ ID NO: 1872109 - RNA, 19 nt, Artificial Sequence
  Description of Artificial Sequence: Synthetic oligonucleotide
  Sense strand starting at position 3168 of SEQ ID NO: 1564335
uguguuuaucuuuauacca

SEQ ID NO: 1872110 - RNA, 19 nt, Artificial Sequence
  Description of Artificial Sequence: Synthetic oligonucleotide
  Antisense strand to SEQ ID NO: 1872109
ugguauaaagauaaacaca

SEQ ID NO: 1872111 - RNA, 19 nt, Artificial Sequence
  Description of Artificial Sequence: Synthetic oligonucleotide
  Sense strand starting at position 3240 of SEQ ID NO: 1564335
gaguaaggccuccaacuuu

SEQ ID NO: 1872112 - RNA, 19 nt, Artificial Sequence
  Description of Artificial Sequence: Synthetic oligonucleotide
  Antisense strand to SEQ ID NO: 1872111
aaaguuggaggccuuacuc

SEQ ID NO: 1872113 - RNA, 19 nt, Artificial Sequence
  Description of Artificial Sequence: Synthetic oligonucleotide
  Sense strand starting at position 3266 of SEQ ID NO: 1564335
ugaugugacuauucugagu

SEQ ID NO: 1872114 - RNA, 19 nt, Artificial Sequence
  Description of Artificial Sequence: Synthetic oligonucleotide
  Antisense strand to SEQ ID NO: 1872113
acucagaauagucacauca

SEQ ID NO: 1872115 - RNA, 19 nt, Artificial Sequence
  Description of Artificial Sequence: Synthetic oligonucleotide
  Sense strand starting at position 3271 of SEQ ID NO: 1564335
ugacuauucugaguuccuu

SEQ ID NO: 1872116 - RNA, 19 nt, Artificial Sequence
  Description of Artificial Sequence: Synthetic oligonucleotide
  Antisense strand to SEQ ID NO: 1872115
aaggaacucagaauaguca

SEQ ID NO: 1872117 - RNA, 19 nt, Artificial Sequence
  Description of Artificial Sequence: Synthetic oligonucleotide
  Sense strand starting at position 3277 of SEQ ID NO: 1564335
uucugaguuccuugcauuu

SEQ ID NO: 1872118 - RNA, 19 nt, Artificial Sequence
  Description of Artificial Sequence: Synthetic oligonucleotide
  Antisense strand to SEQ ID NO: 1872117
aaaugcaaggaacucagaa

SEQ ID NO: 1872119 - RNA, 19 nt, Artificial Sequence
  Description of Artificial Sequence: Synthetic oligonucleotide
  Sense strand starting at position 3346 of SEQ ID NO: 1564335
ggguguuugauauggauua

SEQ ID NO: 1872120 - RNA, 19 nt, Artificial Sequence
  Description of Artificial Sequence: Synthetic oligonucleotide
  Antisense strand to SEQ ID NO: 1872119
uaauccauaucaaacaccc

SEQ ID NO: 1872121 - RNA, 19 nt, Artificial Sequence
  Description of Artificial Sequence: Synthetic oligonucleotide
  Sense strand starting at position 3348 of SEQ ID NO: 1564335
guguuugauauggauuaug

SEQ ID NO: 1872122 - RNA, 19 nt, Artificial Sequence
  Description of Artificial Sequence: Synthetic oligonucleotide
  Antisense strand to SEQ ID NO: 1872121
cauaauccauaucaaacac

SEQ ID NO: 1872123 - RNA, 19 nt, Artificial Sequence
  Description of Artificial Sequence: Synthetic oligonucleotide
  Sense strand starting at position 3382 of SEQ ID NO: 1564335
uuuggagaccauuguuauc

SEQ ID NO: 1872124 - RNA, 19 nt, Artificial Sequence
  Description of Artificial Sequence: Synthetic oligonucleotide
  Antisense strand to SEQ ID NO: 1872123
gauaacaauggucuccaaa

SEQ ID NO: 1872125 - RNA, 19 nt, Artificial Sequence
  Description of Artificial Sequence: Synthetic oligonucleotide
  Sense strand starting at position 3384 of SEQ ID NO: 1564335
uggagaccauuguuaucuu

SEQ ID NO: 1872126 - RNA, 19 nt, Artificial Sequence
  Description of Artificial Sequence: Synthetic oligonucleotide
  Antisense strand to SEQ ID NO: 1872125
aagauaacaauggucucca

SEQ ID NO: 1872127 - RNA, 19 nt, Artificial Sequence
  Description of Artificial Sequence: Synthetic oligonucleotide
  Sense strand starting at position 7 of SEQ ID NO: 1564336
uauaguaaugccuggcauu

SEQ ID NO: 1872128 - RNA, 19 nt, Artificial Sequence
  Description of Artificial Sequence: Synthetic oligonucleotide
  Antisense strand to SEQ ID NO: 1872127
aaugccaggcauuacuaua

SEQ ID NO: 1872129 - RNA, 19 nt, Artificial Sequence
  Description of Artificial Sequence: Synthetic oligonucleotide
  Sense strand starting at position 144 of SEQ ID NO: 1564336
uccacaguccacugggaaa

SEQ ID NO: 1872130 - RNA, 19 nt, Artificial Sequence
  Description of Artificial Sequence: Synthetic oligonucleotide
  Antisense strand to SEQ ID NO: 1872129
uuucccaguggacugugga

SEQ ID NO: 1872131 - RNA, 19 nt, Artificial Sequence
  Description of Artificial Sequence: Synthetic oligonucleotide
  Sense strand starting at position 203 of SEQ ID NO: 1564336
agacaagugcauuggauau

SEQ ID NO: 1872132 - RNA, 19 nt, Artificial Sequence
  Description of Artificial Sequence: Synthetic oligonucleotide
  Antisense strand to SEQ ID NO: 1872131
auauccaaugcacuugucu

SEQ ID NO: 1872133 - RNA, 19 nt, Artificial Sequence
  Description of Artificial Sequence: Synthetic oligonucleotide
  Sense strand starting at position 234 of SEQ ID NO: 1564336
ggaaacagcucacaagaau

SEQ ID NO: 1872134 - RNA, 19 nt, Artificial Sequence
  Description of Artificial Sequence: Synthetic oligonucleotide
  Antisense strand to SEQ ID NO: 1872133
auucuugugagcuguuucc

SEQ ID NO: 1872135 - RNA, 19 nt, Artificial Sequence
  Description of Artificial Sequence: Synthetic oligonucleotide
  Sense strand starting at position 430 of SEQ ID NO: 1564336
ccuuguuugggagacugua

SEQ ID NO: 1872136 - RNA, 19 nt, Artificial Sequence
  Description of Artificial Sequence: Synthetic oligonucleotide
  Antisense strand to SEQ ID NO: 1872135
uacagucucccaaacaagg

SEQ ID NO: 1872137 - RNA, 19 nt, Artificial Sequence
  Description of Artificial Sequence: Synthetic oligonucleotide
  Sense strand starting at position 529 of SEQ ID NO: 1564336
cuuggccaaucuuuagaaa

SEQ ID NO: 1872138 - RNA, 19 nt, Artificial Sequence
  Description of Artificial Sequence: Synthetic oligonucleotide
  Antisense strand to SEQ ID NO: 1872137
uuucuaaagauuggccaag

SEQ ID NO: 1872139 - RNA, 19 nt, Artificial Sequence
  Description of Artificial Sequence: Synthetic oligonucleotide
  Sense strand starting at position 885 of SEQ ID NO: 1564336
ggagaugauucuggcauuu

SEQ ID NO: 1872140 - RNA, 19 nt, Artificial Sequence
  Description of Artificial Sequence: Synthetic oligonucleotide
  Antisense strand to SEQ ID NO: 1872139
aaaugccagaaucaucucc

SEQ ID NO: 1872141 - RNA, 19 nt, Artificial Sequence
  Description of Artificial Sequence: Synthetic oligonucleotide
  Sense strand starting at position 1166 of SEQ ID NO: 1564336
gcagguugcagguagaagu

SEQ ID NO: 1872142 - RNA, 19 nt, Artificial Sequence
  Description of Artificial Sequence: Synthetic oligonucleotide
  Antisense strand to SEQ ID NO: 1872141
acuucuaccugcaaccugc

SEQ ID NO: 1872143 - RNA, 19 nt, Artificial Sequence
  Description of Artificial Sequence: Synthetic oligonucleotide
  Sense strand starting at position 1424 of SEQ ID NO: 1564336
guaucaaucuaggcuggau

SEQ ID NO: 1872144 - RNA, 19 nt, Artificial Sequence
  Description of Artificial Sequence: Synthetic oligonucleotide
  Antisense strand to SEQ ID NO: 1872143
auccagccuagauugauac

SEQ ID NO: 1872145 - RNA, 19 nt, Artificial Sequence
  Description of Artificial Sequence: Synthetic oligonucleotide
  Sense strand starting at position 1772 of SEQ ID NO: 1564336
agccauaugcuccgaggga

SEQ ID NO: 1872146 - RNA, 19 nt, Artificial Sequence
  Description of Artificial Sequence: Synthetic oligonucleotide
  Antisense strand to SEQ ID NO: 1872145
ucccucggagcauauggcu

SEQ ID NO: 1872147 - RNA, 19 nt, Artificial Sequence
  Description of Artificial Sequence: Synthetic oligonucleotide
  Sense strand starting at position 2148 of SEQ ID NO: 1564336
cuaccacgguugucucaau

SEQ ID NO: 1872148 - RNA, 19 nt, Artificial Sequence
  Description of Artificial Sequence: Synthetic oligonucleotide
  Antisense strand to SEQ ID NO: 1872147
auugagacaaccgugguag

SEQ ID NO: 1872149 - RNA, 19 nt, Artificial Sequence
  Description of Artificial Sequence: Synthetic oligonucleotide
  Sense strand starting at position 2407 of SEQ ID NO: 1564336
gagcgugccuccuugauuu

SEQ ID NO: 1872150 - RNA, 19 nt, Artificial Sequence
  Description of Artificial Sequence: Synthetic oligonucleotide
  Antisense strand to SEQ ID NO: 1872149
aaaucaaggaggcacgcuc

SEQ ID NO: 1872151 - RNA, 19 nt, Artificial Sequence
  Description of Artificial Sequence: Synthetic oligonucleotide
  Sense strand starting at position 2457 of SEQ ID NO: 1564336
cccuucucuguauagcaua

SEQ ID NO: 1872152 - RNA, 19 nt, Artificial Sequence
  Description of Artificial Sequence: Synthetic oligonucleotide
  Antisense strand to SEQ ID NO: 1872151
uaugcuauacagagaaggg

SEQ ID NO: 1872153 - RNA, 19 nt, Artificial Sequence
  Description of Artificial Sequence: Synthetic oligonucleotide
  Sense strand starting at position 2465 of SEQ ID NO: 1564336
uguauagcauauuccagaa

SEQ ID NO: 1872154 - RNA, 19 nt, Artificial Sequence
  Description of Artificial Sequence: Synthetic oligonucleotide
  Antisense strand to SEQ ID NO: 1872153
uucuggaauaugcuauaca

SEQ ID NO: 1872155 - RNA, 19 nt, Artificial Sequence
  Description of Artificial Sequence: Synthetic oligonucleotide
  Sense strand starting at position 2583 of SEQ ID NO: 1564336
gugcguguaagagugugaa

SEQ ID NO: 1872156 - RNA, 19 nt, Artificial Sequence
  Description of Artificial Sequence: Synthetic oligonucleotide
  Antisense strand to SEQ ID NO: 1872155
uucacacucuuacacgcac

SEQ ID NO: 1872157 - RNA, 19 nt, Artificial Sequence
  Description of Artificial Sequence: Synthetic oligonucleotide
  Sense strand starting at position 2881 of SEQ ID NO: 1564336
cgaucuguuacaggcaagu

SEQ ID NO: 1872158 - RNA, 19 nt, Artificial Sequence
  Description of Artificial Sequence: Synthetic oligonucleotide
  Antisense strand to SEQ ID NO: 1872157
acuugccuguaacagaucg

SEQ ID NO: 1872159 - RNA, 19 nt, Artificial Sequence
  Description of Artificial Sequence: Synthetic oligonucleotide
  Sense strand starting at position 2891 of SEQ ID NO: 1564336
caggcaaguuuggcaauaa

SEQ ID NO: 1872160 - RNA, 19 nt, Artificial Sequence
  Description of Artificial Sequence: Synthetic oligonucleotide
  Antisense strand to SEQ ID NO: 1872159
uuauugccaaacuugccug

SEQ ID NO: 1872161 - RNA, 19 nt, Artificial Sequence
  Description of Artificial Sequence: Synthetic oligonucleotide
  Sense strand starting at position 2903 of SEQ ID NO: 1564336
gcaauaacugagcauccaa

SEQ ID NO: 1872162 - RNA, 19 nt, Artificial Sequence
  Description of Artificial Sequence: Synthetic oligonucleotide
  Antisense strand to SEQ ID NO: 1872161
uuggaugcucaguuauugc

SEQ ID NO: 1872163 - RNA, 19 nt, Artificial Sequence
  Description of Artificial Sequence: Synthetic oligonucleotide
  Sense strand starting at position 2945 of SEQ ID NO: 1564336
guacuugcgcucgucuuua

SEQ ID NO: 1872164 - RNA, 19 nt, Artificial Sequence
  Description of Artificial Sequence: Synthetic oligonucleotide
  Antisense strand to SEQ ID NO: 1872163
uaaagacgagcgcaaguac

SEQ ID NO: 1872165 - RNA, 19 nt, Artificial Sequence
  Description of Artificial Sequence: Synthetic oligonucleotide
  Sense strand starting at position 3434 of SEQ ID NO: 1564336
uuguccuaucccuggacaa

SEQ ID NO: 1872166 - RNA, 19 nt, Artificial Sequence
  Description of Artificial Sequence: Synthetic oligonucleotide
  Antisense strand to SEQ ID NO: 1872165
uuguccagggauaggacaa

SEQ ID NO: 1872167 - RNA, 19 nt, Artificial Sequence
  Description of Artificial Sequence: Synthetic oligonucleotide
  Sense strand starting at position 3435 of SEQ ID NO: 1564336
uguccuaucccuggacaau

SEQ ID NO: 1872168 - RNA, 19 nt, Artificial Sequence
  Description of Artificial Sequence: Synthetic oligonucleotide
  Antisense strand to SEQ ID NO: 1872167
auuguccagggauaggaca

SEQ ID NO: 1872169 - RNA, 19 nt, Artificial Sequence
  Description of Artificial Sequence: Synthetic oligonucleotide
  Sense strand starting at position 3436 of SEQ ID NO: 1564336
guccuaucccuggacaaug

SEQ ID NO: 1872170 - RNA, 19 nt, Artificial Sequence
  Description of Artificial Sequence: Synthetic oligonucleotide
  Antisense strand to SEQ ID NO: 1872169
cauuguccagggauaggac

SEQ ID NO: 1872171 - RNA, 19 nt, Artificial Sequence
  Description of Artificial Sequence: Synthetic oligonucleotide
  Sense strand starting at position 3458 of SEQ ID NO: 1564336
ugcuccauucuuggguaga

SEQ ID NO: 1872172 - RNA, 19 nt, Artificial Sequence
  Description of Artificial Sequence: Synthetic oligonucleotide
  Antisense strand to SEQ ID NO: 1872171
ucuacccaagaauggagca

SEQ ID NO: 1872173 - RNA, 19 nt, Artificial Sequence
  Description of Artificial Sequence: Synthetic oligonucleotide
  Sense strand starting at position 3460 of SEQ ID NO: 1564336
cuccauucuuggguagauu

SEQ ID NO: 1872174 - RNA, 19 nt, Artificial Sequence
  Description of Artificial Sequence: Synthetic oligonucleotide
  Antisense strand to SEQ ID NO: 1872173
aaucuacccaagaauggag

SEQ ID NO: 1872175 - RNA, 19 nt, Artificial Sequence
  Description of Artificial Sequence: Synthetic oligonucleotide
  Sense strand starting at position 3668 of SEQ ID NO: 1564336
gccagauuuguuugccugu

SEQ ID NO: 1872176 - RNA, 19 nt, Artificial Sequence
  Description of Artificial Sequence: Synthetic oligonucleotide
  Antisense strand to SEQ ID NO: 1872175
acaggcaaacaaaucuggc

SEQ ID NO: 1872177 - RNA, 19 nt, Artificial Sequence
  Description of Artificial Sequence: Synthetic oligonucleotide
  Sense strand starting at position 3671 of SEQ ID NO: 1564336
agauuuguuugccugucuu

SEQ ID NO: 1872178 - RNA, 19 nt, Artificial Sequence
  Description of Artificial Sequence: Synthetic oligonucleotide
  Antisense strand to SEQ ID NO: 1872177
aagacaggcaaacaaaucu

SEQ ID NO: 1872179 - RNA, 19 nt, Artificial Sequence
  Description of Artificial Sequence: Synthetic oligonucleotide
  Sense strand starting at position 3681 of SEQ ID NO: 1564336
gccugucuuccuuaaagga

SEQ ID NO: 1872180 - RNA, 19 nt, Artificial Sequence
  Description of Artificial Sequence: Synthetic oligonucleotide
  Antisense strand to SEQ ID NO: 1872179
uccuuuaaggaagacaggc

SEQ ID NO: 1872181 - RNA, 19 nt, Artificial Sequence
  Description of Artificial Sequence: Synthetic oligonucleotide
  Sense strand starting at position 3773 of SEQ ID NO: 1564336
acacaucgacucggacaaa

SEQ ID NO: 1872182 - RNA, 19 nt, Artificial Sequence
  Description of Artificial Sequence: Synthetic oligonucleotide
  Antisense strand to SEQ ID NO: 1872181
uuuguccgagucgaugugu

SEQ ID NO: 1872183 - RNA, 19 nt, Artificial Sequence
  Description of Artificial Sequence: Synthetic oligonucleotide
  Sense strand starting at position 3783 of SEQ ID NO: 1564336
ucggacaaauggucaugau

SEQ ID NO: 1872184 - RNA, 19 nt, Artificial Sequence
  Description of Artificial Sequence: Synthetic oligonucleotide
  Antisense strand to SEQ ID NO: 1872183
aucaugaccauuuguccga

SEQ ID NO: 1872185 - RNA, 19 nt, Artificial Sequence
  Description of Artificial Sequence: Synthetic oligonucleotide
  Sense strand starting at position 3795 of SEQ ID NO: 1564336
ucaugaucaugucccacau

SEQ ID NO: 1872186 - RNA, 19 nt, Artificial Sequence
  Description of Artificial Sequence: Synthetic oligonucleotide
  Antisense strand to SEQ ID NO: 1872185
augugggacaugaucauga

SEQ ID NO: 1872187 - RNA, 19 nt, Artificial Sequence
  Description of Artificial Sequence: Synthetic oligonucleotide
  Sense strand starting at position 3851 of SEQ ID NO: 1564336
ucuccauggucucuuagaa

SEQ ID NO: 1872188 - RNA, 19 nt, Artificial Sequence
  Description of Artificial Sequence: Synthetic oligonucleotide
  Antisense strand to SEQ ID NO: 1872187
uucuaagagaccauggaga

SEQ ID NO: 1872189 - RNA, 19 nt, Artificial Sequence
  Description of Artificial Sequence: Synthetic oligonucleotide
  Sense strand starting at position 3858 of SEQ ID NO: 1564336
ggucucuuagaaugagacu

SEQ ID NO: 1872190 - RNA, 19 nt, Artificial Sequence
  Description of Artificial Sequence: Synthetic oligonucleotide
  Antisense strand to SEQ ID NO: 1872189
agucucauucuaagagacc

SEQ ID NO: 1872191 - RNA, 19 nt, Artificial Sequence
  Description of Artificial Sequence: Synthetic oligonucleotide
  Sense strand starting at position 3861 of SEQ ID NO: 1564336
cucuuagaaugagacuaga

SEQ ID NO: 1872192 - RNA, 19 nt, Artificial Sequence
  Description of Artificial Sequence: Synthetic oligonucleotide
  Antisense strand to SEQ ID NO: 1872191
ucuagucucauucuaagag

SEQ ID NO: 1872193 - RNA, 19 nt, Artificial Sequence
  Description of Artificial Sequence: Synthetic oligonucleotide
  Sense strand starting at position 3918 of SEQ ID NO: 1564336
gcagucauguaccugguga

SEQ ID NO: 1872194 - RNA, 19 nt, Artificial Sequence
  Description of Artificial Sequence: Synthetic oligonucleotide
  Antisense strand to SEQ ID NO: 1872193
ucaccagguacaugacugc

SEQ ID NO: 1872195 - RNA, 19 nt, Artificial Sequence
  Description of Artificial Sequence: Synthetic oligonucleotide
  Sense strand starting at position 3920 of SEQ ID NO: 1564336
agucauguaccuggugaug

SEQ ID NO: 1872196 - RNA, 19 nt, Artificial Sequence
  Description of Artificial Sequence: Synthetic oligonucleotide
  Antisense strand to SEQ ID NO: 1872195
caucaccagguacaugacu

SEQ ID NO: 1872197 - RNA, 19 nt, Artificial Sequence
  Description of Artificial Sequence: Synthetic oligonucleotide
  Sense strand starting at position 3932 of SEQ ID NO: 1564336
ggugaugguuaaguguuua

SEQ ID NO: 1872198 - RNA, 19 nt, Artificial Sequence
  Description of Artificial Sequence: Synthetic oligonucleotide
  Antisense strand to SEQ ID NO: 1872197
uaaacacuuaaccaucacc

SEQ ID NO: 1872199 - RNA, 19 nt, Artificial Sequence
  Description of Artificial Sequence: Synthetic oligonucleotide
  Sense strand starting at position 3936 of SEQ ID NO: 1564336
augguuaaguguuuagcaa

SEQ ID NO: 1872200 - RNA, 19 nt, Artificial Sequence
  Description of Artificial Sequence: Synthetic oligonucleotide
  Antisense strand to SEQ ID NO: 1872199
uugcuaaacacuuaaccau

SEQ ID NO: 1872201 - RNA, 19 nt, Artificial Sequence
  Description of Artificial Sequence: Synthetic oligonucleotide
  Sense strand starting at position 3937 of SEQ ID NO: 1564336
ugguuaaguguuuagcaag

SEQ ID NO: 1872202 - RNA, 19 nt, Artificial Sequence
  Description of Artificial Sequence: Synthetic oligonucleotide
  Antisense strand to SEQ ID NO: 1872201
cuugcuaaacacuuaacca

SEQ ID NO: 1872203 - RNA, 19 nt, Artificial Sequence
  Description of Artificial Sequence: Synthetic oligonucleotide
  Sense strand starting at position 3943 of SEQ ID NO: 1564336
aguguuuagcaagguuauu

SEQ ID NO: 1872204 - RNA, 19 nt, Artificial Sequence
  Description of Artificial Sequence: Synthetic oligonucleotide
  Antisense strand to SEQ ID NO: 1872203
aauaaccuugcuaaacacu

SEQ ID NO: 1872205 - RNA, 19 nt, Artificial Sequence
  Description of Artificial Sequence: Synthetic oligonucleotide
  Sense strand starting at position 3955 of SEQ ID NO: 1564336
gguuauuacucccucagga

SEQ ID NO: 1872206 - RNA, 19 nt, Artificial Sequence
  Description of Artificial Sequence: Synthetic oligonucleotide
  Antisense strand to SEQ ID NO: 1872205
uccugagggaguaauaacc

SEQ ID NO: 1872207 - RNA, 19 nt, Artificial Sequence
  Description of Artificial Sequence: Synthetic oligonucleotide
  Sense strand starting at position 1251 of SEQ ID NO: 1564337
uacauuuccuccgggagac

SEQ ID NO: 1872208 - RNA, 19 nt, Artificial Sequence
  Description of Artificial Sequence: Synthetic oligonucleotide
  Antisense strand to SEQ ID NO: 1872207
gucucccggaggaaaugua

SEQ ID NO: 1872209 - RNA, 19 nt, Artificial Sequence
  Description of Artificial Sequence: Synthetic oligonucleotide
  Sense strand starting at position 2318 of SEQ ID NO: 1564337
ccaagugaacaaugagagu

SEQ ID NO: 1872210 - RNA, 19 nt, Artificial Sequence
  Description of Artificial Sequence: Synthetic oligonucleotide
  Antisense strand to SEQ ID NO: 1872209
acucucauuguucacuugg

SEQ ID NO: 1872211 - RNA, 19 nt, Artificial Sequence
  Description of Artificial Sequence: Synthetic oligonucleotide
  Sense strand starting at position 2329 of SEQ ID NO: 1564337
augagaguuccucaccuuu

SEQ ID NO: 1872212 - RNA, 19 nt, Artificial Sequence
  Description of Artificial Sequence: Synthetic oligonucleotide
  Antisense strand to SEQ ID NO: 1872211
aaaggugaggaacucucau

SEQ ID NO: 1872213 - RNA, 19 nt, Artificial Sequence
  Description of Artificial Sequence: Synthetic oligonucleotide
  Sense strand starting at position 2331 of SEQ ID NO: 1564337
gagaguuccucaccuuugu

SEQ ID NO: 1872214 - RNA, 19 nt, Artificial Sequence
  Description of Artificial Sequence: Synthetic oligonucleotide
  Antisense strand to SEQ ID NO: 1872213
acaaaggugaggaacucuc

SEQ ID NO: 1872215 - RNA, 19 nt, Artificial Sequence
  Description of Artificial Sequence: Synthetic oligonucleotide
  Sense strand starting at position 2440 of SEQ ID NO: 1564337
gugugaaggagguaguagu

SEQ ID NO: 1872216 - RNA, 19 nt, Artificial Sequence
  Description of Artificial Sequence: Synthetic oligonucleotide
  Antisense strand to SEQ ID NO: 1872215
acuacuaccuccuucacac

SEQ ID NO: 1872217 - RNA, 19 nt, Artificial Sequence
  Description of Artificial Sequence: Synthetic oligonucleotide
  Sense strand starting at position 2451 of SEQ ID NO: 1564337
guaguagugugcccauuua

SEQ ID NO: 1872218 - RNA, 19 nt, Artificial Sequence
  Description of Artificial Sequence: Synthetic oligonucleotide
  Antisense strand to SEQ ID NO: 1872217
uaaaugggcacacuacuac

SEQ ID NO: 1872219 - RNA, 19 nt, Artificial Sequence
  Description of Artificial Sequence: Synthetic oligonucleotide
  Sense strand starting at position 2459 of SEQ ID NO: 1564337
gugcccauuuaacaggaaa

SEQ ID NO: 1872220 - RNA, 19 nt, Artificial Sequence
  Description of Artificial Sequence: Synthetic oligonucleotide
  Antisense strand to SEQ ID NO: 1872219
uuuccuguuaaaugggcac

SEQ ID NO: 1872221 - RNA, 19 nt, Artificial Sequence
  Description of Artificial Sequence: Synthetic oligonucleotide
  Sense strand starting at position 2503 of SEQ ID NO: 1564337
uuaggaagugcagaguuaa

SEQ ID NO: 1872222 - RNA, 19 nt, Artificial Sequence
  Description of Artificial Sequence: Synthetic oligonucleotide
  Antisense strand to SEQ ID NO: 1872221
uuaacucugcacuuccuaa

SEQ ID NO: 1872223 - RNA, 19 nt, Artificial Sequence
  Description of Artificial Sequence: Synthetic oligonucleotide
  Sense strand starting at position 2575 of SEQ ID NO: 1564337
cuccucuauucugucagau

SEQ ID NO: 1872224 - RNA, 19 nt, Artificial Sequence
  Description of Artificial Sequence: Synthetic oligonucleotide
  Antisense strand to SEQ ID NO: 1872223
aucugacagaauagaggag

SEQ ID NO: 1872225 - RNA, 19 nt, Artificial Sequence
  Description of Artificial Sequence: Synthetic oligonucleotide
  Sense strand starting at position 2649 of SEQ ID NO: 1564337
uagaauuggugagcaagaa

SEQ ID NO: 1872226 - RNA, 19 nt, Artificial Sequence
  Description of Artificial Sequence: Synthetic oligonucleotide
  Antisense strand to SEQ ID NO: 1872225
uucuugcucaccaauucua

SEQ ID NO: 1872227 - RNA, 19 nt, Artificial Sequence
  Description of Artificial Sequence: Synthetic oligonucleotide
  Sense strand starting at position 2729 of SEQ ID NO: 1564337
gccuguauccugcagcaaa

SEQ ID NO: 1872228 - RNA, 19 nt, Artificial Sequence
  Description of Artificial Sequence: Synthetic oligonucleotide
  Antisense strand to SEQ ID NO: 1872227
uuugcugcaggauacaggc

SEQ ID NO: 1872229 - RNA, 19 nt, Artificial Sequence
  Description of Artificial Sequence: Synthetic oligonucleotide
  Sense strand starting at position 2732 of SEQ ID NO: 1564337
uguauccugcagcaaauaa

SEQ ID NO: 1872230 - RNA, 19 nt, Artificial Sequence
  Description of Artificial Sequence: Synthetic oligonucleotide
  Antisense strand to SEQ ID NO: 1872229
uuauuugcugcaggauaca

SEQ ID NO: 1872231 - RNA, 19 nt, Artificial Sequence
  Description of Artificial Sequence: Synthetic oligonucleotide
  Sense strand starting at position 2772 of SEQ ID NO: 1564337
ccgucuguugcucucuaga

SEQ ID NO: 1872232 - RNA, 19 nt, Artificial Sequence
  Description of Artificial Sequence: Synthetic oligonucleotide
  Antisense strand to SEQ ID NO: 1872231
ucuagagagcaacagacgg

SEQ ID NO: 1872233 - RNA, 19 nt, Artificial Sequence
  Description of Artificial Sequence: Synthetic oligonucleotide
  Sense strand starting at position 2774 of SEQ ID NO: 1564337
gucuguugcucucuagaug

SEQ ID NO: 1872234 - RNA, 19 nt, Artificial Sequence
  Description of Artificial Sequence: Synthetic oligonucleotide
  Antisense strand to SEQ ID NO: 1872233
caucuagagagcaacagac

SEQ ID NO: 1872235 - RNA, 19 nt, Artificial Sequence
  Description of Artificial Sequence: Synthetic oligonucleotide
  Sense strand starting at position 2777 of SEQ ID NO: 1564337
uguugcucucuagaugcua

SEQ ID NO: 1872236 - RNA, 19 nt, Artificial Sequence
  Description of Artificial Sequence: Synthetic oligonucleotide
  Antisense strand to SEQ ID NO: 1872235
uagcaucuagagagcaaca

SEQ ID NO: 1872237 - RNA, 19 nt, Artificial Sequence
  Description of Artificial Sequence: Synthetic oligonucleotide
  Sense strand starting at position 2963 of SEQ ID NO: 1564337
agaggaaacucuucuuggu

SEQ ID NO: 1872238 - RNA, 19 nt, Artificial Sequence
  Description of Artificial Sequence: Synthetic oligonucleotide
  Antisense strand to SEQ ID NO: 1872237
accaagaagaguuuccucu

SEQ ID NO: 1872239 - RNA, 19 nt, Artificial Sequence
  Description of Artificial Sequence: Synthetic oligonucleotide
  Sense strand starting at position 2965 of SEQ ID NO: 1564337
aggaaacucuucuugguac

SEQ ID NO: 1872240 - RNA, 19 nt, Artificial Sequence
  Description of Artificial Sequence: Synthetic oligonucleotide
  Antisense strand to SEQ ID NO: 1872239
guaccaagaagaguuuccu

SEQ ID NO: 1872241 - RNA, 19 nt, Artificial Sequence
  Description of Artificial Sequence: Synthetic oligonucleotide
  Sense strand starting at position 3311 of SEQ ID NO: 1564337
ggugaagagugugauuugu

SEQ ID NO: 1872242 - RNA, 19 nt, Artificial Sequence
  Description of Artificial Sequence: Synthetic oligonucleotide
  Antisense strand to SEQ ID NO: 1872241
acaaaucacacucuucacc

SEQ ID NO: 1872243 - RNA, 19 nt, Artificial Sequence
  Description of Artificial Sequence: Synthetic oligonucleotide
  Sense strand starting at position 3315 of SEQ ID NO: 1564337
aagagugugauuuguaguu

SEQ ID NO: 1872244 - RNA, 19 nt, Artificial Sequence
  Description of Artificial Sequence: Synthetic oligonucleotide
  Antisense strand to SEQ ID NO: 1872243
aacuacaaaucacacucuu

SEQ ID NO: 1872245 - RNA, 19 nt, Artificial Sequence
  Description of Artificial Sequence: Synthetic oligonucleotide
  Sense strand starting at position 3350 of SEQ ID NO: 1564337
uugauucugagguguagag

SEQ ID NO: 1872246 - RNA, 19 nt, Artificial Sequence
  Description of Artificial Sequence: Synthetic oligonucleotide
  Antisense strand to SEQ ID NO: 1872245
cucuacaccucagaaucaa

SEQ ID NO: 1872247 - RNA, 19 nt, Artificial Sequence
  Description of Artificial Sequence: Synthetic oligonucleotide
  Sense strand starting at position 3398 of SEQ ID NO: 1564337
ccacgugaugcugaagguu

SEQ ID NO: 1872248 - RNA, 19 nt, Artificial Sequence
  Description of Artificial Sequence: Synthetic oligonucleotide
  Antisense strand to SEQ ID NO: 1872247
aaccuucagcaucacgugg

SEQ ID NO: 1872249 - RNA, 19 nt, Artificial Sequence
  Description of Artificial Sequence: Synthetic oligonucleotide
  Sense strand starting at position 3401 of SEQ ID NO: 1564337
cgugaugcugaagguuaua

SEQ ID NO: 1872250 - RNA, 19 nt, Artificial Sequence
  Description of Artificial Sequence: Synthetic oligonucleotide
  Antisense strand to SEQ ID NO: 1872249
uauaaccuucagcaucacg

SEQ ID NO: 1872251 - RNA, 19 nt, Artificial Sequence
  Description of Artificial Sequence: Synthetic oligonucleotide
  Sense strand starting at position 3404 of SEQ ID NO: 1564337
gaugcugaagguuauaagu

SEQ ID NO: 1872252 - RNA, 19 nt, Artificial Sequence
  Description of Artificial Sequence: Synthetic oligonucleotide
  Antisense strand to SEQ ID NO: 1872251
acuuauaaccuucagcauc

SEQ ID NO: 1872253 - RNA, 19 nt, Artificial Sequence
  Description of Artificial Sequence: Synthetic oligonucleotide
  Sense strand starting at position 3441 of SEQ ID NO: 1564337
uguaucuguccauggcaua

SEQ ID NO: 1872254 - RNA, 19 nt, Artificial Sequence
  Description of Artificial Sequence: Synthetic oligonucleotide
  Antisense strand to SEQ ID NO: 1872253
uaugccauggacagauaca

SEQ ID NO: 1872255 - RNA, 19 nt, Artificial Sequence
  Description of Artificial Sequence: Synthetic oligonucleotide
  Sense strand starting at position 3442 of SEQ ID NO: 1564337
guaucuguccauggcauau

SEQ ID NO: 1872256 - RNA, 19 nt, Artificial Sequence
  Description of Artificial Sequence: Synthetic oligonucleotide
  Antisense strand to SEQ ID NO: 1872255
auaugccauggacagauac

SEQ ID NO: 1872257 - RNA, 19 nt, Artificial Sequence
  Description of Artificial Sequence: Synthetic oligonucleotide
  Sense strand starting at position 3451 of SEQ ID NO: 1564337
cauggcauaucugucauga

SEQ ID NO: 1872258 - RNA, 19 nt, Artificial Sequence
  Description of Artificial Sequence: Synthetic oligonucleotide
  Antisense strand to SEQ ID NO: 1872257
ucaugacagauaugccaug

SEQ ID NO: 1872259 - RNA, 19 nt, Artificial Sequence
  Description of Artificial Sequence: Synthetic oligonucleotide
  Sense strand starting at position 3501 of SEQ ID NO: 1564337
agguccuuccuggaauugu

SEQ ID NO: 1872260 - RNA, 19 nt, Artificial Sequence
  Description of Artificial Sequence: Synthetic oligonucleotide
  Antisense strand to SEQ ID NO: 1872259
acaauuccaggaaggaccu

SEQ ID NO: 1872261 - RNA, 19 nt, Artificial Sequence
  Description of Artificial Sequence: Synthetic oligonucleotide
  Sense strand starting at position 3509 of SEQ ID NO: 1564337
ccuggaauuguaugcaaag

SEQ ID NO: 1872262 - RNA, 19 nt, Artificial Sequence
  Description of Artificial Sequence: Synthetic oligonucleotide
  Antisense strand to SEQ ID NO: 1872261
cuuugcauacaauuccagg

SEQ ID NO: 1872263 - RNA, 19 nt, Artificial Sequence
  Description of Artificial Sequence: Synthetic oligonucleotide
  Sense strand starting at position 3510 of SEQ ID NO: 1564337
cuggaauuguaugcaaaga

SEQ ID NO: 1872264 - RNA, 19 nt, Artificial Sequence
  Description of Artificial Sequence: Synthetic oligonucleotide
  Antisense strand to SEQ ID NO: 1872263
ucuuugcauacaauuccag

SEQ ID NO: 1872265 - RNA, 19 nt, Artificial Sequence
  Description of Artificial Sequence: Synthetic oligonucleotide
  Sense strand starting at position 3574 of SEQ ID NO: 1564337
ucaaaugggucugucauaa

SEQ ID NO: 1872266 - RNA, 19 nt, Artificial Sequence
  Description of Artificial Sequence: Synthetic oligonucleotide
  Antisense strand to SEQ ID NO: 1872265
uuaugacagacccauuuga

SEQ ID NO: 1872267 - RNA, 19 nt, Artificial Sequence
  Description of Artificial Sequence: Synthetic oligonucleotide
  Sense strand starting at position 3586 of SEQ ID NO: 1564337
gucauaacgucuuccuucu

SEQ ID NO: 1872268 - RNA, 19 nt, Artificial Sequence
  Description of Artificial Sequence: Synthetic oligonucleotide
  Antisense strand to SEQ ID NO: 1872267
agaaggaagacguuaugac

SEQ ID NO: 1872269 - RNA, 19 nt, Artificial Sequence
  Description of Artificial Sequence: Synthetic oligonucleotide
  Sense strand starting at position 3605 of SEQ ID NO: 1564337
ucaagccaugcuugaugaa

SEQ ID NO: 1872270 - RNA, 19 nt, Artificial Sequence
  Description of Artificial Sequence: Synthetic oligonucleotide
  Antisense strand to SEQ ID NO: 1872269
uucaucaagcauggcuuga

SEQ ID NO: 1872271 - RNA, 19 nt, Artificial Sequence
  Description of Artificial Sequence: Synthetic oligonucleotide
  Sense strand starting at position 3621 of SEQ ID NO: 1564337
gaagaagugugagaaauaa

SEQ ID NO: 1872272 - RNA, 19 nt, Artificial Sequence
  Description of Artificial Sequence: Synthetic oligonucleotide
  Antisense strand to SEQ ID NO: 1872271
uuauuucucacacuucuuc

SEQ ID NO: 1872273 - RNA, 19 nt, Artificial Sequence
  Description of Artificial Sequence: Synthetic oligonucleotide
  Sense strand starting at position 3669 of SEQ ID NO: 1564337
agcucucuguugcugauau

SEQ ID NO: 1872274 - RNA, 19 nt, Artificial Sequence
  Description of Artificial Sequence: Synthetic oligonucleotide
  Antisense strand to SEQ ID NO: 1872273
auaucagcaacagagagcu

SEQ ID NO: 1872275 - RNA, 19 nt, Artificial Sequence
  Description of Artificial Sequence: Synthetic oligonucleotide
  Sense strand starting at position 3734 of SEQ ID NO: 1564337
cugugagcucuucagggua

SEQ ID NO: 1872276 - RNA, 19 nt, Artificial Sequence
  Description of Artificial Sequence: Synthetic oligonucleotide
  Antisense strand to SEQ ID NO: 1872275
uacccugaagagcucacag

SEQ ID NO: 1872277 - RNA, 19 nt, Artificial Sequence
  Description of Artificial Sequence: Synthetic oligonucleotide
  Sense strand starting at position 3750 of SEQ ID NO: 1564337
guacuucuccuuugcugga

SEQ ID NO: 1872278 - RNA, 19 nt, Artificial Sequence
  Description of Artificial Sequence: Synthetic oligonucleotide
  Antisense strand to SEQ ID NO: 1872277
uccagcaaaggagaaguac

SEQ ID NO: 1872279 - RNA, 19 nt, Artificial Sequence
  Description of Artificial Sequence: Synthetic oligonucleotide
  Sense strand starting at position 3828 of SEQ ID NO: 1564337
caaagugaauggccaugaa

SEQ ID NO: 1872280 - RNA, 19 nt, Artificial Sequence
  Description of Artificial Sequence: Synthetic oligonucleotide
  Antisense strand to SEQ ID NO: 1872279
uucauggccauucacuuug

SEQ ID NO: 1872281 - RNA, 19 nt, Artificial Sequence
  Description of Artificial Sequence: Synthetic oligonucleotide
  Sense strand starting at position 3893 of SEQ ID NO: 1564337
agguauuacuuccuuuaug

SEQ ID NO: 1872282 - RNA, 19 nt, Artificial Sequence
  Description of Artificial Sequence: Synthetic oligonucleotide
  Antisense strand to SEQ ID NO: 1872281
cauaaaggaaguaauaccu

SEQ ID NO: 1872283 - RNA, 19 nt, Artificial Sequence
  Description of Artificial Sequence: Synthetic oligonucleotide
  Sense strand starting at position 3894 of SEQ ID NO: 1564337
gguauuacuuccuuuaugu

SEQ ID NO: 1872284 - RNA, 19 nt, Artificial Sequence
  Description of Artificial Sequence: Synthetic oligonucleotide
  Antisense strand to SEQ ID NO: 1872283
acauaaaggaaguaauacc

SEQ ID NO: 1872285 - RNA, 19 nt, Artificial Sequence
  Description of Artificial Sequence: Synthetic oligonucleotide
  Sense strand starting at position 3950 of SEQ ID NO: 1564337
gacuccugauguuuagaag

SEQ ID NO: 1872286 - RNA, 19 nt, Artificial Sequence
  Description of Artificial Sequence: Synthetic oligonucleotide
  Antisense strand to SEQ ID NO: 1872285
cuucuaaacaucaggaguc

SEQ ID NO: 1872287 - RNA, 19 nt, Artificial Sequence
  Description of Artificial Sequence: Synthetic oligonucleotide
  Sense strand starting at position 50 of SEQ ID NO: 1564338
ugagcaaugagguggaagu

SEQ ID NO: 1872288 - RNA, 19 nt, Artificial Sequence
  Description of Artificial Sequence: Synthetic oligonucleotide
  Antisense strand to SEQ ID NO: 1872287
acuuccaccucauugcuca

SEQ ID NO: 1872289 - RNA, 19 nt, Artificial Sequence
  Description of Artificial Sequence: Synthetic oligonucleotide
  Sense strand starting at position 195 of SEQ ID NO: 1564338
ggcuuuggauauccaguaa

SEQ ID NO: 1872290 - RNA, 19 nt, Artificial Sequence
  Description of Artificial Sequence: Synthetic oligonucleotide
  Antisense strand to SEQ ID NO: 1872289
uuacuggauauccaaagcc

SEQ ID NO: 1872291 - RNA, 19 nt, Artificial Sequence
  Description of Artificial Sequence: Synthetic oligonucleotide
  Sense strand starting at position 199 of SEQ ID NO: 1564338
uuggauauccaguaagagc

SEQ ID NO: 1872292 - RNA, 19 nt, Artificial Sequence
  Description of Artificial Sequence: Synthetic oligonucleotide
  Antisense strand to SEQ ID NO: 1872291
gcucuuacuggauauccaa

SEQ ID NO: 1872293 - RNA, 19 nt, Artificial Sequence
  Description of Artificial Sequence: Synthetic oligonucleotide
  Sense strand starting at position 348 of SEQ ID NO: 1564338
gggaaucuccacugaaggu

SEQ ID NO: 1872294 - RNA, 19 nt, Artificial Sequence
  Description of Artificial Sequence: Synthetic oligonucleotide
  Antisense strand to SEQ ID NO: 1872293
accuucaguggagauuccc

SEQ ID NO: 1872295 - RNA, 19 nt, Artificial Sequence
  Description of Artificial Sequence: Synthetic oligonucleotide
  Sense strand starting at position 362 of SEQ ID NO: 1564338
aagguuaaaguguauugca

SEQ ID NO: 1872296 - RNA, 19 nt, Artificial Sequence
  Description of Artificial Sequence: Synthetic oligonucleotide
  Antisense strand to SEQ ID NO: 1872295
ugcaauacacuuuaaccuu

SEQ ID NO: 1872297 - RNA, 19 nt, Artificial Sequence
  Description of Artificial Sequence: Synthetic oligonucleotide
  Sense strand starting at position 384 of SEQ ID NO: 1564338
ggaaaucuguagccucuaa

SEQ ID NO: 1872298 - RNA, 19 nt, Artificial Sequence
  Description of Artificial Sequence: Synthetic oligonucleotide
  Antisense strand to SEQ ID NO: 1872297
uuagaggcuacagauuucc

SEQ ID NO: 1872299 - RNA, 19 nt, Artificial Sequence
  Description of Artificial Sequence: Synthetic oligonucleotide
  Sense strand starting at position 433 of SEQ ID NO: 1564338
ugcugaugucuccacaacu

SEQ ID NO: 1872300 - RNA, 19 nt, Artificial Sequence
  Description of Artificial Sequence: Synthetic oligonucleotide
  Antisense strand to SEQ ID NO: 1872299
aguuguggagacaucagca

SEQ ID NO: 1872301 - RNA, 19 nt, Artificial Sequence
  Description of Artificial Sequence: Synthetic oligonucleotide
  Sense strand starting at position 480 of SEQ ID NO: 1564338
cugagaguucuaggaauuc

SEQ ID NO: 1872302 - RNA, 19 nt, Artificial Sequence
  Description of Artificial Sequence: Synthetic oligonucleotide
  Antisense strand to SEQ ID NO: 1872301
gaauuccuagaacucucag

SEQ ID NO: 1872303 - RNA, 19 nt, Artificial Sequence
  Description of Artificial Sequence: Synthetic oligonucleotide
  Sense strand starting at position 489 of SEQ ID NO: 1564338
cuaggaauuccugggcauu

SEQ ID NO: 1872304 - RNA, 19 nt, Artificial Sequence
  Description of Artificial Sequence: Synthetic oligonucleotide
  Antisense strand to SEQ ID NO: 1872303
aaugcccaggaauuccuag

SEQ ID NO: 1872305 - RNA, 19 nt, Artificial Sequence
  Description of Artificial Sequence: Synthetic oligonucleotide
  Sense strand starting at position 693 of SEQ ID NO: 1564338
uugggaucucaugggccau

SEQ ID NO: 1872306 - RNA, 19 nt, Artificial Sequence
  Description of Artificial Sequence: Synthetic oligonucleotide
  Antisense strand to SEQ ID NO: 1872305
auggcccaugagaucccaa

SEQ ID NO: 1872307 - RNA, 19 nt, Artificial Sequence
  Description of Artificial Sequence: Synthetic oligonucleotide
  Sense strand starting at position 694 of SEQ ID NO: 1564338
ugggaucucaugggccauu

SEQ ID NO: 1872308 - RNA, 19 nt, Artificial Sequence
  Description of Artificial Sequence: Synthetic oligonucleotide
  Antisense strand to SEQ ID NO: 1872307
aauggcccaugagauccca

SEQ ID NO: 1872309 - RNA, 19 nt, Artificial Sequence
  Description of Artificial Sequence: Synthetic oligonucleotide
  Sense strand starting at position 928 of SEQ ID NO: 1564338
ggacuuucggaguagauca

SEQ ID NO: 1872310 - RNA, 19 nt, Artificial Sequence
  Description of Artificial Sequence: Synthetic oligonucleotide
  Antisense strand to SEQ ID NO: 1872309
ugaucuacuccgaaagucc

SEQ ID NO: 1872311 - RNA, 19 nt, Artificial Sequence
  Description of Artificial Sequence: Synthetic oligonucleotide
  Sense strand starting at position 1100 of SEQ ID NO: 1564338
ggaaauggguaugauuuga

SEQ ID NO: 1872312 - RNA, 19 nt, Artificial Sequence
  Description of Artificial Sequence: Synthetic oligonucleotide
  Antisense strand to SEQ ID NO: 1872311
ucaaaucauacccauuucc

SEQ ID NO: 1872313 - RNA, 19 nt, Artificial Sequence
  Description of Artificial Sequence: Synthetic oligonucleotide
  Sense strand starting at position 1105 of SEQ ID NO: 1564338
uggguaugauuugacaauu

SEQ ID NO: 1872314 - RNA, 19 nt, Artificial Sequence
  Description of Artificial Sequence: Synthetic oligonucleotide
  Antisense strand to SEQ ID NO: 1872313
aauugucaaaucauaccca

SEQ ID NO: 1872315 - RNA, 19 nt, Artificial Sequence
  Description of Artificial Sequence: Synthetic oligonucleotide
  Sense strand starting at position 1118 of SEQ ID NO: 1564338
acaauuugcuaccaagaga

SEQ ID NO: 1872316 - RNA, 19 nt, Artificial Sequence
  Description of Artificial Sequence: Synthetic oligonucleotide
  Antisense strand to SEQ ID NO: 1872315
ucucuugguagcaaauugu

SEQ ID NO: 1872317 - RNA, 19 nt, Artificial Sequence
  Description of Artificial Sequence: Synthetic oligonucleotide
  Sense strand starting at position 1133 of SEQ ID NO: 1564338
gagagauuggguggguguu

SEQ ID NO: 1872318 - RNA, 19 nt, Artificial Sequence
  Description of Artificial Sequence: Synthetic oligonucleotide
  Antisense strand to SEQ ID NO: 1872317
aacacccacccaaucucuc

SEQ ID NO: 1872319 - RNA, 19 nt, Artificial Sequence
  Description of Artificial Sequence: Synthetic oligonucleotide
  Sense strand starting at position 1153 of SEQ ID NO: 1564338
gugagauccuuccugaaag

SEQ ID NO: 1872320 - RNA, 19 nt, Artificial Sequence
  Description of Artificial Sequence: Synthetic oligonucleotide
  Antisense strand to SEQ ID NO: 1872319
cuuucaggaaggaucucac

SEQ ID NO: 1872321 - RNA, 19 nt, Artificial Sequence
  Description of Artificial Sequence: Synthetic oligonucleotide
  Sense strand starting at position 1236 of SEQ ID NO: 1564338
gcugauuaucaagagguca

SEQ ID NO: 1872322 - RNA, 19 nt, Artificial Sequence
  Description of Artificial Sequence: Synthetic oligonucleotide
  Antisense strand to SEQ ID NO: 1872321
ugaccucuugauaaucagc

SEQ ID NO: 1872323 - RNA, 19 nt, Artificial Sequence
  Description of Artificial Sequence: Synthetic oligonucleotide
  Sense strand starting at position 1439 of SEQ ID NO: 1564338
gguauauaugcuggaucug

SEQ ID NO: 1872324 - RNA, 19 nt, Artificial Sequence
  Description of Artificial Sequence: Synthetic oligonucleotide
  Antisense strand to SEQ ID NO: 1872323
cagauccagcauauauacc

SEQ ID NO: 1872325 - RNA, 19 nt, Artificial Sequence
  Description of Artificial Sequence: Synthetic oligonucleotide
  Sense strand starting at position 1440 of SEQ ID NO: 1564338
guauauaugcuggaucuga

SEQ ID NO: 1872326 - RNA, 19 nt, Artificial Sequence
  Description of Artificial Sequence: Synthetic oligonucleotide
  Antisense strand to SEQ ID NO: 1872325
ucagauccagcauauauac

SEQ ID NO: 1872327 - RNA, 19 nt, Artificial Sequence
  Description of Artificial Sequence: Synthetic oligonucleotide
  Sense strand starting at position 1692 of SEQ ID NO: 1564338
gggccagcccaagagauau

SEQ ID NO: 1872328 - RNA, 19 nt, Artificial Sequence
  Description of Artificial Sequence: Synthetic oligonucleotide
  Antisense strand to SEQ ID NO: 1872327
auaucucuugggcuggccc

SEQ ID NO: 1872329 - RNA, 19 nt, Artificial Sequence
  Description of Artificial Sequence: Synthetic oligonucleotide
  Sense strand starting at position 1918 of SEQ ID NO: 1564338
auaaauguacguuaccauu

SEQ ID NO: 1872330 - RNA, 19 nt, Artificial Sequence
  Description of Artificial Sequence: Synthetic oligonucleotide
  Antisense strand to SEQ ID NO: 1872329
aaugguaacguacauuuau

SEQ ID NO: 1872331 - RNA, 19 nt, Artificial Sequence
  Description of Artificial Sequence: Synthetic oligonucleotide
  Sense strand starting at position 1940 of SEQ ID NO: 1564338
agacuuaguccaggagcuu

SEQ ID NO: 1872332 - RNA, 19 nt, Artificial Sequence
  Description of Artificial Sequence: Synthetic oligonucleotide
  Antisense strand to SEQ ID NO: 1872331
aagcuccuggacuaagucu

SEQ ID NO: 1872333 - RNA, 19 nt, Artificial Sequence
  Description of Artificial Sequence: Synthetic oligonucleotide
  Sense strand starting at position 2220 of SEQ ID NO: 1564338
aggaaauugugaguaauac

SEQ ID NO: 1872334 - RNA, 19 nt, Artificial Sequence
  Description of Artificial Sequence: Synthetic oligonucleotide
  Antisense strand to SEQ ID NO: 1872333
guauuacucacaauuuccu

SEQ ID NO: 1872335 - RNA, 19 nt, Artificial Sequence
  Description of Artificial Sequence: Synthetic oligonucleotide
  Sense strand starting at position 2346 of SEQ ID NO: 1564338
gccauuuguuuacuucuca

SEQ ID NO: 1872336 - RNA, 19 nt, Artificial Sequence
  Description of Artificial Sequence: Synthetic oligonucleotide
  Antisense strand to SEQ ID NO: 1872335
ugagaaguaaacaaauggc

SEQ ID NO: 1872337 - RNA, 19 nt, Artificial Sequence
  Description of Artificial Sequence: Synthetic oligonucleotide
  Sense strand starting at position 2561 of SEQ ID NO: 1564338
ucugaauguccuggaccaa

SEQ ID NO: 1872338 - RNA, 19 nt, Artificial Sequence
  Description of Artificial Sequence: Synthetic oligonucleotide
  Antisense strand to SEQ ID NO: 1872337
uugguccaggacauucaga

SEQ ID NO: 1872339 - RNA, 19 nt, Artificial Sequence
  Description of Artificial Sequence: Synthetic oligonucleotide
  Sense strand starting at position 2585 of SEQ ID NO: 1564338
ucaugcuucccugaacuga

SEQ ID NO: 1872340 - RNA, 19 nt, Artificial Sequence
  Description of Artificial Sequence: Synthetic oligonucleotide
  Antisense strand to SEQ ID NO: 1872339
ucaguucagggaagcauga

SEQ ID NO: 1872341 - RNA, 19 nt, Artificial Sequence
  Description of Artificial Sequence: Synthetic oligonucleotide
  Sense strand starting at position 2863 of SEQ ID NO: 1564338
ugcauuagucagcauaaug

SEQ ID NO: 1872342 - RNA, 19 nt, Artificial Sequence
  Description of Artificial Sequence: Synthetic oligonucleotide
  Antisense strand to SEQ ID NO: 1872341
cauuaugcugacuaaugca

SEQ ID NO: 1872343 - RNA, 19 nt, Artificial Sequence
  Description of Artificial Sequence: Synthetic oligonucleotide
  Sense strand starting at position 2870 of SEQ ID NO: 1564338
gucagcauaaugggauaaa

SEQ ID NO: 1872344 - RNA, 19 nt, Artificial Sequence
  Description of Artificial Sequence: Synthetic oligonucleotide
  Antisense strand to SEQ ID NO: 1872343
uuuaucccauuaugcugac

SEQ ID NO: 1872345 - RNA, 19 nt, Artificial Sequence
  Description of Artificial Sequence: Synthetic oligonucleotide
  Sense strand starting at position 2939 of SEQ ID NO: 1564338
ccugaauccgaaugcagaa

SEQ ID NO: 1872346 - RNA, 19 nt, Artificial Sequence
  Description of Artificial Sequence: Synthetic oligonucleotide
  Antisense strand to SEQ ID NO: 1872345
uucugcauucggauucagg

SEQ ID NO: 1872347 - RNA, 19 nt, Artificial Sequence
  Description of Artificial Sequence: Synthetic oligonucleotide
  Sense strand starting at position 3257 of SEQ ID NO: 1564338
cuguaacaaugaguuugaa

SEQ ID NO: 1872348 - RNA, 19 nt, Artificial Sequence
  Description of Artificial Sequence: Synthetic oligonucleotide
  Antisense strand to SEQ ID NO: 1872347
uucaaacucauuguuacag

SEQ ID NO: 1872349 - RNA, 19 nt, Artificial Sequence
  Description of Artificial Sequence: Synthetic oligonucleotide
  Sense strand starting at position 3260 of SEQ ID NO: 1564338
uaacaaugaguuugaaggu

SEQ ID NO: 1872350 - RNA, 19 nt, Artificial Sequence
  Description of Artificial Sequence: Synthetic oligonucleotide
  Antisense strand to SEQ ID NO: 1872349
accuucaaacucauuguua

SEQ ID NO: 1872351 - RNA, 19 nt, Artificial Sequence
  Description of Artificial Sequence: Synthetic oligonucleotide
  Sense strand starting at position 3616 of SEQ ID NO: 1564338
auguuauaccuauaugccu

SEQ ID NO: 1872352 - RNA, 19 nt, Artificial Sequence
  Description of Artificial Sequence: Synthetic oligonucleotide
  Antisense strand to SEQ ID NO: 1872351
aggcauauagguauaacau

SEQ ID NO: 1872353 - RNA, 19 nt, Artificial Sequence
  Description of Artificial Sequence: Synthetic oligonucleotide
  Sense strand starting at position 3674 of SEQ ID NO: 1564338
uccuucugauaguuagaau

SEQ ID NO: 1872354 - RNA, 19 nt, Artificial Sequence
  Description of Artificial Sequence: Synthetic oligonucleotide
  Antisense strand to SEQ ID NO: 1872353
auucuaacuaucagaagga

SEQ ID NO: 1872355 - RNA, 19 nt, Artificial Sequence
  Description of Artificial Sequence: Synthetic oligonucleotide
  Sense strand starting at position 3742 of SEQ ID NO: 1564338
acuuuauaggguugucaaa

SEQ ID NO: 1872356 - RNA, 19 nt, Artificial Sequence
  Description of Artificial Sequence: Synthetic oligonucleotide
  Antisense strand to SEQ ID NO: 1872355
uuugacaacccuauaaagu

SEQ ID NO: 1872357 - RNA, 19 nt, Artificial Sequence
  Description of Artificial Sequence: Synthetic oligonucleotide
  Sense strand starting at position 3897 of SEQ ID NO: 1564338
uuuaaucaccugugaauug

SEQ ID NO: 1872358 - RNA, 19 nt, Artificial Sequence
  Description of Artificial Sequence: Synthetic oligonucleotide
  Antisense strand to SEQ ID NO: 1872357
caauucacaggugauuaaa

SEQ ID NO: 1872359 - RNA, 19 nt, Artificial Sequence
  Description of Artificial Sequence: Synthetic oligonucleotide
  Sense strand starting at position 3902 of SEQ ID NO: 1564338
ucaccugugaauugggaaa

SEQ ID NO: 1872360 - RNA, 19 nt, Artificial Sequence
  Description of Artificial Sequence: Synthetic oligonucleotide
  Antisense strand to SEQ ID NO: 1872359
uuucccaauucacagguga

SEQ ID NO: 1872361 - RNA, 19 nt, Artificial Sequence
  Description of Artificial Sequence: Synthetic oligonucleotide
  Sense strand starting at position 3944 of SEQ ID NO: 1564338
uuguguagaggcugagaaa

SEQ ID NO: 1872362 - RNA, 19 nt, Artificial Sequence
  Description of Artificial Sequence: Synthetic oligonucleotide
  Antisense strand to SEQ ID NO: 1872361
uuucucagccucuacacaa

SEQ ID NO: 1872363 - RNA, 19 nt, Artificial Sequence
  Description of Artificial Sequence: Synthetic oligonucleotide
  Sense strand starting at position 3966 of SEQ ID NO: 1564338
gucucauaccgagaaaucu

SEQ ID NO: 1872364 - RNA, 19 nt, Artificial Sequence
  Description of Artificial Sequence: Synthetic oligonucleotide
  Antisense strand to SEQ ID NO: 1872363
agauuucucgguaugagac

SEQ ID NO: 1872365 - RNA, 19 nt, Artificial Sequence
  Description of Artificial Sequence: Synthetic oligonucleotide
  Sense strand starting at position 3974 of SEQ ID NO: 1564338
ccgagaaaucuacagugca

SEQ ID NO: 1872366 - RNA, 19 nt, Artificial Sequence
  Description of Artificial Sequence: Synthetic oligonucleotide
  Antisense strand to SEQ ID NO: 1872365
ugcacuguagauuucucgg

SEQ ID NO: 1872367 - RNA, 19 nt, Artificial Sequence
  Description of Artificial Sequence: Synthetic oligonucleotide
  Sense strand starting at position 31 of SEQ ID NO: 1564339
guagaauucugaguuugaa

SEQ ID NO: 1872368 - RNA, 19 nt, Artificial Sequence
  Description of Artificial Sequence: Synthetic oligonucleotide
  Antisense strand to SEQ ID NO: 1872367
uucaaacucagaauucuac

SEQ ID NO: 1872369 - RNA, 19 nt, Artificial Sequence
  Description of Artificial Sequence: Synthetic oligonucleotide
  Sense strand starting at position 54 of SEQ ID NO: 1564339
caagcuauacugugagaac

SEQ ID NO: 1872370 - RNA, 19 nt, Artificial Sequence
  Description of Artificial Sequence: Synthetic oligonucleotide
  Antisense strand to SEQ ID NO: 1872369
guucucacaguauagcuug

SEQ ID NO: 1872371 - RNA, 19 nt, Artificial Sequence
  Description of Artificial Sequence: Synthetic oligonucleotide
  Sense strand starting at position 91 of SEQ ID NO: 1564339
gauauagagugcuccuuag

SEQ ID NO: 1872372 - RNA, 19 nt, Artificial Sequence
  Description of Artificial Sequence: Synthetic oligonucleotide
  Antisense strand to SEQ ID NO: 1872371
cuaaggagcacucuauauc

SEQ ID NO: 1872373 - RNA, 19 nt, Artificial Sequence
  Description of Artificial Sequence: Synthetic oligonucleotide
  Sense strand starting at position 264 of SEQ ID NO: 1564339
agugcaauccaaugagaag

SEQ ID NO: 1872374 - RNA, 19 nt, Artificial Sequence
  Description of Artificial Sequence: Synthetic oligonucleotide
  Antisense strand to SEQ ID NO: 1872373
cuucucauuggauugcacu

SEQ ID NO: 1872375 - RNA, 19 nt, Artificial Sequence
  Description of Artificial Sequence: Synthetic oligonucleotide
  Sense strand starting at position 265 of SEQ ID NO: 1564339
gugcaauccaaugagaagu

SEQ ID NO: 1872376 - RNA, 19 nt, Artificial Sequence
  Description of Artificial Sequence: Synthetic oligonucleotide
  Antisense strand to SEQ ID NO: 1872375
acuucucauuggauugcac

SEQ ID NO: 1872377 - RNA, 19 nt, Artificial Sequence
  Description of Artificial Sequence: Synthetic oligonucleotide
  Sense strand starting at position 474 of SEQ ID NO: 1564339
ggugacucuagugggagaa

SEQ ID NO: 1872378 - RNA, 19 nt, Artificial Sequence
  Description of Artificial Sequence: Synthetic oligonucleotide
  Antisense strand to SEQ ID NO: 1872377
uucucccacuagagucacc

SEQ ID NO: 1872379 - RNA, 19 nt, Artificial Sequence
  Description of Artificial Sequence: Synthetic oligonucleotide
  Sense strand starting at position 492 of SEQ ID NO: 1564339
aggcacuaucaucauguga

SEQ ID NO: 1872380 - RNA, 19 nt, Artificial Sequence
  Description of Artificial Sequence: Synthetic oligonucleotide
  Antisense strand to SEQ ID NO: 1872379
ucacaugaugauagugccu

SEQ ID NO: 1872381 - RNA, 19 nt, Artificial Sequence
  Description of Artificial Sequence: Synthetic oligonucleotide
  Sense strand starting at position 524 of SEQ ID NO: 1564339
accaguauaaggugucaga

SEQ ID NO: 1872382 - RNA, 19 nt, Artificial Sequence
  Description of Artificial Sequence: Synthetic oligonucleotide
  Antisense strand to SEQ ID NO: 1872381
ucugacaccuuauacuggu

SEQ ID NO: 1872383 - RNA, 19 nt, Artificial Sequence
  Description of Artificial Sequence: Synthetic oligonucleotide
  Sense strand starting at position 634 of SEQ ID NO: 1564339
gggccucucaugugagaga

SEQ ID NO: 1872384 - RNA, 19 nt, Artificial Sequence
  Description of Artificial Sequence: Synthetic oligonucleotide
  Antisense strand to SEQ ID NO: 1872383
ucucucacaugagaggccc

SEQ ID NO: 1872385 - RNA, 19 nt, Artificial Sequence
  Description of Artificial Sequence: Synthetic oligonucleotide
  Sense strand starting at position 848 of SEQ ID NO: 1564339
uagauuccagugugugaaa

SEQ ID NO: 1872386 - RNA, 19 nt, Artificial Sequence
  Description of Artificial Sequence: Synthetic oligonucleotide
  Antisense strand to SEQ ID NO: 1872385
uuucacacacuggaaucua

SEQ ID NO: 1872387 - RNA, 19 nt, Artificial Sequence
  Description of Artificial Sequence: Synthetic oligonucleotide
  Sense strand starting at position 900 of SEQ ID NO: 1564339
uuggaacucucaguaggaa

SEQ ID NO: 1872388 - RNA, 19 nt, Artificial Sequence
  Description of Artificial Sequence: Synthetic oligonucleotide
  Antisense strand to SEQ ID NO: 1872387
uuccuacugagaguuccaa

SEQ ID NO: 1872389 - RNA, 19 nt, Artificial Sequence
  Description of Artificial Sequence: Synthetic oligonucleotide
  Sense strand starting at position 903 of SEQ ID NO: 1564339
gaacucucaguaggaaauc

SEQ ID NO: 1872390 - RNA, 19 nt, Artificial Sequence
  Description of Artificial Sequence: Synthetic oligonucleotide
  Antisense strand to SEQ ID NO: 1872389
gauuuccuacugagaguuc

SEQ ID NO: 1872391 - RNA, 19 nt, Artificial Sequence
  Description of Artificial Sequence: Synthetic oligonucleotide
  Sense strand starting at position 978 of SEQ ID NO: 1564339
uuggaugcauuggugagau

SEQ ID NO: 1872392 - RNA, 19 nt, Artificial Sequence
  Description of Artificial Sequence: Synthetic oligonucleotide
  Antisense strand to SEQ ID NO: 1872391
aucucaccaaugcauccaa

SEQ ID NO: 1872393 - RNA, 19 nt, Artificial Sequence
  Description of Artificial Sequence: Synthetic oligonucleotide
  Sense strand starting at position 1090 of SEQ ID NO: 1564339
augguugcccuguaugaga

SEQ ID NO: 1872394 - RNA, 19 nt, Artificial Sequence
  Description of Artificial Sequence: Synthetic oligonucleotide
  Antisense strand to SEQ ID NO: 1872393
ucucauacagggcaaccau

SEQ ID NO: 1872395 - RNA, 19 nt, Artificial Sequence
  Description of Artificial Sequence: Synthetic oligonucleotide
  Sense strand starting at position 1123 of SEQ ID NO: 1564339
ugggaagagccaggacauu

SEQ ID NO: 1872396 - RNA, 19 nt, Artificial Sequence
  Description of Artificial Sequence: Synthetic oligonucleotide
  Antisense strand to SEQ ID NO: 1872395
aauguccuggcucuuccca

SEQ ID NO: 1872397 - RNA, 19 nt, Artificial Sequence
  Description of Artificial Sequence: Synthetic oligonucleotide
  Sense strand starting at position 1706 of SEQ ID NO: 1564339
gcuugagucacggcguuga

SEQ ID NO: 1872398 - RNA, 19 nt, Artificial Sequence
  Description of Artificial Sequence: Synthetic oligonucleotide
  Antisense strand to SEQ ID NO: 1872397
ucaacgccgugacucaagc

SEQ ID NO: 1872399 - RNA, 19 nt, Artificial Sequence
  Description of Artificial Sequence: Synthetic oligonucleotide
  Sense strand starting at position 1749 of SEQ ID NO: 1564339
gggugauccgucaggcagu

SEQ ID NO: 1872400 - RNA, 19 nt, Artificial Sequence
  Description of Artificial Sequence: Synthetic oligonucleotide
  Antisense strand to SEQ ID NO: 1872399
acugccugacggaucaccc

SEQ ID NO: 1872401 - RNA, 19 nt, Artificial Sequence
  Description of Artificial Sequence: Synthetic oligonucleotide
  Sense strand starting at position 1862 of SEQ ID NO: 1564339
aaucgugaagccgaagaaa

SEQ ID NO: 1872402 - RNA, 19 nt, Artificial Sequence
  Description of Artificial Sequence: Synthetic oligonucleotide
  Antisense strand to SEQ ID NO: 1872401
uuucuucggcuucacgauu

SEQ ID NO: 1872403 - RNA, 19 nt, Artificial Sequence
  Description of Artificial Sequence: Synthetic oligonucleotide
  Sense strand starting at position 1877 of SEQ ID NO: 1564339
gaaauuuggguccgcccau

SEQ ID NO: 1872404 - RNA, 19 nt, Artificial Sequence
  Description of Artificial Sequence: Synthetic oligonucleotide
  Antisense strand to SEQ ID NO: 1872403
augggcggacccaaauuuc

SEQ ID NO: 1872405 - RNA, 19 nt, Artificial Sequence
  Description of Artificial Sequence: Synthetic oligonucleotide
  Sense strand starting at position 2149 of SEQ ID NO: 1564339
uuggguaaguccuuugaca

SEQ ID NO: 1872406 - RNA, 19 nt, Artificial Sequence
  Description of Artificial Sequence: Synthetic oligonucleotide
  Antisense strand to SEQ ID NO: 1872405
ugucaaaggacuuacccaa

SEQ ID NO: 1872407 - RNA, 19 nt, Artificial Sequence
  Description of Artificial Sequence: Synthetic oligonucleotide
  Sense strand starting at position 2151 of SEQ ID NO: 1564339
ggguaaguccuuugacagg

SEQ ID NO: 1872408 - RNA, 19 nt, Artificial Sequence
  Description of Artificial Sequence: Synthetic oligonucleotide
  Antisense strand to SEQ ID NO: 1872407
ccugucaaaggacuuaccc

SEQ ID NO: 1872409 - RNA, 19 nt, Artificial Sequence
  Description of Artificial Sequence: Synthetic oligonucleotide
  Sense strand starting at position 2198 of SEQ ID NO: 1564339
gcagaaucagcuuaguaug

SEQ ID NO: 1872410 - RNA, 19 nt, Artificial Sequence
  Description of Artificial Sequence: Synthetic oligonucleotide
  Antisense strand to SEQ ID NO: 1872409
cauacuaagcugauucugc

SEQ ID NO: 1872411 - RNA, 19 nt, Artificial Sequence
  Description of Artificial Sequence: Synthetic oligonucleotide
  Sense strand starting at position 2299 of SEQ ID NO: 1564339
cgauauuuaagcugagcua

SEQ ID NO: 1872412 - RNA, 19 nt, Artificial Sequence
  Description of Artificial Sequence: Synthetic oligonucleotide
  Antisense strand to SEQ ID NO: 1872411
uagcucagcuuaaauaucg

SEQ ID NO: 1872413 - RNA, 19 nt, Artificial Sequence
  Description of Artificial Sequence: Synthetic oligonucleotide
  Sense strand starting at position 2443 of SEQ ID NO: 1564339
ugaagaguguuugugaaga

SEQ ID NO: 1872414 - RNA, 19 nt, Artificial Sequence
  Description of Artificial Sequence: Synthetic oligonucleotide
  Antisense strand to SEQ ID NO: 1872413
ucuucacaaacacucuuca

SEQ ID NO: 1872415 - RNA, 19 nt, Artificial Sequence
  Description of Artificial Sequence: Synthetic oligonucleotide
  Sense strand starting at position 2552 of SEQ ID NO: 1564339
gcagauuaugaagagccau

SEQ ID NO: 1872416 - RNA, 19 nt, Artificial Sequence
  Description of Artificial Sequence: Synthetic oligonucleotide
  Antisense strand to SEQ ID NO: 1872415
auggcucuucauaaucugc

SEQ ID NO: 1872417 - RNA, 19 nt, Artificial Sequence
  Description of Artificial Sequence: Synthetic oligonucleotide
  Sense strand starting at position 2648 of SEQ ID NO: 1564339
ggccuugaaguaggaagau

SEQ ID NO: 1872418 - RNA, 19 nt, Artificial Sequence
  Description of Artificial Sequence: Synthetic oligonucleotide
  Antisense strand to SEQ ID NO: 1872417
aucuuccuacuucaaggcc

SEQ ID NO: 1872419 - RNA, 19 nt, Artificial Sequence
  Description of Artificial Sequence: Synthetic oligonucleotide
  Sense strand starting at position 2719 of SEQ ID NO: 1564339
uuagaucaacuuugguaca

SEQ ID NO: 1872420 - RNA, 19 nt, Artificial Sequence
  Description of Artificial Sequence: Synthetic oligonucleotide
  Antisense strand to SEQ ID NO: 1872419
uguaccaaaguugaucuaa

SEQ ID NO: 1872421 - RNA, 19 nt, Artificial Sequence
  Description of Artificial Sequence: Synthetic oligonucleotide
  Sense strand starting at position 3203 of SEQ ID NO: 1564339
gggcuuguggaacauguau

SEQ ID NO: 1872422 - RNA, 19 nt, Artificial Sequence
  Description of Artificial Sequence: Synthetic oligonucleotide
  Antisense strand to SEQ ID NO: 1872421
auacauguuccacaagccc

SEQ ID NO: 1872423 - RNA, 19 nt, Artificial Sequence
  Description of Artificial Sequence: Synthetic oligonucleotide
  Sense strand starting at position 3218 of SEQ ID NO: 1564339
guauauugggauugucaag

SEQ ID NO: 1872424 - RNA, 19 nt, Artificial Sequence
  Description of Artificial Sequence: Synthetic oligonucleotide
  Antisense strand to SEQ ID NO: 1872423
cuugacaaucccaauauac

SEQ ID NO: 1872425 - RNA, 19 nt, Artificial Sequence
  Description of Artificial Sequence: Synthetic oligonucleotide
  Sense strand starting at position 3224 of SEQ ID NO: 1564339
ugggauugucaaggguaua

SEQ ID NO: 1872426 - RNA, 19 nt, Artificial Sequence
  Description of Artificial Sequence: Synthetic oligonucleotide
  Antisense strand to SEQ ID NO: 1872425
uauacccuugacaauccca

SEQ ID NO: 1872427 - RNA, 19 nt, Artificial Sequence
  Description of Artificial Sequence: Synthetic oligonucleotide
  Sense strand starting at position 3225 of SEQ ID NO: 1564339
gggauugucaaggguauac

SEQ ID NO: 1872428 - RNA, 19 nt, Artificial Sequence
  Description of Artificial Sequence: Synthetic oligonucleotide
  Antisense strand to SEQ ID NO: 1872427
guauacccuugacaauccc

SEQ ID NO: 1872429 - RNA, 19 nt, Artificial Sequence
  Description of Artificial Sequence: Synthetic oligonucleotide
  Sense strand starting at position 3229 of SEQ ID NO: 1564339
uugucaaggguauacuauu

SEQ ID NO: 1872430 - RNA, 19 nt, Artificial Sequence
  Description of Artificial Sequence: Synthetic oligonucleotide
  Antisense strand to SEQ ID NO: 1872429
aauaguauacccuugacaa

SEQ ID NO: 1872431 - RNA, 19 nt, Artificial Sequence
  Description of Artificial Sequence: Synthetic oligonucleotide
  Sense strand starting at position 3266 of SEQ ID NO: 1564339
ggaggcaaugauuaagugu

SEQ ID NO: 1872432 - RNA, 19 nt, Artificial Sequence
  Description of Artificial Sequence: Synthetic oligonucleotide
  Antisense strand to SEQ ID NO: 1872431
acacuuaaucauugccucc

SEQ ID NO: 1872433 - RNA, 19 nt, Artificial Sequence
  Description of Artificial Sequence: Synthetic oligonucleotide
  Sense strand starting at position 3269 of SEQ ID NO: 1564339
ggcaaugauuaagugugaa

SEQ ID NO: 1872434 - RNA, 19 nt, Artificial Sequence
  Description of Artificial Sequence: Synthetic oligonucleotide
  Antisense strand to SEQ ID NO: 1872433
uucacacuuaaucauugcc

SEQ ID NO: 1872435 - RNA, 19 nt, Artificial Sequence
  Description of Artificial Sequence: Synthetic oligonucleotide
  Sense strand starting at position 3590 of SEQ ID NO: 1564339
gcaggugaggagugagaua

SEQ ID NO: 1872436 - RNA, 19 nt, Artificial Sequence
  Description of Artificial Sequence: Synthetic oligonucleotide
  Antisense strand to SEQ ID NO: 1872435
uaucucacuccucaccugc

SEQ ID NO: 1872437 - RNA, 19 nt, Artificial Sequence
  Description of Artificial Sequence: Synthetic oligonucleotide
  Sense strand starting at position 3650 of SEQ ID NO: 1564339
ugaacaauguugccaauca

SEQ ID NO: 1872438 - RNA, 19 nt, Artificial Sequence
  Description of Artificial Sequence: Synthetic oligonucleotide
  Antisense strand to SEQ ID NO: 1872437
ugauuggcaacauuguuca

SEQ ID NO: 1872439 - RNA, 19 nt, Artificial Sequence
  Description of Artificial Sequence: Synthetic oligonucleotide
  Sense strand starting at position 3658 of SEQ ID NO: 1564339
guugccaaucacuaugaua

SEQ ID NO: 1872440 - RNA, 19 nt, Artificial Sequence
  Description of Artificial Sequence: Synthetic oligonucleotide
  Antisense strand to SEQ ID NO: 1872439
uaucauagugauuggcaac

SEQ ID NO: 1872441 - RNA, 19 nt, Artificial Sequence
  Description of Artificial Sequence: Synthetic oligonucleotide
  Sense strand starting at position 3806 of SEQ ID NO: 1564339
gggcuuaugacagggauag

SEQ ID NO: 1872442 - RNA, 19 nt, Artificial Sequence
  Description of Artificial Sequence: Synthetic oligonucleotide
  Antisense strand to SEQ ID NO: 1872441
cuaucccugucauaagccc

SEQ ID NO: 1872443 - RNA, 19 nt, Artificial Sequence
  Description of Artificial Sequence: Synthetic oligonucleotide
  Sense strand starting at position 3808 of SEQ ID NO: 1564339
gcuuaugacagggauagcu

SEQ ID NO: 1872444 - RNA, 19 nt, Artificial Sequence
  Description of Artificial Sequence: Synthetic oligonucleotide
  Antisense strand to SEQ ID NO: 1872443
agcuaucccugucauaagc

SEQ ID NO: 1872445 - RNA, 19 nt, Artificial Sequence
  Description of Artificial Sequence: Synthetic oligonucleotide
  Sense strand starting at position 3906 of SEQ ID NO: 1564339
augccuaugggccaaauau

SEQ ID NO: 1872446 - RNA, 19 nt, Artificial Sequence
  Description of Artificial Sequence: Synthetic oligonucleotide
  Antisense strand to SEQ ID NO: 1872445
auauuuggcccauaggcau

SEQ ID NO: 1872447 - RNA, 19 nt, Artificial Sequence
  Description of Artificial Sequence: Synthetic oligonucleotide
  Sense strand starting at position 17 of SEQ ID NO: 1564340
ggaaguacauacucuguga

SEQ ID NO: 1872448 - RNA, 19 nt, Artificial Sequence
  Description of Artificial Sequence: Synthetic oligonucleotide
  Antisense strand to SEQ ID NO: 1872447
ucacagaguauguacuucc

SEQ ID NO: 1872449 - RNA, 19 nt, Artificial Sequence
  Description of Artificial Sequence: Synthetic oligonucleotide
  Sense strand starting at position 20 of SEQ ID NO: 1564340
aguacauacucugugauga

SEQ ID NO: 1872450 - RNA, 19 nt, Artificial Sequence
  Description of Artificial Sequence: Synthetic oligonucleotide
  Antisense strand to SEQ ID NO: 1872449
ucaucacagaguauguacu

SEQ ID NO: 1872451 - RNA, 19 nt, Artificial Sequence
  Description of Artificial Sequence: Synthetic oligonucleotide
  Sense strand starting at position 21 of SEQ ID NO: 1564340
guacauacucugugaugac

SEQ ID NO: 1872452 - RNA, 19 nt, Artificial Sequence
  Description of Artificial Sequence: Synthetic oligonucleotide
  Antisense strand to SEQ ID NO: 1872451
gucaucacagaguauguac

SEQ ID NO: 1872453 - RNA, 19 nt, Artificial Sequence
  Description of Artificial Sequence: Synthetic oligonucleotide
  Sense strand starting at position 30 of SEQ ID NO: 1564340
cugugaugaccacgaagca

SEQ ID NO: 1872454 - RNA, 19 nt, Artificial Sequence
  Description of Artificial Sequence: Synthetic oligonucleotide
  Antisense strand to SEQ ID NO: 1872453
ugcuucguggucaucacag

SEQ ID NO: 1872455 - RNA, 19 nt, Artificial Sequence
  Description of Artificial Sequence: Synthetic oligonucleotide
  Sense strand starting at position 59 of SEQ ID NO: 1564340
cuggcaucucuacagacau

SEQ ID NO: 1872456 - RNA, 19 nt, Artificial Sequence
  Description of Artificial Sequence: Synthetic oligonucleotide
  Antisense strand to SEQ ID NO: 1872455
augucuguagagaugccag

SEQ ID NO: 1872457 - RNA, 19 nt, Artificial Sequence
  Description of Artificial Sequence: Synthetic oligonucleotide
  Sense strand starting at position 78 of SEQ ID NO: 1564340
cgcucaagaggacguuaaa

SEQ ID NO: 1872458 - RNA, 19 nt, Artificial Sequence
  Description of Artificial Sequence: Synthetic oligonucleotide
  Antisense strand to SEQ ID NO: 1872457
uuuaacguccucuugagcg

SEQ ID NO: 1872459 - RNA, 19 nt, Artificial Sequence
  Description of Artificial Sequence: Synthetic oligonucleotide
  Sense strand starting at position 87 of SEQ ID NO: 1564340
ggacguuaaagucauccaa

SEQ ID NO: 1872460 - RNA, 19 nt, Artificial Sequence
  Description of Artificial Sequence: Synthetic oligonucleotide
  Antisense strand to SEQ ID NO: 1872459
uuggaugacuuuaacgucc

SEQ ID NO: 1872461 - RNA, 19 nt, Artificial Sequence
  Description of Artificial Sequence: Synthetic oligonucleotide
  Sense strand starting at position 199 of SEQ ID NO: 1564340
ggcgaagaagaguguacau

SEQ ID NO: 1872462 - RNA, 19 nt, Artificial Sequence
  Description of Artificial Sequence: Synthetic oligonucleotide
  Antisense strand to SEQ ID NO: 1872461
auguacacucuucuucgcc

SEQ ID NO: 1872463 - RNA, 19 nt, Artificial Sequence
  Description of Artificial Sequence: Synthetic oligonucleotide
  Sense strand starting at position 201 of SEQ ID NO: 1564340
cgaagaagaguguacaugu

SEQ ID NO: 1872464 - RNA, 19 nt, Artificial Sequence
  Description of Artificial Sequence: Synthetic oligonucleotide
  Antisense strand to SEQ ID NO: 1872463
acauguacacucuucuucg

SEQ ID NO: 1872465 - RNA, 19 nt, Artificial Sequence
  Description of Artificial Sequence: Synthetic oligonucleotide
  Sense strand starting at position 389 of SEQ ID NO: 1564340
uugcgauuacacgagagaa

SEQ ID NO: 1872466 - RNA, 19 nt, Artificial Sequence
  Description of Artificial Sequence: Synthetic oligonucleotide
  Antisense strand to SEQ ID NO: 1872465
uucucucguguaaucgcaa

SEQ ID NO: 1872467 - RNA, 19 nt, Artificial Sequence
  Description of Artificial Sequence: Synthetic oligonucleotide
  Sense strand starting at position 625 of SEQ ID NO: 1564340
uuuccaauucguguuuguu

SEQ ID NO: 1872468 - RNA, 19 nt, Artificial Sequence
  Description of Artificial Sequence: Synthetic oligonucleotide
  Antisense strand to SEQ ID NO: 1872467
aacaaacacgaauuggaaa

SEQ ID NO: 1872469 - RNA, 19 nt, Artificial Sequence
  Description of Artificial Sequence: Synthetic oligonucleotide
  Sense strand starting at position 626 of SEQ ID NO: 1564340
uuccaauucguguuuguuc

SEQ ID NO: 1872470 - RNA, 19 nt, Artificial Sequence
  Description of Artificial Sequence: Synthetic oligonucleotide
  Antisense strand to SEQ ID NO: 1872469
gaacaaacacgaauuggaa

SEQ ID NO: 1872471 - RNA, 19 nt, Artificial Sequence
  Description of Artificial Sequence: Synthetic oligonucleotide
  Sense strand starting at position 686 of SEQ ID NO: 1564340
gggcuaguauuucuucuua

SEQ ID NO: 1872472 - RNA, 19 nt, Artificial Sequence
  Description of Artificial Sequence: Synthetic oligonucleotide
  Antisense strand to SEQ ID NO: 1872471
uaagaagaaauacuagccc

SEQ ID NO: 1872473 - RNA, 19 nt, Artificial Sequence
  Description of Artificial Sequence: Synthetic oligonucleotide
  Sense strand starting at position 1105 of SEQ ID NO: 1564340
cgugcauuguauuuacaca

SEQ ID NO: 1872474 - RNA, 19 nt, Artificial Sequence
  Description of Artificial Sequence: Synthetic oligonucleotide
  Antisense strand to SEQ ID NO: 1872473
uguguaaauacaaugcacg

SEQ ID NO: 1872475 - RNA, 19 nt, Artificial Sequence
  Description of Artificial Sequence: Synthetic oligonucleotide
  Sense strand starting at position 1155 of SEQ ID NO: 1564340
acuuccugaguccgggaaa

SEQ ID NO: 1872476 - RNA, 19 nt, Artificial Sequence
  Description of Artificial Sequence: Synthetic oligonucleotide
  Antisense strand to SEQ ID NO: 1872475
uuucccggacucaggaagu

SEQ ID NO: 1872477 - RNA, 19 nt, Artificial Sequence
  Description of Artificial Sequence: Synthetic oligonucleotide
  Sense strand starting at position 1158 of SEQ ID NO: 1564340
uccugaguccgggaaauga

SEQ ID NO: 1872478 - RNA, 19 nt, Artificial Sequence
  Description of Artificial Sequence: Synthetic oligonucleotide
  Antisense strand to SEQ ID NO: 1872477
ucauuucccggacucagga

SEQ ID NO: 1872479 - RNA, 19 nt, Artificial Sequence
  Description of Artificial Sequence: Synthetic oligonucleotide
  Sense strand starting at position 1175 of SEQ ID NO: 1564340
gaaacaaucuggcuggucu

SEQ ID NO: 1872480 - RNA, 19 nt, Artificial Sequence
  Description of Artificial Sequence: Synthetic oligonucleotide
  Antisense strand to SEQ ID NO: 1872479
agaccagccagauuguuuc

SEQ ID NO: 1872481 - RNA, 19 nt, Artificial Sequence
  Description of Artificial Sequence: Synthetic oligonucleotide
  Sense strand starting at position 1176 of SEQ ID NO: 1564340
aaacaaucuggcuggucua

SEQ ID NO: 1872482 - RNA, 19 nt, Artificial Sequence
  Description of Artificial Sequence: Synthetic oligonucleotide
  Antisense strand to SEQ ID NO: 1872481
uagaccagccagauuguuu

SEQ ID NO: 1872483 - RNA, 19 nt, Artificial Sequence
  Description of Artificial Sequence: Synthetic oligonucleotide
  Sense strand starting at position 1186 of SEQ ID NO: 1564340
gcuggucuagccuaacauu

SEQ ID NO: 1872484 - RNA, 19 nt, Artificial Sequence
  Description of Artificial Sequence: Synthetic oligonucleotide
  Antisense strand to SEQ ID NO: 1872483
aauguuaggcuagaccagc

SEQ ID NO: 1872485 - RNA, 19 nt, Artificial Sequence
  Description of Artificial Sequence: Synthetic oligonucleotide
  Sense strand starting at position 1196 of SEQ ID NO: 1564340
ccuaacauuugugagaauc

SEQ ID NO: 1872486 - RNA, 19 nt, Artificial Sequence
  Description of Artificial Sequence: Synthetic oligonucleotide
  Antisense strand to SEQ ID NO: 1872485
gauucucacaaauguuagg

SEQ ID NO: 1872487 - RNA, 19 nt, Artificial Sequence
  Description of Artificial Sequence: Synthetic oligonucleotide
  Sense strand starting at position 1226 of SEQ ID NO: 1564340
acaucagagaccuguaggu

SEQ ID NO: 1872488 - RNA, 19 nt, Artificial Sequence
  Description of Artificial Sequence: Synthetic oligonucleotide
  Antisense strand to SEQ ID NO: 1872487
accuacaggucucugaugu

SEQ ID NO: 1872489 - RNA, 19 nt, Artificial Sequence
  Description of Artificial Sequence: Synthetic oligonucleotide
  Sense strand starting at position 1230 of SEQ ID NO: 1564340
cagagaccuguaggugaaa

SEQ ID NO: 1872490 - RNA, 19 nt, Artificial Sequence
  Description of Artificial Sequence: Synthetic oligonucleotide
  Antisense strand to SEQ ID NO: 1872489
uuucaccuacaggucucug

SEQ ID NO: 1872491 - RNA, 19 nt, Artificial Sequence
  Description of Artificial Sequence: Synthetic oligonucleotide
  Sense strand starting at position 1271 of SEQ ID NO: 1564340
ucuggaaugguuggugacu

SEQ ID NO: 1872492 - RNA, 19 nt, Artificial Sequence
  Description of Artificial Sequence: Synthetic oligonucleotide
  Antisense strand to SEQ ID NO: 1872491
agucaccaaccauuccaga

SEQ ID NO: 1872493 - RNA, 19 nt, Artificial Sequence
  Description of Artificial Sequence: Synthetic oligonucleotide
  Sense strand starting at position 1995 of SEQ ID NO: 1564340
gcggcugccgaguugagaa

SEQ ID NO: 1872494 - RNA, 19 nt, Artificial Sequence
  Description of Artificial Sequence: Synthetic oligonucleotide
  Antisense strand to SEQ ID NO: 1872493
uucucaacucggcagccgc

SEQ ID NO: 1872495 - RNA, 19 nt, Artificial Sequence
  Description of Artificial Sequence: Synthetic oligonucleotide
  Sense strand starting at position 2535 of SEQ ID NO: 1564340
cuauuaauauaguuacgca

SEQ ID NO: 1872496 - RNA, 19 nt, Artificial Sequence
  Description of Artificial Sequence: Synthetic oligonucleotide
  Antisense strand to SEQ ID NO: 1872495
ugcguaacuauauuaauag

SEQ ID NO: 1872497 - RNA, 19 nt, Artificial Sequence
  Description of Artificial Sequence: Synthetic oligonucleotide
  Sense strand starting at position 2539 of SEQ ID NO: 1564340
uaauauaguuacgcagaga

SEQ ID NO: 1872498 - RNA, 19 nt, Artificial Sequence
  Description of Artificial Sequence: Synthetic oligonucleotide
  Antisense strand to SEQ ID NO: 1872497
ucucugcguaacuauauua

SEQ ID NO: 1872499 - RNA, 19 nt, Artificial Sequence
  Description of Artificial Sequence: Synthetic oligonucleotide
  Sense strand starting at position 2660 of SEQ ID NO: 1564340
cagugagaugcugaagcaa

SEQ ID NO: 1872500 - RNA, 19 nt, Artificial Sequence
  Description of Artificial Sequence: Synthetic oligonucleotide
  Antisense strand to SEQ ID NO: 1872499
uugcuucagcaucucacug

SEQ ID NO: 1872501 - RNA, 19 nt, Artificial Sequence
  Description of Artificial Sequence: Synthetic oligonucleotide
  Sense strand starting at position 2675 of SEQ ID NO: 1564340
gcaacacuagcucacagau

SEQ ID NO: 1872502 - RNA, 19 nt, Artificial Sequence
  Description of Artificial Sequence: Synthetic oligonucleotide
  Antisense strand to SEQ ID NO: 1872501
aucugugagcuaguguugc

SEQ ID NO: 1872503 - RNA, 19 nt, Artificial Sequence
  Description of Artificial Sequence: Synthetic oligonucleotide
  Sense strand starting at position 2912 of SEQ ID NO: 1564340
gcauguuguaaaggauaaa

SEQ ID NO: 1872504 - RNA, 19 nt, Artificial Sequence
  Description of Artificial Sequence: Synthetic oligonucleotide
  Antisense strand to SEQ ID NO: 1872503
uuuauccuuuacaacaugc

SEQ ID NO: 1872505 - RNA, 19 nt, Artificial Sequence
  Description of Artificial Sequence: Synthetic oligonucleotide
  Sense strand starting at position 2915 of SEQ ID NO: 1564340
uguuguaaaggauaaaugu

SEQ ID NO: 1872506 - RNA, 19 nt, Artificial Sequence
  Description of Artificial Sequence: Synthetic oligonucleotide
  Antisense strand to SEQ ID NO: 1872505
acauuuauccuuuacaaca

SEQ ID NO: 1872507 - RNA, 19 nt, Artificial Sequence
  Description of Artificial Sequence: Synthetic oligonucleotide
  Sense strand starting at position 3015 of SEQ ID NO: 1564340
uaaauucuuccagguaggu

SEQ ID NO: 1872508 - RNA, 19 nt, Artificial Sequence
  Description of Artificial Sequence: Synthetic oligonucleotide
  Antisense strand to SEQ ID NO: 1872507
accuaccuggaagaauuua

SEQ ID NO: 1872509 - RNA, 19 nt, Artificial Sequence
  Description of Artificial Sequence: Synthetic oligonucleotide
  Sense strand starting at position 3036 of SEQ ID NO: 1564340
ugaaguaaagauugccaaa

SEQ ID NO: 1872510 - RNA, 19 nt, Artificial Sequence
  Description of Artificial Sequence: Synthetic oligonucleotide
  Antisense strand to SEQ ID NO: 1872509
uuuggcaaucuuuacuuca

SEQ ID NO: 1872511 - RNA, 19 nt, Artificial Sequence
  Description of Artificial Sequence: Synthetic oligonucleotide
  Sense strand starting at position 3194 of SEQ ID NO: 1564340
uacugauccgagugaguug

SEQ ID NO: 1872512 - RNA, 19 nt, Artificial Sequence
  Description of Artificial Sequence: Synthetic oligonucleotide
  Antisense strand to SEQ ID NO: 1872511
caacucacucggaucagua

SEQ ID NO: 1872513 - RNA, 19 nt, Artificial Sequence
  Description of Artificial Sequence: Synthetic oligonucleotide
  Sense strand starting at position 3205 of SEQ ID NO: 1564340
gugaguugcaugcauuaaa

SEQ ID NO: 1872514 - RNA, 19 nt, Artificial Sequence
  Description of Artificial Sequence: Synthetic oligonucleotide
  Antisense strand to SEQ ID NO: 1872513
uuuaaugcaugcaacucac

SEQ ID NO: 1872515 - RNA, 19 nt, Artificial Sequence
  Description of Artificial Sequence: Synthetic oligonucleotide
  Sense strand starting at position 3579 of SEQ ID NO: 1564340
acuauagggugacuuuaaa

SEQ ID NO: 1872516 - RNA, 19 nt, Artificial Sequence
  Description of Artificial Sequence: Synthetic oligonucleotide
  Antisense strand to SEQ ID NO: 1872515
uuuaaagucacccuauagu

SEQ ID NO: 1872517 - RNA, 19 nt, Artificial Sequence
  Description of Artificial Sequence: Synthetic oligonucleotide
  Sense strand starting at position 3724 of SEQ ID NO: 1564340
ggaggagaaugccuacauu

SEQ ID NO: 1872518 - RNA, 19 nt, Artificial Sequence
  Description of Artificial Sequence: Synthetic oligonucleotide
  Antisense strand to SEQ ID NO: 1872517
aauguaggcauucuccucc

SEQ ID NO: 1872519 - RNA, 19 nt, Artificial Sequence
  Description of Artificial Sequence: Synthetic oligonucleotide
  Sense strand starting at position 3822 of SEQ ID NO: 1564340
ugccaaagcucuuccuaag

SEQ ID NO: 1872520 - RNA, 19 nt, Artificial Sequence
  Description of Artificial Sequence: Synthetic oligonucleotide
  Antisense strand to SEQ ID NO: 1872519
cuuaggaagagcuuuggca

SEQ ID NO: 1872521 - RNA, 19 nt, Artificial Sequence
  Description of Artificial Sequence: Synthetic oligonucleotide
  Sense strand starting at position 3843 of SEQ ID NO: 1564340
aguuguauguuaguugaag

SEQ ID NO: 1872522 - RNA, 19 nt, Artificial Sequence
  Description of Artificial Sequence: Synthetic oligonucleotide
  Antisense strand to SEQ ID NO: 1872521
cuucaacuaacauacaacu

SEQ ID NO: 1872523 - RNA, 19 nt, Artificial Sequence
  Description of Artificial Sequence: Synthetic oligonucleotide
  Sense strand starting at position 3845 of SEQ ID NO: 1564340
uuguauguuaguugaagga

SEQ ID NO: 1872524 - RNA, 19 nt, Artificial Sequence
  Description of Artificial Sequence: Synthetic oligonucleotide
  Antisense strand to SEQ ID NO: 1872523
uccuucaacuaacauacaa

SEQ ID NO: 1872525 - RNA, 19 nt, Artificial Sequence
  Description of Artificial Sequence: Synthetic oligonucleotide
  Sense strand starting at position 3901 of SEQ ID NO: 1564340
auaugugucccacacaaua

SEQ ID NO: 1872526 - RNA, 19 nt, Artificial Sequence
  Description of Artificial Sequence: Synthetic oligonucleotide
  Antisense strand to SEQ ID NO: 1872525
uauugugugggacacauau

SEQ ID NO: 1872527 - RNA, 19 nt, Artificial Sequence
  Description of Artificial Sequence: Synthetic oligonucleotide
  Sense strand starting at position 40 of SEQ ID NO: 1564341
uugcgauuacacgagagaa

SEQ ID NO: 1872528 - RNA, 19 nt, Artificial Sequence
  Description of Artificial Sequence: Synthetic oligonucleotide
  Antisense strand to SEQ ID NO: 1872527
uucucucguguaaucgcaa

SEQ ID NO: 1872529 - RNA, 19 nt, Artificial Sequence
  Description of Artificial Sequence: Synthetic oligonucleotide
  Sense strand starting at position 276 of SEQ ID NO: 1564341
uuuccaauucguguuuguu

SEQ ID NO: 1872530 - RNA, 19 nt, Artificial Sequence
  Description of Artificial Sequence: Synthetic oligonucleotide
  Antisense strand to SEQ ID NO: 1872529
aacaaacacgaauuggaaa

SEQ ID NO: 1872531 - RNA, 19 nt, Artificial Sequence
  Description of Artificial Sequence: Synthetic oligonucleotide
  Sense strand starting at position 277 of SEQ ID NO: 1564341
uuccaauucguguuuguuc

SEQ ID NO: 1872532 - RNA, 19 nt, Artificial Sequence
  Description of Artificial Sequence: Synthetic oligonucleotide
  Antisense strand to SEQ ID NO: 1872531
gaacaaacacgaauuggaa

SEQ ID NO: 1872533 - RNA, 19 nt, Artificial Sequence
  Description of Artificial Sequence: Synthetic oligonucleotide
  Sense strand starting at position 337 of SEQ ID NO: 1564341
gggcuaguauuucuucuua

SEQ ID NO: 1872534 - RNA, 19 nt, Artificial Sequence
  Description of Artificial Sequence: Synthetic oligonucleotide
  Antisense strand to SEQ ID NO: 1872533
uaagaagaaauacuagccc

SEQ ID NO: 1872535 - RNA, 19 nt, Artificial Sequence
  Description of Artificial Sequence: Synthetic oligonucleotide
  Sense strand starting at position 756 of SEQ ID NO: 1564341
cgugcauuguauuuacaca

SEQ ID NO: 1872536 - RNA, 19 nt, Artificial Sequence
  Description of Artificial Sequence: Synthetic oligonucleotide
  Antisense strand to SEQ ID NO: 1872535
uguguaaauacaaugcacg

SEQ ID NO: 1872537 - RNA, 19 nt, Artificial Sequence
  Description of Artificial Sequence: Synthetic oligonucleotide
  Sense strand starting at position 806 of SEQ ID NO: 1564341
acuuccugaguccgggaaa

SEQ ID NO: 1872538 - RNA, 19 nt, Artificial Sequence
  Description of Artificial Sequence: Synthetic oligonucleotide
  Antisense strand to SEQ ID NO: 1872537
uuucccggacucaggaagu

SEQ ID NO: 1872539 - RNA, 19 nt, Artificial Sequence
  Description of Artificial Sequence: Synthetic oligonucleotide
  Sense strand starting at position 809 of SEQ ID NO: 1564341
uccugaguccgggaaauga

SEQ ID NO: 1872540 - RNA, 19 nt, Artificial Sequence
  Description of Artificial Sequence: Synthetic oligonucleotide
  Antisense strand to SEQ ID NO: 1872539
ucauuucccggacucagga

SEQ ID NO: 1872541 - RNA, 19 nt, Artificial Sequence
  Description of Artificial Sequence: Synthetic oligonucleotide
  Sense strand starting at position 826 of SEQ ID NO: 1564341
gaaacaaucuggcuggucu

SEQ ID NO: 1872542 - RNA, 19 nt, Artificial Sequence
  Description of Artificial Sequence: Synthetic oligonucleotide
  Antisense strand to SEQ ID NO: 1872541
agaccagccagauuguuuc

SEQ ID NO: 1872543 - RNA, 19 nt, Artificial Sequence
  Description of Artificial Sequence: Synthetic oligonucleotide
  Sense strand starting at position 827 of SEQ ID NO: 1564341
aaacaaucuggcuggucua

SEQ ID NO: 1872544 - RNA, 19 nt, Artificial Sequence
  Description of Artificial Sequence: Synthetic oligonucleotide
  Antisense strand to SEQ ID NO: 1872543
uagaccagccagauuguuu

SEQ ID NO: 1872545 - RNA, 19 nt, Artificial Sequence
  Description of Artificial Sequence: Synthetic oligonucleotide
  Sense strand starting at position 847 of SEQ ID NO: 1564341
ccuaacauuugugagaauc

SEQ ID NO: 1872546 - RNA, 19 nt, Artificial Sequence
  Description of Artificial Sequence: Synthetic oligonucleotide
  Antisense strand to SEQ ID NO: 1872545
gauucucacaaauguuagg

SEQ ID NO: 1872547 - RNA, 19 nt, Artificial Sequence
  Description of Artificial Sequence: Synthetic oligonucleotide
  Sense strand starting at position 877 of SEQ ID NO: 1564341
acaucagagaccuguaggu

SEQ ID NO: 1872548 - RNA, 19 nt, Artificial Sequence
  Description of Artificial Sequence: Synthetic oligonucleotide
  Antisense strand to SEQ ID NO: 1872547
accuacaggucucugaugu

SEQ ID NO: 1872549 - RNA, 19 nt, Artificial Sequence
  Description of Artificial Sequence: Synthetic oligonucleotide
  Sense strand starting at position 881 of SEQ ID NO: 1564341
cagagaccuguaggugaaa

SEQ ID NO: 1872550 - RNA, 19 nt, Artificial Sequence
  Description of Artificial Sequence: Synthetic oligonucleotide
  Antisense strand to SEQ ID NO: 1872549
uuucaccuacaggucucug

SEQ ID NO: 1872551 - RNA, 19 nt, Artificial Sequence
  Description of Artificial Sequence: Synthetic oligonucleotide
  Sense strand starting at position 922 of SEQ ID NO: 1564341
ucuggaaugguuggugacu

SEQ ID NO: 1872552 - RNA, 19 nt, Artificial Sequence
  Description of Artificial Sequence: Synthetic oligonucleotide
  Antisense strand to SEQ ID NO: 1872551
agucaccaaccauuccaga

SEQ ID NO: 1872553 - RNA, 19 nt, Artificial Sequence
  Description of Artificial Sequence: Synthetic oligonucleotide
  Sense strand starting at position 1646 of SEQ ID NO: 1564341
gcggcugccgaguugagaa

SEQ ID NO: 1872554 - RNA, 19 nt, Artificial Sequence
  Description of Artificial Sequence: Synthetic oligonucleotide
  Antisense strand to SEQ ID NO: 1872553
uucucaacucggcagccgc

SEQ ID NO: 1872555 - RNA, 19 nt, Artificial Sequence
  Description of Artificial Sequence: Synthetic oligonucleotide
  Sense strand starting at position 2186 of SEQ ID NO: 1564341
cuauuaauauaguuacgca

SEQ ID NO: 1872556 - RNA, 19 nt, Artificial Sequence
  Description of Artificial Sequence: Synthetic oligonucleotide
  Antisense strand to SEQ ID NO: 1872555
ugcguaacuauauuaauag

SEQ ID NO: 1872557 - RNA, 19 nt, Artificial Sequence
  Description of Artificial Sequence: Synthetic oligonucleotide
  Sense strand starting at position 2190 of SEQ ID NO: 1564341
uaauauaguuacgcagaga

SEQ ID NO: 1872558 - RNA, 19 nt, Artificial Sequence
  Description of Artificial Sequence: Synthetic oligonucleotide
  Antisense strand to SEQ ID NO: 1872557
ucucugcguaacuauauua

SEQ ID NO: 1872559 - RNA, 19 nt, Artificial Sequence
  Description of Artificial Sequence: Synthetic oligonucleotide
  Sense strand starting at position 2311 of SEQ ID NO: 1564341
cagugagaugcugaagcaa

SEQ ID NO: 1872560 - RNA, 19 nt, Artificial Sequence
  Description of Artificial Sequence: Synthetic oligonucleotide
  Antisense strand to SEQ ID NO: 1872559
uugcuucagcaucucacug

SEQ ID NO: 1872561 - RNA, 19 nt, Artificial Sequence
  Description of Artificial Sequence: Synthetic oligonucleotide
  Sense strand starting at position 2326 of SEQ ID NO: 1564341
gcaacacuagcucacagau

SEQ ID NO: 1872562 - RNA, 19 nt, Artificial Sequence
  Description of Artificial Sequence: Synthetic oligonucleotide
  Antisense strand to SEQ ID NO: 1872561
aucugugagcuaguguugc

SEQ ID NO: 1872563 - RNA, 19 nt, Artificial Sequence
  Description of Artificial Sequence: Synthetic oligonucleotide
  Sense strand starting at position 2563 of SEQ ID NO: 1564341
gcauguuguaaaggauaaa

SEQ ID NO: 1872564 - RNA, 19 nt, Artificial Sequence
  Description of Artificial Sequence: Synthetic oligonucleotide
  Antisense strand to SEQ ID NO: 1872563
uuuauccuuuacaacaugc

SEQ ID NO: 1872565 - RNA, 19 nt, Artificial Sequence
  Description of Artificial Sequence: Synthetic oligonucleotide
  Sense strand starting at position 2566 of SEQ ID NO: 1564341
uguuguaaaggauaaaugu

SEQ ID NO: 1872566 - RNA, 19 nt, Artificial Sequence
  Description of Artificial Sequence: Synthetic oligonucleotide
  Antisense strand to SEQ ID NO: 1872565
acauuuauccuuuacaaca

SEQ ID NO: 1872567 - RNA, 19 nt, Artificial Sequence
  Description of Artificial Sequence: Synthetic oligonucleotide
  Sense strand starting at position 2666 of SEQ ID NO: 1564341
uaaauucuuccagguaggu

SEQ ID NO: 1872568 - RNA, 19 nt, Artificial Sequence
  Description of Artificial Sequence: Synthetic oligonucleotide
  Antisense strand to SEQ ID NO: 1872567
accuaccuggaagaauuua

SEQ ID NO: 1872569 - RNA, 19 nt, Artificial Sequence
  Description of Artificial Sequence: Synthetic oligonucleotide
  Sense strand starting at position 2687 of SEQ ID NO: 1564341
ugaaguaaagauugccaaa

SEQ ID NO: 1872570 - RNA, 19 nt, Artificial Sequence
  Description of Artificial Sequence: Synthetic oligonucleotide
  Antisense strand to SEQ ID NO: 1872569
uuuggcaaucuuuacuuca

SEQ ID NO: 1872571 - RNA, 19 nt, Artificial Sequence
  Description of Artificial Sequence: Synthetic oligonucleotide
  Sense strand starting at position 2845 of SEQ ID NO: 1564341
uacugauccgagugaguug

SEQ ID NO: 1872572 - RNA, 19 nt, Artificial Sequence
  Description of Artificial Sequence: Synthetic oligonucleotide
  Antisense strand to SEQ ID NO: 1872571
caacucacucggaucagua

SEQ ID NO: 1872573 - RNA, 19 nt, Artificial Sequence
  Description of Artificial Sequence: Synthetic oligonucleotide
  Sense strand starting at position 2856 of SEQ ID NO: 1564341
gugaguugcaugcauuaaa

SEQ ID NO: 1872574 - RNA, 19 nt, Artificial Sequence
  Description of Artificial Sequence: Synthetic oligonucleotide
  Antisense strand to SEQ ID NO: 1872573
uuuaaugcaugcaacucac

SEQ ID NO: 1872575 - RNA, 19 nt, Artificial Sequence
  Description of Artificial Sequence: Synthetic oligonucleotide
  Sense strand starting at position 3230 of SEQ ID NO: 1564341
acuauagggugacuuuaaa

SEQ ID NO: 1872576 - RNA, 19 nt, Artificial Sequence
  Description of Artificial Sequence: Synthetic oligonucleotide
  Antisense strand to SEQ ID NO: 1872575
uuuaaagucacccuauagu

SEQ ID NO: 1872577 - RNA, 19 nt, Artificial Sequence
  Description of Artificial Sequence: Synthetic oligonucleotide
  Sense strand starting at position 3375 of SEQ ID NO: 1564341
ggaggagaaugccuacauu

SEQ ID NO: 1872578 - RNA, 19 nt, Artificial Sequence
  Description of Artificial Sequence: Synthetic oligonucleotide
  Antisense strand to SEQ ID NO: 1872577
aauguaggcauucuccucc

SEQ ID NO: 1872579 - RNA, 19 nt, Artificial Sequence
  Description of Artificial Sequence: Synthetic oligonucleotide
  Sense strand starting at position 3496 of SEQ ID NO: 1564341
uuguauguuaguugaagga

SEQ ID NO: 1872580 - RNA, 19 nt, Artificial Sequence
  Description of Artificial Sequence: Synthetic oligonucleotide
  Antisense strand to SEQ ID NO: 1872579
uccuucaacuaacauacaa

SEQ ID NO: 1872581 - RNA, 19 nt, Artificial Sequence
  Description of Artificial Sequence: Synthetic oligonucleotide
  Sense strand starting at position 3552 of SEQ ID NO: 1564341
auaugugucccacacaaua

SEQ ID NO: 1872582 - RNA, 19 nt, Artificial Sequence
  Description of Artificial Sequence: Synthetic oligonucleotide
  Antisense strand to SEQ ID NO: 1872581
uauugugugggacacauau

SEQ ID NO: 1872583 - RNA, 19 nt, Artificial Sequence
  Description of Artificial Sequence: Synthetic oligonucleotide
  Sense strand starting at position 3653 of SEQ ID NO: 1564341
guaauucugagauguguug

SEQ ID NO: 1872584 - RNA, 19 nt, Artificial Sequence
  Description of Artificial Sequence: Synthetic oligonucleotide
  Antisense strand to SEQ ID NO: 1872583
caacacaucucagaauuac

SEQ ID NO: 1872585 - RNA, 19 nt, Artificial Sequence
  Description of Artificial Sequence: Synthetic oligonucleotide
  Sense strand starting at position 3684 of SEQ ID NO: 1564341
aaaggaagguuugucuuua

SEQ ID NO: 1872586 - RNA, 19 nt, Artificial Sequence
  Description of Artificial Sequence: Synthetic oligonucleotide
  Antisense strand to SEQ ID NO: 1872585
uaaagacaaaccuuccuuu

SEQ ID NO: 1872587 - RNA, 19 nt, Artificial Sequence
  Description of Artificial Sequence: Synthetic oligonucleotide
  Sense strand starting at position 3685 of SEQ ID NO: 1564341
aaggaagguuugucuuuau

SEQ ID NO: 1872588 - RNA, 19 nt, Artificial Sequence
  Description of Artificial Sequence: Synthetic oligonucleotide
  Antisense strand to SEQ ID NO: 1872587
auaaagacaaaccuuccuu

SEQ ID NO: 1872589 - RNA, 19 nt, Artificial Sequence
  Description of Artificial Sequence: Synthetic oligonucleotide
  Sense strand starting at position 3688 of SEQ ID NO: 1564341
gaagguuugucuuuauaaa

SEQ ID NO: 1872590 - RNA, 19 nt, Artificial Sequence
  Description of Artificial Sequence: Synthetic oligonucleotide
  Antisense strand to SEQ ID NO: 1872589
uuuauaaagacaaaccuuc

SEQ ID NO: 1872591 - RNA, 19 nt, Artificial Sequence
  Description of Artificial Sequence: Synthetic oligonucleotide
  Sense strand starting at position 3689 of SEQ ID NO: 1564341
aagguuugucuuuauaaag

SEQ ID NO: 1872592 - RNA, 19 nt, Artificial Sequence
  Description of Artificial Sequence: Synthetic oligonucleotide
  Antisense strand to SEQ ID NO: 1872591
cuuuauaaagacaaaccuu

SEQ ID NO: 1872593 - RNA, 19 nt, Artificial Sequence
  Description of Artificial Sequence: Synthetic oligonucleotide
  Sense strand starting at position 3710 of SEQ ID NO: 1564341
uccauuguuccuuagcacu

SEQ ID NO: 1872594 - RNA, 19 nt, Artificial Sequence
  Description of Artificial Sequence: Synthetic oligonucleotide
  Antisense strand to SEQ ID NO: 1872593
agugcuaaggaacaaugga

SEQ ID NO: 1872595 - RNA, 19 nt, Artificial Sequence
  Description of Artificial Sequence: Synthetic oligonucleotide
  Sense strand starting at position 3731 of SEQ ID NO: 1564341
ugcugauuaugaucaacag

SEQ ID NO: 1872596 - RNA, 19 nt, Artificial Sequence
  Description of Artificial Sequence: Synthetic oligonucleotide
  Antisense strand to SEQ ID NO: 1872595
cuguugaucauaaucagca

SEQ ID NO: 1872597 - RNA, 19 nt, Artificial Sequence
  Description of Artificial Sequence: Synthetic oligonucleotide
  Sense strand starting at position 3732 of SEQ ID NO: 1564341
gcugauuaugaucaacagu

SEQ ID NO: 1872598 - RNA, 19 nt, Artificial Sequence
  Description of Artificial Sequence: Synthetic oligonucleotide
  Antisense strand to SEQ ID NO: 1872597
acuguugaucauaaucagc

SEQ ID NO: 1872599 - RNA, 19 nt, Artificial Sequence
  Description of Artificial Sequence: Synthetic oligonucleotide
  Sense strand starting at position 3750 of SEQ ID NO: 1564341
uuuauuccucaugaagugu

SEQ ID NO: 1872600 - RNA, 19 nt, Artificial Sequence
  Description of Artificial Sequence: Synthetic oligonucleotide
  Antisense strand to SEQ ID NO: 1872599
acacuucaugaggaauaaa

SEQ ID NO: 1872601 - RNA, 19 nt, Artificial Sequence
  Description of Artificial Sequence: Synthetic oligonucleotide
  Sense strand starting at position 3765 of SEQ ID NO: 1564341
guguacgaucaguaucauu

SEQ ID NO: 1872602 - RNA, 19 nt, Artificial Sequence
  Description of Artificial Sequence: Synthetic oligonucleotide
  Antisense strand to SEQ ID NO: 1872601
aaugauacugaucguacac

SEQ ID NO: 1872603 - RNA, 19 nt, Artificial Sequence
  Description of Artificial Sequence: Synthetic oligonucleotide
  Sense strand starting at position 3868 of SEQ ID NO: 1564341
ucaucagcccuguggauuu

SEQ ID NO: 1872604 - RNA, 19 nt, Artificial Sequence
  Description of Artificial Sequence: Synthetic oligonucleotide
  Antisense strand to SEQ ID NO: 1872603
aaauccacagggcugauga

SEQ ID NO: 1872605 - RNA, 19 nt, Artificial Sequence
  Description of Artificial Sequence: Synthetic oligonucleotide
  Sense strand starting at position 3939 of SEQ ID NO: 1564341
ccauccuucugacuaugga

SEQ ID NO: 1872606 - RNA, 19 nt, Artificial Sequence
  Description of Artificial Sequence: Synthetic oligonucleotide
  Antisense strand to SEQ ID NO: 1872605
uccauagucagaaggaugg

SEQ ID NO: 1872607 - RNA, 19 nt, Artificial Sequence
  Description of Artificial Sequence: Synthetic oligonucleotide
  Sense strand starting at position 92 of SEQ ID NO: 1564342
aaauccugggcguggaaua

SEQ ID NO: 1872608 - RNA, 19 nt, Artificial Sequence
  Description of Artificial Sequence: Synthetic oligonucleotide
  Antisense strand to SEQ ID NO: 1872607
uauuccacgcccaggauuu

SEQ ID NO: 1872609 - RNA, 19 nt, Artificial Sequence
  Description of Artificial Sequence: Synthetic oligonucleotide
  Sense strand starting at position 93 of SEQ ID NO: 1564342
aauccugggcguggaauau

SEQ ID NO: 1872610 - RNA, 19 nt, Artificial Sequence
  Description of Artificial Sequence: Synthetic oligonucleotide
  Antisense strand to SEQ ID NO: 1872609
auauuccacgcccaggauu

SEQ ID NO: 1872611 - RNA, 19 nt, Artificial Sequence
  Description of Artificial Sequence: Synthetic oligonucleotide
  Sense strand starting at position 293 of SEQ ID NO: 1564342
cggagaucuucaguagcug

SEQ ID NO: 1872612 - RNA, 19 nt, Artificial Sequence
  Description of Artificial Sequence: Synthetic oligonucleotide
  Antisense strand to SEQ ID NO: 1872611
cagcuacugaagaucuccg

SEQ ID NO: 1872613 - RNA, 19 nt, Artificial Sequence
  Description of Artificial Sequence: Synthetic oligonucleotide
  Sense strand starting at position 325 of SEQ ID NO: 1564342
ugaggacaacuguguuugu

SEQ ID NO: 1872614 - RNA, 19 nt, Artificial Sequence
  Description of Artificial Sequence: Synthetic oligonucleotide
  Antisense strand to SEQ ID NO: 1872613
acaaacacaguuguccuca

SEQ ID NO: 1872615 - RNA, 19 nt, Artificial Sequence
  Description of Artificial Sequence: Synthetic oligonucleotide
  Sense strand starting at position 328 of SEQ ID NO: 1564342
ggacaacuguguuugucac

SEQ ID NO: 1872616 - RNA, 19 nt, Artificial Sequence
  Description of Artificial Sequence: Synthetic oligonucleotide
  Antisense strand to SEQ ID NO: 1872615
gugacaaacacaguugucc

SEQ ID NO: 1872617 - RNA, 19 nt, Artificial Sequence
  Description of Artificial Sequence: Synthetic oligonucleotide
  Sense strand starting at position 645 of SEQ ID NO: 1564342
ggcaguagagugcaauguu

SEQ ID NO: 1872618 - RNA, 19 nt, Artificial Sequence
  Description of Artificial Sequence: Synthetic oligonucleotide
  Antisense strand to SEQ ID NO: 1872617
aacauugcacucuacugcc

SEQ ID NO: 1872619 - RNA, 19 nt, Artificial Sequence
  Description of Artificial Sequence: Synthetic oligonucleotide
  Sense strand starting at position 648 of SEQ ID NO: 1564342
aguagagugcaauguugaa

SEQ ID NO: 1872620 - RNA, 19 nt, Artificial Sequence
  Description of Artificial Sequence: Synthetic oligonucleotide
  Antisense strand to SEQ ID NO: 1872619
uucaacauugcacucuacu

SEQ ID NO: 1872621 - RNA, 19 nt, Artificial Sequence
  Description of Artificial Sequence: Synthetic oligonucleotide
  Sense strand starting at position 701 of SEQ ID NO: 1564342
aguggaguguuuccauuuc

SEQ ID NO: 1872622 - RNA, 19 nt, Artificial Sequence
  Description of Artificial Sequence: Synthetic oligonucleotide
  Antisense strand to SEQ ID NO: 1872621
gaaauggaaacacuccacu

SEQ ID NO: 1872623 - RNA, 19 nt, Artificial Sequence
  Description of Artificial Sequence: Synthetic oligonucleotide
  Sense strand starting at position 1041 of SEQ ID NO: 1564342
gggacuucucaaggcuuga

SEQ ID NO: 1872624 - RNA, 19 nt, Artificial Sequence
  Description of Artificial Sequence: Synthetic oligonucleotide
  Antisense strand to SEQ ID NO: 1872623
ucaagccuugagaaguccc

SEQ ID NO: 1872625 - RNA, 19 nt, Artificial Sequence
  Description of Artificial Sequence: Synthetic oligonucleotide
  Sense strand starting at position 1045 of SEQ ID NO: 1564342
cuucucaaggcuugaaauc

SEQ ID NO: 1872626 - RNA, 19 nt, Artificial Sequence
  Description of Artificial Sequence: Synthetic oligonucleotide
  Antisense strand to SEQ ID NO: 1872625
gauuucaagccuugagaag

SEQ ID NO: 1872627 - RNA, 19 nt, Artificial Sequence
  Description of Artificial Sequence: Synthetic oligonucleotide
  Sense strand starting at position 1086 of SEQ ID NO: 1564342
gugggaccucccuggucaa

SEQ ID NO: 1872628 - RNA, 19 nt, Artificial Sequence
  Description of Artificial Sequence: Synthetic oligonucleotide
  Antisense strand to SEQ ID NO: 1872627
uugaccagggaggucccac

SEQ ID NO: 1872629 - RNA, 19 nt, Artificial Sequence
  Description of Artificial Sequence: Synthetic oligonucleotide
  Sense strand starting at position 1087 of SEQ ID NO: 1564342
ugggaccucccuggucaau

SEQ ID NO: 1872630 - RNA, 19 nt, Artificial Sequence
  Description of Artificial Sequence: Synthetic oligonucleotide
  Antisense strand to SEQ ID NO: 1872629
auugaccagggagguccca

SEQ ID NO: 1872631 - RNA, 19 nt, Artificial Sequence
  Description of Artificial Sequence: Synthetic oligonucleotide
  Sense strand starting at position 1151 of SEQ ID NO: 1564342
aaaugcagccgucauagaa

SEQ ID NO: 1872632 - RNA, 19 nt, Artificial Sequence
  Description of Artificial Sequence: Synthetic oligonucleotide
  Antisense strand to SEQ ID NO: 1872631
uucuaugacggcugcauuu

SEQ ID NO: 1872633 - RNA, 19 nt, Artificial Sequence
  Description of Artificial Sequence: Synthetic oligonucleotide
  Sense strand starting at position 1159 of SEQ ID NO: 1564342
ccgucauagaaacgaauua

SEQ ID NO: 1872634 - RNA, 19 nt, Artificial Sequence
  Description of Artificial Sequence: Synthetic oligonucleotide
  Antisense strand to SEQ ID NO: 1872633
uaauucguuucuaugacgg

SEQ ID NO: 1872635 - RNA, 19 nt, Artificial Sequence
  Description of Artificial Sequence: Synthetic oligonucleotide
  Sense strand starting at position 1160 of SEQ ID NO: 1564342
cgucauagaaacgaauuaa

SEQ ID NO: 1872636 - RNA, 19 nt, Artificial Sequence
  Description of Artificial Sequence: Synthetic oligonucleotide
  Antisense strand to SEQ ID NO: 1872635
uuaauucguuucuaugacg

SEQ ID NO: 1872637 - RNA, 19 nt, Artificial Sequence
  Description of Artificial Sequence: Synthetic oligonucleotide
  Sense strand starting at position 1386 of SEQ ID NO: 1564342
uggcauuacuggucugaug

SEQ ID NO: 1872638 - RNA, 19 nt, Artificial Sequence
  Description of Artificial Sequence: Synthetic oligonucleotide
  Antisense strand to SEQ ID NO: 1872637
caucagaccaguaaugcca

SEQ ID NO: 1872639 - RNA, 19 nt, Artificial Sequence
  Description of Artificial Sequence: Synthetic oligonucleotide
  Sense strand starting at position 1388 of SEQ ID NO: 1564342
gcauuacuggucugaugga

SEQ ID NO: 1872640 - RNA, 19 nt, Artificial Sequence
  Description of Artificial Sequence: Synthetic oligonucleotide
  Antisense strand to SEQ ID NO: 1872639
uccaucagaccaguaaugc

SEQ ID NO: 1872641 - RNA, 19 nt, Artificial Sequence
  Description of Artificial Sequence: Synthetic oligonucleotide
  Sense strand starting at position 1412 of SEQ ID NO: 1564342
gcauuuauucuugggcuca

SEQ ID NO: 1872642 - RNA, 19 nt, Artificial Sequence
  Description of Artificial Sequence: Synthetic oligonucleotide
  Antisense strand to SEQ ID NO: 1872641
ugagcccaagaauaaaugc

SEQ ID NO: 1872643 - RNA, 19 nt, Artificial Sequence
  Description of Artificial Sequence: Synthetic oligonucleotide
  Sense strand starting at position 1444 of SEQ ID NO: 1564342
acaggaaucucggaaauaa

SEQ ID NO: 1872644 - RNA, 19 nt, Artificial Sequence
  Description of Artificial Sequence: Synthetic oligonucleotide
  Antisense strand to SEQ ID NO: 1872643
uuauuuccgagauuccugu

SEQ ID NO: 1872645 - RNA, 19 nt, Artificial Sequence
  Description of Artificial Sequence: Synthetic oligonucleotide
  Sense strand starting at position 1499 of SEQ ID NO: 1564342
guguaugucguggagggau

SEQ ID NO: 1872646 - RNA, 19 nt, Artificial Sequence
  Description of Artificial Sequence: Synthetic oligonucleotide
  Antisense strand to SEQ ID NO: 1872645
aucccuccacgacauacac

SEQ ID NO: 1872647 - RNA, 19 nt, Artificial Sequence
  Description of Artificial Sequence: Synthetic oligonucleotide
  Sense strand starting at position 1501 of SEQ ID NO: 1564342
guaugucguggagggauca

SEQ ID NO: 1872648 - RNA, 19 nt, Artificial Sequence
  Description of Artificial Sequence: Synthetic oligonucleotide
  Antisense strand to SEQ ID NO: 1872647
ugaucccuccacgacauac

SEQ ID NO: 1872649 - RNA, 19 nt, Artificial Sequence
  Description of Artificial Sequence: Synthetic oligonucleotide
  Sense strand starting at position 1513 of SEQ ID NO: 1564342
gggaucacuuacccaguga

SEQ ID NO: 1872650 - RNA, 19 nt, Artificial Sequence
  Description of Artificial Sequence: Synthetic oligonucleotide
  Antisense strand to SEQ ID NO: 1872649
ucacuggguaagugauccc

SEQ ID NO: 1872651 - RNA, 19 nt, Artificial Sequence
  Description of Artificial Sequence: Synthetic oligonucleotide
  Sense strand starting at position 1773 of SEQ ID NO: 1564342
cggguugcacgaguuguaa

SEQ ID NO: 1872652 - RNA, 19 nt, Artificial Sequence
  Description of Artificial Sequence: Synthetic oligonucleotide
  Antisense strand to SEQ ID NO: 1872651
uuacaacucgugcaacccg

SEQ ID NO: 1872653 - RNA, 19 nt, Artificial Sequence
  Description of Artificial Sequence: Synthetic oligonucleotide
  Sense strand starting at position 1835 of SEQ ID NO: 1564342
gauugugcgccucaggaaa

SEQ ID NO: 1872654 - RNA, 19 nt, Artificial Sequence
  Description of Artificial Sequence: Synthetic oligonucleotide
  Antisense strand to SEQ ID NO: 1872653
uuuccugaggcgcacaauc

SEQ ID NO: 1872655 - RNA, 19 nt, Artificial Sequence
  Description of Artificial Sequence: Synthetic oligonucleotide
  Sense strand starting at position 2087 of SEQ ID NO: 1564342
ugaagacccugcuuaguuu

SEQ ID NO: 1872656 - RNA, 19 nt, Artificial Sequence
  Description of Artificial Sequence: Synthetic oligonucleotide
  Antisense strand to SEQ ID NO: 1872655
aaacuaagcagggucuuca

SEQ ID NO: 1872657 - RNA, 19 nt, Artificial Sequence
  Description of Artificial Sequence: Synthetic oligonucleotide
  Sense strand starting at position 2595 of SEQ ID NO: 1564342
ccaggacacucucugcaau

SEQ ID NO: 1872658 - RNA, 19 nt, Artificial Sequence
  Description of Artificial Sequence: Synthetic oligonucleotide
  Antisense strand to SEQ ID NO: 1872657
auugcagagaguguccugg

SEQ ID NO: 1872659 - RNA, 19 nt, Artificial Sequence
  Description of Artificial Sequence: Synthetic oligonucleotide
  Sense strand starting at position 2598 of SEQ ID NO: 1564342
ggacacucucugcaauuga

SEQ ID NO: 1872660 - RNA, 19 nt, Artificial Sequence
  Description of Artificial Sequence: Synthetic oligonucleotide
  Antisense strand to SEQ ID NO: 1872659
ucaauugcagagagugucc

SEQ ID NO: 1872661 - RNA, 19 nt, Artificial Sequence
  Description of Artificial Sequence: Synthetic oligonucleotide
  Sense strand starting at position 3099 of SEQ ID NO: 1564342
ugaguuucaggcuaagagu

SEQ ID NO: 1872662 - RNA, 19 nt, Artificial Sequence
  Description of Artificial Sequence: Synthetic oligonucleotide
  Antisense strand to SEQ ID NO: 1872661
acucuuagccugaaacuca

SEQ ID NO: 1872663 - RNA, 19 nt, Artificial Sequence
  Description of Artificial Sequence: Synthetic oligonucleotide
  Sense strand starting at position 3163 of SEQ ID NO: 1564342
aggacuucuccacagcagu

SEQ ID NO: 1872664 - RNA, 19 nt, Artificial Sequence
  Description of Artificial Sequence: Synthetic oligonucleotide
  Antisense strand to SEQ ID NO: 1872663
acugcuguggagaaguccu

SEQ ID NO: 1872665 - RNA, 19 nt, Artificial Sequence
  Description of Artificial Sequence: Synthetic oligonucleotide
  Sense strand starting at position 3176 of SEQ ID NO: 1564342
agcaguucucaaugccaga

SEQ ID NO: 1872666 - RNA, 19 nt, Artificial Sequence
  Description of Artificial Sequence: Synthetic oligonucleotide
  Antisense strand to SEQ ID NO: 1872665
ucuggcauugagaacugcu

SEQ ID NO: 1872667 - RNA, 19 nt, Artificial Sequence
  Description of Artificial Sequence: Synthetic oligonucleotide
  Sense strand starting at position 3214 of SEQ ID NO: 1564342
uuggauaucugagucucca

SEQ ID NO: 1872668 - RNA, 19 nt, Artificial Sequence
  Description of Artificial Sequence: Synthetic oligonucleotide
  Antisense strand to SEQ ID NO: 1872667
uggagacucagauauccaa

SEQ ID NO: 1872669 - RNA, 19 nt, Artificial Sequence
  Description of Artificial Sequence: Synthetic oligonucleotide
  Sense strand starting at position 3300 of SEQ ID NO: 1564342
gggugagucccucaugaac

SEQ ID NO: 1872670 - RNA, 19 nt, Artificial Sequence
  Description of Artificial Sequence: Synthetic oligonucleotide
  Antisense strand to SEQ ID NO: 1872669
guucaugagggacucaccc

SEQ ID NO: 1872671 - RNA, 19 nt, Artificial Sequence
  Description of Artificial Sequence: Synthetic oligonucleotide
  Sense strand starting at position 3584 of SEQ ID NO: 1564342
cugguauuccuguacagca

SEQ ID NO: 1872672 - RNA, 19 nt, Artificial Sequence
  Description of Artificial Sequence: Synthetic oligonucleotide
  Antisense strand to SEQ ID NO: 1872671
ugcuguacaggaauaccag

SEQ ID NO: 1872673 - RNA, 19 nt, Artificial Sequence
  Description of Artificial Sequence: Synthetic oligonucleotide
  Sense strand starting at position 3684 of SEQ ID NO: 1564342
gcuucucugccugggauuu

SEQ ID NO: 1872674 - RNA, 19 nt, Artificial Sequence
  Description of Artificial Sequence: Synthetic oligonucleotide
  Antisense strand to SEQ ID NO: 1872673
aaaucccaggcagagaagc

SEQ ID NO: 1872675 - RNA, 19 nt, Artificial Sequence
  Description of Artificial Sequence: Synthetic oligonucleotide
  Sense strand starting at position 3826 of SEQ ID NO: 1564342
cacaguauuugccuggcau

SEQ ID NO: 1872676 - RNA, 19 nt, Artificial Sequence
  Description of Artificial Sequence: Synthetic oligonucleotide
  Antisense strand to SEQ ID NO: 1872675
augccaggcaaauacugug

SEQ ID NO: 1872677 - RNA, 19 nt, Artificial Sequence
  Description of Artificial Sequence: Synthetic oligonucleotide
  Sense strand starting at position 3827 of SEQ ID NO: 1564342
acaguauuugccuggcauu

SEQ ID NO: 1872678 - RNA, 19 nt, Artificial Sequence
  Description of Artificial Sequence: Synthetic oligonucleotide
  Antisense strand to SEQ ID NO: 1872677
aaugccaggcaaauacugu

SEQ ID NO: 1872679 - RNA, 19 nt, Artificial Sequence
  Description of Artificial Sequence: Synthetic oligonucleotide
  Sense strand starting at position 3830 of SEQ ID NO: 1564342
guauuugccuggcauuuaa

SEQ ID NO: 1872680 - RNA, 19 nt, Artificial Sequence
  Description of Artificial Sequence: Synthetic oligonucleotide
  Antisense strand to SEQ ID NO: 1872679
uuaaaugccaggcaaauac

SEQ ID NO: 1872681 - RNA, 19 nt, Artificial Sequence
  Description of Artificial Sequence: Synthetic oligonucleotide
  Sense strand starting at position 3887 of SEQ ID NO: 1564342
agccaacauugguccaaga

SEQ ID NO: 1872682 - RNA, 19 nt, Artificial Sequence
  Description of Artificial Sequence: Synthetic oligonucleotide
  Antisense strand to SEQ ID NO: 1872681
ucuuggaccaauguuggcu

SEQ ID NO: 1872683 - RNA, 19 nt, Artificial Sequence
  Description of Artificial Sequence: Synthetic oligonucleotide
  Sense strand starting at position 3909 of SEQ ID NO: 1564342
auaagcugauguucugaau

SEQ ID NO: 1872684 - RNA, 19 nt, Artificial Sequence
  Description of Artificial Sequence: Synthetic oligonucleotide
  Antisense strand to SEQ ID NO: 1872683
auucagaacaucagcuuau

SEQ ID NO: 1872685 - RNA, 19 nt, Artificial Sequence
  Description of Artificial Sequence: Synthetic oligonucleotide
  Sense strand starting at position 3945 of SEQ ID NO: 1564342
augcuaaaccauuagguua

SEQ ID NO: 1872686 - RNA, 19 nt, Artificial Sequence
  Description of Artificial Sequence: Synthetic oligonucleotide
  Antisense strand to SEQ ID NO: 1872685
uaaccuaaugguuuagcau

SEQ ID NO: 1872687 - RNA, 19 nt, Artificial Sequence
  Description of Artificial Sequence: Synthetic oligonucleotide
  Sense strand starting at position 82 of SEQ ID NO: 1564343
ugccaucacucuucuaguu

SEQ ID NO: 1872688 - RNA, 19 nt, Artificial Sequence
  Description of Artificial Sequence: Synthetic oligonucleotide
  Antisense strand to SEQ ID NO: 1872687
aacuagaagagugauggca

SEQ ID NO: 1872689 - RNA, 19 nt, Artificial Sequence
  Description of Artificial Sequence: Synthetic oligonucleotide
  Sense strand starting at position 238 of SEQ ID NO: 1564343
acuuacuguuuacugaaga

SEQ ID NO: 1872690 - RNA, 19 nt, Artificial Sequence
  Description of Artificial Sequence: Synthetic oligonucleotide
  Antisense strand to SEQ ID NO: 1872689
ucuucaguaaacaguaagu

SEQ ID NO: 1872691 - RNA, 19 nt, Artificial Sequence
  Description of Artificial Sequence: Synthetic oligonucleotide
  Sense strand starting at position 243 of SEQ ID NO: 1564343
cuguuuacugaagaagcuu

SEQ ID NO: 1872692 - RNA, 19 nt, Artificial Sequence
  Description of Artificial Sequence: Synthetic oligonucleotide
  Antisense strand to SEQ ID NO: 1872691
aagcuucuucaguaaacag

SEQ ID NO: 1872693 - RNA, 19 nt, Artificial Sequence
  Description of Artificial Sequence: Synthetic oligonucleotide
  Sense strand starting at position 392 of SEQ ID NO: 1564343
ccuugcuucccucggaaau

SEQ ID NO: 1872694 - RNA, 19 nt, Artificial Sequence
  Description of Artificial Sequence: Synthetic oligonucleotide
  Antisense strand to SEQ ID NO: 1872693
auuuccgagggaagcaagg

SEQ ID NO: 1872695 - RNA, 19 nt, Artificial Sequence
  Description of Artificial Sequence: Synthetic oligonucleotide
  Sense strand starting at position 393 of SEQ ID NO: 1564343
cuugcuucccucggaaauc

SEQ ID NO: 1872696 - RNA, 19 nt, Artificial Sequence
  Description of Artificial Sequence: Synthetic oligonucleotide
  Antisense strand to SEQ ID NO: 1872695
gauuuccgagggaagcaag

SEQ ID NO: 1872697 - RNA, 19 nt, Artificial Sequence
  Description of Artificial Sequence: Synthetic oligonucleotide
  Sense strand starting at position 490 of SEQ ID NO: 1564343
caccgucugcauuacaaga

SEQ ID NO: 1872698 - RNA, 19 nt, Artificial Sequence
  Description of Artificial Sequence: Synthetic oligonucleotide
  Antisense strand to SEQ ID NO: 1872697
ucuuguaaugcagacggug

SEQ ID NO: 1872699 - RNA, 19 nt, Artificial Sequence
  Description of Artificial Sequence: Synthetic oligonucleotide
  Sense strand starting at position 550 of SEQ ID NO: 1564343
aacaguaggcuccgaguuu

SEQ ID NO: 1872700 - RNA, 19 nt, Artificial Sequence
  Description of Artificial Sequence: Synthetic oligonucleotide
  Antisense strand to SEQ ID NO: 1872699
aaacucggagccuacuguu

SEQ ID NO: 1872701 - RNA, 19 nt, Artificial Sequence
  Description of Artificial Sequence: Synthetic oligonucleotide
  Sense strand starting at position 562 of SEQ ID NO: 1564343
cgaguuuaucaagaaaguu

SEQ ID NO: 1872702 - RNA, 19 nt, Artificial Sequence
  Description of Artificial Sequence: Synthetic oligonucleotide
  Antisense strand to SEQ ID NO: 1872701
aacuuucuugauaaacucg

SEQ ID NO: 1872703 - RNA, 19 nt, Artificial Sequence
  Description of Artificial Sequence: Synthetic oligonucleotide
  Sense strand starting at position 612 of SEQ ID NO: 1564343
ggaugaaacuccgccuuaa

SEQ ID NO: 1872704 - RNA, 19 nt, Artificial Sequence
  Description of Artificial Sequence: Synthetic oligonucleotide
  Antisense strand to SEQ ID NO: 1872703
uuaaggcggaguuucaucc

SEQ ID NO: 1872705 - RNA, 19 nt, Artificial Sequence
  Description of Artificial Sequence: Synthetic oligonucleotide
  Sense strand starting at position 690 of SEQ ID NO: 1564343
acacuaaguuguccuccaa

SEQ ID NO: 1872706 - RNA, 19 nt, Artificial Sequence
  Description of Artificial Sequence: Synthetic oligonucleotide
  Antisense strand to SEQ ID NO: 1872705
uuggaggacaacuuagugu

SEQ ID NO: 1872707 - RNA, 19 nt, Artificial Sequence
  Description of Artificial Sequence: Synthetic oligonucleotide
  Sense strand starting at position 697 of SEQ ID NO: 1564343
guuguccuccaauaagaaa

SEQ ID NO: 1872708 - RNA, 19 nt, Artificial Sequence
  Description of Artificial Sequence: Synthetic oligonucleotide
  Antisense strand to SEQ ID NO: 1872707
uuucuuauuggaggacaac

SEQ ID NO: 1872709 - RNA, 19 nt, Artificial Sequence
  Description of Artificial Sequence: Synthetic oligonucleotide
  Sense strand starting at position 727 of SEQ ID NO: 1564343
ugcccuuauuccucgauuu

SEQ ID NO: 1872710 - RNA, 19 nt, Artificial Sequence
  Description of Artificial Sequence: Synthetic oligonucleotide
  Antisense strand to SEQ ID NO: 1872709
aaaucgaggaauaagggca

SEQ ID NO: 1872711 - RNA, 19 nt, Artificial Sequence
  Description of Artificial Sequence: Synthetic oligonucleotide
  Sense strand starting at position 728 of SEQ ID NO: 1564343
gcccuuauuccucgauuua

SEQ ID NO: 1872712 - RNA, 19 nt, Artificial Sequence
  Description of Artificial Sequence: Synthetic oligonucleotide
  Antisense strand to SEQ ID NO: 1872711
uaaaucgaggaauaagggc

SEQ ID NO: 1872713 - RNA, 19 nt, Artificial Sequence
  Description of Artificial Sequence: Synthetic oligonucleotide
  Sense strand starting at position 785 of SEQ ID NO: 1564343
ucaagaaaguuguuuccac

SEQ ID NO: 1872714 - RNA, 19 nt, Artificial Sequence
  Description of Artificial Sequence: Synthetic oligonucleotide
  Antisense strand to SEQ ID NO: 1872713
guggaaacaacuuucuuga

SEQ ID NO: 1872715 - RNA, 19 nt, Artificial Sequence
  Description of Artificial Sequence: Synthetic oligonucleotide
  Sense strand starting at position 800 of SEQ ID NO: 1564343
ccacauaaaugaguacgaa

SEQ ID NO: 1872716 - RNA, 19 nt, Artificial Sequence
  Description of Artificial Sequence: Synthetic oligonucleotide
  Antisense strand to SEQ ID NO: 1872715
uucguacucauuuaugugg

SEQ ID NO: 1872717 - RNA, 19 nt, Artificial Sequence
  Description of Artificial Sequence: Synthetic oligonucleotide
  Sense strand starting at position 803 of SEQ ID NO: 1564343
cauaaaugaguacgaauga

SEQ ID NO: 1872718 - RNA, 19 nt, Artificial Sequence
  Description of Artificial Sequence: Synthetic oligonucleotide
  Antisense strand to SEQ ID NO: 1872717
ucauucguacucauuuaug

SEQ ID NO: 1872719 - RNA, 19 nt, Artificial Sequence
  Description of Artificial Sequence: Synthetic oligonucleotide
  Sense strand starting at position 804 of SEQ ID NO: 1564343
auaaaugaguacgaaugau

SEQ ID NO: 1872720 - RNA, 19 nt, Artificial Sequence
  Description of Artificial Sequence: Synthetic oligonucleotide
  Antisense strand to SEQ ID NO: 1872719
aucauucguacucauuuau

SEQ ID NO: 1872721 - RNA, 19 nt, Artificial Sequence
  Description of Artificial Sequence: Synthetic oligonucleotide
  Sense strand starting at position 939 of SEQ ID NO: 1564343
cggcaaagauuguuggaaa

SEQ ID NO: 1872722 - RNA, 19 nt, Artificial Sequence
  Description of Artificial Sequence: Synthetic oligonucleotide
  Antisense strand to SEQ ID NO: 1872721
uuuccaacaaucuuugccg

SEQ ID NO: 1872723 - RNA, 19 nt, Artificial Sequence
  Description of Artificial Sequence: Synthetic oligonucleotide
  Sense strand starting at position 2498 of SEQ ID NO: 1564343
gcuccagcucgaguuguuu

SEQ ID NO: 1872724 - RNA, 19 nt, Artificial Sequence
  Description of Artificial Sequence: Synthetic oligonucleotide
  Antisense strand to SEQ ID NO: 1872723
aaacaacucgagcuggagc

SEQ ID NO: 1872725 - RNA, 19 nt, Artificial Sequence
  Description of Artificial Sequence: Synthetic oligonucleotide
  Sense strand starting at position 2703 of SEQ ID NO: 1564343
aaggguuaucccuagagca

SEQ ID NO: 1872726 - RNA, 19 nt, Artificial Sequence
  Description of Artificial Sequence: Synthetic oligonucleotide
  Antisense strand to SEQ ID NO: 1872725
ugcucuagggauaacccuu

SEQ ID NO: 1872727 - RNA, 19 nt, Artificial Sequence
  Description of Artificial Sequence: Synthetic oligonucleotide
  Sense strand starting at position 2820 of SEQ ID NO: 1564343
acguuucgcacguugcaaa

SEQ ID NO: 1872728 - RNA, 19 nt, Artificial Sequence
  Description of Artificial Sequence: Synthetic oligonucleotide
  Antisense strand to SEQ ID NO: 1872727
uuugcaacgugcgaaacgu

SEQ ID NO: 1872729 - RNA, 19 nt, Artificial Sequence
  Description of Artificial Sequence: Synthetic oligonucleotide
  Sense strand starting at position 2892 of SEQ ID NO: 1564343
gccugugaaauguaagacu

SEQ ID NO: 1872730 - RNA, 19 nt, Artificial Sequence
  Description of Artificial Sequence: Synthetic oligonucleotide
  Antisense strand to SEQ ID NO: 1872729
agucuuacauuucacaggc

SEQ ID NO: 1872731 - RNA, 19 nt, Artificial Sequence
  Description of Artificial Sequence: Synthetic oligonucleotide
  Sense strand starting at position 2962 of SEQ ID NO: 1564343
agcccaauuggguauggau

SEQ ID NO: 1872732 - RNA, 19 nt, Artificial Sequence
  Description of Artificial Sequence: Synthetic oligonucleotide
  Antisense strand to SEQ ID NO: 1872731
auccauacccaauugggcu

SEQ ID NO: 1872733 - RNA, 19 nt, Artificial Sequence
  Description of Artificial Sequence: Synthetic oligonucleotide
  Sense strand starting at position 3112 of SEQ ID NO: 1564343
uguuuaugcuaucuuucca

SEQ ID NO: 1872734 - RNA, 19 nt, Artificial Sequence
  Description of Artificial Sequence: Synthetic oligonucleotide
  Antisense strand to SEQ ID NO: 1872733
uggaaagauagcauaaaca

SEQ ID NO: 1872735 - RNA, 19 nt, Artificial Sequence
  Description of Artificial Sequence: Synthetic oligonucleotide
  Sense strand starting at position 3119 of SEQ ID NO: 1564343
gcuaucuuuccaugcugaa

SEQ ID NO: 1872736 - RNA, 19 nt, Artificial Sequence
  Description of Artificial Sequence: Synthetic oligonucleotide
  Antisense strand to SEQ ID NO: 1872735
uucagcauggaaagauagc

SEQ ID NO: 1872737 - RNA, 19 nt, Artificial Sequence
  Description of Artificial Sequence: Synthetic oligonucleotide
  Sense strand starting at position 3176 of SEQ ID NO: 1564343
aguuaaauaguggagucuu

SEQ ID NO: 1872738 - RNA, 19 nt, Artificial Sequence
  Description of Artificial Sequence: Synthetic oligonucleotide
  Antisense strand to SEQ ID NO: 1872737
aagacuccacuauuuaacu

SEQ ID NO: 1872739 - RNA, 19 nt, Artificial Sequence
  Description of Artificial Sequence: Synthetic oligonucleotide
  Sense strand starting at position 3211 of SEQ ID NO: 1564343
cuggcaugcuauccuuuaa

SEQ ID NO: 1872740 - RNA, 19 nt, Artificial Sequence
  Description of Artificial Sequence: Synthetic oligonucleotide
  Antisense strand to SEQ ID NO: 1872739
uuaaaggauagcaugccag

SEQ ID NO: 1872741 - RNA, 19 nt, Artificial Sequence
  Description of Artificial Sequence: Synthetic oligonucleotide
  Sense strand starting at position 3292 of SEQ ID NO: 1564343
aguauacuggugugaaauc

SEQ ID NO: 1872742 - RNA, 19 nt, Artificial Sequence
  Description of Artificial Sequence: Synthetic oligonucleotide
  Antisense strand to SEQ ID NO: 1872741
gauuucacaccaguauacu

SEQ ID NO: 1872743 - RNA, 19 nt, Artificial Sequence
  Description of Artificial Sequence: Synthetic oligonucleotide
  Sense strand starting at position 3379 of SEQ ID NO: 1564343
ugucccuucccucagacau

SEQ ID NO: 1872744 - RNA, 19 nt, Artificial Sequence
  Description of Artificial Sequence: Synthetic oligonucleotide
  Antisense strand to SEQ ID NO: 1872743
augucugagggaagggaca

SEQ ID NO: 1872745 - RNA, 19 nt, Artificial Sequence
  Description of Artificial Sequence: Synthetic oligonucleotide
  Sense strand starting at position 3444 of SEQ ID NO: 1564343
agaagaaaucucugagcau

SEQ ID NO: 1872746 - RNA, 19 nt, Artificial Sequence
  Description of Artificial Sequence: Synthetic oligonucleotide
  Antisense strand to SEQ ID NO: 1872745
augcucagagauuucuucu

SEQ ID NO: 1872747 - RNA, 19 nt, Artificial Sequence
  Description of Artificial Sequence: Synthetic oligonucleotide
  Sense strand starting at position 3445 of SEQ ID NO: 1564343
gaagaaaucucugagcaug

SEQ ID NO: 1872748 - RNA, 19 nt, Artificial Sequence
  Description of Artificial Sequence: Synthetic oligonucleotide
  Antisense strand to SEQ ID NO: 1872747
caugcucagagauuucuuc

SEQ ID NO: 1872749 - RNA, 19 nt, Artificial Sequence
  Description of Artificial Sequence: Synthetic oligonucleotide
  Sense strand starting at position 3456 of SEQ ID NO: 1564343
ugagcaugcacuggaugau

SEQ ID NO: 1872750 - RNA, 19 nt, Artificial Sequence
  Description of Artificial Sequence: Synthetic oligonucleotide
  Antisense strand to SEQ ID NO: 1872749
aucauccagugcaugcuca

SEQ ID NO: 1872751 - RNA, 19 nt, Artificial Sequence
  Description of Artificial Sequence: Synthetic oligonucleotide
  Sense strand starting at position 3457 of SEQ ID NO: 1564343
gagcaugcacuggaugaua

SEQ ID NO: 1872752 - RNA, 19 nt, Artificial Sequence
  Description of Artificial Sequence: Synthetic oligonucleotide
  Antisense strand to SEQ ID NO: 1872751
uaucauccagugcaugcuc

SEQ ID NO: 1872753 - RNA, 19 nt, Artificial Sequence
  Description of Artificial Sequence: Synthetic oligonucleotide
  Sense strand starting at position 3459 of SEQ ID NO: 1564343
gcaugcacuggaugauaau

SEQ ID NO: 1872754 - RNA, 19 nt, Artificial Sequence
  Description of Artificial Sequence: Synthetic oligonucleotide
  Antisense strand to SEQ ID NO: 1872753
auuaucauccagugcaugc

SEQ ID NO: 1872755 - RNA, 19 nt, Artificial Sequence
  Description of Artificial Sequence: Synthetic oligonucleotide
  Sense strand starting at position 3566 of SEQ ID NO: 1564343
auuacaucaggcugugaua

SEQ ID NO: 1872756 - RNA, 19 nt, Artificial Sequence
  Description of Artificial Sequence: Synthetic oligonucleotide
  Antisense strand to SEQ ID NO: 1872755
uaucacagccugauguaau

SEQ ID NO: 1872757 - RNA, 19 nt, Artificial Sequence
  Description of Artificial Sequence: Synthetic oligonucleotide
  Sense strand starting at position 3568 of SEQ ID NO: 1564343
uacaucaggcugugauaga

SEQ ID NO: 1872758 - RNA, 19 nt, Artificial Sequence
  Description of Artificial Sequence: Synthetic oligonucleotide
  Antisense strand to SEQ ID NO: 1872757
ucuaucacagccugaugua

SEQ ID NO: 1872759 - RNA, 19 nt, Artificial Sequence
  Description of Artificial Sequence: Synthetic oligonucleotide
  Sense strand starting at position 3621 of SEQ ID NO: 1564343
gaaacuaagcaauguuguu

SEQ ID NO: 1872760 - RNA, 19 nt, Artificial Sequence
  Description of Artificial Sequence: Synthetic oligonucleotide
  Antisense strand to SEQ ID NO: 1872759
aacaacauugcuuaguuuc

SEQ ID NO: 1872761 - RNA, 19 nt, Artificial Sequence
  Description of Artificial Sequence: Synthetic oligonucleotide
  Sense strand starting at position 3667 of SEQ ID NO: 1564343
gugugcccacauuaauauu

SEQ ID NO: 1872762 - RNA, 19 nt, Artificial Sequence
  Description of Artificial Sequence: Synthetic oligonucleotide
  Antisense strand to SEQ ID NO: 1872761
aauauuaaugugggcacac

SEQ ID NO: 1872763 - RNA, 19 nt, Artificial Sequence
  Description of Artificial Sequence: Synthetic oligonucleotide
  Sense strand starting at position 3977 of SEQ ID NO: 1564343
cauugauaaucagcguuua

SEQ ID NO: 1872764 - RNA, 19 nt, Artificial Sequence
  Description of Artificial Sequence: Synthetic oligonucleotide
  Antisense strand to SEQ ID NO: 1872763
uaaacgcugauuaucaaug

SEQ ID NO: 1872765 - RNA, 19 nt, Artificial Sequence
  Description of Artificial Sequence: Synthetic oligonucleotide
  Sense strand starting at position 3978 of SEQ ID NO: 1564343
auugauaaucagcguuuaa

SEQ ID NO: 1872766 - RNA, 19 nt, Artificial Sequence
  Description of Artificial Sequence: Synthetic oligonucleotide
  Antisense strand to SEQ ID NO: 1872765
uuaaacgcugauuaucaau

SEQ ID NO: 1872767 - RNA, 19 nt, Artificial Sequence
  Description of Artificial Sequence: Synthetic oligonucleotide
  Sense strand starting at position 87 of SEQ ID NO: 1564344
ugccaucacucuucuaguu

SEQ ID NO: 1872768 - RNA, 19 nt, Artificial Sequence
  Description of Artificial Sequence: Synthetic oligonucleotide
  Antisense strand to SEQ ID NO: 1872767
aacuagaagagugauggca

SEQ ID NO: 1872769 - RNA, 19 nt, Artificial Sequence
  Description of Artificial Sequence: Synthetic oligonucleotide
  Sense strand starting at position 243 of SEQ ID NO: 1564344
acuuacuguuuacugaaga

SEQ ID NO: 1872770 - RNA, 19 nt, Artificial Sequence
  Description of Artificial Sequence: Synthetic oligonucleotide
  Antisense strand to SEQ ID NO: 1872769
ucuucaguaaacaguaagu

SEQ ID NO: 1872771 - RNA, 19 nt, Artificial Sequence
  Description of Artificial Sequence: Synthetic oligonucleotide
  Sense strand starting at position 248 of SEQ ID NO: 1564344
cuguuuacugaagaagcuu

SEQ ID NO: 1872772 - RNA, 19 nt, Artificial Sequence
  Description of Artificial Sequence: Synthetic oligonucleotide
  Antisense strand to SEQ ID NO: 1872771
aagcuucuucaguaaacag

SEQ ID NO: 1872773 - RNA, 19 nt, Artificial Sequence
  Description of Artificial Sequence: Synthetic oligonucleotide
  Sense strand starting at position 397 of SEQ ID NO: 1564344
ccuugcuucccucggaaau

SEQ ID NO: 1872774 - RNA, 19 nt, Artificial Sequence
  Description of Artificial Sequence: Synthetic oligonucleotide
  Antisense strand to SEQ ID NO: 1872773
auuuccgagggaagcaagg

SEQ ID NO: 1872775 - RNA, 19 nt, Artificial Sequence
  Description of Artificial Sequence: Synthetic oligonucleotide
  Sense strand starting at position 398 of SEQ ID NO: 1564344
cuugcuucccucggaaauc

SEQ ID NO: 1872776 - RNA, 19 nt, Artificial Sequence
  Description of Artificial Sequence: Synthetic oligonucleotide
  Antisense strand to SEQ ID NO: 1872775
gauuuccgagggaagcaag

SEQ ID NO: 1872777 - RNA, 19 nt, Artificial Sequence
  Description of Artificial Sequence: Synthetic oligonucleotide
  Sense strand starting at position 495 of SEQ ID NO: 1564344
caccgucugcauuacaaga

SEQ ID NO: 1872778 - RNA, 19 nt, Artificial Sequence
  Description of Artificial Sequence: Synthetic oligonucleotide
  Antisense strand to SEQ ID NO: 1872777
ucuuguaaugcagacggug

SEQ ID NO: 1872779 - RNA, 19 nt, Artificial Sequence
  Description of Artificial Sequence: Synthetic oligonucleotide
  Sense strand starting at position 555 of SEQ ID NO: 1564344
aacaguaggcuccgaguuu

SEQ ID NO: 1872780 - RNA, 19 nt, Artificial Sequence
  Description of Artificial Sequence: Synthetic oligonucleotide
  Antisense strand to SEQ ID NO: 1872779
aaacucggagccuacuguu

SEQ ID NO: 1872781 - RNA, 19 nt, Artificial Sequence
  Description of Artificial Sequence: Synthetic oligonucleotide
  Sense strand starting at position 567 of SEQ ID NO: 1564344
cgaguuuaucaagaaaguu

SEQ ID NO: 1872782 - RNA, 19 nt, Artificial Sequence
  Description of Artificial Sequence: Synthetic oligonucleotide
  Antisense strand to SEQ ID NO: 1872781
aacuuucuugauaaacucg

SEQ ID NO: 1872783 - RNA, 19 nt, Artificial Sequence
  Description of Artificial Sequence: Synthetic oligonucleotide
  Sense strand starting at position 617 of SEQ ID NO: 1564344
ggaugaaacuccgccuuaa

SEQ ID NO: 1872784 - RNA, 19 nt, Artificial Sequence
  Description of Artificial Sequence: Synthetic oligonucleotide
  Antisense strand to SEQ ID NO: 1872783
uuaaggcggaguuucaucc

SEQ ID NO: 1872785 - RNA, 19 nt, Artificial Sequence
  Description of Artificial Sequence: Synthetic oligonucleotide
  Sense strand starting at position 695 of SEQ ID NO: 1564344
acacuaaguuguccuccaa

SEQ ID NO: 1872786 - RNA, 19 nt, Artificial Sequence
  Description of Artificial Sequence: Synthetic oligonucleotide
  Antisense strand to SEQ ID NO: 1872785
uuggaggacaacuuagugu

SEQ ID NO: 1872787 - RNA, 19 nt, Artificial Sequence
  Description of Artificial Sequence: Synthetic oligonucleotide
  Sense strand starting at position 702 of SEQ ID NO: 1564344
guuguccuccaauaagaaa

SEQ ID NO: 1872788 - RNA, 19 nt, Artificial Sequence
  Description of Artificial Sequence: Synthetic oligonucleotide
  Antisense strand to SEQ ID NO: 1872787
uuucuuauuggaggacaac

SEQ ID NO: 1872789 - RNA, 19 nt, Artificial Sequence
  Description of Artificial Sequence: Synthetic oligonucleotide
  Sense strand starting at position 732 of SEQ ID NO: 1564344
ugcccuuauuccucgauuu

SEQ ID NO: 1872790 - RNA, 19 nt, Artificial Sequence
  Description of Artificial Sequence: Synthetic oligonucleotide
  Antisense strand to SEQ ID NO: 1872789
aaaucgaggaauaagggca

SEQ ID NO: 1872791 - RNA, 19 nt, Artificial Sequence
  Description of Artificial Sequence: Synthetic oligonucleotide
  Sense strand starting at position 733 of SEQ ID NO: 1564344
gcccuuauuccucgauuua

SEQ ID NO: 1872792 - RNA, 19 nt, Artificial Sequence
  Description of Artificial Sequence: Synthetic oligonucleotide
  Antisense strand to SEQ ID NO: 1872791
uaaaucgaggaauaagggc

SEQ ID NO: 1872793 - RNA, 19 nt, Artificial Sequence
  Description of Artificial Sequence: Synthetic oligonucleotide
  Sense strand starting at position 790 of SEQ ID NO: 1564344
ucaagaaaguuguuuccac

SEQ ID NO: 1872794 - RNA, 19 nt, Artificial Sequence
  Description of Artificial Sequence: Synthetic oligonucleotide
  Antisense strand to SEQ ID NO: 1872793
guggaaacaacuuucuuga

SEQ ID NO: 1872795 - RNA, 19 nt, Artificial Sequence
  Description of Artificial Sequence: Synthetic oligonucleotide
  Sense strand starting at position 805 of SEQ ID NO: 1564344
ccacauaaaugaguacgaa

SEQ ID NO: 1872796 - RNA, 19 nt, Artificial Sequence
  Description of Artificial Sequence: Synthetic oligonucleotide
  Antisense strand to SEQ ID NO: 1872795
uucguacucauuuaugugg

SEQ ID NO: 1872797 - RNA, 19 nt, Artificial Sequence
  Description of Artificial Sequence: Synthetic oligonucleotide
  Sense strand starting at position 808 of SEQ ID NO: 1564344
cauaaaugaguacgaauga

SEQ ID NO: 1872798 - RNA, 19 nt, Artificial Sequence
  Description of Artificial Sequence: Synthetic oligonucleotide
  Antisense strand to SEQ ID NO: 1872797
ucauucguacucauuuaug

SEQ ID NO: 1872799 - RNA, 19 nt, Artificial Sequence
  Description of Artificial Sequence: Synthetic oligonucleotide
  Sense strand starting at position 809 of SEQ ID NO: 1564344
auaaaugaguacgaaugau

SEQ ID NO: 1872800 - RNA, 19 nt, Artificial Sequence
  Description of Artificial Sequence: Synthetic oligonucleotide
  Antisense strand to SEQ ID NO: 1872799
aucauucguacucauuuau

SEQ ID NO: 1872801 - RNA, 19 nt, Artificial Sequence
  Description of Artificial Sequence: Synthetic oligonucleotide
  Sense strand starting at position 944 of SEQ ID NO: 1564344
cggcaaagauuguuggaaa

SEQ ID NO: 1872802 - RNA, 19 nt, Artificial Sequence
  Description of Artificial Sequence: Synthetic oligonucleotide
  Antisense strand to SEQ ID NO: 1872801
uuuccaacaaucuuugccg

SEQ ID NO: 1872803 - RNA, 19 nt, Artificial Sequence
  Description of Artificial Sequence: Synthetic oligonucleotide
  Sense strand starting at position 2503 of SEQ ID NO: 1564344
gcuccagcucgaguuguuu

SEQ ID NO: 1872804 - RNA, 19 nt, Artificial Sequence
  Description of Artificial Sequence: Synthetic oligonucleotide
  Antisense strand to SEQ ID NO: 1872803
aaacaacucgagcuggagc

SEQ ID NO: 1872805 - RNA, 19 nt, Artificial Sequence
  Description of Artificial Sequence: Synthetic oligonucleotide
  Sense strand starting at position 2708 of SEQ ID NO: 1564344
aaggguuaucccuagagca

SEQ ID NO: 1872806 - RNA, 19 nt, Artificial Sequence
  Description of Artificial Sequence: Synthetic oligonucleotide
  Antisense strand to SEQ ID NO: 1872805
ugcucuagggauaacccuu

SEQ ID NO: 1872807 - RNA, 19 nt, Artificial Sequence
  Description of Artificial Sequence: Synthetic oligonucleotide
  Sense strand starting at position 2825 of SEQ ID NO: 1564344
acguuucgcacguugcaaa

SEQ ID NO: 1872808 - RNA, 19 nt, Artificial Sequence
  Description of Artificial Sequence: Synthetic oligonucleotide
  Antisense strand to SEQ ID NO: 1872807
uuugcaacgugcgaaacgu

SEQ ID NO: 1872809 - RNA, 19 nt, Artificial Sequence
  Description of Artificial Sequence: Synthetic oligonucleotide
  Sense strand starting at position 2897 of SEQ ID NO: 1564344
gccugugaaauguaagacu

SEQ ID NO: 1872810 - RNA, 19 nt, Artificial Sequence
  Description of Artificial Sequence: Synthetic oligonucleotide
  Antisense strand to SEQ ID NO: 1872809
agucuuacauuucacaggc

SEQ ID NO: 1872811 - RNA, 19 nt, Artificial Sequence
  Description of Artificial Sequence: Synthetic oligonucleotide
  Sense strand starting at position 2967 of SEQ ID NO: 1564344
agcccaauuggguauggau

SEQ ID NO: 1872812 - RNA, 19 nt, Artificial Sequence
  Description of Artificial Sequence: Synthetic oligonucleotide
  Antisense strand to SEQ ID NO: 1872811
auccauacccaauugggcu

SEQ ID NO: 1872813 - RNA, 19 nt, Artificial Sequence
  Description of Artificial Sequence: Synthetic oligonucleotide
  Sense strand starting at position 3117 of SEQ ID NO: 1564344
uguuuaugcuaucuuucca

SEQ ID NO: 1872814 - RNA, 19 nt, Artificial Sequence
  Description of Artificial Sequence: Synthetic oligonucleotide
  Antisense strand to SEQ ID NO: 1872813
uggaaagauagcauaaaca

SEQ ID NO: 1872815 - RNA, 19 nt, Artificial Sequence
  Description of Artificial Sequence: Synthetic oligonucleotide
  Sense strand starting at position 3124 of SEQ ID NO: 1564344
gcuaucuuuccaugcugaa

SEQ ID NO: 1872816 - RNA, 19 nt, Artificial Sequence
  Description of Artificial Sequence: Synthetic oligonucleotide
  Antisense strand to SEQ ID NO: 1872815
uucagcauggaaagauagc

SEQ ID NO: 1872817 - RNA, 19 nt, Artificial Sequence
  Description of Artificial Sequence: Synthetic oligonucleotide
  Sense strand starting at position 3181 of SEQ ID NO: 1564344
aguuaaauaguggagucuu

SEQ ID NO: 1872818 - RNA, 19 nt, Artificial Sequence
  Description of Artificial Sequence: Synthetic oligonucleotide
  Antisense strand to SEQ ID NO: 1872817
aagacuccacuauuuaacu

SEQ ID NO: 1872819 - RNA, 19 nt, Artificial Sequence
  Description of Artificial Sequence: Synthetic oligonucleotide
  Sense strand starting at position 3216 of SEQ ID NO: 1564344
cuggcaugcuauccuuuaa

SEQ ID NO: 1872820 - RNA, 19 nt, Artificial Sequence
  Description of Artificial Sequence: Synthetic oligonucleotide
  Antisense strand to SEQ ID NO: 1872819
uuaaaggauagcaugccag

SEQ ID NO: 1872821 - RNA, 19 nt, Artificial Sequence
  Description of Artificial Sequence: Synthetic oligonucleotide
  Sense strand starting at position 3297 of SEQ ID NO: 1564344
aguauacuggugugaaauc

SEQ ID NO: 1872822 - RNA, 19 nt, Artificial Sequence
  Description of Artificial Sequence: Synthetic oligonucleotide
  Antisense strand to SEQ ID NO: 1872821
gauuucacaccaguauacu

SEQ ID NO: 1872823 - RNA, 19 nt, Artificial Sequence
  Description of Artificial Sequence: Synthetic oligonucleotide
  Sense strand starting at position 3384 of SEQ ID NO: 1564344
ugucccuucccucagacau

SEQ ID NO: 1872824 - RNA, 19 nt, Artificial Sequence
  Description of Artificial Sequence: Synthetic oligonucleotide
  Antisense strand to SEQ ID NO: 1872823
augucugagggaagggaca

SEQ ID NO: 1872825 - RNA, 19 nt, Artificial Sequence
  Description of Artificial Sequence: Synthetic oligonucleotide
  Sense strand starting at position 3449 of SEQ ID NO: 1564344
agaagaaaucucugagcau

SEQ ID NO: 1872826 - RNA, 19 nt, Artificial Sequence
  Description of Artificial Sequence: Synthetic oligonucleotide
  Antisense strand to SEQ ID NO: 1872825
augcucagagauuucuucu

SEQ ID NO: 1872827 - RNA, 19 nt, Artificial Sequence
  Description of Artificial Sequence: Synthetic oligonucleotide
  Sense strand starting at position 3450 of SEQ ID NO: 1564344
gaagaaaucucugagcaug

SEQ ID NO: 1872828 - RNA, 19 nt, Artificial Sequence
  Description of Artificial Sequence: Synthetic oligonucleotide
  Antisense strand to SEQ ID NO: 1872827
caugcucagagauuucuuc

SEQ ID NO: 1872829 - RNA, 19 nt, Artificial Sequence
  Description of Artificial Sequence: Synthetic oligonucleotide
  Sense strand starting at position 3461 of SEQ ID NO: 1564344
ugagcaugcacuggaugau

SEQ ID NO: 1872830 - RNA, 19 nt, Artificial Sequence
  Description of Artificial Sequence: Synthetic oligonucleotide
  Antisense strand to SEQ ID NO: 1872829
aucauccagugcaugcuca

SEQ ID NO: 1872831 - RNA, 19 nt, Artificial Sequence
  Description of Artificial Sequence: Synthetic oligonucleotide
  Sense strand starting at position 3462 of SEQ ID NO: 1564344
gagcaugcacuggaugaua

SEQ ID NO: 1872832 - RNA, 19 nt, Artificial Sequence
  Description of Artificial Sequence: Synthetic oligonucleotide
  Antisense strand to SEQ ID NO: 1872831
uaucauccagugcaugcuc

SEQ ID NO: 1872833 - RNA, 19 nt, Artificial Sequence
  Description of Artificial Sequence: Synthetic oligonucleotide
  Sense strand starting at position 3464 of SEQ ID NO: 1564344
gcaugcacuggaugauaau

SEQ ID NO: 1872834 - RNA, 19 nt, Artificial Sequence
  Description of Artificial Sequence: Synthetic oligonucleotide
  Antisense strand to SEQ ID NO: 1872833
auuaucauccagugcaugc

SEQ ID NO: 1872835 - RNA, 19 nt, Artificial Sequence
  Description of Artificial Sequence: Synthetic oligonucleotide
  Sense strand starting at position 3571 of SEQ ID NO: 1564344
auuacaucaggcugugaua

SEQ ID NO: 1872836 - RNA, 19 nt, Artificial Sequence
  Description of Artificial Sequence: Synthetic oligonucleotide
  Antisense strand to SEQ ID NO: 1872835
uaucacagccugauguaau

SEQ ID NO: 1872837 - RNA, 19 nt, Artificial Sequence
  Description of Artificial Sequence: Synthetic oligonucleotide
  Sense strand starting at position 3573 of SEQ ID NO: 1564344
uacaucaggcugugauaga

SEQ ID NO: 1872838 - RNA, 19 nt, Artificial Sequence
  Description of Artificial Sequence: Synthetic oligonucleotide
  Antisense strand to SEQ ID NO: 1872837
ucuaucacagccugaugua

SEQ ID NO: 1872839 - RNA, 19 nt, Artificial Sequence
  Description of Artificial Sequence: Synthetic oligonucleotide
  Sense strand starting at position 3626 of SEQ ID NO: 1564344
gaaacuaagcaauguuguu

SEQ ID NO: 1872840 - RNA, 19 nt, Artificial Sequence
  Description of Artificial Sequence: Synthetic oligonucleotide
  Antisense strand to SEQ ID NO: 1872839
aacaacauugcuuaguuuc

SEQ ID NO: 1872841 - RNA, 19 nt, Artificial Sequence
  Description of Artificial Sequence: Synthetic oligonucleotide
  Sense strand starting at position 3672 of SEQ ID NO: 1564344
gugugcccacauuaauauu

SEQ ID NO: 1872842 - RNA, 19 nt, Artificial Sequence
  Description of Artificial Sequence: Synthetic oligonucleotide
  Antisense strand to SEQ ID NO: 1872841
aauauuaaugugggcacac

SEQ ID NO: 1872843 - RNA, 19 nt, Artificial Sequence
  Description of Artificial Sequence: Synthetic oligonucleotide
  Sense strand starting at position 3982 of SEQ ID NO: 1564344
cauugauaaucagcguuua

SEQ ID NO: 1872844 - RNA, 19 nt, Artificial Sequence
  Description of Artificial Sequence: Synthetic oligonucleotide
  Antisense strand to SEQ ID NO: 1872843
uaaacgcugauuaucaaug

SEQ ID NO: 1872845 - RNA, 19 nt, Artificial Sequence
  Description of Artificial Sequence: Synthetic oligonucleotide
  Sense strand starting at position 3983 of SEQ ID NO: 1564344
auugauaaucagcguuuaa

SEQ ID NO: 1872846 - RNA, 19 nt, Artificial Sequence
  Description of Artificial Sequence: Synthetic oligonucleotide
  Antisense strand to SEQ ID NO: 1872845
uuaaacgcugauuaucaau

SEQ ID NO: 1872847 - RNA, 19 nt, Artificial Sequence
  Description of Artificial Sequence: Synthetic oligonucleotide
  Sense strand starting at position 3 of SEQ ID NO: 1564345
ugccaucacucuucuaguu

SEQ ID NO: 1872848 - RNA, 19 nt, Artificial Sequence
  Description of Artificial Sequence: Synthetic oligonucleotide
  Antisense strand to SEQ ID NO: 1872847
aacuagaagagugauggca

SEQ ID NO: 1872849 - RNA, 19 nt, Artificial Sequence
  Description of Artificial Sequence: Synthetic oligonucleotide
  Sense strand starting at position 159 of SEQ ID NO: 1564345
acuuacuguuuacugaaga

SEQ ID NO: 1872850 - RNA, 19 nt, Artificial Sequence
  Description of Artificial Sequence: Synthetic oligonucleotide
  Antisense strand to SEQ ID NO: 1872849
ucuucaguaaacaguaagu

SEQ ID NO: 1872851 - RNA, 19 nt, Artificial Sequence
  Description of Artificial Sequence: Synthetic oligonucleotide
  Sense strand starting at position 164 of SEQ ID NO: 1564345
cuguuuacugaagaagcuu

SEQ ID NO: 1872852 - RNA, 19 nt, Artificial Sequence
  Description of Artificial Sequence: Synthetic oligonucleotide
  Antisense strand to SEQ ID NO: 1872851
aagcuucuucaguaaacag

SEQ ID NO: 1872853 - RNA, 19 nt, Artificial Sequence
  Description of Artificial Sequence: Synthetic oligonucleotide
  Sense strand starting at position 313 of SEQ ID NO: 1564345
ccuugcuucccucggaaau

SEQ ID NO: 1872854 - RNA, 19 nt, Artificial Sequence
  Description of Artificial Sequence: Synthetic oligonucleotide
  Antisense strand to SEQ ID NO: 1872853
auuuccgagggaagcaagg

SEQ ID NO: 1872855 - RNA, 19 nt, Artificial Sequence
  Description of Artificial Sequence: Synthetic oligonucleotide
  Sense strand starting at position 314 of SEQ ID NO: 1564345
cuugcuucccucggaaauc

SEQ ID NO: 1872856 - RNA, 19 nt, Artificial Sequence
  Description of Artificial Sequence: Synthetic oligonucleotide
  Antisense strand to SEQ ID NO: 1872855
gauuuccgagggaagcaag

SEQ ID NO: 1872857 - RNA, 19 nt, Artificial Sequence
  Description of Artificial Sequence: Synthetic oligonucleotide
  Sense strand starting at position 411 of SEQ ID NO: 1564345
caccgucugcauuacaaga

SEQ ID NO: 1872858 - RNA, 19 nt, Artificial Sequence
  Description of Artificial Sequence: Synthetic oligonucleotide
  Antisense strand to SEQ ID NO: 1872857
ucuuguaaugcagacggug

SEQ ID NO: 1872859 - RNA, 19 nt, Artificial Sequence
  Description of Artificial Sequence: Synthetic oligonucleotide
  Sense strand starting at position 471 of SEQ ID NO: 1564345
aacaguaggcuccgaguuu

SEQ ID NO: 1872860 - RNA, 19 nt, Artificial Sequence
  Description of Artificial Sequence: Synthetic oligonucleotide
  Antisense strand to SEQ ID NO: 1872859
aaacucggagccuacuguu

SEQ ID NO: 1872861 - RNA, 19 nt, Artificial Sequence
  Description of Artificial Sequence: Synthetic oligonucleotide
  Sense strand starting at position 483 of SEQ ID NO: 1564345
cgaguuuaucaagaaaguu

SEQ ID NO: 1872862 - RNA, 19 nt, Artificial Sequence
  Description of Artificial Sequence: Synthetic oligonucleotide
  Antisense strand to SEQ ID NO: 1872861
aacuuucuugauaaacucg

SEQ ID NO: 1872863 - RNA, 19 nt, Artificial Sequence
  Description of Artificial Sequence: Synthetic oligonucleotide
  Sense strand starting at position 533 of SEQ ID NO: 1564345
ggaugaaacuccgccuuaa

SEQ ID NO: 1872864 - RNA, 19 nt, Artificial Sequence
  Description of Artificial Sequence: Synthetic oligonucleotide
  Antisense strand to SEQ ID NO: 1872863
uuaaggcggaguuucaucc

SEQ ID NO: 1872865 - RNA, 19 nt, Artificial Sequence
  Description of Artificial Sequence: Synthetic oligonucleotide
  Sense strand starting at position 611 of SEQ ID NO: 1564345
acacuaaguuguccuccaa

SEQ ID NO: 1872866 - RNA, 19 nt, Artificial Sequence
  Description of Artificial Sequence: Synthetic oligonucleotide
  Antisense strand to SEQ ID NO: 1872865
uuggaggacaacuuagugu

SEQ ID NO: 1872867 - RNA, 19 nt, Artificial Sequence
  Description of Artificial Sequence: Synthetic oligonucleotide
  Sense strand starting at position 618 of SEQ ID NO: 1564345
guuguccuccaauaagaaa

SEQ ID NO: 1872868 - RNA, 19 nt, Artificial Sequence
  Description of Artificial Sequence: Synthetic oligonucleotide
  Antisense strand to SEQ ID NO: 1872867
uuucuuauuggaggacaac

SEQ ID NO: 1872869 - RNA, 19 nt, Artificial Sequence
  Description of Artificial Sequence: Synthetic oligonucleotide
  Sense strand starting at position 648 of SEQ ID NO: 1564345
ugcccuuauuccucgauuu

SEQ ID NO: 1872870 - RNA, 19 nt, Artificial Sequence
  Description of Artificial Sequence: Synthetic oligonucleotide
  Antisense strand to SEQ ID NO: 1872869
aaaucgaggaauaagggca

SEQ ID NO: 1872871 - RNA, 19 nt, Artificial Sequence
  Description of Artificial Sequence: Synthetic oligonucleotide
  Sense strand starting at position 649 of SEQ ID NO: 1564345
gcccuuauuccucgauuua

SEQ ID NO: 1872872 - RNA, 19 nt, Artificial Sequence
  Description of Artificial Sequence: Synthetic oligonucleotide
  Antisense strand to SEQ ID NO: 1872871
uaaaucgaggaauaagggc

SEQ ID NO: 1872873 - RNA, 19 nt, Artificial Sequence
  Description of Artificial Sequence: Synthetic oligonucleotide
  Sense strand starting at position 706 of SEQ ID NO: 1564345
ucaagaaaguuguuuccac

SEQ ID NO: 1872874 - RNA, 19 nt, Artificial Sequence
  Description of Artificial Sequence: Synthetic oligonucleotide
  Antisense strand to SEQ ID NO: 1872873
guggaaacaacuuucuuga

SEQ ID NO: 1872875 - RNA, 19 nt, Artificial Sequence
  Description of Artificial Sequence: Synthetic oligonucleotide
  Sense strand starting at position 721 of SEQ ID NO: 1564345
ccacauaaaugaguacgaa

SEQ ID NO: 1872876 - RNA, 19 nt, Artificial Sequence
  Description of Artificial Sequence: Synthetic oligonucleotide
  Antisense strand to SEQ ID NO: 1872875
uucguacucauuuaugugg

SEQ ID NO: 1872877 - RNA, 19 nt, Artificial Sequence
  Description of Artificial Sequence: Synthetic oligonucleotide
  Sense strand starting at position 724 of SEQ ID NO: 1564345
cauaaaugaguacgaauga

SEQ ID NO: 1872878 - RNA, 19 nt, Artificial Sequence
  Description of Artificial Sequence: Synthetic oligonucleotide
  Antisense strand to SEQ ID NO: 1872877
ucauucguacucauuuaug

SEQ ID NO: 1872879 - RNA, 19 nt, Artificial Sequence
  Description of Artificial Sequence: Synthetic oligonucleotide
  Sense strand starting at position 725 of SEQ ID NO: 1564345
auaaaugaguacgaaugau

SEQ ID NO: 1872880 - RNA, 19 nt, Artificial Sequence
  Description of Artificial Sequence: Synthetic oligonucleotide
  Antisense strand to SEQ ID NO: 1872879
aucauucguacucauuuau

SEQ ID NO: 1872881 - RNA, 19 nt, Artificial Sequence
  Description of Artificial Sequence: Synthetic oligonucleotide
  Sense strand starting at position 860 of SEQ ID NO: 1564345
cggcaaagauuguuggaaa

SEQ ID NO: 1872882 - RNA, 19 nt, Artificial Sequence
  Description of Artificial Sequence: Synthetic oligonucleotide
  Antisense strand to SEQ ID NO: 1872881
uuuccaacaaucuuugccg

SEQ ID NO: 1872883 - RNA, 19 nt, Artificial Sequence
  Description of Artificial Sequence: Synthetic oligonucleotide
  Sense strand starting at position 2419 of SEQ ID NO: 1564345
gcuccagcucgaguuguuu

SEQ ID NO: 1872884 - RNA, 19 nt, Artificial Sequence
  Description of Artificial Sequence: Synthetic oligonucleotide
  Antisense strand to SEQ ID NO: 1872883
aaacaacucgagcuggagc

SEQ ID NO: 1872885 - RNA, 19 nt, Artificial Sequence
  Description of Artificial Sequence: Synthetic oligonucleotide
  Sense strand starting at position 2624 of SEQ ID NO: 1564345
aaggguuaucccuagagca

SEQ ID NO: 1872886 - RNA, 19 nt, Artificial Sequence
  Description of Artificial Sequence: Synthetic oligonucleotide
  Antisense strand to SEQ ID NO: 1872885
ugcucuagggauaacccuu

SEQ ID NO: 1872887 - RNA, 19 nt, Artificial Sequence
  Description of Artificial Sequence: Synthetic oligonucleotide
  Sense strand starting at position 2741 of SEQ ID NO: 1564345
acguuucgcacguugcaaa

SEQ ID NO: 1872888 - RNA, 19 nt, Artificial Sequence
  Description of Artificial Sequence: Synthetic oligonucleotide
  Antisense strand to SEQ ID NO: 1872887
uuugcaacgugcgaaacgu

SEQ ID NO: 1872889 - RNA, 19 nt, Artificial Sequence
  Description of Artificial Sequence: Synthetic oligonucleotide
  Sense strand starting at position 2813 of SEQ ID NO: 1564345
gccugugaaauguaagacu

SEQ ID NO: 1872890 - RNA, 19 nt, Artificial Sequence
  Description of Artificial Sequence: Synthetic oligonucleotide
  Antisense strand to SEQ ID NO: 1872889
agucuuacauuucacaggc

SEQ ID NO: 1872891 - RNA, 19 nt, Artificial Sequence
  Description of Artificial Sequence: Synthetic oligonucleotide
  Sense strand starting at position 2883 of SEQ ID NO: 1564345
agcccaauuggguauggau

SEQ ID NO: 1872892 - RNA, 19 nt, Artificial Sequence
  Description of Artificial Sequence: Synthetic oligonucleotide
  Antisense strand to SEQ ID NO: 1872891
auccauacccaauugggcu

SEQ ID NO: 1872893 - RNA, 19 nt, Artificial Sequence
  Description of Artificial Sequence: Synthetic oligonucleotide
  Sense strand starting at position 3033 of SEQ ID NO: 1564345
uguuuaugcuaucuuucca

SEQ ID NO: 1872894 - RNA, 19 nt, Artificial Sequence
  Description of Artificial Sequence: Synthetic oligonucleotide
  Antisense strand to SEQ ID NO: 1872893
uggaaagauagcauaaaca

SEQ ID NO: 1872895 - RNA, 19 nt, Artificial Sequence
  Description of Artificial Sequence: Synthetic oligonucleotide
  Sense strand starting at position 3040 of SEQ ID NO: 1564345
gcuaucuuuccaugcugaa

SEQ ID NO: 1872896 - RNA, 19 nt, Artificial Sequence
  Description of Artificial Sequence: Synthetic oligonucleotide
  Antisense strand to SEQ ID NO: 1872895
uucagcauggaaagauagc

SEQ ID NO: 1872897 - RNA, 19 nt, Artificial Sequence
  Description of Artificial Sequence: Synthetic oligonucleotide
  Sense strand starting at position 3097 of SEQ ID NO: 1564345
aguuaaauaguggagucuu

SEQ ID NO: 1872898 - RNA, 19 nt, Artificial Sequence
  Description of Artificial Sequence: Synthetic oligonucleotide
  Antisense strand to SEQ ID NO: 1872897
aagacuccacuauuuaacu

SEQ ID NO: 1872899 - RNA, 19 nt, Artificial Sequence
  Description of Artificial Sequence: Synthetic oligonucleotide
  Sense strand starting at position 3132 of SEQ ID NO: 1564345
cuggcaugcuauccuuuaa

SEQ ID NO: 1872900 - RNA, 19 nt, Artificial Sequence
  Description of Artificial Sequence: Synthetic oligonucleotide
  Antisense strand to SEQ ID NO: 1872899
uuaaaggauagcaugccag

SEQ ID NO: 1872901 - RNA, 19 nt, Artificial Sequence
  Description of Artificial Sequence: Synthetic oligonucleotide
  Sense strand starting at position 3213 of SEQ ID NO: 1564345
aguauacuggugugaaauc

SEQ ID NO: 1872902 - RNA, 19 nt, Artificial Sequence
  Description of Artificial Sequence: Synthetic oligonucleotide
  Antisense strand to SEQ ID NO: 1872901
gauuucacaccaguauacu

SEQ ID NO: 1872903 - RNA, 19 nt, Artificial Sequence
  Description of Artificial Sequence: Synthetic oligonucleotide
  Sense strand starting at position 3300 of SEQ ID NO: 1564345
ugucccuucccucagacau

SEQ ID NO: 1872904 - RNA, 19 nt, Artificial Sequence
  Description of Artificial Sequence: Synthetic oligonucleotide
  Antisense strand to SEQ ID NO: 1872903
augucugagggaagggaca

SEQ ID NO: 1872905 - RNA, 19 nt, Artificial Sequence
  Description of Artificial Sequence: Synthetic oligonucleotide
  Sense strand starting at position 3365 of SEQ ID NO: 1564345
agaagaaaucucugagcau

SEQ ID NO: 1872906 - RNA, 19 nt, Artificial Sequence
  Description of Artificial Sequence: Synthetic oligonucleotide
  Antisense strand to SEQ ID NO: 1872905
augcucagagauuucuucu

SEQ ID NO: 1872907 - RNA, 19 nt, Artificial Sequence
  Description of Artificial Sequence: Synthetic oligonucleotide
  Sense strand starting at position 3366 of SEQ ID NO: 1564345
gaagaaaucucugagcaug

SEQ ID NO: 1872908 - RNA, 19 nt, Artificial Sequence
  Description of Artificial Sequence: Synthetic oligonucleotide
  Antisense strand to SEQ ID NO: 1872907
caugcucagagauuucuuc

SEQ ID NO: 1872909 - RNA, 19 nt, Artificial Sequence
  Description of Artificial Sequence: Synthetic oligonucleotide
  Sense strand starting at position 3377 of SEQ ID NO: 1564345
ugagcaugcacuggaugau

SEQ ID NO: 1872910 - RNA, 19 nt, Artificial Sequence
  Description of Artificial Sequence: Synthetic oligonucleotide
  Antisense strand to SEQ ID NO: 1872909
aucauccagugcaugcuca

SEQ ID NO: 1872911 - RNA, 19 nt, Artificial Sequence
  Description of Artificial Sequence: Synthetic oligonucleotide
  Sense strand starting at position 3378 of SEQ ID NO: 1564345
gagcaugcacuggaugaua

SEQ ID NO: 1872912 - RNA, 19 nt, Artificial Sequence
  Description of Artificial Sequence: Synthetic oligonucleotide
  Antisense strand to SEQ ID NO: 1872911
uaucauccagugcaugcuc

SEQ ID NO: 1872913 - RNA, 19 nt, Artificial Sequence
  Description of Artificial Sequence: Synthetic oligonucleotide
  Sense strand starting at position 3380 of SEQ ID NO: 1564345
gcaugcacuggaugauaau

SEQ ID NO: 1872914 - RNA, 19 nt, Artificial Sequence
  Description of Artificial Sequence: Synthetic oligonucleotide
  Antisense strand to SEQ ID NO: 1872913
auuaucauccagugcaugc

SEQ ID NO: 1872915 - RNA, 19 nt, Artificial Sequence
  Description of Artificial Sequence: Synthetic oligonucleotide
  Sense strand starting at position 3487 of SEQ ID NO: 1564345
auuacaucaggcugugaua

SEQ ID NO: 1872916 - RNA, 19 nt, Artificial Sequence
  Description of Artificial Sequence: Synthetic oligonucleotide
  Antisense strand to SEQ ID NO: 1872915
uaucacagccugauguaau

SEQ ID NO: 1872917 - RNA, 19 nt, Artificial Sequence
  Description of Artificial Sequence: Synthetic oligonucleotide
  Sense strand starting at position 3489 of SEQ ID NO: 1564345
uacaucaggcugugauaga

SEQ ID NO: 1872918 - RNA, 19 nt, Artificial Sequence
  Description of Artificial Sequence: Synthetic oligonucleotide
  Antisense strand to SEQ ID NO: 1872917
ucuaucacagccugaugua

SEQ ID NO: 1872919 - RNA, 19 nt, Artificial Sequence
  Description of Artificial Sequence: Synthetic oligonucleotide
  Sense strand starting at position 3542 of SEQ ID NO: 1564345
gaaacuaagcaauguuguu

SEQ ID NO: 1872920 - RNA, 19 nt, Artificial Sequence
  Description of Artificial Sequence: Synthetic oligonucleotide
  Antisense strand to SEQ ID NO: 1872919
aacaacauugcuuaguuuc

SEQ ID NO: 1872921 - RNA, 19 nt, Artificial Sequence
  Description of Artificial Sequence: Synthetic oligonucleotide
  Sense strand starting at position 3588 of SEQ ID NO: 1564345
gugugcccacauuaauauu

SEQ ID NO: 1872922 - RNA, 19 nt, Artificial Sequence
  Description of Artificial Sequence: Synthetic oligonucleotide
  Antisense strand to SEQ ID NO: 1872921
aauauuaaugugggcacac

SEQ ID NO: 1872923 - RNA, 19 nt, Artificial Sequence
  Description of Artificial Sequence: Synthetic oligonucleotide
  Sense strand starting at position 3898 of SEQ ID NO: 1564345
cauugauaaucagcguuua

SEQ ID NO: 1872924 - RNA, 19 nt, Artificial Sequence
  Description of Artificial Sequence: Synthetic oligonucleotide
  Antisense strand to SEQ ID NO: 1872923
uaaacgcugauuaucaaug

SEQ ID NO: 1872925 - RNA, 19 nt, Artificial Sequence
  Description of Artificial Sequence: Synthetic oligonucleotide
  Sense strand starting at position 3899 of SEQ ID NO: 1564345
auugauaaucagcguuuaa

SEQ ID NO: 1872926 - RNA, 19 nt, Artificial Sequence
  Description of Artificial Sequence: Synthetic oligonucleotide
  Antisense strand to SEQ ID NO: 1872925
uuaaacgcugauuaucaau

SEQ ID NO: 1872927 - RNA, 19 nt, Artificial Sequence
  Description of Artificial Sequence: Synthetic oligonucleotide
  Sense strand starting at position 95 of SEQ ID NO: 1564346
ugccaucacucuucuaguu

SEQ ID NO: 1872928 - RNA, 19 nt, Artificial Sequence
  Description of Artificial Sequence: Synthetic oligonucleotide
  Antisense strand to SEQ ID NO: 1872927
aacuagaagagugauggca

SEQ ID NO: 1872929 - RNA, 19 nt, Artificial Sequence
  Description of Artificial Sequence: Synthetic oligonucleotide
  Sense strand starting at position 251 of SEQ ID NO: 1564346
acuuacuguuuacugaaga

SEQ ID NO: 1872930 - RNA, 19 nt, Artificial Sequence
  Description of Artificial Sequence: Synthetic oligonucleotide
  Antisense strand to SEQ ID NO: 1872929
ucuucaguaaacaguaagu

SEQ ID NO: 1872931 - RNA, 19 nt, Artificial Sequence
  Description of Artificial Sequence: Synthetic oligonucleotide
  Sense strand starting at position 256 of SEQ ID NO: 1564346
cuguuuacugaagaagcuu

SEQ ID NO: 1872932 - RNA, 19 nt, Artificial Sequence
  Description of Artificial Sequence: Synthetic oligonucleotide
  Antisense strand to SEQ ID NO: 1872931
aagcuucuucaguaaacag

SEQ ID NO: 1872933 - RNA, 19 nt, Artificial Sequence
  Description of Artificial Sequence: Synthetic oligonucleotide
  Sense strand starting at position 405 of SEQ ID NO: 1564346
ccuugcuucccucggaaau

SEQ ID NO: 1872934 - RNA, 19 nt, Artificial Sequence
  Description of Artificial Sequence: Synthetic oligonucleotide
  Antisense strand to SEQ ID NO: 1872933
auuuccgagggaagcaagg

SEQ ID NO: 1872935 - RNA, 19 nt, Artificial Sequence
  Description of Artificial Sequence: Synthetic oligonucleotide
  Sense strand starting at position 406 of SEQ ID NO: 1564346
cuugcuucccucggaaauc

SEQ ID NO: 1872936 - RNA, 19 nt, Artificial Sequence
  Description of Artificial Sequence: Synthetic oligonucleotide
  Antisense strand to SEQ ID NO: 1872935
gauuuccgagggaagcaag

SEQ ID NO: 1872937 - RNA, 19 nt, Artificial Sequence
  Description of Artificial Sequence: Synthetic oligonucleotide
  Sense strand starting at position 503 of SEQ ID NO: 1564346
caccgucugcauuacaaga

SEQ ID NO: 1872938 - RNA, 19 nt, Artificial Sequence
  Description of Artificial Sequence: Synthetic oligonucleotide
  Antisense strand to SEQ ID NO: 1872937
ucuuguaaugcagacggug

SEQ ID NO: 1872939 - RNA, 19 nt, Artificial Sequence
  Description of Artificial Sequence: Synthetic oligonucleotide
  Sense strand starting at position 563 of SEQ ID NO: 1564346
aacaguaggcuccgaguuu

SEQ ID NO: 1872940 - RNA, 19 nt, Artificial Sequence
  Description of Artificial Sequence: Synthetic oligonucleotide
  Antisense strand to SEQ ID NO: 1872939
aaacucggagccuacuguu

SEQ ID NO: 1872941 - RNA, 19 nt, Artificial Sequence
  Description of Artificial Sequence: Synthetic oligonucleotide
  Sense strand starting at position 575 of SEQ ID NO: 1564346
cgaguuuaucaagaaaguu

SEQ ID NO: 1872942 - RNA, 19 nt, Artificial Sequence
  Description of Artificial Sequence: Synthetic oligonucleotide
  Antisense strand to SEQ ID NO: 1872941
aacuuucuugauaaacucg

SEQ ID NO: 1872943 - RNA, 19 nt, Artificial Sequence
  Description of Artificial Sequence: Synthetic oligonucleotide
  Sense strand starting at position 625 of SEQ ID NO: 1564346
ggaugaaacuccgccuuaa

SEQ ID NO: 1872944 - RNA, 19 nt, Artificial Sequence
  Description of Artificial Sequence: Synthetic oligonucleotide
  Antisense strand to SEQ ID NO: 1872943
uuaaggcggaguuucaucc

SEQ ID NO: 1872945 - RNA, 19 nt, Artificial Sequence
  Description of Artificial Sequence: Synthetic oligonucleotide
  Sense strand starting at position 703 of SEQ ID NO: 1564346
acacuaaguuguccuccaa

SEQ ID NO: 1872946 - RNA, 19 nt, Artificial Sequence
  Description of Artificial Sequence: Synthetic oligonucleotide
  Antisense strand to SEQ ID NO: 1872945
uuggaggacaacuuagugu

SEQ ID NO: 1872947 - RNA, 19 nt, Artificial Sequence
  Description of Artificial Sequence: Synthetic oligonucleotide
  Sense strand starting at position 710 of SEQ ID NO: 1564346
guuguccuccaauaagaaa

SEQ ID NO: 1872948 - RNA, 19 nt, Artificial Sequence
  Description of Artificial Sequence: Synthetic oligonucleotide
  Antisense strand to SEQ ID NO: 1872947
uuucuuauuggaggacaac

SEQ ID NO: 1872949 - RNA, 19 nt, Artificial Sequence
  Description of Artificial Sequence: Synthetic oligonucleotide
  Sense strand starting at position 740 of SEQ ID NO: 1564346
ugcccuuauuccucgauuu

SEQ ID NO: 1872950 - RNA, 19 nt, Artificial Sequence
  Description of Artificial Sequence: Synthetic oligonucleotide
  Antisense strand to SEQ ID NO: 1872949
aaaucgaggaauaagggca

SEQ ID NO: 1872951 - RNA, 19 nt, Artificial Sequence
  Description of Artificial Sequence: Synthetic oligonucleotide
  Sense strand starting at position 741 of SEQ ID NO: 1564346
gcccuuauuccucgauuua

SEQ ID NO: 1872952 - RNA, 19 nt, Artificial Sequence
  Description of Artificial Sequence: Synthetic oligonucleotide
  Antisense strand to SEQ ID NO: 1872951
uaaaucgaggaauaagggc

SEQ ID NO: 1872953 - RNA, 19 nt, Artificial Sequence
  Description of Artificial Sequence: Synthetic oligonucleotide
  Sense strand starting at position 798 of SEQ ID NO: 1564346
ucaagaaaguuguuuccac

SEQ ID NO: 1872954 - RNA, 19 nt, Artificial Sequence
  Description of Artificial Sequence: Synthetic oligonucleotide
  Antisense strand to SEQ ID NO: 1872953
guggaaacaacuuucuuga

SEQ ID NO: 1872955 - RNA, 19 nt, Artificial Sequence
  Description of Artificial Sequence: Synthetic oligonucleotide
  Sense strand starting at position 813 of SEQ ID NO: 1564346
ccacauaaaugaguacgaa

SEQ ID NO: 1872956 - RNA, 19 nt, Artificial Sequence
  Description of Artificial Sequence: Synthetic oligonucleotide
  Antisense strand to SEQ ID NO: 1872955
uucguacucauuuaugugg

SEQ ID NO: 1872957 - RNA, 19 nt, Artificial Sequence
  Description of Artificial Sequence: Synthetic oligonucleotide
  Sense strand starting at position 816 of SEQ ID NO: 1564346
cauaaaugaguacgaauga

SEQ ID NO: 1872958 - RNA, 19 nt, Artificial Sequence
  Description of Artificial Sequence: Synthetic oligonucleotide
  Antisense strand to SEQ ID NO: 1872957
ucauucguacucauuuaug

SEQ ID NO: 1872959 - RNA, 19 nt, Artificial Sequence
  Description of Artificial Sequence: Synthetic oligonucleotide
  Sense strand starting at position 817 of SEQ ID NO: 1564346
auaaaugaguacgaaugau

SEQ ID NO: 1872960 - RNA, 19 nt, Artificial Sequence
  Description of Artificial Sequence: Synthetic oligonucleotide
  Antisense strand to SEQ ID NO: 1872959
aucauucguacucauuuau

SEQ ID NO: 1872961 - RNA, 19 nt, Artificial Sequence
  Description of Artificial Sequence: Synthetic oligonucleotide
  Sense strand starting at position 952 of SEQ ID NO: 1564346
cggcaaagauuguuggaaa

SEQ ID NO: 1872962 - RNA, 19 nt, Artificial Sequence
  Description of Artificial Sequence: Synthetic oligonucleotide
  Antisense strand to SEQ ID NO: 1872961
uuuccaacaaucuuugccg

SEQ ID NO: 1872963 - RNA, 19 nt, Artificial Sequence
  Description of Artificial Sequence: Synthetic oligonucleotide
  Sense strand starting at position 2270 of SEQ ID NO: 1564346
ggccggagucuccgugaca

SEQ ID NO: 1872964 - RNA, 19 nt, Artificial Sequence
  Description of Artificial Sequence: Synthetic oligonucleotide
  Antisense strand to SEQ ID NO: 1872963
ugucacggagacuccggcc

SEQ ID NO: 1872965 - RNA, 19 nt, Artificial Sequence
  Description of Artificial Sequence: Synthetic oligonucleotide
  Sense strand starting at position 2511 of SEQ ID NO: 1564346
gcuccagcucgaguuguuu

SEQ ID NO: 1872966 - RNA, 19 nt, Artificial Sequence
  Description of Artificial Sequence: Synthetic oligonucleotide
  Antisense strand to SEQ ID NO: 1872965
aaacaacucgagcuggagc

SEQ ID NO: 1872967 - RNA, 19 nt, Artificial Sequence
  Description of Artificial Sequence: Synthetic oligonucleotide
  Sense strand starting at position 2716 of SEQ ID NO: 1564346
aaggguuaucccuagagca

SEQ ID NO: 1872968 - RNA, 19 nt, Artificial Sequence
  Description of Artificial Sequence: Synthetic oligonucleotide
  Antisense strand to SEQ ID NO: 1872967
ugcucuagggauaacccuu

SEQ ID NO: 1872969 - RNA, 19 nt, Artificial Sequence
  Description of Artificial Sequence: Synthetic oligonucleotide
  Sense strand starting at position 2833 of SEQ ID NO: 1564346
acguuucgcacguugcaaa

SEQ ID NO: 1872970 - RNA, 19 nt, Artificial Sequence
  Description of Artificial Sequence: Synthetic oligonucleotide
  Antisense strand to SEQ ID NO: 1872969
uuugcaacgugcgaaacgu

SEQ ID NO: 1872971 - RNA, 19 nt, Artificial Sequence
  Description of Artificial Sequence: Synthetic oligonucleotide
  Sense strand starting at position 2905 of SEQ ID NO: 1564346
gccugugaaauguaagacu

SEQ ID NO: 1872972 - RNA, 19 nt, Artificial Sequence
  Description of Artificial Sequence: Synthetic oligonucleotide
  Antisense strand to SEQ ID NO: 1872971
agucuuacauuucacaggc

SEQ ID NO: 1872973 - RNA, 19 nt, Artificial Sequence
  Description of Artificial Sequence: Synthetic oligonucleotide
  Sense strand starting at position 2975 of SEQ ID NO: 1564346
agcccaauuggguauggau

SEQ ID NO: 1872974 - RNA, 19 nt, Artificial Sequence
  Description of Artificial Sequence: Synthetic oligonucleotide
  Antisense strand to SEQ ID NO: 1872973
auccauacccaauugggcu

SEQ ID NO: 1872975 - RNA, 19 nt, Artificial Sequence
  Description of Artificial Sequence: Synthetic oligonucleotide
  Sense strand starting at position 3125 of SEQ ID NO: 1564346
uguuuaugcuaucuuucca

SEQ ID NO: 1872976 - RNA, 19 nt, Artificial Sequence
  Description of Artificial Sequence: Synthetic oligonucleotide
  Antisense strand to SEQ ID NO: 1872975
uggaaagauagcauaaaca

SEQ ID NO: 1872977 - RNA, 19 nt, Artificial Sequence
  Description of Artificial Sequence: Synthetic oligonucleotide
  Sense strand starting at position 3132 of SEQ ID NO: 1564346
gcuaucuuuccaugcugaa

SEQ ID NO: 1872978 - RNA, 19 nt, Artificial Sequence
  Description of Artificial Sequence: Synthetic oligonucleotide
  Antisense strand to SEQ ID NO: 1872977
uucagcauggaaagauagc

SEQ ID NO: 1872979 - RNA, 19 nt, Artificial Sequence
  Description of Artificial Sequence: Synthetic oligonucleotide
  Sense strand starting at position 3189 of SEQ ID NO: 1564346
aguuaaauaguggagucuu

SEQ ID NO: 1872980 - RNA, 19 nt, Artificial Sequence
  Description of Artificial Sequence: Synthetic oligonucleotide
  Antisense strand to SEQ ID NO: 1872979
aagacuccacuauuuaacu

SEQ ID NO: 1872981 - RNA, 19 nt, Artificial Sequence
  Description of Artificial Sequence: Synthetic oligonucleotide
  Sense strand starting at position 3224 of SEQ ID NO: 1564346
cuggcaugcuauccuuuaa

SEQ ID NO: 1872982 - RNA, 19 nt, Artificial Sequence
  Description of Artificial Sequence: Synthetic oligonucleotide
  Antisense strand to SEQ ID NO: 1872981
uuaaaggauagcaugccag

SEQ ID NO: 1872983 - RNA, 19 nt, Artificial Sequence
  Description of Artificial Sequence: Synthetic oligonucleotide
  Sense strand starting at position 3305 of SEQ ID NO: 1564346
aguauacuggugugaaauc

SEQ ID NO: 1872984 - RNA, 19 nt, Artificial Sequence
  Description of Artificial Sequence: Synthetic oligonucleotide
  Antisense strand to SEQ ID NO: 1872983
gauuucacaccaguauacu

SEQ ID NO: 1872985 - RNA, 19 nt, Artificial Sequence
  Description of Artificial Sequence: Synthetic oligonucleotide
  Sense strand starting at position 3392 of SEQ ID NO: 1564346
ugucccuucccucagacau

SEQ ID NO: 1872986 - RNA, 19 nt, Artificial Sequence
  Description of Artificial Sequence: Synthetic oligonucleotide
  Antisense strand to SEQ ID NO: 1872985
augucugagggaagggaca

SEQ ID NO: 1872987 - RNA, 19 nt, Artificial Sequence
  Description of Artificial Sequence: Synthetic oligonucleotide
  Sense strand starting at position 3457 of SEQ ID NO: 1564346
agaagaaaucucugagcau

SEQ ID NO: 1872988 - RNA, 19 nt, Artificial Sequence
  Description of Artificial Sequence: Synthetic oligonucleotide
  Antisense strand to SEQ ID NO: 1872987
augcucagagauuucuucu

SEQ ID NO: 1872989 - RNA, 19 nt, Artificial Sequence
  Description of Artificial Sequence: Synthetic oligonucleotide
  Sense strand starting at position 3458 of SEQ ID NO: 1564346
gaagaaaucucugagcaug

SEQ ID NO: 1872990 - RNA, 19 nt, Artificial Sequence
  Description of Artificial Sequence: Synthetic oligonucleotide
  Antisense strand to SEQ ID NO: 1872989
caugcucagagauuucuuc

SEQ ID NO: 1872991 - RNA, 19 nt, Artificial Sequence
  Description of Artificial Sequence: Synthetic oligonucleotide
  Sense strand starting at position 3469 of SEQ ID NO: 1564346
ugagcaugcacuggaugau

SEQ ID NO: 1872992 - RNA, 19 nt, Artificial Sequence
  Description of Artificial Sequence: Synthetic oligonucleotide
  Antisense strand to SEQ ID NO: 1872991
aucauccagugcaugcuca

SEQ ID NO: 1872993 - RNA, 19 nt, Artificial Sequence
  Description of Artificial Sequence: Synthetic oligonucleotide
  Sense strand starting at position 3470 of SEQ ID NO: 1564346
gagcaugcacuggaugaua

SEQ ID NO: 1872994 - RNA, 19 nt, Artificial Sequence
  Description of Artificial Sequence: Synthetic oligonucleotide
  Antisense strand to SEQ ID NO: 1872993
uaucauccagugcaugcuc

SEQ ID NO: 1872995 - RNA, 19 nt, Artificial Sequence
  Description of Artificial Sequence: Synthetic oligonucleotide
  Sense strand starting at position 3472 of SEQ ID NO: 1564346
gcaugcacuggaugauaau

SEQ ID NO: 1872996 - RNA, 19 nt, Artificial Sequence
  Description of Artificial Sequence: Synthetic oligonucleotide
  Antisense strand to SEQ ID NO: 1872995
auuaucauccagugcaugc

SEQ ID NO: 1872997 - RNA, 19 nt, Artificial Sequence
  Description of Artificial Sequence: Synthetic oligonucleotide
  Sense strand starting at position 3579 of SEQ ID NO: 1564346
auuacaucaggcugugaua

SEQ ID NO: 1872998 - RNA, 19 nt, Artificial Sequence
  Description of Artificial Sequence: Synthetic oligonucleotide
  Antisense strand to SEQ ID NO: 1872997
uaucacagccugauguaau

SEQ ID NO: 1872999 - RNA, 19 nt, Artificial Sequence
  Description of Artificial Sequence: Synthetic oligonucleotide
  Sense strand starting at position 3581 of SEQ ID NO: 1564346
uacaucaggcugugauaga

SEQ ID NO: 1873000 - RNA, 19 nt, Artificial Sequence
  Description of Artificial Sequence: Synthetic oligonucleotide
  Antisense strand to SEQ ID NO: 1872999
ucuaucacagccugaugua

SEQ ID NO: 1873001 - RNA, 19 nt, Artificial Sequence
  Description of Artificial Sequence: Synthetic oligonucleotide
  Sense strand starting at position 3634 of SEQ ID NO: 1564346
gaaacuaagcaauguuguu

SEQ ID NO: 1873002 - RNA, 19 nt, Artificial Sequence
  Description of Artificial Sequence: Synthetic oligonucleotide
  Antisense strand to SEQ ID NO: 1873001
aacaacauugcuuaguuuc

SEQ ID NO: 1873003 - RNA, 19 nt, Artificial Sequence
  Description of Artificial Sequence: Synthetic oligonucleotide
  Sense strand starting at position 3674 of SEQ ID NO: 1564346
uagcuugugugcccacauu

SEQ ID NO: 1873004 - RNA, 19 nt, Artificial Sequence
  Description of Artificial Sequence: Synthetic oligonucleotide
  Antisense strand to SEQ ID NO: 1873003
aaugugggcacacaagcua

SEQ ID NO: 1873005 - RNA, 19 nt, Artificial Sequence
  Description of Artificial Sequence: Synthetic oligonucleotide
  Sense strand starting at position 3680 of SEQ ID NO: 1564346
gugugcccacauuaauauu

SEQ ID NO: 1873006 - RNA, 19 nt, Artificial Sequence
  Description of Artificial Sequence: Synthetic oligonucleotide
  Antisense strand to SEQ ID NO: 1873005
aauauuaaugugggcacac

SEQ ID NO: 1873007 - RNA, 19 nt, Artificial Sequence
  Description of Artificial Sequence: Synthetic oligonucleotide
  Sense strand starting at position 21 of SEQ ID NO: 1564347
gcggaaguaaccgaaaguu

SEQ ID NO: 1873008 - RNA, 19 nt, Artificial Sequence
  Description of Artificial Sequence: Synthetic oligonucleotide
  Antisense strand to SEQ ID NO: 1873007
aacuuucgguuacuuccgc

SEQ ID NO: 1873009 - RNA, 19 nt, Artificial Sequence
  Description of Artificial Sequence: Synthetic oligonucleotide
  Sense strand starting at position 51 of SEQ ID NO: 1564347
gcauuuguaugguugccuu

SEQ ID NO: 1873010 - RNA, 19 nt, Artificial Sequence
  Description of Artificial Sequence: Synthetic oligonucleotide
  Antisense strand to SEQ ID NO: 1873009
aaggcaaccauacaaaugc

SEQ ID NO: 1873011 - RNA, 19 nt, Artificial Sequence
  Description of Artificial Sequence: Synthetic oligonucleotide
  Sense strand starting at position 59 of SEQ ID NO: 1564347
augguugccuuccacgaau

SEQ ID NO: 1873012 - RNA, 19 nt, Artificial Sequence
  Description of Artificial Sequence: Synthetic oligonucleotide
  Antisense strand to SEQ ID NO: 1873011
auucguggaaggcaaccau

SEQ ID NO: 1873013 - RNA, 19 nt, Artificial Sequence
  Description of Artificial Sequence: Synthetic oligonucleotide
  Sense strand starting at position 61 of SEQ ID NO: 1564347
gguugccuuccacgaaugu

SEQ ID NO: 1873014 - RNA, 19 nt, Artificial Sequence
  Description of Artificial Sequence: Synthetic oligonucleotide
  Antisense strand to SEQ ID NO: 1873013
acauucguggaaggcaacc

SEQ ID NO: 1873015 - RNA, 19 nt, Artificial Sequence
  Description of Artificial Sequence: Synthetic oligonucleotide
  Sense strand starting at position 86 of SEQ ID NO: 1564347
agagcuaagucgcuuguaa

SEQ ID NO: 1873016 - RNA, 19 nt, Artificial Sequence
  Description of Artificial Sequence: Synthetic oligonucleotide
  Antisense strand to SEQ ID NO: 1873015
uuacaagcgacuuagcucu

SEQ ID NO: 1873017 - RNA, 19 nt, Artificial Sequence
  Description of Artificial Sequence: Synthetic oligonucleotide
  Sense strand starting at position 93 of SEQ ID NO: 1564347
agucgcuuguaagcaauau

SEQ ID NO: 1873018 - RNA, 19 nt, Artificial Sequence
  Description of Artificial Sequence: Synthetic oligonucleotide
  Antisense strand to SEQ ID NO: 1873017
auauugcuuacaagcgacu

SEQ ID NO: 1873019 - RNA, 19 nt, Artificial Sequence
  Description of Artificial Sequence: Synthetic oligonucleotide
  Sense strand starting at position 191 of SEQ ID NO: 1564347
gcgagaaggucccaauuag

SEQ ID NO: 1873020 - RNA, 19 nt, Artificial Sequence
  Description of Artificial Sequence: Synthetic oligonucleotide
  Antisense strand to SEQ ID NO: 1873019
cuaauugggaccuucucgc

SEQ ID NO: 1873021 - RNA, 19 nt, Artificial Sequence
  Description of Artificial Sequence: Synthetic oligonucleotide
  Sense strand starting at position 202 of SEQ ID NO: 1564347
ccaauuaguuccugagacc

SEQ ID NO: 1873022 - RNA, 19 nt, Artificial Sequence
  Description of Artificial Sequence: Synthetic oligonucleotide
  Antisense strand to SEQ ID NO: 1873021
ggucucaggaacuaauugg

SEQ ID NO: 1873023 - RNA, 19 nt, Artificial Sequence
  Description of Artificial Sequence: Synthetic oligonucleotide
  Sense strand starting at position 226 of SEQ ID NO: 1564347
gcagucugcccgggaaguu

SEQ ID NO: 1873024 - RNA, 19 nt, Artificial Sequence
  Description of Artificial Sequence: Synthetic oligonucleotide
  Antisense strand to SEQ ID NO: 1873023
aacuucccgggcagacugc

SEQ ID NO: 1873025 - RNA, 19 nt, Artificial Sequence
  Description of Artificial Sequence: Synthetic oligonucleotide
  Sense strand starting at position 227 of SEQ ID NO: 1564347
cagucugcccgggaaguua

SEQ ID NO: 1873026 - RNA, 19 nt, Artificial Sequence
  Description of Artificial Sequence: Synthetic oligonucleotide
  Antisense strand to SEQ ID NO: 1873025
uaacuucccgggcagacug

SEQ ID NO: 1873027 - RNA, 19 nt, Artificial Sequence
  Description of Artificial Sequence: Synthetic oligonucleotide
  Sense strand starting at position 240 of SEQ ID NO: 1564347
aaguuagaacucggcaaag

SEQ ID NO: 1873028 - RNA, 19 nt, Artificial Sequence
  Description of Artificial Sequence: Synthetic oligonucleotide
  Antisense strand to SEQ ID NO: 1873027
cuuugccgaguucuaacuu

SEQ ID NO: 1873029 - RNA, 19 nt, Artificial Sequence
  Description of Artificial Sequence: Synthetic oligonucleotide
  Sense strand starting at position 2026 of SEQ ID NO: 1564347
gccucuucgccuccagagu

SEQ ID NO: 1873030 - RNA, 19 nt, Artificial Sequence
  Description of Artificial Sequence: Synthetic oligonucleotide
  Antisense strand to SEQ ID NO: 1873029
acucuggaggcgaagaggc

SEQ ID NO: 1873031 - RNA, 19 nt, Artificial Sequence
  Description of Artificial Sequence: Synthetic oligonucleotide
  Sense strand starting at position 2027 of SEQ ID NO: 1564347
ccucuucgccuccagagua

SEQ ID NO: 1873032 - RNA, 19 nt, Artificial Sequence
  Description of Artificial Sequence: Synthetic oligonucleotide
  Antisense strand to SEQ ID NO: 1873031
uacucuggaggcgaagagg

SEQ ID NO: 1873033 - RNA, 19 nt, Artificial Sequence
  Description of Artificial Sequence: Synthetic oligonucleotide
  Sense strand starting at position 2040 of SEQ ID NO: 1564347
agaguaauguccuuggacu

SEQ ID NO: 1873034 - RNA, 19 nt, Artificial Sequence
  Description of Artificial Sequence: Synthetic oligonucleotide
  Antisense strand to SEQ ID NO: 1873033
aguccaaggacauuacucu

SEQ ID NO: 1873035 - RNA, 19 nt, Artificial Sequence
  Description of Artificial Sequence: Synthetic oligonucleotide
  Sense strand starting at position 2041 of SEQ ID NO: 1564347
gaguaauguccuuggacug

SEQ ID NO: 1873036 - RNA, 19 nt, Artificial Sequence
  Description of Artificial Sequence: Synthetic oligonucleotide
  Antisense strand to SEQ ID NO: 1873035
caguccaaggacauuacuc

SEQ ID NO: 1873037 - RNA, 19 nt, Artificial Sequence
  Description of Artificial Sequence: Synthetic oligonucleotide
  Sense strand starting at position 2046 of SEQ ID NO: 1564347
auguccuuggacugauaaa

SEQ ID NO: 1873038 - RNA, 19 nt, Artificial Sequence
  Description of Artificial Sequence: Synthetic oligonucleotide
  Antisense strand to SEQ ID NO: 1873037
uuuaucaguccaaggacau

SEQ ID NO: 1873039 - RNA, 19 nt, Artificial Sequence
  Description of Artificial Sequence: Synthetic oligonucleotide
  Sense strand starting at position 2638 of SEQ ID NO: 1564347
ccgggauaguucgccguuu

SEQ ID NO: 1873040 - RNA, 19 nt, Artificial Sequence
  Description of Artificial Sequence: Synthetic oligonucleotide
  Antisense strand to SEQ ID NO: 1873039
aaacggcgaacuaucccgg

SEQ ID NO: 1873041 - RNA, 19 nt, Artificial Sequence
  Description of Artificial Sequence: Synthetic oligonucleotide
  Sense strand starting at position 2640 of SEQ ID NO: 1564347
gggauaguucgccguuugu

SEQ ID NO: 1873042 - RNA, 19 nt, Artificial Sequence
  Description of Artificial Sequence: Synthetic oligonucleotide
  Antisense strand to SEQ ID NO: 1873041
acaaacggcgaacuauccc

SEQ ID NO: 1873043 - RNA, 19 nt, Artificial Sequence
  Description of Artificial Sequence: Synthetic oligonucleotide
  Sense strand starting at position 2674 of SEQ ID NO: 1564347
gcagcuguccgagacccaa

SEQ ID NO: 1873044 - RNA, 19 nt, Artificial Sequence
  Description of Artificial Sequence: Synthetic oligonucleotide
  Antisense strand to SEQ ID NO: 1873043
uugggucucggacagcugc

SEQ ID NO: 1873045 - RNA, 19 nt, Artificial Sequence
  Description of Artificial Sequence: Synthetic oligonucleotide
  Sense strand starting at position 2715 of SEQ ID NO: 1564347
agagcugaucuccguuacu

SEQ ID NO: 1873046 - RNA, 19 nt, Artificial Sequence
  Description of Artificial Sequence: Synthetic oligonucleotide
  Antisense strand to SEQ ID NO: 1873045
aguaacggagaucagcucu

SEQ ID NO: 1873047 - RNA, 19 nt, Artificial Sequence
  Description of Artificial Sequence: Synthetic oligonucleotide
  Sense strand starting at position 2754 of SEQ ID NO: 1564347
acccuuuaguuugugagca

SEQ ID NO: 1873048 - RNA, 19 nt, Artificial Sequence
  Description of Artificial Sequence: Synthetic oligonucleotide
  Antisense strand to SEQ ID NO: 1873047
ugcucacaaacuaaagggu

SEQ ID NO: 1873049 - RNA, 19 nt, Artificial Sequence
  Description of Artificial Sequence: Synthetic oligonucleotide
  Sense strand starting at position 3144 of SEQ ID NO: 1564347
guaucagggugguuuccaa

SEQ ID NO: 1873050 - RNA, 19 nt, Artificial Sequence
  Description of Artificial Sequence: Synthetic oligonucleotide
  Antisense strand to SEQ ID NO: 1873049
uuggaaaccacccugauac

SEQ ID NO: 1873051 - RNA, 19 nt, Artificial Sequence
  Description of Artificial Sequence: Synthetic oligonucleotide
  Sense strand starting at position 3148 of SEQ ID NO: 1564347
cagggugguuuccaaauca

SEQ ID NO: 1873052 - RNA, 19 nt, Artificial Sequence
  Description of Artificial Sequence: Synthetic oligonucleotide
  Antisense strand to SEQ ID NO: 1873051
ugauuuggaaaccacccug

SEQ ID NO: 1873053 - RNA, 19 nt, Artificial Sequence
  Description of Artificial Sequence: Synthetic oligonucleotide
  Sense strand starting at position 3171 of SEQ ID NO: 1564347
gcuaaucagcuuugaauuc

SEQ ID NO: 1873054 - RNA, 19 nt, Artificial Sequence
  Description of Artificial Sequence: Synthetic oligonucleotide
  Antisense strand to SEQ ID NO: 1873053
gaauucaaagcugauuagc

SEQ ID NO: 1873055 - RNA, 19 nt, Artificial Sequence
  Description of Artificial Sequence: Synthetic oligonucleotide
  Sense strand starting at position 3240 of SEQ ID NO: 1564347
gggacugugacauggaauu

SEQ ID NO: 1873056 - RNA, 19 nt, Artificial Sequence
  Description of Artificial Sequence: Synthetic oligonucleotide
  Antisense strand to SEQ ID NO: 1873055
aauuccaugucacaguccc

SEQ ID NO: 1873057 - RNA, 19 nt, Artificial Sequence
  Description of Artificial Sequence: Synthetic oligonucleotide
  Sense strand starting at position 3388 of SEQ ID NO: 1564347
cgccuucugucuguugcaa

SEQ ID NO: 1873058 - RNA, 19 nt, Artificial Sequence
  Description of Artificial Sequence: Synthetic oligonucleotide
  Antisense strand to SEQ ID NO: 1873057
uugcaacagacagaaggcg

SEQ ID NO: 1873059 - RNA, 19 nt, Artificial Sequence
  Description of Artificial Sequence: Synthetic oligonucleotide
  Sense strand starting at position 3406 of SEQ ID NO: 1564347
aggucuuucugacauaaug

SEQ ID NO: 1873060 - RNA, 19 nt, Artificial Sequence
  Description of Artificial Sequence: Synthetic oligonucleotide
  Antisense strand to SEQ ID NO: 1873059
cauuaugucagaaagaccu

SEQ ID NO: 1873061 - RNA, 19 nt, Artificial Sequence
  Description of Artificial Sequence: Synthetic oligonucleotide
  Sense strand starting at position 3516 of SEQ ID NO: 1564347
agagaaagauggcugugau

SEQ ID NO: 1873062 - RNA, 19 nt, Artificial Sequence
  Description of Artificial Sequence: Synthetic oligonucleotide
  Antisense strand to SEQ ID NO: 1873061
aucacagccaucuuucucu

SEQ ID NO: 1873063 - RNA, 19 nt, Artificial Sequence
  Description of Artificial Sequence: Synthetic oligonucleotide
  Sense strand starting at position 3519 of SEQ ID NO: 1564347
gaaagauggcugugauugu

SEQ ID NO: 1873064 - RNA, 19 nt, Artificial Sequence
  Description of Artificial Sequence: Synthetic oligonucleotide
  Antisense strand to SEQ ID NO: 1873063
acaaucacagccaucuuuc

SEQ ID NO: 1873065 - RNA, 19 nt, Artificial Sequence
  Description of Artificial Sequence: Synthetic oligonucleotide
  Sense strand starting at position 3523 of SEQ ID NO: 1564347
gauggcugugauugucaca

SEQ ID NO: 1873066 - RNA, 19 nt, Artificial Sequence
  Description of Artificial Sequence: Synthetic oligonucleotide
  Antisense strand to SEQ ID NO: 1873065
ugugacaaucacagccauc

SEQ ID NO: 1873067 - RNA, 19 nt, Artificial Sequence
  Description of Artificial Sequence: Synthetic oligonucleotide
  Sense strand starting at position 3528 of SEQ ID NO: 1564347
cugugauugucacaucccu

SEQ ID NO: 1873068 - RNA, 19 nt, Artificial Sequence
  Description of Artificial Sequence: Synthetic oligonucleotide
  Antisense strand to SEQ ID NO: 1873067
agggaugugacaaucacag

SEQ ID NO: 1873069 - RNA, 19 nt, Artificial Sequence
  Description of Artificial Sequence: Synthetic oligonucleotide
  Sense strand starting at position 3597 of SEQ ID NO: 1564347
ccgccaucucucuguagga

SEQ ID NO: 1873070 - RNA, 19 nt, Artificial Sequence
  Description of Artificial Sequence: Synthetic oligonucleotide
  Antisense strand to SEQ ID NO: 1873069
uccuacagagagauggcgg

SEQ ID NO: 1873071 - RNA, 19 nt, Artificial Sequence
  Description of Artificial Sequence: Synthetic oligonucleotide
  Sense strand starting at position 3598 of SEQ ID NO: 1564347
cgccaucucucuguaggaa

SEQ ID NO: 1873072 - RNA, 19 nt, Artificial Sequence
  Description of Artificial Sequence: Synthetic oligonucleotide
  Antisense strand to SEQ ID NO: 1873071
uuccuacagagagauggcg

SEQ ID NO: 1873073 - RNA, 19 nt, Artificial Sequence
  Description of Artificial Sequence: Synthetic oligonucleotide
  Sense strand starting at position 3599 of SEQ ID NO: 1564347
gccaucucucuguaggaaa

SEQ ID NO: 1873074 - RNA, 19 nt, Artificial Sequence
  Description of Artificial Sequence: Synthetic oligonucleotide
  Antisense strand to SEQ ID NO: 1873073
uuuccuacagagagauggc

SEQ ID NO: 1873075 - RNA, 19 nt, Artificial Sequence
  Description of Artificial Sequence: Synthetic oligonucleotide
  Sense strand starting at position 3657 of SEQ ID NO: 1564347
gccuuaagcagcgcuuuau

SEQ ID NO: 1873076 - RNA, 19 nt, Artificial Sequence
  Description of Artificial Sequence: Synthetic oligonucleotide
  Antisense strand to SEQ ID NO: 1873075
auaaagcgcugcuuaaggc

SEQ ID NO: 1873077 - RNA, 19 nt, Artificial Sequence
  Description of Artificial Sequence: Synthetic oligonucleotide
  Sense strand starting at position 3744 of SEQ ID NO: 1564347
ccaguuugcugggagaaca

SEQ ID NO: 1873078 - RNA, 19 nt, Artificial Sequence
  Description of Artificial Sequence: Synthetic oligonucleotide
  Antisense strand to SEQ ID NO: 1873077
uguucucccagcaaacugg

SEQ ID NO: 1873079 - RNA, 19 nt, Artificial Sequence
  Description of Artificial Sequence: Synthetic oligonucleotide
  Sense strand starting at position 3856 of SEQ ID NO: 1564347
aggugaguucacugcugac

SEQ ID NO: 1873080 - RNA, 19 nt, Artificial Sequence
  Description of Artificial Sequence: Synthetic oligonucleotide
  Antisense strand to SEQ ID NO: 1873079
gucagcagugaacucaccu

SEQ ID NO: 1873081 - RNA, 19 nt, Artificial Sequence
  Description of Artificial Sequence: Synthetic oligonucleotide
  Sense strand starting at position 3877 of SEQ ID NO: 1564347
aaauuauugcgucugccga

SEQ ID NO: 1873082 - RNA, 19 nt, Artificial Sequence
  Description of Artificial Sequence: Synthetic oligonucleotide
  Antisense strand to SEQ ID NO: 1873081
ucggcagacgcaauaauuu

SEQ ID NO: 1873083 - RNA, 19 nt, Artificial Sequence
  Description of Artificial Sequence: Synthetic oligonucleotide
  Sense strand starting at position 3878 of SEQ ID NO: 1564347
aauuauugcgucugccgaa

SEQ ID NO: 1873084 - RNA, 19 nt, Artificial Sequence
  Description of Artificial Sequence: Synthetic oligonucleotide
  Antisense strand to SEQ ID NO: 1873083
uucggcagacgcaauaauu

SEQ ID NO: 1873085 - RNA, 19 nt, Artificial Sequence
  Description of Artificial Sequence: Synthetic oligonucleotide
  Sense strand starting at position 3959 of SEQ ID NO: 1564347
gggcgcugguguguucaga

SEQ ID NO: 1873086 - RNA, 19 nt, Artificial Sequence
  Description of Artificial Sequence: Synthetic oligonucleotide
  Antisense strand to SEQ ID NO: 1873085
ucugaacacaccagcgccc

SEQ ID NO: 1873087 - RNA, 19 nt, Artificial Sequence
  Description of Artificial Sequence: Synthetic oligonucleotide
  Sense strand starting at position 103 of SEQ ID NO: 1564348
ccacgagauacuggucuua

SEQ ID NO: 1873088 - RNA, 19 nt, Artificial Sequence
  Description of Artificial Sequence: Synthetic oligonucleotide
  Antisense strand to SEQ ID NO: 1873087
uaagaccaguaucucgugg

SEQ ID NO: 1873089 - RNA, 19 nt, Artificial Sequence
  Description of Artificial Sequence: Synthetic oligonucleotide
  Sense strand starting at position 105 of SEQ ID NO: 1564348
acgagauacuggucuuaaa

SEQ ID NO: 1873090 - RNA, 19 nt, Artificial Sequence
  Description of Artificial Sequence: Synthetic oligonucleotide
  Antisense strand to SEQ ID NO: 1873089
uuuaagaccaguaucucgu

SEQ ID NO: 1873091 - RNA, 19 nt, Artificial Sequence
  Description of Artificial Sequence: Synthetic oligonucleotide
  Sense strand starting at position 153 of SEQ ID NO: 1564348
auugaauugugaucuugau

SEQ ID NO: 1873092 - RNA, 19 nt, Artificial Sequence
  Description of Artificial Sequence: Synthetic oligonucleotide
  Antisense strand to SEQ ID NO: 1873091
aucaagaucacaauucaau

SEQ ID NO: 1873093 - RNA, 19 nt, Artificial Sequence
  Description of Artificial Sequence: Synthetic oligonucleotide
  Sense strand starting at position 162 of SEQ ID NO: 1564348
ugaucuugaugccuauaaa

SEQ ID NO: 1873094 - RNA, 19 nt, Artificial Sequence
  Description of Artificial Sequence: Synthetic oligonucleotide
  Antisense strand to SEQ ID NO: 1873093
uuuauaggcaucaagauca

SEQ ID NO: 1873095 - RNA, 19 nt, Artificial Sequence
  Description of Artificial Sequence: Synthetic oligonucleotide
  Sense strand starting at position 255 of SEQ ID NO: 1564348
auccauuaaggcugauuga

SEQ ID NO: 1873096 - RNA, 19 nt, Artificial Sequence
  Description of Artificial Sequence: Synthetic oligonucleotide
  Antisense strand to SEQ ID NO: 1873095
ucaaucagccuuaauggau

SEQ ID NO: 1873097 - RNA, 19 nt, Artificial Sequence
  Description of Artificial Sequence: Synthetic oligonucleotide
  Sense strand starting at position 258 of SEQ ID NO: 1564348
cauuaaggcugauugaaga

SEQ ID NO: 1873098 - RNA, 19 nt, Artificial Sequence
  Description of Artificial Sequence: Synthetic oligonucleotide
  Antisense strand to SEQ ID NO: 1873097
ucuucaaucagccuuaaug

SEQ ID NO: 1873099 - RNA, 19 nt, Artificial Sequence
  Description of Artificial Sequence: Synthetic oligonucleotide
  Sense strand starting at position 338 of SEQ ID NO: 1564348
guguacuucuaacuuccau

SEQ ID NO: 1873100 - RNA, 19 nt, Artificial Sequence
  Description of Artificial Sequence: Synthetic oligonucleotide
  Antisense strand to SEQ ID NO: 1873099
auggaaguuagaaguacac

SEQ ID NO: 1873101 - RNA, 19 nt, Artificial Sequence
  Description of Artificial Sequence: Synthetic oligonucleotide
  Sense strand starting at position 375 of SEQ ID NO: 1564348
auguaaugugccuauacaa

SEQ ID NO: 1873102 - RNA, 19 nt, Artificial Sequence
  Description of Artificial Sequence: Synthetic oligonucleotide
  Antisense strand to SEQ ID NO: 1873101
uuguauaggcacauuacau

SEQ ID NO: 1873103 - RNA, 19 nt, Artificial Sequence
  Description of Artificial Sequence: Synthetic oligonucleotide
  Sense strand starting at position 391 of SEQ ID NO: 1564348
caaauauuguaagggauuu

SEQ ID NO: 1873104 - RNA, 19 nt, Artificial Sequence
  Description of Artificial Sequence: Synthetic oligonucleotide
  Antisense strand to SEQ ID NO: 1873103
aaaucccuuacaauauuug

SEQ ID NO: 1873105 - RNA, 19 nt, Artificial Sequence
  Description of Artificial Sequence: Synthetic oligonucleotide
  Sense strand starting at position 432 of SEQ ID NO: 1564348
caaagugaaaggugugaaa

SEQ ID NO: 1873106 - RNA, 19 nt, Artificial Sequence
  Description of Artificial Sequence: Synthetic oligonucleotide
  Antisense strand to SEQ ID NO: 1873105
uuucacaccuuucacuuug

SEQ ID NO: 1873107 - RNA, 19 nt, Artificial Sequence
  Description of Artificial Sequence: Synthetic oligonucleotide
  Sense strand starting at position 523 of SEQ ID NO: 1564348
aauggaguaucuuccuaag

SEQ ID NO: 1873108 - RNA, 19 nt, Artificial Sequence
  Description of Artificial Sequence: Synthetic oligonucleotide
  Antisense strand to SEQ ID NO: 1873107
cuuaggaagauacuccauu

SEQ ID NO: 1873109 - RNA, 19 nt, Artificial Sequence
  Description of Artificial Sequence: Synthetic oligonucleotide
  Sense strand starting at position 525 of SEQ ID NO: 1564348
uggaguaucuuccuaagaa

SEQ ID NO: 1873110 - RNA, 19 nt, Artificial Sequence
  Description of Artificial Sequence: Synthetic oligonucleotide
  Antisense strand to SEQ ID NO: 1873109
uucuuaggaagauacucca

SEQ ID NO: 1873111 - RNA, 19 nt, Artificial Sequence
  Description of Artificial Sequence: Synthetic oligonucleotide
  Sense strand starting at position 584 of SEQ ID NO: 1564348
ucacuuuggaggcaaguua

SEQ ID NO: 1873112 - RNA, 19 nt, Artificial Sequence
  Description of Artificial Sequence: Synthetic oligonucleotide
  Antisense strand to SEQ ID NO: 1873111
uaacuugccuccaaaguga

SEQ ID NO: 1873113 - RNA, 19 nt, Artificial Sequence
  Description of Artificial Sequence: Synthetic oligonucleotide
  Sense strand starting at position 639 of SEQ ID NO: 1564348
uuacgaaauuuacauggca

SEQ ID NO: 1873114 - RNA, 19 nt, Artificial Sequence
  Description of Artificial Sequence: Synthetic oligonucleotide
  Antisense strand to SEQ ID NO: 1873113
ugccauguaaauuucguaa

SEQ ID NO: 1873115 - RNA, 19 nt, Artificial Sequence
  Description of Artificial Sequence: Synthetic oligonucleotide
  Sense strand starting at position 782 of SEQ ID NO: 1564348
uauacagaacuuuguguga

SEQ ID NO: 1873116 - RNA, 19 nt, Artificial Sequence
  Description of Artificial Sequence: Synthetic oligonucleotide
  Antisense strand to SEQ ID NO: 1873115
ucacacaaaguucuguaua

SEQ ID NO: 1873117 - RNA, 19 nt, Artificial Sequence
  Description of Artificial Sequence: Synthetic oligonucleotide
  Sense strand starting at position 785 of SEQ ID NO: 1564348
acagaacuuugugugaaua

SEQ ID NO: 1873118 - RNA, 19 nt, Artificial Sequence
  Description of Artificial Sequence: Synthetic oligonucleotide
  Antisense strand to SEQ ID NO: 1873117
uauucacacaaaguucugu

SEQ ID NO: 1873119 - RNA, 19 nt, Artificial Sequence
  Description of Artificial Sequence: Synthetic oligonucleotide
  Sense strand starting at position 786 of SEQ ID NO: 1564348
cagaacuuugugugaauac

SEQ ID NO: 1873120 - RNA, 19 nt, Artificial Sequence
  Description of Artificial Sequence: Synthetic oligonucleotide
  Antisense strand to SEQ ID NO: 1873119
guauucacacaaaguucug

SEQ ID NO: 1873121 - RNA, 19 nt, Artificial Sequence
  Description of Artificial Sequence: Synthetic oligonucleotide
  Sense strand starting at position 797 of SEQ ID NO: 1564348
gugaauaccgcuuauauug

SEQ ID NO: 1873122 - RNA, 19 nt, Artificial Sequence
  Description of Artificial Sequence: Synthetic oligonucleotide
  Antisense strand to SEQ ID NO: 1873121
caauauaagcgguauucac

SEQ ID NO: 1873123 - RNA, 19 nt, Artificial Sequence
  Description of Artificial Sequence: Synthetic oligonucleotide
  Sense strand starting at position 844 of SEQ ID NO: 1564348
aggaguaauauguguuggu

SEQ ID NO: 1873124 - RNA, 19 nt, Artificial Sequence
  Description of Artificial Sequence: Synthetic oligonucleotide
  Antisense strand to SEQ ID NO: 1873123
accaacacauauuacuccu

SEQ ID NO: 1873125 - RNA, 19 nt, Artificial Sequence
  Description of Artificial Sequence: Synthetic oligonucleotide
  Sense strand starting at position 845 of SEQ ID NO: 1564348
ggaguaauauguguuggua

SEQ ID NO: 1873126 - RNA, 19 nt, Artificial Sequence
  Description of Artificial Sequence: Synthetic oligonucleotide
  Antisense strand to SEQ ID NO: 1873125
uaccaacacauauuacucc

SEQ ID NO: 1873127 - RNA, 19 nt, Artificial Sequence
  Description of Artificial Sequence: Synthetic oligonucleotide
  Sense strand starting at position 849 of SEQ ID NO: 1564348
uaauauguguugguaggua

SEQ ID NO: 1873128 - RNA, 19 nt, Artificial Sequence
  Description of Artificial Sequence: Synthetic oligonucleotide
  Antisense strand to SEQ ID NO: 1873127
uaccuaccaacacauauua

SEQ ID NO: 1873129 - RNA, 19 nt, Artificial Sequence
  Description of Artificial Sequence: Synthetic oligonucleotide
  Sense strand starting at position 917 of SEQ ID NO: 1564348
uugcuuuacuaggucacau

SEQ ID NO: 1873130 - RNA, 19 nt, Artificial Sequence
  Description of Artificial Sequence: Synthetic oligonucleotide
  Antisense strand to SEQ ID NO: 1873129
augugaccuaguaaagcaa

SEQ ID NO: 1873131 - RNA, 19 nt, Artificial Sequence
  Description of Artificial Sequence: Synthetic oligonucleotide
  Sense strand starting at position 1002 of SEQ ID NO: 1564348
ccucucuuucccuaguaga

SEQ ID NO: 1873132 - RNA, 19 nt, Artificial Sequence
  Description of Artificial Sequence: Synthetic oligonucleotide
  Antisense strand to SEQ ID NO: 1873131
ucuacuagggaaagagagg

SEQ ID NO: 1873133 - RNA, 19 nt, Artificial Sequence
  Description of Artificial Sequence: Synthetic oligonucleotide
  Sense strand starting at position 1184 of SEQ ID NO: 1564348
cccuuauuucuucgguauu

SEQ ID NO: 1873134 - RNA, 19 nt, Artificial Sequence
  Description of Artificial Sequence: Synthetic oligonucleotide
  Antisense strand to SEQ ID NO: 1873133
aauaccgaagaaauaaggg

SEQ ID NO: 1873135 - RNA, 19 nt, Artificial Sequence
  Description of Artificial Sequence: Synthetic oligonucleotide
  Sense strand starting at position 1346 of SEQ ID NO: 1564348
gagagaaauuaugugguau

SEQ ID NO: 1873136 - RNA, 19 nt, Artificial Sequence
  Description of Artificial Sequence: Synthetic oligonucleotide
  Antisense strand to SEQ ID NO: 1873135
auaccacauaauuucucuc

SEQ ID NO: 1873137 - RNA, 19 nt, Artificial Sequence
  Description of Artificial Sequence: Synthetic oligonucleotide
  Sense strand starting at position 1347 of SEQ ID NO: 1564348
agagaaauuaugugguauu

SEQ ID NO: 1873138 - RNA, 19 nt, Artificial Sequence
  Description of Artificial Sequence: Synthetic oligonucleotide
  Antisense strand to SEQ ID NO: 1873137
aauaccacauaauuucucu

SEQ ID NO: 1873139 - RNA, 19 nt, Artificial Sequence
  Description of Artificial Sequence: Synthetic oligonucleotide
  Sense strand starting at position 1388 of SEQ ID NO: 1564348
ccucaugaguaccugcaau

SEQ ID NO: 1873140 - RNA, 19 nt, Artificial Sequence
  Description of Artificial Sequence: Synthetic oligonucleotide
  Antisense strand to SEQ ID NO: 1873139
auugcagguacucaugagg

SEQ ID NO: 1873141 - RNA, 19 nt, Artificial Sequence
  Description of Artificial Sequence: Synthetic oligonucleotide
  Sense strand starting at position 1427 of SEQ ID NO: 1564348
auccuuuacaggugggaga

SEQ ID NO: 1873142 - RNA, 19 nt, Artificial Sequence
  Description of Artificial Sequence: Synthetic oligonucleotide
  Antisense strand to SEQ ID NO: 1873141
ucucccaccuguaaaggau

SEQ ID NO: 1873143 - RNA, 19 nt, Artificial Sequence
  Description of Artificial Sequence: Synthetic oligonucleotide
  Sense strand starting at position 2222 of SEQ ID NO: 1564348
cagugaggcuucuuuggag

SEQ ID NO: 1873144 - RNA, 19 nt, Artificial Sequence
  Description of Artificial Sequence: Synthetic oligonucleotide
  Antisense strand to SEQ ID NO: 1873143
cuccaaagaagccucacug

SEQ ID NO: 1873145 - RNA, 19 nt, Artificial Sequence
  Description of Artificial Sequence: Synthetic oligonucleotide
  Sense strand starting at position 2926 of SEQ ID NO: 1564348
auagauaugugccuaaaua

SEQ ID NO: 1873146 - RNA, 19 nt, Artificial Sequence
  Description of Artificial Sequence: Synthetic oligonucleotide
  Antisense strand to SEQ ID NO: 1873145
uauuuaggcacauaucuau

SEQ ID NO: 1873147 - RNA, 19 nt, Artificial Sequence
  Description of Artificial Sequence: Synthetic oligonucleotide
  Sense strand starting at position 2927 of SEQ ID NO: 1564348
uagauaugugccuaaauag

SEQ ID NO: 1873148 - RNA, 19 nt, Artificial Sequence
  Description of Artificial Sequence: Synthetic oligonucleotide
  Antisense strand to SEQ ID NO: 1873147
cuauuuaggcacauaucua

SEQ ID NO: 1873149 - RNA, 19 nt, Artificial Sequence
  Description of Artificial Sequence: Synthetic oligonucleotide
  Sense strand starting at position 3151 of SEQ ID NO: 1564348
uugcuuguagcuguaguua

SEQ ID NO: 1873150 - RNA, 19 nt, Artificial Sequence
  Description of Artificial Sequence: Synthetic oligonucleotide
  Antisense strand to SEQ ID NO: 1873149
uaacuacagcuacaagcaa

SEQ ID NO: 1873151 - RNA, 19 nt, Artificial Sequence
  Description of Artificial Sequence: Synthetic oligonucleotide
  Sense strand starting at position 3239 of SEQ ID NO: 1564348
gcaagucucccuuaaguau

SEQ ID NO: 1873152 - RNA, 19 nt, Artificial Sequence
  Description of Artificial Sequence: Synthetic oligonucleotide
  Antisense strand to SEQ ID NO: 1873151
auacuuaagggagacuugc

SEQ ID NO: 1873153 - RNA, 19 nt, Artificial Sequence
  Description of Artificial Sequence: Synthetic oligonucleotide
  Sense strand starting at position 3271 of SEQ ID NO: 1564348
gucuuagauccguugcugu

SEQ ID NO: 1873154 - RNA, 19 nt, Artificial Sequence
  Description of Artificial Sequence: Synthetic oligonucleotide
  Antisense strand to SEQ ID NO: 1873153
acagcaacggaucuaagac

SEQ ID NO: 1873155 - RNA, 19 nt, Artificial Sequence
  Description of Artificial Sequence: Synthetic oligonucleotide
  Sense strand starting at position 3303 of SEQ ID NO: 1564348
augauauauggucagacgu

SEQ ID NO: 1873156 - RNA, 19 nt, Artificial Sequence
  Description of Artificial Sequence: Synthetic oligonucleotide
  Antisense strand to SEQ ID NO: 1873155
acgucugaccauauaucau

SEQ ID NO: 1873157 - RNA, 19 nt, Artificial Sequence
  Description of Artificial Sequence: Synthetic oligonucleotide
  Sense strand starting at position 3339 of SEQ ID NO: 1564348
ggucuucuuuccucugauc

SEQ ID NO: 1873158 - RNA, 19 nt, Artificial Sequence
  Description of Artificial Sequence: Synthetic oligonucleotide
  Antisense strand to SEQ ID NO: 1873157
gaucagaggaaagaagacc

SEQ ID NO: 1873159 - RNA, 19 nt, Artificial Sequence
  Description of Artificial Sequence: Synthetic oligonucleotide
  Sense strand starting at position 3541 of SEQ ID NO: 1564348
cuucuuagauuccugugaa

SEQ ID NO: 1873160 - RNA, 19 nt, Artificial Sequence
  Description of Artificial Sequence: Synthetic oligonucleotide
  Antisense strand to SEQ ID NO: 1873159
uucacaggaaucuaagaag

SEQ ID NO: 1873161 - RNA, 19 nt, Artificial Sequence
  Description of Artificial Sequence: Synthetic oligonucleotide
  Sense strand starting at position 3544 of SEQ ID NO: 1564348
cuuagauuccugugaagac

SEQ ID NO: 1873162 - RNA, 19 nt, Artificial Sequence
  Description of Artificial Sequence: Synthetic oligonucleotide
  Antisense strand to SEQ ID NO: 1873161
gucuucacaggaaucuaag

SEQ ID NO: 1873163 - RNA, 19 nt, Artificial Sequence
  Description of Artificial Sequence: Synthetic oligonucleotide
  Sense strand starting at position 3861 of SEQ ID NO: 1564348
uccugugaagaccauguua

SEQ ID NO: 1873164 - RNA, 19 nt, Artificial Sequence
  Description of Artificial Sequence: Synthetic oligonucleotide
  Antisense strand to SEQ ID NO: 1873163
uaacauggucuucacagga

SEQ ID NO: 1873165 - RNA, 19 nt, Artificial Sequence
  Description of Artificial Sequence: Synthetic oligonucleotide
  Sense strand starting at position 3863 of SEQ ID NO: 1564348
cugugaagaccauguuauu

SEQ ID NO: 1873166 - RNA, 19 nt, Artificial Sequence
  Description of Artificial Sequence: Synthetic oligonucleotide
  Antisense strand to SEQ ID NO: 1873165
aauaacauggucuucacag

SEQ ID NO: 1873167 - RNA, 19 nt, Artificial Sequence
  Description of Artificial Sequence: Synthetic oligonucleotide
  Sense strand starting at position 55 of SEQ ID NO: 1564349
ccaugaguauggcuggaua

SEQ ID NO: 1873168 - RNA, 19 nt, Artificial Sequence
  Description of Artificial Sequence: Synthetic oligonucleotide
  Antisense strand to SEQ ID NO: 1873167
uauccagccauacucaugg

SEQ ID NO: 1873169 - RNA, 19 nt, Artificial Sequence
  Description of Artificial Sequence: Synthetic oligonucleotide
  Sense strand starting at position 57 of SEQ ID NO: 1564349
augaguauggcuggauaug

SEQ ID NO: 1873170 - RNA, 19 nt, Artificial Sequence
  Description of Artificial Sequence: Synthetic oligonucleotide
  Antisense strand to SEQ ID NO: 1873169
cauauccagccauacucau

SEQ ID NO: 1873171 - RNA, 19 nt, Artificial Sequence
  Description of Artificial Sequence: Synthetic oligonucleotide
  Sense strand starting at position 58 of SEQ ID NO: 1564349
ugaguauggcuggauaugu

SEQ ID NO: 1873172 - RNA, 19 nt, Artificial Sequence
  Description of Artificial Sequence: Synthetic oligonucleotide
  Antisense strand to SEQ ID NO: 1873171
acauauccagccauacuca

SEQ ID NO: 1873173 - RNA, 19 nt, Artificial Sequence
  Description of Artificial Sequence: Synthetic oligonucleotide
  Sense strand starting at position 69 of SEQ ID NO: 1564349
ggauauguacugcagauua

SEQ ID NO: 1873174 - RNA, 19 nt, Artificial Sequence
  Description of Artificial Sequence: Synthetic oligonucleotide
  Antisense strand to SEQ ID NO: 1873173
uaaucugcaguacauaucc

SEQ ID NO: 1873175 - RNA, 19 nt, Artificial Sequence
  Description of Artificial Sequence: Synthetic oligonucleotide
  Sense strand starting at position 102 of SEQ ID NO: 1564349
ggcaguagagguggucuua

SEQ ID NO: 1873176 - RNA, 19 nt, Artificial Sequence
  Description of Artificial Sequence: Synthetic oligonucleotide
  Antisense strand to SEQ ID NO: 1873175
uaagaccaccucuacugcc

SEQ ID NO: 1873177 - RNA, 19 nt, Artificial Sequence
  Description of Artificial Sequence: Synthetic oligonucleotide
  Sense strand starting at position 135 of SEQ ID NO: 1564349
uuauauaggcucugagaca

SEQ ID NO: 1873178 - RNA, 19 nt, Artificial Sequence
  Description of Artificial Sequence: Synthetic oligonucleotide
  Antisense strand to SEQ ID NO: 1873177
ugucucagagccuauauaa

SEQ ID NO: 1873179 - RNA, 19 nt, Artificial Sequence
  Description of Artificial Sequence: Synthetic oligonucleotide
  Sense strand starting at position 209 of SEQ ID NO: 1564349
agcauuuccgaaggcuuua

SEQ ID NO: 1873180 - RNA, 19 nt, Artificial Sequence
  Description of Artificial Sequence: Synthetic oligonucleotide
  Antisense strand to SEQ ID NO: 1873179
uaaagccuucggaaaugcu

SEQ ID NO: 1873181 - RNA, 19 nt, Artificial Sequence
  Description of Artificial Sequence: Synthetic oligonucleotide
  Sense strand starting at position 733 of SEQ ID NO: 1564349
gagcuacgaucucuccuua

SEQ ID NO: 1873182 - RNA, 19 nt, Artificial Sequence
  Description of Artificial Sequence: Synthetic oligonucleotide
  Antisense strand to SEQ ID NO: 1873181
uaaggagagaucguagcuc

SEQ ID NO: 1873183 - RNA, 19 nt, Artificial Sequence
  Description of Artificial Sequence: Synthetic oligonucleotide
  Sense strand starting at position 1636 of SEQ ID NO: 1564349
cagucugagagucagaguu

SEQ ID NO: 1873184 - RNA, 19 nt, Artificial Sequence
  Description of Artificial Sequence: Synthetic oligonucleotide
  Antisense strand to SEQ ID NO: 1873183
aacucugacucucagacug

SEQ ID NO: 1873185 - RNA, 19 nt, Artificial Sequence
  Description of Artificial Sequence: Synthetic oligonucleotide
  Sense strand starting at position 1733 of SEQ ID NO: 1564349
aaccguuacugcuugauga

SEQ ID NO: 1873186 - RNA, 19 nt, Artificial Sequence
  Description of Artificial Sequence: Synthetic oligonucleotide
  Antisense strand to SEQ ID NO: 1873185
ucaucaagcaguaacgguu

SEQ ID NO: 1873187 - RNA, 19 nt, Artificial Sequence
  Description of Artificial Sequence: Synthetic oligonucleotide
  Sense strand starting at position 1802 of SEQ ID NO: 1564349
ggguaaguucugggaucuu

SEQ ID NO: 1873188 - RNA, 19 nt, Artificial Sequence
  Description of Artificial Sequence: Synthetic oligonucleotide
  Antisense strand to SEQ ID NO: 1873187
aagaucccagaacuuaccc

SEQ ID NO: 1873189 - RNA, 19 nt, Artificial Sequence
  Description of Artificial Sequence: Synthetic oligonucleotide
  Sense strand starting at position 1814 of SEQ ID NO: 1564349
ggaucuucucccugagucu

SEQ ID NO: 1873190 - RNA, 19 nt, Artificial Sequence
  Description of Artificial Sequence: Synthetic oligonucleotide
  Antisense strand to SEQ ID NO: 1873189
agacucagggagaagaucc

SEQ ID NO: 1873191 - RNA, 19 nt, Artificial Sequence
  Description of Artificial Sequence: Synthetic oligonucleotide
  Sense strand starting at position 1848 of SEQ ID NO: 1564349
cuguauuaucuauggaguu

SEQ ID NO: 1873192 - RNA, 19 nt, Artificial Sequence
  Description of Artificial Sequence: Synthetic oligonucleotide
  Antisense strand to SEQ ID NO: 1873191
aacuccauagauaauacag

SEQ ID NO: 1873193 - RNA, 19 nt, Artificial Sequence
  Description of Artificial Sequence: Synthetic oligonucleotide
  Sense strand starting at position 2113 of SEQ ID NO: 1564349
ccuggaugguccuuagcau

SEQ ID NO: 1873194 - RNA, 19 nt, Artificial Sequence
  Description of Artificial Sequence: Synthetic oligonucleotide
  Antisense strand to SEQ ID NO: 1873193
augcuaaggaccauccagg

SEQ ID NO: 1873195 - RNA, 19 nt, Artificial Sequence
  Description of Artificial Sequence: Synthetic oligonucleotide
  Sense strand starting at position 2144 of SEQ ID NO: 1564349
gagguuaggcuagagaagu

SEQ ID NO: 1873196 - RNA, 19 nt, Artificial Sequence
  Description of Artificial Sequence: Synthetic oligonucleotide
  Antisense strand to SEQ ID NO: 1873195
acuucucuagccuaaccuc

SEQ ID NO: 1873197 - RNA, 19 nt, Artificial Sequence
  Description of Artificial Sequence: Synthetic oligonucleotide
  Sense strand starting at position 2145 of SEQ ID NO: 1564349
agguuaggcuagagaagug

SEQ ID NO: 1873198 - RNA, 19 nt, Artificial Sequence
  Description of Artificial Sequence: Synthetic oligonucleotide
  Antisense strand to SEQ ID NO: 1873197
cacuucucuagccuaaccu

SEQ ID NO: 1873199 - RNA, 19 nt, Artificial Sequence
  Description of Artificial Sequence: Synthetic oligonucleotide
  Sense strand starting at position 2225 of SEQ ID NO: 1564349
auucucaguccgcauuaua

SEQ ID NO: 1873200 - RNA, 19 nt, Artificial Sequence
  Description of Artificial Sequence: Synthetic oligonucleotide
  Antisense strand to SEQ ID NO: 1873199
uauaaugcggacugagaau

SEQ ID NO: 1873201 - RNA, 19 nt, Artificial Sequence
  Description of Artificial Sequence: Synthetic oligonucleotide
  Sense strand starting at position 2228 of SEQ ID NO: 1564349
cucaguccgcauuauauua

SEQ ID NO: 1873202 - RNA, 19 nt, Artificial Sequence
  Description of Artificial Sequence: Synthetic oligonucleotide
  Antisense strand to SEQ ID NO: 1873201
uaauauaaugcggacugag

SEQ ID NO: 1873203 - RNA, 19 nt, Artificial Sequence
  Description of Artificial Sequence: Synthetic oligonucleotide
  Sense strand starting at position 2250 of SEQ ID NO: 1564349
guuagagcacuuuacaauc

SEQ ID NO: 1873204 - RNA, 19 nt, Artificial Sequence
  Description of Artificial Sequence: Synthetic oligonucleotide
  Antisense strand to SEQ ID NO: 1873203
gauuguaaagugcucuaac

SEQ ID NO: 1873205 - RNA, 19 nt, Artificial Sequence
  Description of Artificial Sequence: Synthetic oligonucleotide
  Sense strand starting at position 2309 of SEQ ID NO: 1564349
gcauuuaguagccgaacua

SEQ ID NO: 1873206 - RNA, 19 nt, Artificial Sequence
  Description of Artificial Sequence: Synthetic oligonucleotide
  Antisense strand to SEQ ID NO: 1873205
uaguucggcuacuaaaugc

SEQ ID NO: 1873207 - RNA, 19 nt, Artificial Sequence
  Description of Artificial Sequence: Synthetic oligonucleotide
  Sense strand starting at position 2379 of SEQ ID NO: 1564349
guauccagugccuauucua

SEQ ID NO: 1873208 - RNA, 19 nt, Artificial Sequence
  Description of Artificial Sequence: Synthetic oligonucleotide
  Antisense strand to SEQ ID NO: 1873207
uagaauaggcacuggauac

SEQ ID NO: 1873209 - RNA, 19 nt, Artificial Sequence
  Description of Artificial Sequence: Synthetic oligonucleotide
  Sense strand starting at position 2455 of SEQ ID NO: 1564349
uguaguccucgggaguuua

SEQ ID NO: 1873210 - RNA, 19 nt, Artificial Sequence
  Description of Artificial Sequence: Synthetic oligonucleotide
  Antisense strand to SEQ ID NO: 1873209
uaaacucccgaggacuaca

SEQ ID NO: 1873211 - RNA, 19 nt, Artificial Sequence
  Description of Artificial Sequence: Synthetic oligonucleotide
  Sense strand starting at position 2524 of SEQ ID NO: 1564349
ccacauggccuugagguua

SEQ ID NO: 1873212 - RNA, 19 nt, Artificial Sequence
  Description of Artificial Sequence: Synthetic oligonucleotide
  Antisense strand to SEQ ID NO: 1873211
uaaccucaaggccaugugg

SEQ ID NO: 1873213 - RNA, 19 nt, Artificial Sequence
  Description of Artificial Sequence: Synthetic oligonucleotide
  Sense strand starting at position 2786 of SEQ ID NO: 1564349
ggaggugccuggucacuau

SEQ ID NO: 1873214 - RNA, 19 nt, Artificial Sequence
  Description of Artificial Sequence: Synthetic oligonucleotide
  Antisense strand to SEQ ID NO: 1873213
auagugaccaggcaccucc

SEQ ID NO: 1873215 - RNA, 19 nt, Artificial Sequence
  Description of Artificial Sequence: Synthetic oligonucleotide
  Sense strand starting at position 2790 of SEQ ID NO: 1564349
gugccuggucacuaucuuu

SEQ ID NO: 1873216 - RNA, 19 nt, Artificial Sequence
  Description of Artificial Sequence: Synthetic oligonucleotide
  Antisense strand to SEQ ID NO: 1873215
aaagauagugaccaggcac

SEQ ID NO: 1873217 - RNA, 19 nt, Artificial Sequence
  Description of Artificial Sequence: Synthetic oligonucleotide
  Sense strand starting at position 2844 of SEQ ID NO: 1564349
guguguuauuaauucuaga

SEQ ID NO: 1873218 - RNA, 19 nt, Artificial Sequence
  Description of Artificial Sequence: Synthetic oligonucleotide
  Antisense strand to SEQ ID NO: 1873217
ucuagaauuaauaacacac

SEQ ID NO: 1873219 - RNA, 19 nt, Artificial Sequence
  Description of Artificial Sequence: Synthetic oligonucleotide
  Sense strand starting at position 2948 of SEQ ID NO: 1564349
ggacaagugacuugucaag

SEQ ID NO: 1873220 - RNA, 19 nt, Artificial Sequence
  Description of Artificial Sequence: Synthetic oligonucleotide
  Antisense strand to SEQ ID NO: 1873219
cuugacaagucacuugucc

SEQ ID NO: 1873221 - RNA, 19 nt, Artificial Sequence
  Description of Artificial Sequence: Synthetic oligonucleotide
  Sense strand starting at position 2950 of SEQ ID NO: 1564349
acaagugacuugucaagug

SEQ ID NO: 1873222 - RNA, 19 nt, Artificial Sequence
  Description of Artificial Sequence: Synthetic oligonucleotide
  Antisense strand to SEQ ID NO: 1873221
cacuugacaagucacuugu

SEQ ID NO: 1873223 - RNA, 19 nt, Artificial Sequence
  Description of Artificial Sequence: Synthetic oligonucleotide
  Sense strand starting at position 3043 of SEQ ID NO: 1564349
augcaacagacguagucau

SEQ ID NO: 1873224 - RNA, 19 nt, Artificial Sequence
  Description of Artificial Sequence: Synthetic oligonucleotide
  Antisense strand to SEQ ID NO: 1873223
augacuacgucuguugcau

SEQ ID NO: 1873225 - RNA, 19 nt, Artificial Sequence
  Description of Artificial Sequence: Synthetic oligonucleotide
  Sense strand starting at position 3050 of SEQ ID NO: 1564349
agacguagucauuaacaac

SEQ ID NO: 1873226 - RNA, 19 nt, Artificial Sequence
  Description of Artificial Sequence: Synthetic oligonucleotide
  Antisense strand to SEQ ID NO: 1873225
guuguuaaugacuacgucu

SEQ ID NO: 1873227 - RNA, 19 nt, Artificial Sequence
  Description of Artificial Sequence: Synthetic oligonucleotide
  Sense strand starting at position 3464 of SEQ ID NO: 1564349
acuguaauaguggauacuu

SEQ ID NO: 1873228 - RNA, 19 nt, Artificial Sequence
  Description of Artificial Sequence: Synthetic oligonucleotide
  Antisense strand to SEQ ID NO: 1873227
aaguauccacuauuacagu

SEQ ID NO: 1873229 - RNA, 19 nt, Artificial Sequence
  Description of Artificial Sequence: Synthetic oligonucleotide
  Sense strand starting at position 3475 of SEQ ID NO: 1564349
ggauacuuguaaguauaca

SEQ ID NO: 1873230 - RNA, 19 nt, Artificial Sequence
  Description of Artificial Sequence: Synthetic oligonucleotide
  Antisense strand to SEQ ID NO: 1873229
uguauacuuacaaguaucc

SEQ ID NO: 1873231 - RNA, 19 nt, Artificial Sequence
  Description of Artificial Sequence: Synthetic oligonucleotide
  Sense strand starting at position 3527 of SEQ ID NO: 1564349
gugaacuaacucuaaugua

SEQ ID NO: 1873232 - RNA, 19 nt, Artificial Sequence
  Description of Artificial Sequence: Synthetic oligonucleotide
  Antisense strand to SEQ ID NO: 1873231
uacauuagaguuaguucac

SEQ ID NO: 1873233 - RNA, 19 nt, Artificial Sequence
  Description of Artificial Sequence: Synthetic oligonucleotide
  Sense strand starting at position 3550 of SEQ ID NO: 1564349
gcaggcuuugguuaguaau

SEQ ID NO: 1873234 - RNA, 19 nt, Artificial Sequence
  Description of Artificial Sequence: Synthetic oligonucleotide
  Antisense strand to SEQ ID NO: 1873233
auuacuaaccaaagccugc

SEQ ID NO: 1873235 - RNA, 19 nt, Artificial Sequence
  Description of Artificial Sequence: Synthetic oligonucleotide
  Sense strand starting at position 3552 of SEQ ID NO: 1564349
aggcuuugguuaguaauga

SEQ ID NO: 1873236 - RNA, 19 nt, Artificial Sequence
  Description of Artificial Sequence: Synthetic oligonucleotide
  Antisense strand to SEQ ID NO: 1873235
ucauuacuaaccaaagccu

SEQ ID NO: 1873237 - RNA, 19 nt, Artificial Sequence
  Description of Artificial Sequence: Synthetic oligonucleotide
  Sense strand starting at position 3562 of SEQ ID NO: 1564349
uaguaaugauguguuaaug

SEQ ID NO: 1873238 - RNA, 19 nt, Artificial Sequence
  Description of Artificial Sequence: Synthetic oligonucleotide
  Antisense strand to SEQ ID NO: 1873237
cauuaacacaucauuacua

SEQ ID NO: 1873239 - RNA, 19 nt, Artificial Sequence
  Description of Artificial Sequence: Synthetic oligonucleotide
  Sense strand starting at position 3796 of SEQ ID NO: 1564349
uauggccuuugguugauaa

SEQ ID NO: 1873240 - RNA, 19 nt, Artificial Sequence
  Description of Artificial Sequence: Synthetic oligonucleotide
  Antisense strand to SEQ ID NO: 1873239
uuaucaaccaaaggccaua

SEQ ID NO: 1873241 - RNA, 19 nt, Artificial Sequence
  Description of Artificial Sequence: Synthetic oligonucleotide
  Sense strand starting at position 3797 of SEQ ID NO: 1564349
auggccuuugguugauaau

SEQ ID NO: 1873242 - RNA, 19 nt, Artificial Sequence
  Description of Artificial Sequence: Synthetic oligonucleotide
  Antisense strand to SEQ ID NO: 1873241
auuaucaaccaaaggccau

SEQ ID NO: 1873243 - RNA, 19 nt, Artificial Sequence
  Description of Artificial Sequence: Synthetic oligonucleotide
  Sense strand starting at position 3798 of SEQ ID NO: 1564349
uggccuuugguugauaaug

SEQ ID NO: 1873244 - RNA, 19 nt, Artificial Sequence
  Description of Artificial Sequence: Synthetic oligonucleotide
  Antisense strand to SEQ ID NO: 1873243
cauuaucaaccaaaggcca

SEQ ID NO: 1873245 - RNA, 19 nt, Artificial Sequence
  Description of Artificial Sequence: Synthetic oligonucleotide
  Sense strand starting at position 3810 of SEQ ID NO: 1564349
gauaaugugucacuguaua

SEQ ID NO: 1873246 - RNA, 19 nt, Artificial Sequence
  Description of Artificial Sequence: Synthetic oligonucleotide
  Antisense strand to SEQ ID NO: 1873245
uauacagugacacauuauc

SEQ ID NO: 1873247 - RNA, 19 nt, Artificial Sequence
  Description of Artificial Sequence: Synthetic oligonucleotide
  Sense strand starting at position 149 of SEQ ID NO: 1564350
ugcaguguuauuggagaau

SEQ ID NO: 1873248 - RNA, 19 nt, Artificial Sequence
  Description of Artificial Sequence: Synthetic oligonucleotide
  Antisense strand to SEQ ID NO: 1873247
auucuccaauaacacugca

SEQ ID NO: 1873249 - RNA, 19 nt, Artificial Sequence
  Description of Artificial Sequence: Synthetic oligonucleotide
  Sense strand starting at position 152 of SEQ ID NO: 1564350
aguguuauuggagaaucug

SEQ ID NO: 1873250 - RNA, 19 nt, Artificial Sequence
  Description of Artificial Sequence: Synthetic oligonucleotide
  Antisense strand to SEQ ID NO: 1873249
cagauucuccaauaacacu

SEQ ID NO: 1873251 - RNA, 19 nt, Artificial Sequence
  Description of Artificial Sequence: Synthetic oligonucleotide
  Sense strand starting at position 603 of SEQ ID NO: 1564350
ccaugaguauggcuggaua

SEQ ID NO: 1873252 - RNA, 19 nt, Artificial Sequence
  Description of Artificial Sequence: Synthetic oligonucleotide
  Antisense strand to SEQ ID NO: 1873251
uauccagccauacucaugg

SEQ ID NO: 1873253 - RNA, 19 nt, Artificial Sequence
  Description of Artificial Sequence: Synthetic oligonucleotide
  Sense strand starting at position 605 of SEQ ID NO: 1564350
augaguauggcuggauaug

SEQ ID NO: 1873254 - RNA, 19 nt, Artificial Sequence
  Description of Artificial Sequence: Synthetic oligonucleotide
  Antisense strand to SEQ ID NO: 1873253
cauauccagccauacucau

SEQ ID NO: 1873255 - RNA, 19 nt, Artificial Sequence
  Description of Artificial Sequence: Synthetic oligonucleotide
  Sense strand starting at position 606 of SEQ ID NO: 1564350
ugaguauggcuggauaugu

SEQ ID NO: 1873256 - RNA, 19 nt, Artificial Sequence
  Description of Artificial Sequence: Synthetic oligonucleotide
  Antisense strand to SEQ ID NO: 1873255
acauauccagccauacuca

SEQ ID NO: 1873257 - RNA, 19 nt, Artificial Sequence
  Description of Artificial Sequence: Synthetic oligonucleotide
  Sense strand starting at position 617 of SEQ ID NO: 1564350
ggauauguacugcagauua

SEQ ID NO: 1873258 - RNA, 19 nt, Artificial Sequence
  Description of Artificial Sequence: Synthetic oligonucleotide
  Antisense strand to SEQ ID NO: 1873257
uaaucugcaguacauaucc

SEQ ID NO: 1873259 - RNA, 19 nt, Artificial Sequence
  Description of Artificial Sequence: Synthetic oligonucleotide
  Sense strand starting at position 650 of SEQ ID NO: 1564350
ggcaguagagguggucuua

SEQ ID NO: 1873260 - RNA, 19 nt, Artificial Sequence
  Description of Artificial Sequence: Synthetic oligonucleotide
  Antisense strand to SEQ ID NO: 1873259
uaagaccaccucuacugcc

SEQ ID NO: 1873261 - RNA, 19 nt, Artificial Sequence
  Description of Artificial Sequence: Synthetic oligonucleotide
  Sense strand starting at position 660 of SEQ ID NO: 1564350
guggucuuagccugaauuc

SEQ ID NO: 1873262 - RNA, 19 nt, Artificial Sequence
  Description of Artificial Sequence: Synthetic oligonucleotide
  Antisense strand to SEQ ID NO: 1873261
gaauucaggcuaagaccac

SEQ ID NO: 1873263 - RNA, 19 nt, Artificial Sequence
  Description of Artificial Sequence: Synthetic oligonucleotide
  Sense strand starting at position 683 of SEQ ID NO: 1564350
uuauauaggcucugagaca

SEQ ID NO: 1873264 - RNA, 19 nt, Artificial Sequence
  Description of Artificial Sequence: Synthetic oligonucleotide
  Antisense strand to SEQ ID NO: 1873263
ugucucagagccuauauaa

SEQ ID NO: 1873265 - RNA, 19 nt, Artificial Sequence
  Description of Artificial Sequence: Synthetic oligonucleotide
  Sense strand starting at position 717 of SEQ ID NO: 1564350
uuggauuucucaugagcag

SEQ ID NO: 1873266 - RNA, 19 nt, Artificial Sequence
  Description of Artificial Sequence: Synthetic oligonucleotide
  Antisense strand to SEQ ID NO: 1873265
cugcucaugagaaauccaa

SEQ ID NO: 1873267 - RNA, 19 nt, Artificial Sequence
  Description of Artificial Sequence: Synthetic oligonucleotide
  Sense strand starting at position 757 of SEQ ID NO: 1564350
agcauuuccgaaggcuuua

SEQ ID NO: 1873268 - RNA, 19 nt, Artificial Sequence
  Description of Artificial Sequence: Synthetic oligonucleotide
  Antisense strand to SEQ ID NO: 1873267
uaaagccuucggaaaugcu

SEQ ID NO: 1873269 - RNA, 19 nt, Artificial Sequence
  Description of Artificial Sequence: Synthetic oligonucleotide
  Sense strand starting at position 1281 of SEQ ID NO: 1564350
gagcuacgaucucuccuua

SEQ ID NO: 1873270 - RNA, 19 nt, Artificial Sequence
  Description of Artificial Sequence: Synthetic oligonucleotide
  Antisense strand to SEQ ID NO: 1873269
uaaggagagaucguagcuc

SEQ ID NO: 1873271 - RNA, 19 nt, Artificial Sequence
  Description of Artificial Sequence: Synthetic oligonucleotide
  Sense strand starting at position 2184 of SEQ ID NO: 1564350
cagucugagagucagaguu

SEQ ID NO: 1873272 - RNA, 19 nt, Artificial Sequence
  Description of Artificial Sequence: Synthetic oligonucleotide
  Antisense strand to SEQ ID NO: 1873271
aacucugacucucagacug

SEQ ID NO: 1873273 - RNA, 19 nt, Artificial Sequence
  Description of Artificial Sequence: Synthetic oligonucleotide
  Sense strand starting at position 2243 of SEQ ID NO: 1564350
guuaaauggcucuggcuca

SEQ ID NO: 1873274 - RNA, 19 nt, Artificial Sequence
  Description of Artificial Sequence: Synthetic oligonucleotide
  Antisense strand to SEQ ID NO: 1873273
ugagccagagccauuuaac

SEQ ID NO: 1873275 - RNA, 19 nt, Artificial Sequence
  Description of Artificial Sequence: Synthetic oligonucleotide
  Sense strand starting at position 2281 of SEQ ID NO: 1564350
aaccguuacugcuugauga

SEQ ID NO: 1873276 - RNA, 19 nt, Artificial Sequence
  Description of Artificial Sequence: Synthetic oligonucleotide
  Antisense strand to SEQ ID NO: 1873275
ucaucaagcaguaacgguu

SEQ ID NO: 1873277 - RNA, 19 nt, Artificial Sequence
  Description of Artificial Sequence: Synthetic oligonucleotide
  Sense strand starting at position 2350 of SEQ ID NO: 1564350
ggguaaguucugggaucuu

SEQ ID NO: 1873278 - RNA, 19 nt, Artificial Sequence
  Description of Artificial Sequence: Synthetic oligonucleotide
  Antisense strand to SEQ ID NO: 1873277
aagaucccagaacuuaccc

SEQ ID NO: 1873279 - RNA, 19 nt, Artificial Sequence
  Description of Artificial Sequence: Synthetic oligonucleotide
  Sense strand starting at position 2362 of SEQ ID NO: 1564350
ggaucuucucccugagucu

SEQ ID NO: 1873280 - RNA, 19 nt, Artificial Sequence
  Description of Artificial Sequence: Synthetic oligonucleotide
  Antisense strand to SEQ ID NO: 1873279
agacucagggagaagaucc

SEQ ID NO: 1873281 - RNA, 19 nt, Artificial Sequence
  Description of Artificial Sequence: Synthetic oligonucleotide
  Sense strand starting at position 2385 of SEQ ID NO: 1564350
gcaggagcucccuguauua

SEQ ID NO: 1873282 - RNA, 19 nt, Artificial Sequence
  Description of Artificial Sequence: Synthetic oligonucleotide
  Antisense strand to SEQ ID NO: 1873281
uaauacagggagcuccugc

SEQ ID NO: 1873283 - RNA, 19 nt, Artificial Sequence
  Description of Artificial Sequence: Synthetic oligonucleotide
  Sense strand starting at position 2396 of SEQ ID NO: 1564350
cuguauuaucuauggaguu

SEQ ID NO: 1873284 - RNA, 19 nt, Artificial Sequence
  Description of Artificial Sequence: Synthetic oligonucleotide
  Antisense strand to SEQ ID NO: 1873283
aacuccauagauaauacag

SEQ ID NO: 1873285 - RNA, 19 nt, Artificial Sequence
  Description of Artificial Sequence: Synthetic oligonucleotide
  Sense strand starting at position 2661 of SEQ ID NO: 1564350
ccuggaugguccuuagcau

SEQ ID NO: 1873286 - RNA, 19 nt, Artificial Sequence
  Description of Artificial Sequence: Synthetic oligonucleotide
  Antisense strand to SEQ ID NO: 1873285
augcuaaggaccauccagg

SEQ ID NO: 1873287 - RNA, 19 nt, Artificial Sequence
  Description of Artificial Sequence: Synthetic oligonucleotide
  Sense strand starting at position 2692 of SEQ ID NO: 1564350
gagguuaggcuagagaagu

SEQ ID NO: 1873288 - RNA, 19 nt, Artificial Sequence
  Description of Artificial Sequence: Synthetic oligonucleotide
  Antisense strand to SEQ ID NO: 1873287
acuucucuagccuaaccuc

SEQ ID NO: 1873289 - RNA, 19 nt, Artificial Sequence
  Description of Artificial Sequence: Synthetic oligonucleotide
  Sense strand starting at position 2693 of SEQ ID NO: 1564350
agguuaggcuagagaagug

SEQ ID NO: 1873290 - RNA, 19 nt, Artificial Sequence
  Description of Artificial Sequence: Synthetic oligonucleotide
  Antisense strand to SEQ ID NO: 1873289
cacuucucuagccuaaccu

SEQ ID NO: 1873291 - RNA, 19 nt, Artificial Sequence
  Description of Artificial Sequence: Synthetic oligonucleotide
  Sense strand starting at position 2773 of SEQ ID NO: 1564350
auucucaguccgcauuaua

SEQ ID NO: 1873292 - RNA, 19 nt, Artificial Sequence
  Description of Artificial Sequence: Synthetic oligonucleotide
  Antisense strand to SEQ ID NO: 1873291
uauaaugcggacugagaau

SEQ ID NO: 1873293 - RNA, 19 nt, Artificial Sequence
  Description of Artificial Sequence: Synthetic oligonucleotide
  Sense strand starting at position 2776 of SEQ ID NO: 1564350
cucaguccgcauuauauua

SEQ ID NO: 1873294 - RNA, 19 nt, Artificial Sequence
  Description of Artificial Sequence: Synthetic oligonucleotide
  Antisense strand to SEQ ID NO: 1873293
uaauauaaugcggacugag

SEQ ID NO: 1873295 - RNA, 19 nt, Artificial Sequence
  Description of Artificial Sequence: Synthetic oligonucleotide
  Sense strand starting at position 2798 of SEQ ID NO: 1564350
guuagagcacuuuacaauc

SEQ ID NO: 1873296 - RNA, 19 nt, Artificial Sequence
  Description of Artificial Sequence: Synthetic oligonucleotide
  Antisense strand to SEQ ID NO: 1873295
gauuguaaagugcucuaac

SEQ ID NO: 1873297 - RNA, 19 nt, Artificial Sequence
  Description of Artificial Sequence: Synthetic oligonucleotide
  Sense strand starting at position 2857 of SEQ ID NO: 1564350
gcauuuaguagccgaacua

SEQ ID NO: 1873298 - RNA, 19 nt, Artificial Sequence
  Description of Artificial Sequence: Synthetic oligonucleotide
  Antisense strand to SEQ ID NO: 1873297
uaguucggcuacuaaaugc

SEQ ID NO: 1873299 - RNA, 19 nt, Artificial Sequence
  Description of Artificial Sequence: Synthetic oligonucleotide
  Sense strand starting at position 2923 of SEQ ID NO: 1564350
uuugguauccagugccuau

SEQ ID NO: 1873300 - RNA, 19 nt, Artificial Sequence
  Description of Artificial Sequence: Synthetic oligonucleotide
  Antisense strand to SEQ ID NO: 1873299
auaggcacuggauaccaaa

SEQ ID NO: 1873301 - RNA, 19 nt, Artificial Sequence
  Description of Artificial Sequence: Synthetic oligonucleotide
  Sense strand starting at position 2927 of SEQ ID NO: 1564350
guauccagugccuauucua

SEQ ID NO: 1873302 - RNA, 19 nt, Artificial Sequence
  Description of Artificial Sequence: Synthetic oligonucleotide
  Antisense strand to SEQ ID NO: 1873301
uagaauaggcacuggauac

SEQ ID NO: 1873303 - RNA, 19 nt, Artificial Sequence
  Description of Artificial Sequence: Synthetic oligonucleotide
  Sense strand starting at position 3000 of SEQ ID NO: 1564350
ucuuguaguccucgggagu

SEQ ID NO: 1873304 - RNA, 19 nt, Artificial Sequence
  Description of Artificial Sequence: Synthetic oligonucleotide
  Antisense strand to SEQ ID NO: 1873303
acucccgaggacuacaaga

SEQ ID NO: 1873305 - RNA, 19 nt, Artificial Sequence
  Description of Artificial Sequence: Synthetic oligonucleotide
  Sense strand starting at position 3001 of SEQ ID NO: 1564350
cuuguaguccucgggaguu

SEQ ID NO: 1873306 - RNA, 19 nt, Artificial Sequence
  Description of Artificial Sequence: Synthetic oligonucleotide
  Antisense strand to SEQ ID NO: 1873305
aacucccgaggacuacaag

SEQ ID NO: 1873307 - RNA, 19 nt, Artificial Sequence
  Description of Artificial Sequence: Synthetic oligonucleotide
  Sense strand starting at position 3003 of SEQ ID NO: 1564350
uguaguccucgggaguuua

SEQ ID NO: 1873308 - RNA, 19 nt, Artificial Sequence
  Description of Artificial Sequence: Synthetic oligonucleotide
  Antisense strand to SEQ ID NO: 1873307
uaaacucccgaggacuaca

SEQ ID NO: 1873309 - RNA, 19 nt, Artificial Sequence
  Description of Artificial Sequence: Synthetic oligonucleotide
  Sense strand starting at position 3072 of SEQ ID NO: 1564350
ccacauggccuugagguua

SEQ ID NO: 1873310 - RNA, 19 nt, Artificial Sequence
  Description of Artificial Sequence: Synthetic oligonucleotide
  Antisense strand to SEQ ID NO: 1873309
uaaccucaaggccaugugg

SEQ ID NO: 1873311 - RNA, 19 nt, Artificial Sequence
  Description of Artificial Sequence: Synthetic oligonucleotide
  Sense strand starting at position 3334 of SEQ ID NO: 1564350
ggaggugccuggucacuau

SEQ ID NO: 1873312 - RNA, 19 nt, Artificial Sequence
  Description of Artificial Sequence: Synthetic oligonucleotide
  Antisense strand to SEQ ID NO: 1873311
auagugaccaggcaccucc

SEQ ID NO: 1873313 - RNA, 19 nt, Artificial Sequence
  Description of Artificial Sequence: Synthetic oligonucleotide
  Sense strand starting at position 3338 of SEQ ID NO: 1564350
gugccuggucacuaucuuu

SEQ ID NO: 1873314 - RNA, 19 nt, Artificial Sequence
  Description of Artificial Sequence: Synthetic oligonucleotide
  Antisense strand to SEQ ID NO: 1873313
aaagauagugaccaggcac

SEQ ID NO: 1873315 - RNA, 19 nt, Artificial Sequence
  Description of Artificial Sequence: Synthetic oligonucleotide
  Sense strand starting at position 3388 of SEQ ID NO: 1564350
agugguguguuauuaauuc

SEQ ID NO: 1873316 - RNA, 19 nt, Artificial Sequence
  Description of Artificial Sequence: Synthetic oligonucleotide
  Antisense strand to SEQ ID NO: 1873315
gaauuaauaacacaccacu

SEQ ID NO: 1873317 - RNA, 19 nt, Artificial Sequence
  Description of Artificial Sequence: Synthetic oligonucleotide
  Sense strand starting at position 3392 of SEQ ID NO: 1564350
guguguuauuaauucuaga

SEQ ID NO: 1873318 - RNA, 19 nt, Artificial Sequence
  Description of Artificial Sequence: Synthetic oligonucleotide
  Antisense strand to SEQ ID NO: 1873317
ucuagaauuaauaacacac

SEQ ID NO: 1873319 - RNA, 19 nt, Artificial Sequence
  Description of Artificial Sequence: Synthetic oligonucleotide
  Sense strand starting at position 3496 of SEQ ID NO: 1564350
ggacaagugacuugucaag

SEQ ID NO: 1873320 - RNA, 19 nt, Artificial Sequence
  Description of Artificial Sequence: Synthetic oligonucleotide
  Antisense strand to SEQ ID NO: 1873319
cuugacaagucacuugucc

SEQ ID NO: 1873321 - RNA, 19 nt, Artificial Sequence
  Description of Artificial Sequence: Synthetic oligonucleotide
  Sense strand starting at position 3498 of SEQ ID NO: 1564350
acaagugacuugucaagug

SEQ ID NO: 1873322 - RNA, 19 nt, Artificial Sequence
  Description of Artificial Sequence: Synthetic oligonucleotide
  Antisense strand to SEQ ID NO: 1873321
cacuugacaagucacuugu

SEQ ID NO: 1873323 - RNA, 19 nt, Artificial Sequence
  Description of Artificial Sequence: Synthetic oligonucleotide
  Sense strand starting at position 3591 of SEQ ID NO: 1564350
augcaacagacguagucau

SEQ ID NO: 1873324 - RNA, 19 nt, Artificial Sequence
  Description of Artificial Sequence: Synthetic oligonucleotide
  Antisense strand to SEQ ID NO: 1873323
augacuacgucuguugcau

SEQ ID NO: 1873325 - RNA, 19 nt, Artificial Sequence
  Description of Artificial Sequence: Synthetic oligonucleotide
  Sense strand starting at position 3598 of SEQ ID NO: 1564350
agacguagucauuaacaac

SEQ ID NO: 1873326 - RNA, 19 nt, Artificial Sequence
  Description of Artificial Sequence: Synthetic oligonucleotide
  Antisense strand to SEQ ID NO: 1873325
guuguuaaugacuacgucu

SEQ ID NO: 1873327 - RNA, 19 nt, Artificial Sequence
  Description of Artificial Sequence: Synthetic oligonucleotide
  Sense strand starting at position 49 of SEQ ID NO: 1564351
aaccaagaagccuggugua

SEQ ID NO: 1873328 - RNA, 19 nt, Artificial Sequence
  Description of Artificial Sequence: Synthetic oligonucleotide
  Antisense strand to SEQ ID NO: 1873327
uacaccaggcuucuugguu

SEQ ID NO: 1873329 - RNA, 19 nt, Artificial Sequence
  Description of Artificial Sequence: Synthetic oligonucleotide
  Sense strand starting at position 368 of SEQ ID NO: 1564351
agcccugauucuccagaua

SEQ ID NO: 1873330 - RNA, 19 nt, Artificial Sequence
  Description of Artificial Sequence: Synthetic oligonucleotide
  Antisense strand to SEQ ID NO: 1873329
uaucuggagaaucagggcu

SEQ ID NO: 1873331 - RNA, 19 nt, Artificial Sequence
  Description of Artificial Sequence: Synthetic oligonucleotide
  Sense strand starting at position 436 of SEQ ID NO: 1564351
ccagguuuggucugagaac

SEQ ID NO: 1873332 - RNA, 19 nt, Artificial Sequence
  Description of Artificial Sequence: Synthetic oligonucleotide
  Antisense strand to SEQ ID NO: 1873331
guucucagaccaaaccugg

SEQ ID NO: 1873333 - RNA, 19 nt, Artificial Sequence
  Description of Artificial Sequence: Synthetic oligonucleotide
  Sense strand starting at position 443 of SEQ ID NO: 1564351
uggucugagaacuguugau

SEQ ID NO: 1873334 - RNA, 19 nt, Artificial Sequence
  Description of Artificial Sequence: Synthetic oligonucleotide
  Antisense strand to SEQ ID NO: 1873333
aucaacaguucucagacca

SEQ ID NO: 1873335 - RNA, 19 nt, Artificial Sequence
  Description of Artificial Sequence: Synthetic oligonucleotide
  Sense strand starting at position 449 of SEQ ID NO: 1564351
gagaacuguugauuccauc

SEQ ID NO: 1873336 - RNA, 19 nt, Artificial Sequence
  Description of Artificial Sequence: Synthetic oligonucleotide
  Antisense strand to SEQ ID NO: 1873335
gauggaaucaacaguucuc

SEQ ID NO: 1873337 - RNA, 19 nt, Artificial Sequence
  Description of Artificial Sequence: Synthetic oligonucleotide
  Sense strand starting at position 610 of SEQ ID NO: 1564351
ugcaguguuauuggagaau

SEQ ID NO: 1873338 - RNA, 19 nt, Artificial Sequence
  Description of Artificial Sequence: Synthetic oligonucleotide
  Antisense strand to SEQ ID NO: 1873337
auucuccaauaacacugca

SEQ ID NO: 1873339 - RNA, 19 nt, Artificial Sequence
  Description of Artificial Sequence: Synthetic oligonucleotide
  Sense strand starting at position 613 of SEQ ID NO: 1564351
aguguuauuggagaaucug

SEQ ID NO: 1873340 - RNA, 19 nt, Artificial Sequence
  Description of Artificial Sequence: Synthetic oligonucleotide
  Antisense strand to SEQ ID NO: 1873339
cagauucuccaauaacacu

SEQ ID NO: 1873341 - RNA, 19 nt, Artificial Sequence
  Description of Artificial Sequence: Synthetic oligonucleotide
  Sense strand starting at position 1064 of SEQ ID NO: 1564351
ccaugaguauggcuggaua

SEQ ID NO: 1873342 - RNA, 19 nt, Artificial Sequence
  Description of Artificial Sequence: Synthetic oligonucleotide
  Antisense strand to SEQ ID NO: 1873341
uauccagccauacucaugg

SEQ ID NO: 1873343 - RNA, 19 nt, Artificial Sequence
  Description of Artificial Sequence: Synthetic oligonucleotide
  Sense strand starting at position 1066 of SEQ ID NO: 1564351
augaguauggcuggauaug

SEQ ID NO: 1873344 - RNA, 19 nt, Artificial Sequence
  Description of Artificial Sequence: Synthetic oligonucleotide
  Antisense strand to SEQ ID NO: 1873343
cauauccagccauacucau

SEQ ID NO: 1873345 - RNA, 19 nt, Artificial Sequence
  Description of Artificial Sequence: Synthetic oligonucleotide
  Sense strand starting at position 1067 of SEQ ID NO: 1564351
ugaguauggcuggauaugu

SEQ ID NO: 1873346 - RNA, 19 nt, Artificial Sequence
  Description of Artificial Sequence: Synthetic oligonucleotide
  Antisense strand to SEQ ID NO: 1873345
acauauccagccauacuca

SEQ ID NO: 1873347 - RNA, 19 nt, Artificial Sequence
  Description of Artificial Sequence: Synthetic oligonucleotide
  Sense strand starting at position 1078 of SEQ ID NO: 1564351
ggauauguacugcagauua

SEQ ID NO: 1873348 - RNA, 19 nt, Artificial Sequence
  Description of Artificial Sequence: Synthetic oligonucleotide
  Antisense strand to SEQ ID NO: 1873347
uaaucugcaguacauaucc

SEQ ID NO: 1873349 - RNA, 19 nt, Artificial Sequence
  Description of Artificial Sequence: Synthetic oligonucleotide
  Sense strand starting at position 1111 of SEQ ID NO: 1564351
ggcaguagagguggucuua

SEQ ID NO: 1873350 - RNA, 19 nt, Artificial Sequence
  Description of Artificial Sequence: Synthetic oligonucleotide
  Antisense strand to SEQ ID NO: 1873349
uaagaccaccucuacugcc

SEQ ID NO: 1873351 - RNA, 19 nt, Artificial Sequence
  Description of Artificial Sequence: Synthetic oligonucleotide
  Sense strand starting at position 1121 of SEQ ID NO: 1564351
guggucuuagccugaauuc

SEQ ID NO: 1873352 - RNA, 19 nt, Artificial Sequence
  Description of Artificial Sequence: Synthetic oligonucleotide
  Antisense strand to SEQ ID NO: 1873351
gaauucaggcuaagaccac

SEQ ID NO: 1873353 - RNA, 19 nt, Artificial Sequence
  Description of Artificial Sequence: Synthetic oligonucleotide
  Sense strand starting at position 1144 of SEQ ID NO: 1564351
uuauauaggcucugagaca

SEQ ID NO: 1873354 - RNA, 19 nt, Artificial Sequence
  Description of Artificial Sequence: Synthetic oligonucleotide
  Antisense strand to SEQ ID NO: 1873353
ugucucagagccuauauaa

SEQ ID NO: 1873355 - RNA, 19 nt, Artificial Sequence
  Description of Artificial Sequence: Synthetic oligonucleotide
  Sense strand starting at position 1178 of SEQ ID NO: 1564351
uuggauuucucaugagcag

SEQ ID NO: 1873356 - RNA, 19 nt, Artificial Sequence
  Description of Artificial Sequence: Synthetic oligonucleotide
  Antisense strand to SEQ ID NO: 1873355
cugcucaugagaaauccaa

SEQ ID NO: 1873357 - RNA, 19 nt, Artificial Sequence
  Description of Artificial Sequence: Synthetic oligonucleotide
  Sense strand starting at position 1218 of SEQ ID NO: 1564351
agcauuuccgaaggcuuua

SEQ ID NO: 1873358 - RNA, 19 nt, Artificial Sequence
  Description of Artificial Sequence: Synthetic oligonucleotide
  Antisense strand to SEQ ID NO: 1873357
uaaagccuucggaaaugcu

SEQ ID NO: 1873359 - RNA, 19 nt, Artificial Sequence
  Description of Artificial Sequence: Synthetic oligonucleotide
  Sense strand starting at position 1742 of SEQ ID NO: 1564351
gagcuacgaucucuccuua

SEQ ID NO: 1873360 - RNA, 19 nt, Artificial Sequence
  Description of Artificial Sequence: Synthetic oligonucleotide
  Antisense strand to SEQ ID NO: 1873359
uaaggagagaucguagcuc

SEQ ID NO: 1873361 - RNA, 19 nt, Artificial Sequence
  Description of Artificial Sequence: Synthetic oligonucleotide
  Sense strand starting at position 2645 of SEQ ID NO: 1564351
cagucugagagucagaguu

SEQ ID NO: 1873362 - RNA, 19 nt, Artificial Sequence
  Description of Artificial Sequence: Synthetic oligonucleotide
  Antisense strand to SEQ ID NO: 1873361
aacucugacucucagacug

SEQ ID NO: 1873363 - RNA, 19 nt, Artificial Sequence
  Description of Artificial Sequence: Synthetic oligonucleotide
  Sense strand starting at position 2704 of SEQ ID NO: 1564351
guuaaauggcucuggcuca

SEQ ID NO: 1873364 - RNA, 19 nt, Artificial Sequence
  Description of Artificial Sequence: Synthetic oligonucleotide
  Antisense strand to SEQ ID NO: 1873363
ugagccagagccauuuaac

SEQ ID NO: 1873365 - RNA, 19 nt, Artificial Sequence
  Description of Artificial Sequence: Synthetic oligonucleotide
  Sense strand starting at position 2742 of SEQ ID NO: 1564351
aaccguuacugcuugauga

SEQ ID NO: 1873366 - RNA, 19 nt, Artificial Sequence
  Description of Artificial Sequence: Synthetic oligonucleotide
  Antisense strand to SEQ ID NO: 1873365
ucaucaagcaguaacgguu

SEQ ID NO: 1873367 - RNA, 19 nt, Artificial Sequence
  Description of Artificial Sequence: Synthetic oligonucleotide
  Sense strand starting at position 2811 of SEQ ID NO: 1564351
ggguaaguucugggaucuu

SEQ ID NO: 1873368 - RNA, 19 nt, Artificial Sequence
  Description of Artificial Sequence: Synthetic oligonucleotide
  Antisense strand to SEQ ID NO: 1873367
aagaucccagaacuuaccc

SEQ ID NO: 1873369 - RNA, 19 nt, Artificial Sequence
  Description of Artificial Sequence: Synthetic oligonucleotide
  Sense strand starting at position 2823 of SEQ ID NO: 1564351
ggaucuucucccugagucu

SEQ ID NO: 1873370 - RNA, 19 nt, Artificial Sequence
  Description of Artificial Sequence: Synthetic oligonucleotide
  Antisense strand to SEQ ID NO: 1873369
agacucagggagaagaucc

SEQ ID NO: 1873371 - RNA, 19 nt, Artificial Sequence
  Description of Artificial Sequence: Synthetic oligonucleotide
  Sense strand starting at position 2846 of SEQ ID NO: 1564351
gcaggagcucccuguauua

SEQ ID NO: 1873372 - RNA, 19 nt, Artificial Sequence
  Description of Artificial Sequence: Synthetic oligonucleotide
  Antisense strand to SEQ ID NO: 1873371
uaauacagggagcuccugc

SEQ ID NO: 1873373 - RNA, 19 nt, Artificial Sequence
  Description of Artificial Sequence: Synthetic oligonucleotide
  Sense strand starting at position 2857 of SEQ ID NO: 1564351
cuguauuaucuauggaguu

SEQ ID NO: 1873374 - RNA, 19 nt, Artificial Sequence
  Description of Artificial Sequence: Synthetic oligonucleotide
  Antisense strand to SEQ ID NO: 1873373
aacuccauagauaauacag

SEQ ID NO: 1873375 - RNA, 19 nt, Artificial Sequence
  Description of Artificial Sequence: Synthetic oligonucleotide
  Sense strand starting at position 3122 of SEQ ID NO: 1564351
ccuggaugguccuuagcau

SEQ ID NO: 1873376 - RNA, 19 nt, Artificial Sequence
  Description of Artificial Sequence: Synthetic oligonucleotide
  Antisense strand to SEQ ID NO: 1873375
augcuaaggaccauccagg

SEQ ID NO: 1873377 - RNA, 19 nt, Artificial Sequence
  Description of Artificial Sequence: Synthetic oligonucleotide
  Sense strand starting at position 3153 of SEQ ID NO: 1564351
gagguuaggcuagagaagu

SEQ ID NO: 1873378 - RNA, 19 nt, Artificial Sequence
  Description of Artificial Sequence: Synthetic oligonucleotide
  Antisense strand to SEQ ID NO: 1873377
acuucucuagccuaaccuc

SEQ ID NO: 1873379 - RNA, 19 nt, Artificial Sequence
  Description of Artificial Sequence: Synthetic oligonucleotide
  Sense strand starting at position 3154 of SEQ ID NO: 1564351
agguuaggcuagagaagug

SEQ ID NO: 1873380 - RNA, 19 nt, Artificial Sequence
  Description of Artificial Sequence: Synthetic oligonucleotide
  Antisense strand to SEQ ID NO: 1873379
cacuucucuagccuaaccu

SEQ ID NO: 1873381 - RNA, 19 nt, Artificial Sequence
  Description of Artificial Sequence: Synthetic oligonucleotide
  Sense strand starting at position 3234 of SEQ ID NO: 1564351
auucucaguccgcauuaua

SEQ ID NO: 1873382 - RNA, 19 nt, Artificial Sequence
  Description of Artificial Sequence: Synthetic oligonucleotide
  Antisense strand to SEQ ID NO: 1873381
uauaaugcggacugagaau

SEQ ID NO: 1873383 - RNA, 19 nt, Artificial Sequence
  Description of Artificial Sequence: Synthetic oligonucleotide
  Sense strand starting at position 3237 of SEQ ID NO: 1564351
cucaguccgcauuauauua

SEQ ID NO: 1873384 - RNA, 19 nt, Artificial Sequence
  Description of Artificial Sequence: Synthetic oligonucleotide
  Antisense strand to SEQ ID NO: 1873383
uaauauaaugcggacugag

SEQ ID NO: 1873385 - RNA, 19 nt, Artificial Sequence
  Description of Artificial Sequence: Synthetic oligonucleotide
  Sense strand starting at position 3259 of SEQ ID NO: 1564351
guuagagcacuuuacaauc

SEQ ID NO: 1873386 - RNA, 19 nt, Artificial Sequence
  Description of Artificial Sequence: Synthetic oligonucleotide
  Antisense strand to SEQ ID NO: 1873385
gauuguaaagugcucuaac

SEQ ID NO: 1873387 - RNA, 19 nt, Artificial Sequence
  Description of Artificial Sequence: Synthetic oligonucleotide
  Sense strand starting at position 3318 of SEQ ID NO: 1564351
gcauuuaguagccgaacua

SEQ ID NO: 1873388 - RNA, 19 nt, Artificial Sequence
  Description of Artificial Sequence: Synthetic oligonucleotide
  Antisense strand to SEQ ID NO: 1873387
uaguucggcuacuaaaugc

SEQ ID NO: 1873389 - RNA, 19 nt, Artificial Sequence
  Description of Artificial Sequence: Synthetic oligonucleotide
  Sense strand starting at position 3388 of SEQ ID NO: 1564351
guauccagugccuauucua

SEQ ID NO: 1873390 - RNA, 19 nt, Artificial Sequence
  Description of Artificial Sequence: Synthetic oligonucleotide
  Antisense strand to SEQ ID NO: 1873389
uagaauaggcacuggauac

SEQ ID NO: 1873391 - RNA, 19 nt, Artificial Sequence
  Description of Artificial Sequence: Synthetic oligonucleotide
  Sense strand starting at position 3464 of SEQ ID NO: 1564351
uguaguccucgggaguuua

SEQ ID NO: 1873392 - RNA, 19 nt, Artificial Sequence
  Description of Artificial Sequence: Synthetic oligonucleotide
  Antisense strand to SEQ ID NO: 1873391
uaaacucccgaggacuaca

SEQ ID NO: 1873393 - RNA, 19 nt, Artificial Sequence
  Description of Artificial Sequence: Synthetic oligonucleotide
  Sense strand starting at position 3533 of SEQ ID NO: 1564351
ccacauggccuugagguua

SEQ ID NO: 1873394 - RNA, 19 nt, Artificial Sequence
  Description of Artificial Sequence: Synthetic oligonucleotide
  Antisense strand to SEQ ID NO: 1873393
uaaccucaaggccaugugg

SEQ ID NO: 1873395 - RNA, 19 nt, Artificial Sequence
  Description of Artificial Sequence: Synthetic oligonucleotide
  Sense strand starting at position 3795 of SEQ ID NO: 1564351
ggaggugccuggucacuau

SEQ ID NO: 1873396 - RNA, 19 nt, Artificial Sequence
  Description of Artificial Sequence: Synthetic oligonucleotide
  Antisense strand to SEQ ID NO: 1873395
auagugaccaggcaccucc

SEQ ID NO: 1873397 - RNA, 19 nt, Artificial Sequence
  Description of Artificial Sequence: Synthetic oligonucleotide
  Sense strand starting at position 3799 of SEQ ID NO: 1564351
gugccuggucacuaucuuu

SEQ ID NO: 1873398 - RNA, 19 nt, Artificial Sequence
  Description of Artificial Sequence: Synthetic oligonucleotide
  Antisense strand to SEQ ID NO: 1873397
aaagauagugaccaggcac

SEQ ID NO: 1873399 - RNA, 19 nt, Artificial Sequence
  Description of Artificial Sequence: Synthetic oligonucleotide
  Sense strand starting at position 3849 of SEQ ID NO: 1564351
agugguguguuauuaauuc

SEQ ID NO: 1873400 - RNA, 19 nt, Artificial Sequence
  Description of Artificial Sequence: Synthetic oligonucleotide
  Antisense strand to SEQ ID NO: 1873399
gaauuaauaacacaccacu

SEQ ID NO: 1873401 - RNA, 19 nt, Artificial Sequence
  Description of Artificial Sequence: Synthetic oligonucleotide
  Sense strand starting at position 3853 of SEQ ID NO: 1564351
guguguuauuaauucuaga

SEQ ID NO: 1873402 - RNA, 19 nt, Artificial Sequence
  Description of Artificial Sequence: Synthetic oligonucleotide
  Antisense strand to SEQ ID NO: 1873401
ucuagaauuaauaacacac

SEQ ID NO: 1873403 - RNA, 19 nt, Artificial Sequence
  Description of Artificial Sequence: Synthetic oligonucleotide
  Sense strand starting at position 3957 of SEQ ID NO: 1564351
ggacaagugacuugucaag

SEQ ID NO: 1873404 - RNA, 19 nt, Artificial Sequence
  Description of Artificial Sequence: Synthetic oligonucleotide
  Antisense strand to SEQ ID NO: 1873403
cuugacaagucacuugucc

SEQ ID NO: 1873405 - RNA, 19 nt, Artificial Sequence
  Description of Artificial Sequence: Synthetic oligonucleotide
  Sense strand starting at position 3959 of SEQ ID NO: 1564351
acaagugacuugucaagug

SEQ ID NO: 1873406 - RNA, 19 nt, Artificial Sequence
  Description of Artificial Sequence: Synthetic oligonucleotide
  Antisense strand to SEQ ID NO: 1873405
cacuugacaagucacuugu

SEQ ID NO: 1873407 - RNA, 19 nt, Artificial Sequence
  Description of Artificial Sequence: Synthetic oligonucleotide
  Sense strand starting at position 230 of SEQ ID NO: 1564352
ccagaagcucuccagacuu

SEQ ID NO: 1873408 - RNA, 19 nt, Artificial Sequence
  Description of Artificial Sequence: Synthetic oligonucleotide
  Antisense strand to SEQ ID NO: 1873407
aagucuggagagcuucugg

SEQ ID NO: 1873409 - RNA, 19 nt, Artificial Sequence
  Description of Artificial Sequence: Synthetic oligonucleotide
  Sense strand starting at position 232 of SEQ ID NO: 1564352
agaagcucuccagacuuua

SEQ ID NO: 1873410 - RNA, 19 nt, Artificial Sequence
  Description of Artificial Sequence: Synthetic oligonucleotide
  Antisense strand to SEQ ID NO: 1873409
uaaagucuggagagcuucu

SEQ ID NO: 1873411 - RNA, 19 nt, Artificial Sequence
  Description of Artificial Sequence: Synthetic oligonucleotide
  Sense strand starting at position 300 of SEQ ID NO: 1564352
aucauuugcccuuguggau

SEQ ID NO: 1873412 - RNA, 19 nt, Artificial Sequence
  Description of Artificial Sequence: Synthetic oligonucleotide
  Antisense strand to SEQ ID NO: 1873411
auccacaagggcaaaugau

SEQ ID NO: 1873413 - RNA, 19 nt, Artificial Sequence
  Description of Artificial Sequence: Synthetic oligonucleotide
  Sense strand starting at position 470 of SEQ ID NO: 1564352
uuuaguacuuuagagauuc

SEQ ID NO: 1873414 - RNA, 19 nt, Artificial Sequence
  Description of Artificial Sequence: Synthetic oligonucleotide
  Antisense strand to SEQ ID NO: 1873413
gaaucucuaaaguacuaaa

SEQ ID NO: 1873415 - RNA, 19 nt, Artificial Sequence
  Description of Artificial Sequence: Synthetic oligonucleotide
  Sense strand starting at position 478 of SEQ ID NO: 1564352
uuuagagauuccgaggaua

SEQ ID NO: 1873416 - RNA, 19 nt, Artificial Sequence
  Description of Artificial Sequence: Synthetic oligonucleotide
  Antisense strand to SEQ ID NO: 1873415
uauccucggaaucucuaaa

SEQ ID NO: 1873417 - RNA, 19 nt, Artificial Sequence
  Description of Artificial Sequence: Synthetic oligonucleotide
  Sense strand starting at position 480 of SEQ ID NO: 1564352
uagagauuccgaggauauu

SEQ ID NO: 1873418 - RNA, 19 nt, Artificial Sequence
  Description of Artificial Sequence: Synthetic oligonucleotide
  Antisense strand to SEQ ID NO: 1873417
aauauccucggaaucucua

SEQ ID NO: 1873419 - RNA, 19 nt, Artificial Sequence
  Description of Artificial Sequence: Synthetic oligonucleotide
  Sense strand starting at position 499 of SEQ ID NO: 1564352
aggaguuguuugccaggaa

SEQ ID NO: 1873420 - RNA, 19 nt, Artificial Sequence
  Description of Artificial Sequence: Synthetic oligonucleotide
  Antisense strand to SEQ ID NO: 1873419
uuccuggcaaacaacuccu

SEQ ID NO: 1873421 - RNA, 19 nt, Artificial Sequence
  Description of Artificial Sequence: Synthetic oligonucleotide
  Sense strand starting at position 629 of SEQ ID NO: 1564352
accagugaaugguuauacu

SEQ ID NO: 1873422 - RNA, 19 nt, Artificial Sequence
  Description of Artificial Sequence: Synthetic oligonucleotide
  Antisense strand to SEQ ID NO: 1873421
aguauaaccauucacuggu

SEQ ID NO: 1873423 - RNA, 19 nt, Artificial Sequence
  Description of Artificial Sequence: Synthetic oligonucleotide
  Sense strand starting at position 638 of SEQ ID NO: 1564352
ugguuauacuguuugguac

SEQ ID NO: 1873424 - RNA, 19 nt, Artificial Sequence
  Description of Artificial Sequence: Synthetic oligonucleotide
  Antisense strand to SEQ ID NO: 1873423
guaccaaacaguauaacca

SEQ ID NO: 1873425 - RNA, 19 nt, Artificial Sequence
  Description of Artificial Sequence: Synthetic oligonucleotide
  Sense strand starting at position 639 of SEQ ID NO: 1564352
gguuauacuguuugguaca

SEQ ID NO: 1873426 - RNA, 19 nt, Artificial Sequence
  Description of Artificial Sequence: Synthetic oligonucleotide
  Antisense strand to SEQ ID NO: 1873425
uguaccaaacaguauaacc

SEQ ID NO: 1873427 - RNA, 19 nt, Artificial Sequence
  Description of Artificial Sequence: Synthetic oligonucleotide
  Sense strand starting at position 840 of SEQ ID NO: 1564352
guggcacgcacuuguaaua

SEQ ID NO: 1873428 - RNA, 19 nt, Artificial Sequence
  Description of Artificial Sequence: Synthetic oligonucleotide
  Antisense strand to SEQ ID NO: 1873427
uauuacaagugcgugccac

SEQ ID NO: 1873429 - RNA, 19 nt, Artificial Sequence
  Description of Artificial Sequence: Synthetic oligonucleotide
  Sense strand starting at position 998 of SEQ ID NO: 1564352
auauacuguuagcuauuga

SEQ ID NO: 1873430 - RNA, 19 nt, Artificial Sequence
  Description of Artificial Sequence: Synthetic oligonucleotide
  Antisense strand to SEQ ID NO: 1873429
ucaauagcuaacaguauau

SEQ ID NO: 1873431 - RNA, 19 nt, Artificial Sequence
  Description of Artificial Sequence: Synthetic oligonucleotide
  Sense strand starting at position 1230 of SEQ ID NO: 1564352
ugccaugcccggcaaauaa

SEQ ID NO: 1873432 - RNA, 19 nt, Artificial Sequence
  Description of Artificial Sequence: Synthetic oligonucleotide
  Antisense strand to SEQ ID NO: 1873431
uuauuugccgggcauggca

SEQ ID NO: 1873433 - RNA, 19 nt, Artificial Sequence
  Description of Artificial Sequence: Synthetic oligonucleotide
  Sense strand starting at position 1575 of SEQ ID NO: 1564352
auuauaguauuggagaaca

SEQ ID NO: 1873434 - RNA, 19 nt, Artificial Sequence
  Description of Artificial Sequence: Synthetic oligonucleotide
  Antisense strand to SEQ ID NO: 1873433
uguucuccaauacuauaau

SEQ ID NO: 1873435 - RNA, 19 nt, Artificial Sequence
  Description of Artificial Sequence: Synthetic oligonucleotide
  Sense strand starting at position 1634 of SEQ ID NO: 1564352
aagugaagugguugugucu

SEQ ID NO: 1873436 - RNA, 19 nt, Artificial Sequence
  Description of Artificial Sequence: Synthetic oligonucleotide
  Antisense strand to SEQ ID NO: 1873435
agacacaaccacuucacuu

SEQ ID NO: 1873437 - RNA, 19 nt, Artificial Sequence
  Description of Artificial Sequence: Synthetic oligonucleotide
  Sense strand starting at position 1637 of SEQ ID NO: 1564352
ugaagugguugugucuauu

SEQ ID NO: 1873438 - RNA, 19 nt, Artificial Sequence
  Description of Artificial Sequence: Synthetic oligonucleotide
  Antisense strand to SEQ ID NO: 1873437
aauagacacaaccacuuca

SEQ ID NO: 1873439 - RNA, 19 nt, Artificial Sequence
  Description of Artificial Sequence: Synthetic oligonucleotide
  Sense strand starting at position 1647 of SEQ ID NO: 1564352
gugucuauuuaaugacaac

SEQ ID NO: 1873440 - RNA, 19 nt, Artificial Sequence
  Description of Artificial Sequence: Synthetic oligonucleotide
  Antisense strand to SEQ ID NO: 1873439
guugucauuaaauagacac

SEQ ID NO: 1873441 - RNA, 19 nt, Artificial Sequence
  Description of Artificial Sequence: Synthetic oligonucleotide
  Sense strand starting at position 1685 of SEQ ID NO: 1564352
auggaaaugcucugcaugu

SEQ ID NO: 1873442 - RNA, 19 nt, Artificial Sequence
  Description of Artificial Sequence: Synthetic oligonucleotide
  Antisense strand to SEQ ID NO: 1873441
acaugcagagcauuuccau

SEQ ID NO: 1873443 - RNA, 19 nt, Artificial Sequence
  Description of Artificial Sequence: Synthetic oligonucleotide
  Sense strand starting at position 1686 of SEQ ID NO: 1564352
uggaaaugcucugcauguc

SEQ ID NO: 1873444 - RNA, 19 nt, Artificial Sequence
  Description of Artificial Sequence: Synthetic oligonucleotide
  Antisense strand to SEQ ID NO: 1873443
gacaugcagagcauuucca

SEQ ID NO: 1873445 - RNA, 19 nt, Artificial Sequence
  Description of Artificial Sequence: Synthetic oligonucleotide
  Sense strand starting at position 1687 of SEQ ID NO: 1564352
ggaaaugcucugcauguca

SEQ ID NO: 1873446 - RNA, 19 nt, Artificial Sequence
  Description of Artificial Sequence: Synthetic oligonucleotide
  Antisense strand to SEQ ID NO: 1873445
ugacaugcagagcauuucc

SEQ ID NO: 1873447 - RNA, 19 nt, Artificial Sequence
  Description of Artificial Sequence: Synthetic oligonucleotide
  Sense strand starting at position 1701 of SEQ ID NO: 1564352
ugucaauauccuggguauu

SEQ ID NO: 1873448 - RNA, 19 nt, Artificial Sequence
  Description of Artificial Sequence: Synthetic oligonucleotide
  Antisense strand to SEQ ID NO: 1873447
aauacccaggauauugaca

SEQ ID NO: 1873449 - RNA, 19 nt, Artificial Sequence
  Description of Artificial Sequence: Synthetic oligonucleotide
  Sense strand starting at position 1702 of SEQ ID NO: 1564352
gucaauauccuggguauua

SEQ ID NO: 1873450 - RNA, 19 nt, Artificial Sequence
  Description of Artificial Sequence: Synthetic oligonucleotide
  Antisense strand to SEQ ID NO: 1873449
uaauacccaggauauugac

SEQ ID NO: 1873451 - RNA, 19 nt, Artificial Sequence
  Description of Artificial Sequence: Synthetic oligonucleotide
  Sense strand starting at position 1703 of SEQ ID NO: 1564352
ucaauauccuggguauuac

SEQ ID NO: 1873452 - RNA, 19 nt, Artificial Sequence
  Description of Artificial Sequence: Synthetic oligonucleotide
  Antisense strand to SEQ ID NO: 1873451
guaauacccaggauauuga

SEQ ID NO: 1873453 - RNA, 19 nt, Artificial Sequence
  Description of Artificial Sequence: Synthetic oligonucleotide
  Sense strand starting at position 1712 of SEQ ID NO: 1564352
uggguauuacgagauguua

SEQ ID NO: 1873454 - RNA, 19 nt, Artificial Sequence
  Description of Artificial Sequence: Synthetic oligonucleotide
  Antisense strand to SEQ ID NO: 1873453
uaacaucucguaauaccca

SEQ ID NO: 1873455 - RNA, 19 nt, Artificial Sequence
  Description of Artificial Sequence: Synthetic oligonucleotide
  Sense strand starting at position 1714 of SEQ ID NO: 1564352
gguauuacgagauguuacu

SEQ ID NO: 1873456 - RNA, 19 nt, Artificial Sequence
  Description of Artificial Sequence: Synthetic oligonucleotide
  Antisense strand to SEQ ID NO: 1873455
aguaacaucucguaauacc

SEQ ID NO: 1873457 - RNA, 19 nt, Artificial Sequence
  Description of Artificial Sequence: Synthetic oligonucleotide
  Sense strand starting at position 2059 of SEQ ID NO: 1564352
guauccauaucaucagugu

SEQ ID NO: 1873458 - RNA, 19 nt, Artificial Sequence
  Description of Artificial Sequence: Synthetic oligonucleotide
  Antisense strand to SEQ ID NO: 1873457
acacugaugauauggauac

SEQ ID NO: 1873459 - RNA, 19 nt, Artificial Sequence
  Description of Artificial Sequence: Synthetic oligonucleotide
  Sense strand starting at position 2062 of SEQ ID NO: 1564352
uccauaucaucagugucau

SEQ ID NO: 1873460 - RNA, 19 nt, Artificial Sequence
  Description of Artificial Sequence: Synthetic oligonucleotide
  Antisense strand to SEQ ID NO: 1873459
augacacugaugauaugga

SEQ ID NO: 1873461 - RNA, 19 nt, Artificial Sequence
  Description of Artificial Sequence: Synthetic oligonucleotide
  Sense strand starting at position 2063 of SEQ ID NO: 1564352
ccauaucaucagugucauc

SEQ ID NO: 1873462 - RNA, 19 nt, Artificial Sequence
  Description of Artificial Sequence: Synthetic oligonucleotide
  Antisense strand to SEQ ID NO: 1873461
gaugacacugaugauaugg

SEQ ID NO: 1873463 - RNA, 19 nt, Artificial Sequence
  Description of Artificial Sequence: Synthetic oligonucleotide
  Sense strand starting at position 2068 of SEQ ID NO: 1564352
ucaucagugucaucccaca

SEQ ID NO: 1873464 - RNA, 19 nt, Artificial Sequence
  Description of Artificial Sequence: Synthetic oligonucleotide
  Antisense strand to SEQ ID NO: 1873463
ugugggaugacacugauga

SEQ ID NO: 1873465 - RNA, 19 nt, Artificial Sequence
  Description of Artificial Sequence: Synthetic oligonucleotide
  Sense strand starting at position 2282 of SEQ ID NO: 1564352
agugcuuaagggugcuuaa

SEQ ID NO: 1873466 - RNA, 19 nt, Artificial Sequence
  Description of Artificial Sequence: Synthetic oligonucleotide
  Antisense strand to SEQ ID NO: 1873465
uuaagcacccuuaagcacu

SEQ ID NO: 1873467 - RNA, 19 nt, Artificial Sequence
  Description of Artificial Sequence: Synthetic oligonucleotide
  Sense strand starting at position 2359 of SEQ ID NO: 1564352
cuggaaagcugauaaucua

SEQ ID NO: 1873468 - RNA, 19 nt, Artificial Sequence
  Description of Artificial Sequence: Synthetic oligonucleotide
  Antisense strand to SEQ ID NO: 1873467
uagauuaucagcuuuccag

SEQ ID NO: 1873469 - RNA, 19 nt, Artificial Sequence
  Description of Artificial Sequence: Synthetic oligonucleotide
  Sense strand starting at position 2833 of SEQ ID NO: 1564352
gccuaauguuauguauuac

SEQ ID NO: 1873470 - RNA, 19 nt, Artificial Sequence
  Description of Artificial Sequence: Synthetic oligonucleotide
  Antisense strand to SEQ ID NO: 1873469
guaauacauaacauuaggc

SEQ ID NO: 1873471 - RNA, 19 nt, Artificial Sequence
  Description of Artificial Sequence: Synthetic oligonucleotide
  Sense strand starting at position 2868 of SEQ ID NO: 1564352
gggaaacacucugcuguua

SEQ ID NO: 1873472 - RNA, 19 nt, Artificial Sequence
  Description of Artificial Sequence: Synthetic oligonucleotide
  Antisense strand to SEQ ID NO: 1873471
uaacagcagaguguuuccc

SEQ ID NO: 1873473 - RNA, 19 nt, Artificial Sequence
  Description of Artificial Sequence: Synthetic oligonucleotide
  Sense strand starting at position 3054 of SEQ ID NO: 1564352
uuaguacugucugcuauaa

SEQ ID NO: 1873474 - RNA, 19 nt, Artificial Sequence
  Description of Artificial Sequence: Synthetic oligonucleotide
  Antisense strand to SEQ ID NO: 1873473
uuauagcagacaguacuaa

SEQ ID NO: 1873475 - RNA, 19 nt, Artificial Sequence
  Description of Artificial Sequence: Synthetic oligonucleotide
  Sense strand starting at position 3227 of SEQ ID NO: 1564352
gugagacgcugucuuuaca

SEQ ID NO: 1873476 - RNA, 19 nt, Artificial Sequence
  Description of Artificial Sequence: Synthetic oligonucleotide
  Antisense strand to SEQ ID NO: 1873475
uguaaagacagcgucucac

SEQ ID NO: 1873477 - RNA, 19 nt, Artificial Sequence
  Description of Artificial Sequence: Synthetic oligonucleotide
  Sense strand starting at position 3230 of SEQ ID NO: 1564352
agacgcugucuuuacaaga

SEQ ID NO: 1873478 - RNA, 19 nt, Artificial Sequence
  Description of Artificial Sequence: Synthetic oligonucleotide
  Antisense strand to SEQ ID NO: 1873477
ucuuguaaagacagcgucu

SEQ ID NO: 1873479 - RNA, 19 nt, Artificial Sequence
  Description of Artificial Sequence: Synthetic oligonucleotide
  Sense strand starting at position 3253 of SEQ ID NO: 1564352
aaauaauccgaguguggug

SEQ ID NO: 1873480 - RNA, 19 nt, Artificial Sequence
  Description of Artificial Sequence: Synthetic oligonucleotide
  Antisense strand to SEQ ID NO: 1873479
caccacacucggauuauuu

SEQ ID NO: 1873481 - RNA, 19 nt, Artificial Sequence
  Description of Artificial Sequence: Synthetic oligonucleotide
  Sense strand starting at position 3309 of SEQ ID NO: 1564352
gcagaaggauagcuuaaga

SEQ ID NO: 1873482 - RNA, 19 nt, Artificial Sequence
  Description of Artificial Sequence: Synthetic oligonucleotide
  Antisense strand to SEQ ID NO: 1873481
ucuuaagcuauccuucugc

SEQ ID NO: 1873483 - RNA, 19 nt, Artificial Sequence
  Description of Artificial Sequence: Synthetic oligonucleotide
  Sense strand starting at position 3784 of SEQ ID NO: 1564352
agugacacuuuguuucuau

SEQ ID NO: 1873484 - RNA, 19 nt, Artificial Sequence
  Description of Artificial Sequence: Synthetic oligonucleotide
  Antisense strand to SEQ ID NO: 1873483
auagaaacaaagugucacu

SEQ ID NO: 1873485 - RNA, 19 nt, Artificial Sequence
  Description of Artificial Sequence: Synthetic oligonucleotide
  Sense strand starting at position 3785 of SEQ ID NO: 1564352
gugacacuuuguuucuauu

SEQ ID NO: 1873486 - RNA, 19 nt, Artificial Sequence
  Description of Artificial Sequence: Synthetic oligonucleotide
  Antisense strand to SEQ ID NO: 1873485
aauagaaacaaagugucac

SEQ ID NO: 1873487 - RNA, 19 nt, Artificial Sequence
  Description of Artificial Sequence: Synthetic oligonucleotide
  Sense strand starting at position 135 of SEQ ID NO: 1564353
cagguucccuaagagauuu

SEQ ID NO: 1873488 - RNA, 19 nt, Artificial Sequence
  Description of Artificial Sequence: Synthetic oligonucleotide
  Antisense strand to SEQ ID NO: 1873487
aaaucucuuagggaaccug

SEQ ID NO: 1873489 - RNA, 19 nt, Artificial Sequence
  Description of Artificial Sequence: Synthetic oligonucleotide
  Sense strand starting at position 174 of SEQ ID NO: 1564353
acaugaugucuccagcuca

SEQ ID NO: 1873490 - RNA, 19 nt, Artificial Sequence
  Description of Artificial Sequence: Synthetic oligonucleotide
  Antisense strand to SEQ ID NO: 1873489
ugagcuggagacaucaugu

SEQ ID NO: 1873491 - RNA, 19 nt, Artificial Sequence
  Description of Artificial Sequence: Synthetic oligonucleotide
  Sense strand starting at position 194 of SEQ ID NO: 1564353
ugaggaaagcuguagcaca

SEQ ID NO: 1873492 - RNA, 19 nt, Artificial Sequence
  Description of Artificial Sequence: Synthetic oligonucleotide
  Antisense strand to SEQ ID NO: 1873491
ugugcuacagcuuuccuca

SEQ ID NO: 1873493 - RNA, 19 nt, Artificial Sequence
  Description of Artificial Sequence: Synthetic oligonucleotide
  Sense strand starting at position 207 of SEQ ID NO: 1564353
agcacauaucugcaggaaa

SEQ ID NO: 1873494 - RNA, 19 nt, Artificial Sequence
  Description of Artificial Sequence: Synthetic oligonucleotide
  Antisense strand to SEQ ID NO: 1873493
uuuccugcagauaugugcu

SEQ ID NO: 1873495 - RNA, 19 nt, Artificial Sequence
  Description of Artificial Sequence: Synthetic oligonucleotide
  Sense strand starting at position 337 of SEQ ID NO: 1564353
ugugcucucuccugaugag

SEQ ID NO: 1873496 - RNA, 19 nt, Artificial Sequence
  Description of Artificial Sequence: Synthetic oligonucleotide
  Antisense strand to SEQ ID NO: 1873495
cucaucaggagagagcaca

SEQ ID NO: 1873497 - RNA, 19 nt, Artificial Sequence
  Description of Artificial Sequence: Synthetic oligonucleotide
  Sense strand starting at position 338 of SEQ ID NO: 1564353
gugcucucuccugaugagu

SEQ ID NO: 1873498 - RNA, 19 nt, Artificial Sequence
  Description of Artificial Sequence: Synthetic oligonucleotide
  Antisense strand to SEQ ID NO: 1873497
acucaucaggagagagcac

SEQ ID NO: 1873499 - RNA, 19 nt, Artificial Sequence
  Description of Artificial Sequence: Synthetic oligonucleotide
  Sense strand starting at position 340 of SEQ ID NO: 1564353
gcucucuccugaugaguaa

SEQ ID NO: 1873500 - RNA, 19 nt, Artificial Sequence
  Description of Artificial Sequence: Synthetic oligonucleotide
  Antisense strand to SEQ ID NO: 1873499
uuacucaucaggagagagc

SEQ ID NO: 1873501 - RNA, 19 nt, Artificial Sequence
  Description of Artificial Sequence: Synthetic oligonucleotide
  Sense strand starting at position 362 of SEQ ID NO: 1564353
gagccaagguacugguuau

SEQ ID NO: 1873502 - RNA, 19 nt, Artificial Sequence
  Description of Artificial Sequence: Synthetic oligonucleotide
  Antisense strand to SEQ ID NO: 1873501
auaaccaguaccuuggcuc

SEQ ID NO: 1873503 - RNA, 19 nt, Artificial Sequence
  Description of Artificial Sequence: Synthetic oligonucleotide
  Sense strand starting at position 481 of SEQ ID NO: 1564353
cuugaucuguugucucuua

SEQ ID NO: 1873504 - RNA, 19 nt, Artificial Sequence
  Description of Artificial Sequence: Synthetic oligonucleotide
  Antisense strand to SEQ ID NO: 1873503
uaagagacaacagaucaag

SEQ ID NO: 1873505 - RNA, 19 nt, Artificial Sequence
  Description of Artificial Sequence: Synthetic oligonucleotide
  Sense strand starting at position 482 of SEQ ID NO: 1564353
uugaucuguugucucuuau

SEQ ID NO: 1873506 - RNA, 19 nt, Artificial Sequence
  Description of Artificial Sequence: Synthetic oligonucleotide
  Antisense strand to SEQ ID NO: 1873505
auaagagacaacagaucaa

SEQ ID NO: 1873507 - RNA, 19 nt, Artificial Sequence
  Description of Artificial Sequence: Synthetic oligonucleotide
  Sense strand starting at position 565 of SEQ ID NO: 1564353
ucgucacauccacaguaaa

SEQ ID NO: 1873508 - RNA, 19 nt, Artificial Sequence
  Description of Artificial Sequence: Synthetic oligonucleotide
  Antisense strand to SEQ ID NO: 1873507
uuuacuguggaugugacga

SEQ ID NO: 1873509 - RNA, 19 nt, Artificial Sequence
  Description of Artificial Sequence: Synthetic oligonucleotide
  Sense strand starting at position 633 of SEQ ID NO: 1564353
uccugcucuucuugggaaa

SEQ ID NO: 1873510 - RNA, 19 nt, Artificial Sequence
  Description of Artificial Sequence: Synthetic oligonucleotide
  Antisense strand to SEQ ID NO: 1873509
uuucccaagaagagcagga

SEQ ID NO: 1873511 - RNA, 19 nt, Artificial Sequence
  Description of Artificial Sequence: Synthetic oligonucleotide
  Sense strand starting at position 735 of SEQ ID NO: 1564353
agaauuagcugccuagcaa

SEQ ID NO: 1873512 - RNA, 19 nt, Artificial Sequence
  Description of Artificial Sequence: Synthetic oligonucleotide
  Antisense strand to SEQ ID NO: 1873511
uugcuaggcagcuaauucu

SEQ ID NO: 1873513 - RNA, 19 nt, Artificial Sequence
  Description of Artificial Sequence: Synthetic oligonucleotide
  Sense strand starting at position 776 of SEQ ID NO: 1564353
cagacugcucucuggaaga

SEQ ID NO: 1873514 - RNA, 19 nt, Artificial Sequence
  Description of Artificial Sequence: Synthetic oligonucleotide
  Antisense strand to SEQ ID NO: 1873513
ucuuccagagagcagucug

SEQ ID NO: 1873515 - RNA, 19 nt, Artificial Sequence
  Description of Artificial Sequence: Synthetic oligonucleotide
  Sense strand starting at position 778 of SEQ ID NO: 1564353
gacugcucucuggaagagu

SEQ ID NO: 1873516 - RNA, 19 nt, Artificial Sequence
  Description of Artificial Sequence: Synthetic oligonucleotide
  Antisense strand to SEQ ID NO: 1873515
acucuuccagagagcaguc

SEQ ID NO: 1873517 - RNA, 19 nt, Artificial Sequence
  Description of Artificial Sequence: Synthetic oligonucleotide
  Sense strand starting at position 786 of SEQ ID NO: 1564353
ucuggaagagucugggcaa

SEQ ID NO: 1873518 - RNA, 19 nt, Artificial Sequence
  Description of Artificial Sequence: Synthetic oligonucleotide
  Antisense strand to SEQ ID NO: 1873517
uugcccagacucuuccaga

SEQ ID NO: 1873519 - RNA, 19 nt, Artificial Sequence
  Description of Artificial Sequence: Synthetic oligonucleotide
  Sense strand starting at position 891 of SEQ ID NO: 1564353
uguacugacccauaaagug

SEQ ID NO: 1873520 - RNA, 19 nt, Artificial Sequence
  Description of Artificial Sequence: Synthetic oligonucleotide
  Antisense strand to SEQ ID NO: 1873519
cacuuuaugggucaguaca

SEQ ID NO: 1873521 - RNA, 19 nt, Artificial Sequence
  Description of Artificial Sequence: Synthetic oligonucleotide
  Sense strand starting at position 954 of SEQ ID NO: 1564353
ucauaauuucucugcacgu

SEQ ID NO: 1873522 - RNA, 19 nt, Artificial Sequence
  Description of Artificial Sequence: Synthetic oligonucleotide
  Antisense strand to SEQ ID NO: 1873521
acgugcagagaaauuauga

SEQ ID NO: 1873523 - RNA, 19 nt, Artificial Sequence
  Description of Artificial Sequence: Synthetic oligonucleotide
  Sense strand starting at position 1008 of SEQ ID NO: 1564353
cuuaaacgauccucuauga

SEQ ID NO: 1873524 - RNA, 19 nt, Artificial Sequence
  Description of Artificial Sequence: Synthetic oligonucleotide
  Antisense strand to SEQ ID NO: 1873523
ucauagaggaucguuuaag

SEQ ID NO: 1873525 - RNA, 19 nt, Artificial Sequence
  Description of Artificial Sequence: Synthetic oligonucleotide
  Sense strand starting at position 1088 of SEQ ID NO: 1564353
guuauauggaacuguacag

SEQ ID NO: 1873526 - RNA, 19 nt, Artificial Sequence
  Description of Artificial Sequence: Synthetic oligonucleotide
  Antisense strand to SEQ ID NO: 1873525
cuguacaguuccauauaac

SEQ ID NO: 1873527 - RNA, 19 nt, Artificial Sequence
  Description of Artificial Sequence: Synthetic oligonucleotide
  Sense strand starting at position 1095 of SEQ ID NO: 1564353
ggaacuguacaguaucuau

SEQ ID NO: 1873528 - RNA, 19 nt, Artificial Sequence
  Description of Artificial Sequence: Synthetic oligonucleotide
  Antisense strand to SEQ ID NO: 1873527
auagauacuguacaguucc

SEQ ID NO: 1873529 - RNA, 19 nt, Artificial Sequence
  Description of Artificial Sequence: Synthetic oligonucleotide
  Sense strand starting at position 1110 of SEQ ID NO: 1564353
cuaugcacuuugugguaua

SEQ ID NO: 1873530 - RNA, 19 nt, Artificial Sequence
  Description of Artificial Sequence: Synthetic oligonucleotide
  Antisense strand to SEQ ID NO: 1873529
uauaccacaaagugcauag

SEQ ID NO: 1873531 - RNA, 19 nt, Artificial Sequence
  Description of Artificial Sequence: Synthetic oligonucleotide
  Sense strand starting at position 1111 of SEQ ID NO: 1564353
uaugcacuuugugguauau

SEQ ID NO: 1873532 - RNA, 19 nt, Artificial Sequence
  Description of Artificial Sequence: Synthetic oligonucleotide
  Antisense strand to SEQ ID NO: 1873531
auauaccacaaagugcaua

SEQ ID NO: 1873533 - RNA, 19 nt, Artificial Sequence
  Description of Artificial Sequence: Synthetic oligonucleotide
  Sense strand starting at position 1113 of SEQ ID NO: 1564353
ugcacuuugugguauaugu

SEQ ID NO: 1873534 - RNA, 19 nt, Artificial Sequence
  Description of Artificial Sequence: Synthetic oligonucleotide
  Antisense strand to SEQ ID NO: 1873533
acauauaccacaaagugca

SEQ ID NO: 1873535 - RNA, 19 nt, Artificial Sequence
  Description of Artificial Sequence: Synthetic oligonucleotide
  Sense strand starting at position 1115 of SEQ ID NO: 1564353
cacuuugugguauauguau

SEQ ID NO: 1873536 - RNA, 19 nt, Artificial Sequence
  Description of Artificial Sequence: Synthetic oligonucleotide
  Antisense strand to SEQ ID NO: 1873535
auacauauaccacaaagug

SEQ ID NO: 1873537 - RNA, 19 nt, Artificial Sequence
  Description of Artificial Sequence: Synthetic oligonucleotide
  Sense strand starting at position 1122 of SEQ ID NO: 1564353
ugguauauguaucucaacu

SEQ ID NO: 1873538 - RNA, 19 nt, Artificial Sequence
  Description of Artificial Sequence: Synthetic oligonucleotide
  Antisense strand to SEQ ID NO: 1873537
aguugagauacauauacca

SEQ ID NO: 1873539 - RNA, 19 nt, Artificial Sequence
  Description of Artificial Sequence: Synthetic oligonucleotide
  Sense strand starting at position 1124 of SEQ ID NO: 1564353
guauauguaucucaacuaa

SEQ ID NO: 1873540 - RNA, 19 nt, Artificial Sequence
  Description of Artificial Sequence: Synthetic oligonucleotide
  Antisense strand to SEQ ID NO: 1873539
uuaguugagauacauauac

SEQ ID NO: 1873541 - RNA, 19 nt, Artificial Sequence
  Description of Artificial Sequence: Synthetic oligonucleotide
  Sense strand starting at position 1172 of SEQ ID NO: 1564353
uaaggugaauuacaaagua

SEQ ID NO: 1873542 - RNA, 19 nt, Artificial Sequence
  Description of Artificial Sequence: Synthetic oligonucleotide
  Antisense strand to SEQ ID NO: 1873541
uacuuuguaauucaccuua

SEQ ID NO: 1873543 - RNA, 19 nt, Artificial Sequence
  Description of Artificial Sequence: Synthetic oligonucleotide
  Sense strand starting at position 1301 of SEQ ID NO: 1564353
agaauuaguuccuguugau

SEQ ID NO: 1873544 - RNA, 19 nt, Artificial Sequence
  Description of Artificial Sequence: Synthetic oligonucleotide
  Antisense strand to SEQ ID NO: 1873543
aucaacaggaacuaauucu

SEQ ID NO: 1873545 - RNA, 19 nt, Artificial Sequence
  Description of Artificial Sequence: Synthetic oligonucleotide
  Sense strand starting at position 2210 of SEQ ID NO: 1564353
gucgcaaagcgguuguuua

SEQ ID NO: 1873546 - RNA, 19 nt, Artificial Sequence
  Description of Artificial Sequence: Synthetic oligonucleotide
  Antisense strand to SEQ ID NO: 1873545
uaaacaaccgcuuugcgac

SEQ ID NO: 1873547 - RNA, 19 nt, Artificial Sequence
  Description of Artificial Sequence: Synthetic oligonucleotide
  Sense strand starting at position 2214 of SEQ ID NO: 1564353
caaagcgguuguuuacuua

SEQ ID NO: 1873548 - RNA, 19 nt, Artificial Sequence
  Description of Artificial Sequence: Synthetic oligonucleotide
  Antisense strand to SEQ ID NO: 1873547
uaaguaaacaaccgcuuug

SEQ ID NO: 1873549 - RNA, 19 nt, Artificial Sequence
  Description of Artificial Sequence: Synthetic oligonucleotide
  Sense strand starting at position 2218 of SEQ ID NO: 1564353
gcgguuguuuacuuaguua

SEQ ID NO: 1873550 - RNA, 19 nt, Artificial Sequence
  Description of Artificial Sequence: Synthetic oligonucleotide
  Antisense strand to SEQ ID NO: 1873549
uaacuaaguaaacaaccgc

SEQ ID NO: 1873551 - RNA, 19 nt, Artificial Sequence
  Description of Artificial Sequence: Synthetic oligonucleotide
  Sense strand starting at position 2222 of SEQ ID NO: 1564353
uuguuuacuuaguuaugca

SEQ ID NO: 1873552 - RNA, 19 nt, Artificial Sequence
  Description of Artificial Sequence: Synthetic oligonucleotide
  Antisense strand to SEQ ID NO: 1873551
ugcauaacuaaguaaacaa

SEQ ID NO: 1873553 - RNA, 19 nt, Artificial Sequence
  Description of Artificial Sequence: Synthetic oligonucleotide
  Sense strand starting at position 118 of SEQ ID NO: 1564354
cagguucccuaagagauuu

SEQ ID NO: 1873554 - RNA, 19 nt, Artificial Sequence
  Description of Artificial Sequence: Synthetic oligonucleotide
  Antisense strand to SEQ ID NO: 1873553
aaaucucuuagggaaccug

SEQ ID NO: 1873555 - RNA, 19 nt, Artificial Sequence
  Description of Artificial Sequence: Synthetic oligonucleotide
  Sense strand starting at position 157 of SEQ ID NO: 1564354
acaugaugucuccagcuca

SEQ ID NO: 1873556 - RNA, 19 nt, Artificial Sequence
  Description of Artificial Sequence: Synthetic oligonucleotide
  Antisense strand to SEQ ID NO: 1873555
ugagcuggagacaucaugu

SEQ ID NO: 1873557 - RNA, 19 nt, Artificial Sequence
  Description of Artificial Sequence: Synthetic oligonucleotide
  Sense strand starting at position 177 of SEQ ID NO: 1564354
ugaggaaagcuguagcaca

SEQ ID NO: 1873558 - RNA, 19 nt, Artificial Sequence
  Description of Artificial Sequence: Synthetic oligonucleotide
  Antisense strand to SEQ ID NO: 1873557
ugugcuacagcuuuccuca

SEQ ID NO: 1873559 - RNA, 19 nt, Artificial Sequence
  Description of Artificial Sequence: Synthetic oligonucleotide
  Sense strand starting at position 190 of SEQ ID NO: 1564354
agcacauaucugcaggaaa

SEQ ID NO: 1873560 - RNA, 19 nt, Artificial Sequence
  Description of Artificial Sequence: Synthetic oligonucleotide
  Antisense strand to SEQ ID NO: 1873559
uuuccugcagauaugugcu

SEQ ID NO: 1873561 - RNA, 19 nt, Artificial Sequence
  Description of Artificial Sequence: Synthetic oligonucleotide
  Sense strand starting at position 320 of SEQ ID NO: 1564354
ugugcucucuccugaugag

SEQ ID NO: 1873562 - RNA, 19 nt, Artificial Sequence
  Description of Artificial Sequence: Synthetic oligonucleotide
  Antisense strand to SEQ ID NO: 1873561
cucaucaggagagagcaca

SEQ ID NO: 1873563 - RNA, 19 nt, Artificial Sequence
  Description of Artificial Sequence: Synthetic oligonucleotide
  Sense strand starting at position 321 of SEQ ID NO: 1564354
gugcucucuccugaugagu

SEQ ID NO: 1873564 - RNA, 19 nt, Artificial Sequence
  Description of Artificial Sequence: Synthetic oligonucleotide
  Antisense strand to SEQ ID NO: 1873563
acucaucaggagagagcac

SEQ ID NO: 1873565 - RNA, 19 nt, Artificial Sequence
  Description of Artificial Sequence: Synthetic oligonucleotide
  Sense strand starting at position 323 of SEQ ID NO: 1564354
gcucucuccugaugaguaa

SEQ ID NO: 1873566 - RNA, 19 nt, Artificial Sequence
  Description of Artificial Sequence: Synthetic oligonucleotide
  Antisense strand to SEQ ID NO: 1873565
uuacucaucaggagagagc

SEQ ID NO: 1873567 - RNA, 19 nt, Artificial Sequence
  Description of Artificial Sequence: Synthetic oligonucleotide
  Sense strand starting at position 345 of SEQ ID NO: 1564354
gagccaagguacugguuau

SEQ ID NO: 1873568 - RNA, 19 nt, Artificial Sequence
  Description of Artificial Sequence: Synthetic oligonucleotide
  Antisense strand to SEQ ID NO: 1873567
auaaccaguaccuuggcuc

SEQ ID NO: 1873569 - RNA, 19 nt, Artificial Sequence
  Description of Artificial Sequence: Synthetic oligonucleotide
  Sense strand starting at position 464 of SEQ ID NO: 1564354
cuugaucuguugucucuua

SEQ ID NO: 1873570 - RNA, 19 nt, Artificial Sequence
  Description of Artificial Sequence: Synthetic oligonucleotide
  Antisense strand to SEQ ID NO: 1873569
uaagagacaacagaucaag

SEQ ID NO: 1873571 - RNA, 19 nt, Artificial Sequence
  Description of Artificial Sequence: Synthetic oligonucleotide
  Sense strand starting at position 465 of SEQ ID NO: 1564354
uugaucuguugucucuuau

SEQ ID NO: 1873572 - RNA, 19 nt, Artificial Sequence
  Description of Artificial Sequence: Synthetic oligonucleotide
  Antisense strand to SEQ ID NO: 1873571
auaagagacaacagaucaa

SEQ ID NO: 1873573 - RNA, 19 nt, Artificial Sequence
  Description of Artificial Sequence: Synthetic oligonucleotide
  Sense strand starting at position 548 of SEQ ID NO: 1564354
ucgucacauccacaguaaa

SEQ ID NO: 1873574 - RNA, 19 nt, Artificial Sequence
  Description of Artificial Sequence: Synthetic oligonucleotide
  Antisense strand to SEQ ID NO: 1873573
uuuacuguggaugugacga

SEQ ID NO: 1873575 - RNA, 19 nt, Artificial Sequence
  Description of Artificial Sequence: Synthetic oligonucleotide
  Sense strand starting at position 616 of SEQ ID NO: 1564354
uccugcucuucuugggaaa

SEQ ID NO: 1873576 - RNA, 19 nt, Artificial Sequence
  Description of Artificial Sequence: Synthetic oligonucleotide
  Antisense strand to SEQ ID NO: 1873575
uuucccaagaagagcagga

SEQ ID NO: 1873577 - RNA, 19 nt, Artificial Sequence
  Description of Artificial Sequence: Synthetic oligonucleotide
  Sense strand starting at position 718 of SEQ ID NO: 1564354
agaauuagcugccuagcaa

SEQ ID NO: 1873578 - RNA, 19 nt, Artificial Sequence
  Description of Artificial Sequence: Synthetic oligonucleotide
  Antisense strand to SEQ ID NO: 1873577
uugcuaggcagcuaauucu

SEQ ID NO: 1873579 - RNA, 19 nt, Artificial Sequence
  Description of Artificial Sequence: Synthetic oligonucleotide
  Sense strand starting at position 759 of SEQ ID NO: 1564354
cagacugcucucuggaaga

SEQ ID NO: 1873580 - RNA, 19 nt, Artificial Sequence
  Description of Artificial Sequence: Synthetic oligonucleotide
  Antisense strand to SEQ ID NO: 1873579
ucuuccagagagcagucug

SEQ ID NO: 1873581 - RNA, 19 nt, Artificial Sequence
  Description of Artificial Sequence: Synthetic oligonucleotide
  Sense strand starting at position 761 of SEQ ID NO: 1564354
gacugcucucuggaagagu

SEQ ID NO: 1873582 - RNA, 19 nt, Artificial Sequence
  Description of Artificial Sequence: Synthetic oligonucleotide
  Antisense strand to SEQ ID NO: 1873581
acucuuccagagagcaguc

SEQ ID NO: 1873583 - RNA, 19 nt, Artificial Sequence
  Description of Artificial Sequence: Synthetic oligonucleotide
  Sense strand starting at position 769 of SEQ ID NO: 1564354
ucuggaagagucugggcaa

SEQ ID NO: 1873584 - RNA, 19 nt, Artificial Sequence
  Description of Artificial Sequence: Synthetic oligonucleotide
  Antisense strand to SEQ ID NO: 1873583
uugcccagacucuuccaga

SEQ ID NO: 1873585 - RNA, 19 nt, Artificial Sequence
  Description of Artificial Sequence: Synthetic oligonucleotide
  Sense strand starting at position 874 of SEQ ID NO: 1564354
uguacugacccauaaagug

SEQ ID NO: 1873586 - RNA, 19 nt, Artificial Sequence
  Description of Artificial Sequence: Synthetic oligonucleotide
  Antisense strand to SEQ ID NO: 1873585
cacuuuaugggucaguaca

SEQ ID NO: 1873587 - RNA, 19 nt, Artificial Sequence
  Description of Artificial Sequence: Synthetic oligonucleotide
  Sense strand starting at position 937 of SEQ ID NO: 1564354
ucauaauuucucugcacgu

SEQ ID NO: 1873588 - RNA, 19 nt, Artificial Sequence
  Description of Artificial Sequence: Synthetic oligonucleotide
  Antisense strand to SEQ ID NO: 1873587
acgugcagagaaauuauga

SEQ ID NO: 1873589 - RNA, 19 nt, Artificial Sequence
  Description of Artificial Sequence: Synthetic oligonucleotide
  Sense strand starting at position 991 of SEQ ID NO: 1564354
cuuaaacgauccucuauga

SEQ ID NO: 1873590 - RNA, 19 nt, Artificial Sequence
  Description of Artificial Sequence: Synthetic oligonucleotide
  Antisense strand to SEQ ID NO: 1873589
ucauagaggaucguuuaag

SEQ ID NO: 1873591 - RNA, 19 nt, Artificial Sequence
  Description of Artificial Sequence: Synthetic oligonucleotide
  Sense strand starting at position 1071 of SEQ ID NO: 1564354
guuauauggaacuguacag

SEQ ID NO: 1873592 - RNA, 19 nt, Artificial Sequence
  Description of Artificial Sequence: Synthetic oligonucleotide
  Antisense strand to SEQ ID NO: 1873591
cuguacaguuccauauaac

SEQ ID NO: 1873593 - RNA, 19 nt, Artificial Sequence
  Description of Artificial Sequence: Synthetic oligonucleotide
  Sense strand starting at position 1078 of SEQ ID NO: 1564354
ggaacuguacaguaucuau

SEQ ID NO: 1873594 - RNA, 19 nt, Artificial Sequence
  Description of Artificial Sequence: Synthetic oligonucleotide
  Antisense strand to SEQ ID NO: 1873593
auagauacuguacaguucc

SEQ ID NO: 1873595 - RNA, 19 nt, Artificial Sequence
  Description of Artificial Sequence: Synthetic oligonucleotide
  Sense strand starting at position 1093 of SEQ ID NO: 1564354
cuaugcacuuugugguaua

SEQ ID NO: 1873596 - RNA, 19 nt, Artificial Sequence
  Description of Artificial Sequence: Synthetic oligonucleotide
  Antisense strand to SEQ ID NO: 1873595
uauaccacaaagugcauag

SEQ ID NO: 1873597 - RNA, 19 nt, Artificial Sequence
  Description of Artificial Sequence: Synthetic oligonucleotide
  Sense strand starting at position 1094 of SEQ ID NO: 1564354
uaugcacuuugugguauau

SEQ ID NO: 1873598 - RNA, 19 nt, Artificial Sequence
  Description of Artificial Sequence: Synthetic oligonucleotide
  Antisense strand to SEQ ID NO: 1873597
auauaccacaaagugcaua

SEQ ID NO: 1873599 - RNA, 19 nt, Artificial Sequence
  Description of Artificial Sequence: Synthetic oligonucleotide
  Sense strand starting at position 1096 of SEQ ID NO: 1564354
ugcacuuugugguauaugu

SEQ ID NO: 1873600 - RNA, 19 nt, Artificial Sequence
  Description of Artificial Sequence: Synthetic oligonucleotide
  Antisense strand to SEQ ID NO: 1873599
acauauaccacaaagugca

SEQ ID NO: 1873601 - RNA, 19 nt, Artificial Sequence
  Description of Artificial Sequence: Synthetic oligonucleotide
  Sense strand starting at position 1098 of SEQ ID NO: 1564354
cacuuugugguauauguau

SEQ ID NO: 1873602 - RNA, 19 nt, Artificial Sequence
  Description of Artificial Sequence: Synthetic oligonucleotide
  Antisense strand to SEQ ID NO: 1873601
auacauauaccacaaagug

SEQ ID NO: 1873603 - RNA, 19 nt, Artificial Sequence
  Description of Artificial Sequence: Synthetic oligonucleotide
  Sense strand starting at position 1105 of SEQ ID NO: 1564354
ugguauauguaucucaacu

SEQ ID NO: 1873604 - RNA, 19 nt, Artificial Sequence
  Description of Artificial Sequence: Synthetic oligonucleotide
  Antisense strand to SEQ ID NO: 1873603
aguugagauacauauacca

SEQ ID NO: 1873605 - RNA, 19 nt, Artificial Sequence
  Description of Artificial Sequence: Synthetic oligonucleotide
  Sense strand starting at position 1107 of SEQ ID NO: 1564354
guauauguaucucaacuaa

SEQ ID NO: 1873606 - RNA, 19 nt, Artificial Sequence
  Description of Artificial Sequence: Synthetic oligonucleotide
  Antisense strand to SEQ ID NO: 1873605
uuaguugagauacauauac

SEQ ID NO: 1873607 - RNA, 19 nt, Artificial Sequence
  Description of Artificial Sequence: Synthetic oligonucleotide
  Sense strand starting at position 1155 of SEQ ID NO: 1564354
uaaggugaauuacaaagua

SEQ ID NO: 1873608 - RNA, 19 nt, Artificial Sequence
  Description of Artificial Sequence: Synthetic oligonucleotide
  Antisense strand to SEQ ID NO: 1873607
uacuuuguaauucaccuua

SEQ ID NO: 1873609 - RNA, 19 nt, Artificial Sequence
  Description of Artificial Sequence: Synthetic oligonucleotide
  Sense strand starting at position 1284 of SEQ ID NO: 1564354
agaauuaguuccuguugau

SEQ ID NO: 1873610 - RNA, 19 nt, Artificial Sequence
  Description of Artificial Sequence: Synthetic oligonucleotide
  Antisense strand to SEQ ID NO: 1873609
aucaacaggaacuaauucu

SEQ ID NO: 1873611 - RNA, 19 nt, Artificial Sequence
  Description of Artificial Sequence: Synthetic oligonucleotide
  Sense strand starting at position 2193 of SEQ ID NO: 1564354
gucgcaaagcgguuguuua

SEQ ID NO: 1873612 - RNA, 19 nt, Artificial Sequence
  Description of Artificial Sequence: Synthetic oligonucleotide
  Antisense strand to SEQ ID NO: 1873611
uaaacaaccgcuuugcgac

SEQ ID NO: 1873613 - RNA, 19 nt, Artificial Sequence
  Description of Artificial Sequence: Synthetic oligonucleotide
  Sense strand starting at position 2197 of SEQ ID NO: 1564354
caaagcgguuguuuacuua

SEQ ID NO: 1873614 - RNA, 19 nt, Artificial Sequence
  Description of Artificial Sequence: Synthetic oligonucleotide
  Antisense strand to SEQ ID NO: 1873613
uaaguaaacaaccgcuuug

SEQ ID NO: 1873615 - RNA, 19 nt, Artificial Sequence
  Description of Artificial Sequence: Synthetic oligonucleotide
  Sense strand starting at position 2201 of SEQ ID NO: 1564354
gcgguuguuuacuuaguua

SEQ ID NO: 1873616 - RNA, 19 nt, Artificial Sequence
  Description of Artificial Sequence: Synthetic oligonucleotide
  Antisense strand to SEQ ID NO: 1873615
uaacuaaguaaacaaccgc

SEQ ID NO: 1873617 - RNA, 19 nt, Artificial Sequence
  Description of Artificial Sequence: Synthetic oligonucleotide
  Sense strand starting at position 2205 of SEQ ID NO: 1564354
uuguuuacuuaguuaugca

SEQ ID NO: 1873618 - RNA, 19 nt, Artificial Sequence
  Description of Artificial Sequence: Synthetic oligonucleotide
  Antisense strand to SEQ ID NO: 1873617
ugcauaacuaaguaaacaa

SEQ ID NO: 1873619 - RNA, 19 nt, Artificial Sequence
  Description of Artificial Sequence: Synthetic oligonucleotide
  Sense strand starting at position 50 of SEQ ID NO: 1564355
ggguggucagccuggaagu

SEQ ID NO: 1873620 - RNA, 19 nt, Artificial Sequence
  Description of Artificial Sequence: Synthetic oligonucleotide
  Antisense strand to SEQ ID NO: 1873619
acuuccaggcugaccaccc

SEQ ID NO: 1873621 - RNA, 19 nt, Artificial Sequence
  Description of Artificial Sequence: Synthetic oligonucleotide
  Sense strand starting at position 103 of SEQ ID NO: 1564355
aagaguccuccucagaguu

SEQ ID NO: 1873622 - RNA, 19 nt, Artificial Sequence
  Description of Artificial Sequence: Synthetic oligonucleotide
  Antisense strand to SEQ ID NO: 1873621
aacucugaggaggacucuu

SEQ ID NO: 1873623 - RNA, 19 nt, Artificial Sequence
  Description of Artificial Sequence: Synthetic oligonucleotide
  Sense strand starting at position 358 of SEQ ID NO: 1564355
gacgucaguugcccaaaga

SEQ ID NO: 1873624 - RNA, 19 nt, Artificial Sequence
  Description of Artificial Sequence: Synthetic oligonucleotide
  Antisense strand to SEQ ID NO: 1873623
ucuuugggcaacugacguc

SEQ ID NO: 1873625 - RNA, 19 nt, Artificial Sequence
  Description of Artificial Sequence: Synthetic oligonucleotide
  Sense strand starting at position 465 of SEQ ID NO: 1564355
gagagaccguaguuacuaa

SEQ ID NO: 1873626 - RNA, 19 nt, Artificial Sequence
  Description of Artificial Sequence: Synthetic oligonucleotide
  Antisense strand to SEQ ID NO: 1873625
uuaguaacuacggucucuc

SEQ ID NO: 1873627 - RNA, 19 nt, Artificial Sequence
  Description of Artificial Sequence: Synthetic oligonucleotide
  Sense strand starting at position 469 of SEQ ID NO: 1564355
gaccguaguuacuaaaggu

SEQ ID NO: 1873628 - RNA, 19 nt, Artificial Sequence
  Description of Artificial Sequence: Synthetic oligonucleotide
  Antisense strand to SEQ ID NO: 1873627
accuuuaguaacuacgguc

SEQ ID NO: 1873629 - RNA, 19 nt, Artificial Sequence
  Description of Artificial Sequence: Synthetic oligonucleotide
  Sense strand starting at position 490 of SEQ ID NO: 1564355
cccugugugcuggcuguaa

SEQ ID NO: 1873630 - RNA, 19 nt, Artificial Sequence
  Description of Artificial Sequence: Synthetic oligonucleotide
  Antisense strand to SEQ ID NO: 1873629
uuacagccagcacacaggg

SEQ ID NO: 1873631 - RNA, 19 nt, Artificial Sequence
  Description of Artificial Sequence: Synthetic oligonucleotide
  Sense strand starting at position 492 of SEQ ID NO: 1564355
cugugugcuggcuguaaac

SEQ ID NO: 1873632 - RNA, 19 nt, Artificial Sequence
  Description of Artificial Sequence: Synthetic oligonucleotide
  Antisense strand to SEQ ID NO: 1873631
guuuacagccagcacacag

SEQ ID NO: 1873633 - RNA, 19 nt, Artificial Sequence
  Description of Artificial Sequence: Synthetic oligonucleotide
  Sense strand starting at position 494 of SEQ ID NO: 1564355
gugugcuggcuguaaacuu

SEQ ID NO: 1873634 - RNA, 19 nt, Artificial Sequence
  Description of Artificial Sequence: Synthetic oligonucleotide
  Antisense strand to SEQ ID NO: 1873633
aaguuuacagccagcacac

SEQ ID NO: 1873635 - RNA, 19 nt, Artificial Sequence
  Description of Artificial Sequence: Synthetic oligonucleotide
  Sense strand starting at position 673 of SEQ ID NO: 1564355
ccuagacacuguuauggaa

SEQ ID NO: 1873636 - RNA, 19 nt, Artificial Sequence
  Description of Artificial Sequence: Synthetic oligonucleotide
  Antisense strand to SEQ ID NO: 1873635
uuccauaacagugucuagg

SEQ ID NO: 1873637 - RNA, 19 nt, Artificial Sequence
  Description of Artificial Sequence: Synthetic oligonucleotide
  Sense strand starting at position 713 of SEQ ID NO: 1564355
gccaguucuccuuggucag

SEQ ID NO: 1873638 - RNA, 19 nt, Artificial Sequence
  Description of Artificial Sequence: Synthetic oligonucleotide
  Antisense strand to SEQ ID NO: 1873637
cugaccaaggagaacuggc

SEQ ID NO: 1873639 - RNA, 19 nt, Artificial Sequence
  Description of Artificial Sequence: Synthetic oligonucleotide
  Sense strand starting at position 747 of SEQ ID NO: 1564355
acgguaaacuugggagaca

SEQ ID NO: 1873640 - RNA, 19 nt, Artificial Sequence
  Description of Artificial Sequence: Synthetic oligonucleotide
  Antisense strand to SEQ ID NO: 1873639
ugucucccaaguuuaccgu

SEQ ID NO: 1873641 - RNA, 19 nt, Artificial Sequence
  Description of Artificial Sequence: Synthetic oligonucleotide
  Sense strand starting at position 910 of SEQ ID NO: 1564355
ggugggaggucgucuucuu

SEQ ID NO: 1873642 - RNA, 19 nt, Artificial Sequence
  Description of Artificial Sequence: Synthetic oligonucleotide
  Antisense strand to SEQ ID NO: 1873641
aagaagacgaccucccacc

SEQ ID NO: 1873643 - RNA, 19 nt, Artificial Sequence
  Description of Artificial Sequence: Synthetic oligonucleotide
  Sense strand starting at position 915 of SEQ ID NO: 1564355
gaggucgucuucuucuuaa

SEQ ID NO: 1873644 - RNA, 19 nt, Artificial Sequence
  Description of Artificial Sequence: Synthetic oligonucleotide
  Antisense strand to SEQ ID NO: 1873643
uuaagaagaagacgaccuc

SEQ ID NO: 1873645 - RNA, 19 nt, Artificial Sequence
  Description of Artificial Sequence: Synthetic oligonucleotide
  Sense strand starting at position 918 of SEQ ID NO: 1564355
gucgucuucuucuuaaaga

SEQ ID NO: 1873646 - RNA, 19 nt, Artificial Sequence
  Description of Artificial Sequence: Synthetic oligonucleotide
  Antisense strand to SEQ ID NO: 1873645
ucuuuaagaagaagacgac

SEQ ID NO: 1873647 - RNA, 19 nt, Artificial Sequence
  Description of Artificial Sequence: Synthetic oligonucleotide
  Sense strand starting at position 919 of SEQ ID NO: 1564355
ucgucuucuucuuaaagac

SEQ ID NO: 1873648 - RNA, 19 nt, Artificial Sequence
  Description of Artificial Sequence: Synthetic oligonucleotide
  Antisense strand to SEQ ID NO: 1873647
gucuuuaagaagaagacga

SEQ ID NO: 1873649 - RNA, 19 nt, Artificial Sequence
  Description of Artificial Sequence: Synthetic oligonucleotide
  Sense strand starting at position 1327 of SEQ ID NO: 1564355
aaggauuggcuccgagacu

SEQ ID NO: 1873650 - RNA, 19 nt, Artificial Sequence
  Description of Artificial Sequence: Synthetic oligonucleotide
  Antisense strand to SEQ ID NO: 1873649
agucucggagccaauccuu

SEQ ID NO: 1873651 - RNA, 19 nt, Artificial Sequence
  Description of Artificial Sequence: Synthetic oligonucleotide
  Sense strand starting at position 1451 of SEQ ID NO: 1564355
cugugacauugcuggauag

SEQ ID NO: 1873652 - RNA, 19 nt, Artificial Sequence
  Description of Artificial Sequence: Synthetic oligonucleotide
  Antisense strand to SEQ ID NO: 1873651
cuauccagcaaugucacag

SEQ ID NO: 1873653 - RNA, 19 nt, Artificial Sequence
  Description of Artificial Sequence: Synthetic oligonucleotide
  Sense strand starting at position 1504 of SEQ ID NO: 1564355
ggagcucugaaugguggaa

SEQ ID NO: 1873654 - RNA, 19 nt, Artificial Sequence
  Description of Artificial Sequence: Synthetic oligonucleotide
  Antisense strand to SEQ ID NO: 1873653
uuccaccauucagagcucc

SEQ ID NO: 1873655 - RNA, 19 nt, Artificial Sequence
  Description of Artificial Sequence: Synthetic oligonucleotide
  Sense strand starting at position 2043 of SEQ ID NO: 1564355
gugucuugcaggugaccau

SEQ ID NO: 1873656 - RNA, 19 nt, Artificial Sequence
  Description of Artificial Sequence: Synthetic oligonucleotide
  Antisense strand to SEQ ID NO: 1873655
auggucaccugcaagacac

SEQ ID NO: 1873657 - RNA, 19 nt, Artificial Sequence
  Description of Artificial Sequence: Synthetic oligonucleotide
  Sense strand starting at position 2058 of SEQ ID NO: 1564355
ccauauggguccugguaca

SEQ ID NO: 1873658 - RNA, 19 nt, Artificial Sequence
  Description of Artificial Sequence: Synthetic oligonucleotide
  Antisense strand to SEQ ID NO: 1873657
uguaccaggacccauaugg

SEQ ID NO: 1873659 - RNA, 19 nt, Artificial Sequence
  Description of Artificial Sequence: Synthetic oligonucleotide
  Sense strand starting at position 2117 of SEQ ID NO: 1564355
aagcguugguggagugcua

SEQ ID NO: 1873660 - RNA, 19 nt, Artificial Sequence
  Description of Artificial Sequence: Synthetic oligonucleotide
  Antisense strand to SEQ ID NO: 1873659
uagcacuccaccaacgcuu

SEQ ID NO: 1873661 - RNA, 19 nt, Artificial Sequence
  Description of Artificial Sequence: Synthetic oligonucleotide
  Sense strand starting at position 2130 of SEQ ID NO: 1564355
gugcuaaguaugggcagaa

SEQ ID NO: 1873662 - RNA, 19 nt, Artificial Sequence
  Description of Artificial Sequence: Synthetic oligonucleotide
  Antisense strand to SEQ ID NO: 1873661
uucugcccauacuuagcac

SEQ ID NO: 1873663 - RNA, 19 nt, Artificial Sequence
  Description of Artificial Sequence: Synthetic oligonucleotide
  Sense strand starting at position 2585 of SEQ ID NO: 1564355
ucaggacugcugugaggau

SEQ ID NO: 1873664 - RNA, 19 nt, Artificial Sequence
  Description of Artificial Sequence: Synthetic oligonucleotide
  Antisense strand to SEQ ID NO: 1873663
auccucacagcaguccuga

SEQ ID NO: 1873665 - RNA, 19 nt, Artificial Sequence
  Description of Artificial Sequence: Synthetic oligonucleotide
  Sense strand starting at position 2665 of SEQ ID NO: 1564355
gcucucaagucaucugcua

SEQ ID NO: 1873666 - RNA, 19 nt, Artificial Sequence
  Description of Artificial Sequence: Synthetic oligonucleotide
  Antisense strand to SEQ ID NO: 1873665
uagcagaugacuugagagc

SEQ ID NO: 1873667 - RNA, 19 nt, Artificial Sequence
  Description of Artificial Sequence: Synthetic oligonucleotide
  Sense strand starting at position 2670 of SEQ ID NO: 1564355
caagucaucugcuaggaga

SEQ ID NO: 1873668 - RNA, 19 nt, Artificial Sequence
  Description of Artificial Sequence: Synthetic oligonucleotide
  Antisense strand to SEQ ID NO: 1873667
ucuccuagcagaugacuug

SEQ ID NO: 1873669 - RNA, 19 nt, Artificial Sequence
  Description of Artificial Sequence: Synthetic oligonucleotide
  Sense strand starting at position 2823 of SEQ ID NO: 1564355
cgaguguggcaauguggua

SEQ ID NO: 1873670 - RNA, 19 nt, Artificial Sequence
  Description of Artificial Sequence: Synthetic oligonucleotide
  Antisense strand to SEQ ID NO: 1873669
uaccacauugccacacucg

SEQ ID NO: 1873671 - RNA, 19 nt, Artificial Sequence
  Description of Artificial Sequence: Synthetic oligonucleotide
  Sense strand starting at position 2828 of SEQ ID NO: 1564355
guggcaaugugguaaguua

SEQ ID NO: 1873672 - RNA, 19 nt, Artificial Sequence
  Description of Artificial Sequence: Synthetic oligonucleotide
  Antisense strand to SEQ ID NO: 1873671
uaacuuaccacauugccac

SEQ ID NO: 1873673 - RNA, 19 nt, Artificial Sequence
  Description of Artificial Sequence: Synthetic oligonucleotide
  Sense strand starting at position 3042 of SEQ ID NO: 1564355
ggccauuugcuccggagaa

SEQ ID NO: 1873674 - RNA, 19 nt, Artificial Sequence
  Description of Artificial Sequence: Synthetic oligonucleotide
  Antisense strand to SEQ ID NO: 1873673
uucuccggagcaaauggcc

SEQ ID NO: 1873675 - RNA, 19 nt, Artificial Sequence
  Description of Artificial Sequence: Synthetic oligonucleotide
  Sense strand starting at position 3043 of SEQ ID NO: 1564355
gccauuugcuccggagaag

SEQ ID NO: 1873676 - RNA, 19 nt, Artificial Sequence
  Description of Artificial Sequence: Synthetic oligonucleotide
  Antisense strand to SEQ ID NO: 1873675
cuucuccggagcaaauggc

SEQ ID NO: 1873677 - RNA, 19 nt, Artificial Sequence
  Description of Artificial Sequence: Synthetic oligonucleotide
  Sense strand starting at position 3320 of SEQ ID NO: 1564355
cuggauguguuucugugga

SEQ ID NO: 1873678 - RNA, 19 nt, Artificial Sequence
  Description of Artificial Sequence: Synthetic oligonucleotide
  Antisense strand to SEQ ID NO: 1873677
uccacagaaacacauccag

SEQ ID NO: 1873679 - RNA, 19 nt, Artificial Sequence
  Description of Artificial Sequence: Synthetic oligonucleotide
  Sense strand starting at position 3405 of SEQ ID NO: 1564355
agagcuggcucuuccauaa

SEQ ID NO: 1873680 - RNA, 19 nt, Artificial Sequence
  Description of Artificial Sequence: Synthetic oligonucleotide
  Antisense strand to SEQ ID NO: 1873679
uuauggaagagccagcucu

SEQ ID NO: 1873681 - RNA, 19 nt, Artificial Sequence
  Description of Artificial Sequence: Synthetic oligonucleotide
  Sense strand starting at position 3457 of SEQ ID NO: 1564355
ccugcugugugccaggaau

SEQ ID NO: 1873682 - RNA, 19 nt, Artificial Sequence
  Description of Artificial Sequence: Synthetic oligonucleotide
  Antisense strand to SEQ ID NO: 1873681
auuccuggcacacagcagg

SEQ ID NO: 1873683 - RNA, 19 nt, Artificial Sequence
  Description of Artificial Sequence: Synthetic oligonucleotide
  Sense strand starting at position 3533 of SEQ ID NO: 1564355
acguuagaguucuguugag

SEQ ID NO: 1873684 - RNA, 19 nt, Artificial Sequence
  Description of Artificial Sequence: Synthetic oligonucleotide
  Antisense strand to SEQ ID NO: 1873683
cucaacagaacucuaacgu

SEQ ID NO: 1873685 - RNA, 19 nt, Artificial Sequence
  Description of Artificial Sequence: Synthetic oligonucleotide
  Sense strand starting at position 3567 of SEQ ID NO: 1564355
agguguuccuagggccaua

SEQ ID NO: 1873686 - RNA, 19 nt, Artificial Sequence
  Description of Artificial Sequence: Synthetic oligonucleotide
  Antisense strand to SEQ ID NO: 1873685
uauggcccuaggaacaccu

SEQ ID NO: 1873687 - RNA, 19 nt, Artificial Sequence
  Description of Artificial Sequence: Synthetic oligonucleotide
  Sense strand starting at position 3740 of SEQ ID NO: 1564355
agucuuucgucuuuagguu

SEQ ID NO: 1873688 - RNA, 19 nt, Artificial Sequence
  Description of Artificial Sequence: Synthetic oligonucleotide
  Antisense strand to SEQ ID NO: 1873687
aaccuaaagacgaaagacu

SEQ ID NO: 1873689 - RNA, 19 nt, Artificial Sequence
  Description of Artificial Sequence: Synthetic oligonucleotide
  Sense strand starting at position 3748 of SEQ ID NO: 1564355
gucuuuagguuccuucuaa

SEQ ID NO: 1873690 - RNA, 19 nt, Artificial Sequence
  Description of Artificial Sequence: Synthetic oligonucleotide
  Antisense strand to SEQ ID NO: 1873689
uuagaaggaaccuaaagac

SEQ ID NO: 1873691 - RNA, 19 nt, Artificial Sequence
  Description of Artificial Sequence: Synthetic oligonucleotide
  Sense strand starting at position 3778 of SEQ ID NO: 1564355
uguacuagcuaguaugacu

SEQ ID NO: 1873692 - RNA, 19 nt, Artificial Sequence
  Description of Artificial Sequence: Synthetic oligonucleotide
  Antisense strand to SEQ ID NO: 1873691
agucauacuagcuaguaca

SEQ ID NO: 1873693 - RNA, 19 nt, Artificial Sequence
  Description of Artificial Sequence: Synthetic oligonucleotide
  Sense strand starting at position 3939 of SEQ ID NO: 1564355
ggcacaaggacucaucagu

SEQ ID NO: 1873694 - RNA, 19 nt, Artificial Sequence
  Description of Artificial Sequence: Synthetic oligonucleotide
  Antisense strand to SEQ ID NO: 1873693
acugaugaguccuugugcc

SEQ ID NO: 1873695 - RNA, 19 nt, Artificial Sequence
  Description of Artificial Sequence: Synthetic oligonucleotide
  Sense strand starting at position 3978 of SEQ ID NO: 1564355
ggccacauugccuagaagu

SEQ ID NO: 1873696 - RNA, 19 nt, Artificial Sequence
  Description of Artificial Sequence: Synthetic oligonucleotide
  Antisense strand to SEQ ID NO: 1873695
acuucuaggcaauguggcc

SEQ ID NO: 1873697 - RNA, 19 nt, Artificial Sequence
  Description of Artificial Sequence: Synthetic oligonucleotide
  Sense strand starting at position 3980 of SEQ ID NO: 1564355
ccacauugccuagaaguuu

SEQ ID NO: 1873698 - RNA, 19 nt, Artificial Sequence
  Description of Artificial Sequence: Synthetic oligonucleotide
  Antisense strand to SEQ ID NO: 1873697
aaacuucuaggcaaugugg

SEQ ID NO: 1873699 - RNA, 19 nt, Artificial Sequence
  Description of Artificial Sequence: Synthetic oligonucleotide
  Sense strand starting at position 42 of SEQ ID NO: 1564356
ugcugugauuccugcgcca

SEQ ID NO: 1873700 - RNA, 19 nt, Artificial Sequence
  Description of Artificial Sequence: Synthetic oligonucleotide
  Antisense strand to SEQ ID NO: 1873699
uggcgcaggaaucacagca

SEQ ID NO: 1873701 - RNA, 19 nt, Artificial Sequence
  Description of Artificial Sequence: Synthetic oligonucleotide
  Sense strand starting at position 44 of SEQ ID NO: 1564356
cugugauuccugcgccaca

SEQ ID NO: 1873702 - RNA, 19 nt, Artificial Sequence
  Description of Artificial Sequence: Synthetic oligonucleotide
  Antisense strand to SEQ ID NO: 1873701
uguggcgcaggaaucacag

SEQ ID NO: 1873703 - RNA, 19 nt, Artificial Sequence
  Description of Artificial Sequence: Synthetic oligonucleotide
  Sense strand starting at position 47 of SEQ ID NO: 1564356
ugauuccugcgccacagau

SEQ ID NO: 1873704 - RNA, 19 nt, Artificial Sequence
  Description of Artificial Sequence: Synthetic oligonucleotide
  Antisense strand to SEQ ID NO: 1873703
aucuguggcgcaggaauca

SEQ ID NO: 1873705 - RNA, 19 nt, Artificial Sequence
  Description of Artificial Sequence: Synthetic oligonucleotide
  Sense strand starting at position 60 of SEQ ID NO: 1564356
acagaugggucagcagaua

SEQ ID NO: 1873706 - RNA, 19 nt, Artificial Sequence
  Description of Artificial Sequence: Synthetic oligonucleotide
  Antisense strand to SEQ ID NO: 1873705
uaucugcugacccaucugu

SEQ ID NO: 1873707 - RNA, 19 nt, Artificial Sequence
  Description of Artificial Sequence: Synthetic oligonucleotide
  Sense strand starting at position 439 of SEQ ID NO: 1564356
gguggcuucucccugaaua

SEQ ID NO: 1873708 - RNA, 19 nt, Artificial Sequence
  Description of Artificial Sequence: Synthetic oligonucleotide
  Antisense strand to SEQ ID NO: 1873707
uauucagggagaagccacc

SEQ ID NO: 1873709 - RNA, 19 nt, Artificial Sequence
  Description of Artificial Sequence: Synthetic oligonucleotide
  Sense strand starting at position 440 of SEQ ID NO: 1564356
guggcuucucccugaauau

SEQ ID NO: 1873710 - RNA, 19 nt, Artificial Sequence
  Description of Artificial Sequence: Synthetic oligonucleotide
  Antisense strand to SEQ ID NO: 1873709
auauucagggagaagccac

SEQ ID NO: 1873711 - RNA, 19 nt, Artificial Sequence
  Description of Artificial Sequence: Synthetic oligonucleotide
  Sense strand starting at position 441 of SEQ ID NO: 1564356
uggcuucucccugaauauu

SEQ ID NO: 1873712 - RNA, 19 nt, Artificial Sequence
  Description of Artificial Sequence: Synthetic oligonucleotide
  Antisense strand to SEQ ID NO: 1873711
aauauucagggagaagcca

SEQ ID NO: 1873713 - RNA, 19 nt, Artificial Sequence
  Description of Artificial Sequence: Synthetic oligonucleotide
  Sense strand starting at position 544 of SEQ ID NO: 1564356
ccacauuaccuagguucua

SEQ ID NO: 1873714 - RNA, 19 nt, Artificial Sequence
  Description of Artificial Sequence: Synthetic oligonucleotide
  Antisense strand to SEQ ID NO: 1873713
uagaaccuagguaaugugg

SEQ ID NO: 1873715 - RNA, 19 nt, Artificial Sequence
  Description of Artificial Sequence: Synthetic oligonucleotide
  Sense strand starting at position 614 of SEQ ID NO: 1564356
gguucuggcacucagagaa

SEQ ID NO: 1873716 - RNA, 19 nt, Artificial Sequence
  Description of Artificial Sequence: Synthetic oligonucleotide
  Antisense strand to SEQ ID NO: 1873715
uucucugagugccagaacc

SEQ ID NO: 1873717 - RNA, 19 nt, Artificial Sequence
  Description of Artificial Sequence: Synthetic oligonucleotide
  Sense strand starting at position 716 of SEQ ID NO: 1564356
ccagcagucuucgaagacu

SEQ ID NO: 1873718 - RNA, 19 nt, Artificial Sequence
  Description of Artificial Sequence: Synthetic oligonucleotide
  Antisense strand to SEQ ID NO: 1873717
agucuucgaagacugcugg

SEQ ID NO: 1873719 - RNA, 19 nt, Artificial Sequence
  Description of Artificial Sequence: Synthetic oligonucleotide
  Sense strand starting at position 964 of SEQ ID NO: 1564356
gaggcaagucaauaucucu

SEQ ID NO: 1873720 - RNA, 19 nt, Artificial Sequence
  Description of Artificial Sequence: Synthetic oligonucleotide
  Antisense strand to SEQ ID NO: 1873719
agagauauugacuugccuc

SEQ ID NO: 1873721 - RNA, 19 nt, Artificial Sequence
  Description of Artificial Sequence: Synthetic oligonucleotide
  Sense strand starting at position 1003 of SEQ ID NO: 1564356
gccacuuguuccucccuga

SEQ ID NO: 1873722 - RNA, 19 nt, Artificial Sequence
  Description of Artificial Sequence: Synthetic oligonucleotide
  Antisense strand to SEQ ID NO: 1873721
ucagggaggaacaaguggc

SEQ ID NO: 1873723 - RNA, 19 nt, Artificial Sequence
  Description of Artificial Sequence: Synthetic oligonucleotide
  Sense strand starting at position 1006 of SEQ ID NO: 1564356
acuuguuccucccugagac

SEQ ID NO: 1873724 - RNA, 19 nt, Artificial Sequence
  Description of Artificial Sequence: Synthetic oligonucleotide
  Antisense strand to SEQ ID NO: 1873723
gucucagggaggaacaagu

SEQ ID NO: 1873725 - RNA, 19 nt, Artificial Sequence
  Description of Artificial Sequence: Synthetic oligonucleotide
  Sense strand starting at position 1252 of SEQ ID NO: 1564356
cccgaagguuucuauccaa

SEQ ID NO: 1873726 - RNA, 19 nt, Artificial Sequence
  Description of Artificial Sequence: Synthetic oligonucleotide
  Antisense strand to SEQ ID NO: 1873725
uuggauagaaaccuucggg

SEQ ID NO: 1873727 - RNA, 19 nt, Artificial Sequence
  Description of Artificial Sequence: Synthetic oligonucleotide
  Sense strand starting at position 1659 of SEQ ID NO: 1564356
ggacuuguuccuuggagga

SEQ ID NO: 1873728 - RNA, 19 nt, Artificial Sequence
  Description of Artificial Sequence: Synthetic oligonucleotide
  Antisense strand to SEQ ID NO: 1873727
uccuccaaggaacaagucc

SEQ ID NO: 1873729 - RNA, 19 nt, Artificial Sequence
  Description of Artificial Sequence: Synthetic oligonucleotide
  Sense strand starting at position 2090 of SEQ ID NO: 1564356
augccaaggugcuugaauu

SEQ ID NO: 1873730 - RNA, 19 nt, Artificial Sequence
  Description of Artificial Sequence: Synthetic oligonucleotide
  Antisense strand to SEQ ID NO: 1873729
aauucaagcaccuuggcau

SEQ ID NO: 1873731 - RNA, 19 nt, Artificial Sequence
  Description of Artificial Sequence: Synthetic oligonucleotide
  Sense strand starting at position 2098 of SEQ ID NO: 1564356
gugcuugaauugcaugcaa

SEQ ID NO: 1873732 - RNA, 19 nt, Artificial Sequence
  Description of Artificial Sequence: Synthetic oligonucleotide
  Antisense strand to SEQ ID NO: 1873731
uugcaugcaauucaagcac

SEQ ID NO: 1873733 - RNA, 19 nt, Artificial Sequence
  Description of Artificial Sequence: Synthetic oligonucleotide
  Sense strand starting at position 2100 of SEQ ID NO: 1564356
gcuugaauugcaugcaacu

SEQ ID NO: 1873734 - RNA, 19 nt, Artificial Sequence
  Description of Artificial Sequence: Synthetic oligonucleotide
  Antisense strand to SEQ ID NO: 1873733
aguugcaugcaauucaagc

SEQ ID NO: 1873735 - RNA, 19 nt, Artificial Sequence
  Description of Artificial Sequence: Synthetic oligonucleotide
  Sense strand starting at position 2208 of SEQ ID NO: 1564356
gcaccucucugucccauua

SEQ ID NO: 1873736 - RNA, 19 nt, Artificial Sequence
  Description of Artificial Sequence: Synthetic oligonucleotide
  Antisense strand to SEQ ID NO: 1873735
uaaugggacagagaggugc

SEQ ID NO: 1873737 - RNA, 19 nt, Artificial Sequence
  Description of Artificial Sequence: Synthetic oligonucleotide
  Sense strand starting at position 2253 of SEQ ID NO: 1564356
ggacaaggacacuguuagu

SEQ ID NO: 1873738 - RNA, 19 nt, Artificial Sequence
  Description of Artificial Sequence: Synthetic oligonucleotide
  Antisense strand to SEQ ID NO: 1873737
acuaacaguguccuugucc

SEQ ID NO: 1873739 - RNA, 19 nt, Artificial Sequence
  Description of Artificial Sequence: Synthetic oligonucleotide
  Sense strand starting at position 2686 of SEQ ID NO: 1564356
cggucacuuaccggaugau

SEQ ID NO: 1873740 - RNA, 19 nt, Artificial Sequence
  Description of Artificial Sequence: Synthetic oligonucleotide
  Antisense strand to SEQ ID NO: 1873739
aucauccgguaagugaccg

SEQ ID NO: 1873741 - RNA, 19 nt, Artificial Sequence
  Description of Artificial Sequence: Synthetic oligonucleotide
  Sense strand starting at position 2687 of SEQ ID NO: 1564356
ggucacuuaccggaugaug

SEQ ID NO: 1873742 - RNA, 19 nt, Artificial Sequence
  Description of Artificial Sequence: Synthetic oligonucleotide
  Antisense strand to SEQ ID NO: 1873741
caucauccgguaagugacc

SEQ ID NO: 1873743 - RNA, 19 nt, Artificial Sequence
  Description of Artificial Sequence: Synthetic oligonucleotide
  Sense strand starting at position 2689 of SEQ ID NO: 1564356
ucacuuaccggaugaugua

SEQ ID NO: 1873744 - RNA, 19 nt, Artificial Sequence
  Description of Artificial Sequence: Synthetic oligonucleotide
  Antisense strand to SEQ ID NO: 1873743
uacaucauccgguaaguga

SEQ ID NO: 1873745 - RNA, 19 nt, Artificial Sequence
  Description of Artificial Sequence: Synthetic oligonucleotide
  Sense strand starting at position 2799 of SEQ ID NO: 1564356
uuauccugcccuuaacgau

SEQ ID NO: 1873746 - RNA, 19 nt, Artificial Sequence
  Description of Artificial Sequence: Synthetic oligonucleotide
  Antisense strand to SEQ ID NO: 1873745
aucguuaagggcaggauaa

SEQ ID NO: 1873747 - RNA, 19 nt, Artificial Sequence
  Description of Artificial Sequence: Synthetic oligonucleotide
  Sense strand starting at position 2805 of SEQ ID NO: 1564356
ugcccuuaacgauagcaaa

SEQ ID NO: 1873748 - RNA, 19 nt, Artificial Sequence
  Description of Artificial Sequence: Synthetic oligonucleotide
  Antisense strand to SEQ ID NO: 1873747
uuugcuaucguuaagggca

SEQ ID NO: 1873749 - RNA, 19 nt, Artificial Sequence
  Description of Artificial Sequence: Synthetic oligonucleotide
  Sense strand starting at position 2823 of SEQ ID NO: 1564356
auaagauuggcuggcaagu

SEQ ID NO: 1873750 - RNA, 19 nt, Artificial Sequence
  Description of Artificial Sequence: Synthetic oligonucleotide
  Antisense strand to SEQ ID NO: 1873749
acuugccagccaaucuuau

SEQ ID NO: 1873751 - RNA, 19 nt, Artificial Sequence
  Description of Artificial Sequence: Synthetic oligonucleotide
  Sense strand starting at position 3307 of SEQ ID NO: 1564356
ccaagucuugguggaaguu

SEQ ID NO: 1873752 - RNA, 19 nt, Artificial Sequence
  Description of Artificial Sequence: Synthetic oligonucleotide
  Antisense strand to SEQ ID NO: 1873751
aacuuccaccaagacuugg

SEQ ID NO: 1873753 - RNA, 19 nt, Artificial Sequence
  Description of Artificial Sequence: Synthetic oligonucleotide
  Sense strand starting at position 3308 of SEQ ID NO: 1564356
caagucuugguggaaguuu

SEQ ID NO: 1873754 - RNA, 19 nt, Artificial Sequence
  Description of Artificial Sequence: Synthetic oligonucleotide
  Antisense strand to SEQ ID NO: 1873753
aaacuuccaccaagacuug

SEQ ID NO: 1873755 - RNA, 19 nt, Artificial Sequence
  Description of Artificial Sequence: Synthetic oligonucleotide
  Sense strand starting at position 3317 of SEQ ID NO: 1564356
guggaaguuugagacgaga

SEQ ID NO: 1873756 - RNA, 19 nt, Artificial Sequence
  Description of Artificial Sequence: Synthetic oligonucleotide
  Antisense strand to SEQ ID NO: 1873755
ucucgucucaaacuuccac

SEQ ID NO: 1873757 - RNA, 19 nt, Artificial Sequence
  Description of Artificial Sequence: Synthetic oligonucleotide
  Sense strand starting at position 3473 of SEQ ID NO: 1564356
ggguggucagccuggaagu

SEQ ID NO: 1873758 - RNA, 19 nt, Artificial Sequence
  Description of Artificial Sequence: Synthetic oligonucleotide
  Antisense strand to SEQ ID NO: 1873757
acuuccaggcugaccaccc

SEQ ID NO: 1873759 - RNA, 19 nt, Artificial Sequence
  Description of Artificial Sequence: Synthetic oligonucleotide
  Sense strand starting at position 3526 of SEQ ID NO: 1564356
aagaguccuccucagaguu

SEQ ID NO: 1873760 - RNA, 19 nt, Artificial Sequence
  Description of Artificial Sequence: Synthetic oligonucleotide
  Antisense strand to SEQ ID NO: 1873759
aacucugaggaggacucuu

SEQ ID NO: 1873761 - RNA, 19 nt, Artificial Sequence
  Description of Artificial Sequence: Synthetic oligonucleotide
  Sense strand starting at position 3781 of SEQ ID NO: 1564356
gacgucaguugcccaaaga

SEQ ID NO: 1873762 - RNA, 19 nt, Artificial Sequence
  Description of Artificial Sequence: Synthetic oligonucleotide
  Antisense strand to SEQ ID NO: 1873761
ucuuugggcaacugacguc

SEQ ID NO: 1873763 - RNA, 19 nt, Artificial Sequence
  Description of Artificial Sequence: Synthetic oligonucleotide
  Sense strand starting at position 3888 of SEQ ID NO: 1564356
gagagaccguaguuacuaa

SEQ ID NO: 1873764 - RNA, 19 nt, Artificial Sequence
  Description of Artificial Sequence: Synthetic oligonucleotide
  Antisense strand to SEQ ID NO: 1873763
uuaguaacuacggucucuc

SEQ ID NO: 1873765 - RNA, 19 nt, Artificial Sequence
  Description of Artificial Sequence: Synthetic oligonucleotide
  Sense strand starting at position 3892 of SEQ ID NO: 1564356
gaccguaguuacuaaaggu

SEQ ID NO: 1873766 - RNA, 19 nt, Artificial Sequence
  Description of Artificial Sequence: Synthetic oligonucleotide
  Antisense strand to SEQ ID NO: 1873765
accuuuaguaacuacgguc

SEQ ID NO: 1873767 - RNA, 19 nt, Artificial Sequence
  Description of Artificial Sequence: Synthetic oligonucleotide
  Sense strand starting at position 3913 of SEQ ID NO: 1564356
cccugugugcuggcuguaa

SEQ ID NO: 1873768 - RNA, 19 nt, Artificial Sequence
  Description of Artificial Sequence: Synthetic oligonucleotide
  Antisense strand to SEQ ID NO: 1873767
uuacagccagcacacaggg

SEQ ID NO: 1873769 - RNA, 19 nt, Artificial Sequence
  Description of Artificial Sequence: Synthetic oligonucleotide
  Sense strand starting at position 3915 of SEQ ID NO: 1564356
cugugugcuggcuguaaac

SEQ ID NO: 1873770 - RNA, 19 nt, Artificial Sequence
  Description of Artificial Sequence: Synthetic oligonucleotide
  Antisense strand to SEQ ID NO: 1873769
guuuacagccagcacacag

SEQ ID NO: 1873771 - RNA, 19 nt, Artificial Sequence
  Description of Artificial Sequence: Synthetic oligonucleotide
  Sense strand starting at position 3917 of SEQ ID NO: 1564356
gugugcuggcuguaaacuu

SEQ ID NO: 1873772 - RNA, 19 nt, Artificial Sequence
  Description of Artificial Sequence: Synthetic oligonucleotide
  Antisense strand to SEQ ID NO: 1873771
aaguuuacagccagcacac

SEQ ID NO: 1873773 - RNA, 19 nt, Artificial Sequence
  Description of Artificial Sequence: Synthetic oligonucleotide
  Sense strand starting at position 53 of SEQ ID NO: 1564357
augaccuaugugggucaua

SEQ ID NO: 1873774 - RNA, 19 nt, Artificial Sequence
  Description of Artificial Sequence: Synthetic oligonucleotide
  Antisense strand to SEQ ID NO: 1873773
uaugacccacauaggucau

SEQ ID NO: 1873775 - RNA, 19 nt, Artificial Sequence
  Description of Artificial Sequence: Synthetic oligonucleotide
  Sense strand starting at position 54 of SEQ ID NO: 1564357
ugaccuaugugggucauaa

SEQ ID NO: 1873776 - RNA, 19 nt, Artificial Sequence
  Description of Artificial Sequence: Synthetic oligonucleotide
  Antisense strand to SEQ ID NO: 1873775
uuaugacccacauagguca

SEQ ID NO: 1873777 - RNA, 19 nt, Artificial Sequence
  Description of Artificial Sequence: Synthetic oligonucleotide
  Sense strand starting at position 100 of SEQ ID NO: 1564357
ggaagcucugcuggacaau

SEQ ID NO: 1873778 - RNA, 19 nt, Artificial Sequence
  Description of Artificial Sequence: Synthetic oligonucleotide
  Antisense strand to SEQ ID NO: 1873777
auuguccagcagagcuucc

SEQ ID NO: 1873779 - RNA, 19 nt, Artificial Sequence
  Description of Artificial Sequence: Synthetic oligonucleotide
  Sense strand starting at position 130 of SEQ ID NO: 1564357
gggaauuacuucccagcua

SEQ ID NO: 1873780 - RNA, 19 nt, Artificial Sequence
  Description of Artificial Sequence: Synthetic oligonucleotide
  Antisense strand to SEQ ID NO: 1873779
uagcugggaaguaauuccc

SEQ ID NO: 1873781 - RNA, 19 nt, Artificial Sequence
  Description of Artificial Sequence: Synthetic oligonucleotide
  Sense strand starting at position 153 of SEQ ID NO: 1564357
guccgagcuccucaugaac

SEQ ID NO: 1873782 - RNA, 19 nt, Artificial Sequence
  Description of Artificial Sequence: Synthetic oligonucleotide
  Antisense strand to SEQ ID NO: 1873781
guucaugaggagcucggac

SEQ ID NO: 1873783 - RNA, 19 nt, Artificial Sequence
  Description of Artificial Sequence: Synthetic oligonucleotide
  Sense strand starting at position 178 of SEQ ID NO: 1564357
gaagucaagugguuagaga

SEQ ID NO: 1873784 - RNA, 19 nt, Artificial Sequence
  Description of Artificial Sequence: Synthetic oligonucleotide
  Antisense strand to SEQ ID NO: 1873783
ucucuaaccacuugacuuc

SEQ ID NO: 1873785 - RNA, 19 nt, Artificial Sequence
  Description of Artificial Sequence: Synthetic oligonucleotide
  Sense strand starting at position 179 of SEQ ID NO: 1564357
aagucaagugguuagagau

SEQ ID NO: 1873786 - RNA, 19 nt, Artificial Sequence
  Description of Artificial Sequence: Synthetic oligonucleotide
  Antisense strand to SEQ ID NO: 1873785
aucucuaaccacuugacuu

SEQ ID NO: 1873787 - RNA, 19 nt, Artificial Sequence
  Description of Artificial Sequence: Synthetic oligonucleotide
  Sense strand starting at position 185 of SEQ ID NO: 1564357
agugguuagagauaggcaa

SEQ ID NO: 1873788 - RNA, 19 nt, Artificial Sequence
  Description of Artificial Sequence: Synthetic oligonucleotide
  Antisense strand to SEQ ID NO: 1873787
uugccuaucucuaaccacu

SEQ ID NO: 1873789 - RNA, 19 nt, Artificial Sequence
  Description of Artificial Sequence: Synthetic oligonucleotide
  Sense strand starting at position 189 of SEQ ID NO: 1564357
guuagagauaggcaaggua

SEQ ID NO: 1873790 - RNA, 19 nt, Artificial Sequence
  Description of Artificial Sequence: Synthetic oligonucleotide
  Antisense strand to SEQ ID NO: 1873789
uaccuugccuaucucuaac

SEQ ID NO: 1873791 - RNA, 19 nt, Artificial Sequence
  Description of Artificial Sequence: Synthetic oligonucleotide
  Sense strand starting at position 263 of SEQ ID NO: 1564357
cuuuccuucugaguguaau

SEQ ID NO: 1873792 - RNA, 19 nt, Artificial Sequence
  Description of Artificial Sequence: Synthetic oligonucleotide
  Antisense strand to SEQ ID NO: 1873791
auuacacucagaaggaaag

SEQ ID NO: 1873793 - RNA, 19 nt, Artificial Sequence
  Description of Artificial Sequence: Synthetic oligonucleotide
  Sense strand starting at position 264 of SEQ ID NO: 1564357
uuuccuucugaguguaauu

SEQ ID NO: 1873794 - RNA, 19 nt, Artificial Sequence
  Description of Artificial Sequence: Synthetic oligonucleotide
  Antisense strand to SEQ ID NO: 1873793
aauuacacucagaaggaaa

SEQ ID NO: 1873795 - RNA, 19 nt, Artificial Sequence
  Description of Artificial Sequence: Synthetic oligonucleotide
  Sense strand starting at position 271 of SEQ ID NO: 1564357
cugaguguaauuggaccaa

SEQ ID NO: 1873796 - RNA, 19 nt, Artificial Sequence
  Description of Artificial Sequence: Synthetic oligonucleotide
  Antisense strand to SEQ ID NO: 1873795
uugguccaauuacacucag

SEQ ID NO: 1873797 - RNA, 19 nt, Artificial Sequence
  Description of Artificial Sequence: Synthetic oligonucleotide
  Sense strand starting at position 409 of SEQ ID NO: 1564357
aguacuuuggcaggcagaa

SEQ ID NO: 1873798 - RNA, 19 nt, Artificial Sequence
  Description of Artificial Sequence: Synthetic oligonucleotide
  Antisense strand to SEQ ID NO: 1873797
uucugccugccaaaguacu

SEQ ID NO: 1873799 - RNA, 19 nt, Artificial Sequence
  Description of Artificial Sequence: Synthetic oligonucleotide
  Sense strand starting at position 895 of SEQ ID NO: 1564357
gccaguggugaggaaaugu

SEQ ID NO: 1873800 - RNA, 19 nt, Artificial Sequence
  Description of Artificial Sequence: Synthetic oligonucleotide
  Antisense strand to SEQ ID NO: 1873799
acauuuccucaccacuggc

SEQ ID NO: 1873801 - RNA, 19 nt, Artificial Sequence
  Description of Artificial Sequence: Synthetic oligonucleotide
  Sense strand starting at position 908 of SEQ ID NO: 1564357
aaauguggugccuaaacuu

SEQ ID NO: 1873802 - RNA, 19 nt, Artificial Sequence
  Description of Artificial Sequence: Synthetic oligonucleotide
  Antisense strand to SEQ ID NO: 1873801
aaguuuaggcaccacauuu

SEQ ID NO: 1873803 - RNA, 19 nt, Artificial Sequence
  Description of Artificial Sequence: Synthetic oligonucleotide
  Sense strand starting at position 991 of SEQ ID NO: 1564357
cagcauguucuagauggaa

SEQ ID NO: 1873804 - RNA, 19 nt, Artificial Sequence
  Description of Artificial Sequence: Synthetic oligonucleotide
  Antisense strand to SEQ ID NO: 1873803
uuccaucuagaacaugcug

SEQ ID NO: 1873805 - RNA, 19 nt, Artificial Sequence
  Description of Artificial Sequence: Synthetic oligonucleotide
  Sense strand starting at position 1075 of SEQ ID NO: 1564357
caauaaagcugguuaaguu

SEQ ID NO: 1873806 - RNA, 19 nt, Artificial Sequence
  Description of Artificial Sequence: Synthetic oligonucleotide
  Antisense strand to SEQ ID NO: 1873805
aacuuaaccagcuuuauug

SEQ ID NO: 1873807 - RNA, 19 nt, Artificial Sequence
  Description of Artificial Sequence: Synthetic oligonucleotide
  Sense strand starting at position 1076 of SEQ ID NO: 1564357
aauaaagcugguuaaguua

SEQ ID NO: 1873808 - RNA, 19 nt, Artificial Sequence
  Description of Artificial Sequence: Synthetic oligonucleotide
  Antisense strand to SEQ ID NO: 1873807
uaacuuaaccagcuuuauu

SEQ ID NO: 1873809 - RNA, 19 nt, Artificial Sequence
  Description of Artificial Sequence: Synthetic oligonucleotide
  Sense strand starting at position 1128 of SEQ ID NO: 1564357
aggagauauuccucuggug

SEQ ID NO: 1873810 - RNA, 19 nt, Artificial Sequence
  Description of Artificial Sequence: Synthetic oligonucleotide
  Antisense strand to SEQ ID NO: 1873809
caccagaggaauaucuccu

SEQ ID NO: 1873811 - RNA, 19 nt, Artificial Sequence
  Description of Artificial Sequence: Synthetic oligonucleotide
  Sense strand starting at position 1130 of SEQ ID NO: 1564357
gagauauuccucuggugcu

SEQ ID NO: 1873812 - RNA, 19 nt, Artificial Sequence
  Description of Artificial Sequence: Synthetic oligonucleotide
  Antisense strand to SEQ ID NO: 1873811
agcaccagaggaauaucuc

SEQ ID NO: 1873813 - RNA, 19 nt, Artificial Sequence
  Description of Artificial Sequence: Synthetic oligonucleotide
  Sense strand starting at position 1169 of SEQ ID NO: 1564357
uuaaauguccuacaggcuu

SEQ ID NO: 1873814 - RNA, 19 nt, Artificial Sequence
  Description of Artificial Sequence: Synthetic oligonucleotide
  Antisense strand to SEQ ID NO: 1873813
aagccuguaggacauuuaa

SEQ ID NO: 1873815 - RNA, 19 nt, Artificial Sequence
  Description of Artificial Sequence: Synthetic oligonucleotide
  Sense strand starting at position 1221 of SEQ ID NO: 1564357
cccuauaugguaggaggua

SEQ ID NO: 1873816 - RNA, 19 nt, Artificial Sequence
  Description of Artificial Sequence: Synthetic oligonucleotide
  Antisense strand to SEQ ID NO: 1873815
uaccuccuaccauauaggg

SEQ ID NO: 1873817 - RNA, 19 nt, Artificial Sequence
  Description of Artificial Sequence: Synthetic oligonucleotide
  Sense strand starting at position 1234 of SEQ ID NO: 1564357
gagguaugauuaccacuau

SEQ ID NO: 1873818 - RNA, 19 nt, Artificial Sequence
  Description of Artificial Sequence: Synthetic oligonucleotide
  Antisense strand to SEQ ID NO: 1873817
auagugguaaucauaccuc

SEQ ID NO: 1873819 - RNA, 19 nt, Artificial Sequence
  Description of Artificial Sequence: Synthetic oligonucleotide
  Sense strand starting at position 1245 of SEQ ID NO: 1564357
accacuauuccgcacguga

SEQ ID NO: 1873820 - RNA, 19 nt, Artificial Sequence
  Description of Artificial Sequence: Synthetic oligonucleotide
  Antisense strand to SEQ ID NO: 1873819
ucacgugcggaauaguggu

SEQ ID NO: 1873821 - RNA, 19 nt, Artificial Sequence
  Description of Artificial Sequence: Synthetic oligonucleotide
  Sense strand starting at position 1308 of SEQ ID NO: 1564357
ggugcuuguaagugacaga

SEQ ID NO: 1873822 - RNA, 19 nt, Artificial Sequence
  Description of Artificial Sequence: Synthetic oligonucleotide
  Antisense strand to SEQ ID NO: 1873821
ucugucacuuacaagcacc

SEQ ID NO: 1873823 - RNA, 19 nt, Artificial Sequence
  Description of Artificial Sequence: Synthetic oligonucleotide
  Sense strand starting at position 1458 of SEQ ID NO: 1564357
uguguuguaaccuagggaa

SEQ ID NO: 1873824 - RNA, 19 nt, Artificial Sequence
  Description of Artificial Sequence: Synthetic oligonucleotide
  Antisense strand to SEQ ID NO: 1873823
uucccuagguuacaacaca

SEQ ID NO: 1873825 - RNA, 19 nt, Artificial Sequence
  Description of Artificial Sequence: Synthetic oligonucleotide
  Sense strand starting at position 1460 of SEQ ID NO: 1564357
uguuguaaccuagggaaag

SEQ ID NO: 1873826 - RNA, 19 nt, Artificial Sequence
  Description of Artificial Sequence: Synthetic oligonucleotide
  Antisense strand to SEQ ID NO: 1873825
cuuucccuagguuacaaca

SEQ ID NO: 1873827 - RNA, 19 nt, Artificial Sequence
  Description of Artificial Sequence: Synthetic oligonucleotide
  Sense strand starting at position 2223 of SEQ ID NO: 1564357
caaauagaucgucaaggcu

SEQ ID NO: 1873828 - RNA, 19 nt, Artificial Sequence
  Description of Artificial Sequence: Synthetic oligonucleotide
  Antisense strand to SEQ ID NO: 1873827
agccuugacgaucuauuug

SEQ ID NO: 1873829 - RNA, 19 nt, Artificial Sequence
  Description of Artificial Sequence: Synthetic oligonucleotide
  Sense strand starting at position 2245 of SEQ ID NO: 1564357
cagcaagguuugucaaccu

SEQ ID NO: 1873830 - RNA, 19 nt, Artificial Sequence
  Description of Artificial Sequence: Synthetic oligonucleotide
  Antisense strand to SEQ ID NO: 1873829
agguugacaaaccuugcug

SEQ ID NO: 1873831 - RNA, 19 nt, Artificial Sequence
  Description of Artificial Sequence: Synthetic oligonucleotide
  Sense strand starting at position 2252 of SEQ ID NO: 1564357
guuugucaaccuuagcacu

SEQ ID NO: 1873832 - RNA, 19 nt, Artificial Sequence
  Description of Artificial Sequence: Synthetic oligonucleotide
  Antisense strand to SEQ ID NO: 1873831
agugcuaagguugacaaac

SEQ ID NO: 1873833 - RNA, 19 nt, Artificial Sequence
  Description of Artificial Sequence: Synthetic oligonucleotide
  Sense strand starting at position 2461 of SEQ ID NO: 1564357
gaacgaugguucucgaccu

SEQ ID NO: 1873834 - RNA, 19 nt, Artificial Sequence
  Description of Artificial Sequence: Synthetic oligonucleotide
  Antisense strand to SEQ ID NO: 1873833
aggucgagaaccaucguuc

SEQ ID NO: 1873835 - RNA, 19 nt, Artificial Sequence
  Description of Artificial Sequence: Synthetic oligonucleotide
  Sense strand starting at position 2565 of SEQ ID NO: 1564357
cugggacuucgggaaguuu

SEQ ID NO: 1873836 - RNA, 19 nt, Artificial Sequence
  Description of Artificial Sequence: Synthetic oligonucleotide
  Antisense strand to SEQ ID NO: 1873835
aaacuucccgaagucccag

SEQ ID NO: 1873837 - RNA, 19 nt, Artificial Sequence
  Description of Artificial Sequence: Synthetic oligonucleotide
  Sense strand starting at position 2918 of SEQ ID NO: 1564357
uugaaaugaccuggcaaag

SEQ ID NO: 1873838 - RNA, 19 nt, Artificial Sequence
  Description of Artificial Sequence: Synthetic oligonucleotide
  Antisense strand to SEQ ID NO: 1873837
cuuugccaggucauuucaa

SEQ ID NO: 1873839 - RNA, 19 nt, Artificial Sequence
  Description of Artificial Sequence: Synthetic oligonucleotide
  Sense strand starting at position 3046 of SEQ ID NO: 1564357
ggccaucuauugcuucuaa

SEQ ID NO: 1873840 - RNA, 19 nt, Artificial Sequence
  Description of Artificial Sequence: Synthetic oligonucleotide
  Antisense strand to SEQ ID NO: 1873839
uuagaagcaauagauggcc

SEQ ID NO: 1873841 - RNA, 19 nt, Artificial Sequence
  Description of Artificial Sequence: Synthetic oligonucleotide
  Sense strand starting at position 3521 of SEQ ID NO: 1564357
caguacuuccuaggugauu

SEQ ID NO: 1873842 - RNA, 19 nt, Artificial Sequence
  Description of Artificial Sequence: Synthetic oligonucleotide
  Antisense strand to SEQ ID NO: 1873841
aaucaccuaggaaguacug

SEQ ID NO: 1873843 - RNA, 19 nt, Artificial Sequence
  Description of Artificial Sequence: Synthetic oligonucleotide
  Sense strand starting at position 3526 of SEQ ID NO: 1564357
cuuccuaggugauucucaa

SEQ ID NO: 1873844 - RNA, 19 nt, Artificial Sequence
  Description of Artificial Sequence: Synthetic oligonucleotide
  Antisense strand to SEQ ID NO: 1873843
uugagaaucaccuaggaag

SEQ ID NO: 1873845 - RNA, 19 nt, Artificial Sequence
  Description of Artificial Sequence: Synthetic oligonucleotide
  Sense strand starting at position 3553 of SEQ ID NO: 1564357
agaguugugaaacacugua

SEQ ID NO: 1873846 - RNA, 19 nt, Artificial Sequence
  Description of Artificial Sequence: Synthetic oligonucleotide
  Antisense strand to SEQ ID NO: 1873845
uacaguguuucacaacucu

SEQ ID NO: 1873847 - RNA, 19 nt, Artificial Sequence
  Description of Artificial Sequence: Synthetic oligonucleotide
  Sense strand starting at position 3906 of SEQ ID NO: 1564357
uuugcagacguuuaaacau

SEQ ID NO: 1873848 - RNA, 19 nt, Artificial Sequence
  Description of Artificial Sequence: Synthetic oligonucleotide
  Antisense strand to SEQ ID NO: 1873847
auguuuaaacgucugcaaa

SEQ ID NO: 1873849 - RNA, 19 nt, Artificial Sequence
  Description of Artificial Sequence: Synthetic oligonucleotide
  Sense strand starting at position 3915 of SEQ ID NO: 1564357
guuuaaacaucagaggaaa

SEQ ID NO: 1873850 - RNA, 19 nt, Artificial Sequence
  Description of Artificial Sequence: Synthetic oligonucleotide
  Antisense strand to SEQ ID NO: 1873849
uuuccucugauguuuaaac

SEQ ID NO: 1873851 - RNA, 19 nt, Artificial Sequence
  Description of Artificial Sequence: Synthetic oligonucleotide
  Sense strand starting at position 3950 of SEQ ID NO: 1564357
ucuagaguuggcuggaucu

SEQ ID NO: 1873852 - RNA, 19 nt, Artificial Sequence
  Description of Artificial Sequence: Synthetic oligonucleotide
  Antisense strand to SEQ ID NO: 1873851
agauccagccaacucuaga

SEQ ID NO: 1873853 - RNA, 19 nt, Artificial Sequence
  Description of Artificial Sequence: Synthetic oligonucleotide
  Sense strand starting at position 44 of SEQ ID NO: 1564358
guuuguuguacuuaauuga

SEQ ID NO: 1873854 - RNA, 19 nt, Artificial Sequence
  Description of Artificial Sequence: Synthetic oligonucleotide
  Antisense strand to SEQ ID NO: 1873853
ucaauuaaguacaacaaac

SEQ ID NO: 1873855 - RNA, 19 nt, Artificial Sequence
  Description of Artificial Sequence: Synthetic oligonucleotide
  Sense strand starting at position 47 of SEQ ID NO: 1564358
uguuguacuuaauugagga

SEQ ID NO: 1873856 - RNA, 19 nt, Artificial Sequence
  Description of Artificial Sequence: Synthetic oligonucleotide
  Antisense strand to SEQ ID NO: 1873855
uccucaauuaaguacaaca

SEQ ID NO: 1873857 - RNA, 19 nt, Artificial Sequence
  Description of Artificial Sequence: Synthetic oligonucleotide
  Sense strand starting at position 48 of SEQ ID NO: 1564358
guuguacuuaauugaggaa

SEQ ID NO: 1873858 - RNA, 19 nt, Artificial Sequence
  Description of Artificial Sequence: Synthetic oligonucleotide
  Antisense strand to SEQ ID NO: 1873857
uuccucaauuaaguacaac

SEQ ID NO: 1873859 - RNA, 19 nt, Artificial Sequence
  Description of Artificial Sequence: Synthetic oligonucleotide
  Sense strand starting at position 146 of SEQ ID NO: 1564358
uagguaacaucgccuggau

SEQ ID NO: 1873860 - RNA, 19 nt, Artificial Sequence
  Description of Artificial Sequence: Synthetic oligonucleotide
  Antisense strand to SEQ ID NO: 1873859
auccaggcgauguuaccua

SEQ ID NO: 1873861 - RNA, 19 nt, Artificial Sequence
  Description of Artificial Sequence: Synthetic oligonucleotide
  Sense strand starting at position 149 of SEQ ID NO: 1564358
guaacaucgccuggauaca

SEQ ID NO: 1873862 - RNA, 19 nt, Artificial Sequence
  Description of Artificial Sequence: Synthetic oligonucleotide
  Antisense strand to SEQ ID NO: 1873861
uguauccaggcgauguuac

SEQ ID NO: 1873863 - RNA, 19 nt, Artificial Sequence
  Description of Artificial Sequence: Synthetic oligonucleotide
  Sense strand starting at position 161 of SEQ ID NO: 1564358
ggauacaaaggucgaaauu

SEQ ID NO: 1873864 - RNA, 19 nt, Artificial Sequence
  Description of Artificial Sequence: Synthetic oligonucleotide
  Antisense strand to SEQ ID NO: 1873863
aauuucgaccuuuguaucc

SEQ ID NO: 1873865 - RNA, 19 nt, Artificial Sequence
  Description of Artificial Sequence: Synthetic oligonucleotide
  Sense strand starting at position 189 of SEQ ID NO: 1564358
gugggaugcuaugcaaauu

SEQ ID NO: 1873866 - RNA, 19 nt, Artificial Sequence
  Description of Artificial Sequence: Synthetic oligonucleotide
  Antisense strand to SEQ ID NO: 1873865
aauuugcauagcaucccac

SEQ ID NO: 1873867 - RNA, 19 nt, Artificial Sequence
  Description of Artificial Sequence: Synthetic oligonucleotide
  Sense strand starting at position 256 of SEQ ID NO: 1564358
gcuggaucacugggugaga

SEQ ID NO: 1873868 - RNA, 19 nt, Artificial Sequence
  Description of Artificial Sequence: Synthetic oligonucleotide
  Antisense strand to SEQ ID NO: 1873867
ucucacccagugauccagc

SEQ ID NO: 1873869 - RNA, 19 nt, Artificial Sequence
  Description of Artificial Sequence: Synthetic oligonucleotide
  Sense strand starting at position 269 of SEQ ID NO: 1564358
gugagaaaguuggugugga

SEQ ID NO: 1873870 - RNA, 19 nt, Artificial Sequence
  Description of Artificial Sequence: Synthetic oligonucleotide
  Antisense strand to SEQ ID NO: 1873869
uccacaccaacuuucucac

SEQ ID NO: 1873871 - RNA, 19 nt, Artificial Sequence
  Description of Artificial Sequence: Synthetic oligonucleotide
  Sense strand starting at position 296 of SEQ ID NO: 1564358
agaacucaugugggaguuu

SEQ ID NO: 1873872 - RNA, 19 nt, Artificial Sequence
  Description of Artificial Sequence: Synthetic oligonucleotide
  Antisense strand to SEQ ID NO: 1873871
aaacucccacaugaguucu

SEQ ID NO: 1873873 - RNA, 19 nt, Artificial Sequence
  Description of Artificial Sequence: Synthetic oligonucleotide
  Sense strand starting at position 441 of SEQ ID NO: 1564358
cucagaaucucuguuacug

SEQ ID NO: 1873874 - RNA, 19 nt, Artificial Sequence
  Description of Artificial Sequence: Synthetic oligonucleotide
  Antisense strand to SEQ ID NO: 1873873
caguaacagagauucugag

SEQ ID NO: 1873875 - RNA, 19 nt, Artificial Sequence
  Description of Artificial Sequence: Synthetic oligonucleotide
  Sense strand starting at position 461 of SEQ ID NO: 1564358
caggauuccugcccaggaa

SEQ ID NO: 1873876 - RNA, 19 nt, Artificial Sequence
  Description of Artificial Sequence: Synthetic oligonucleotide
  Antisense strand to SEQ ID NO: 1873875
uuccugggcaggaauccug

SEQ ID NO: 1873877 - RNA, 19 nt, Artificial Sequence
  Description of Artificial Sequence: Synthetic oligonucleotide
  Sense strand starting at position 513 of SEQ ID NO: 1564358
ugugcugaugguuagaaga

SEQ ID NO: 1873878 - RNA, 19 nt, Artificial Sequence
  Description of Artificial Sequence: Synthetic oligonucleotide
  Antisense strand to SEQ ID NO: 1873877
ucuucuaaccaucagcaca

SEQ ID NO: 1873879 - RNA, 19 nt, Artificial Sequence
  Description of Artificial Sequence: Synthetic oligonucleotide
  Sense strand starting at position 584 of SEQ ID NO: 1564358
gcaaauuacugcucaauag

SEQ ID NO: 1873880 - RNA, 19 nt, Artificial Sequence
  Description of Artificial Sequence: Synthetic oligonucleotide
  Antisense strand to SEQ ID NO: 1873879
cuauugagcaguaauuugc

SEQ ID NO: 1873881 - RNA, 19 nt, Artificial Sequence
  Description of Artificial Sequence: Synthetic oligonucleotide
  Sense strand starting at position 2208 of SEQ ID NO: 1564358
gagcgugcgaaugaaugaa

SEQ ID NO: 1873882 - RNA, 19 nt, Artificial Sequence
  Description of Artificial Sequence: Synthetic oligonucleotide
  Antisense strand to SEQ ID NO: 1873881
uucauucauucgcacgcuc

SEQ ID NO: 1873883 - RNA, 19 nt, Artificial Sequence
  Description of Artificial Sequence: Synthetic oligonucleotide
  Sense strand starting at position 2355 of SEQ ID NO: 1564358
gaaagccaguauucuguau

SEQ ID NO: 1873884 - RNA, 19 nt, Artificial Sequence
  Description of Artificial Sequence: Synthetic oligonucleotide
  Antisense strand to SEQ ID NO: 1873883
auacagaauacuggcuuuc

SEQ ID NO: 1873885 - RNA, 19 nt, Artificial Sequence
  Description of Artificial Sequence: Synthetic oligonucleotide
  Sense strand starting at position 2359 of SEQ ID NO: 1564358
gccaguauucuguaugaau

SEQ ID NO: 1873886 - RNA, 19 nt, Artificial Sequence
  Description of Artificial Sequence: Synthetic oligonucleotide
  Antisense strand to SEQ ID NO: 1873885
auucauacagaauacuggc

SEQ ID NO: 1873887 - RNA, 19 nt, Artificial Sequence
  Description of Artificial Sequence: Synthetic oligonucleotide
  Sense strand starting at position 2376 of SEQ ID NO: 1564358
auggaaucagaucguaugu

SEQ ID NO: 1873888 - RNA, 19 nt, Artificial Sequence
  Description of Artificial Sequence: Synthetic oligonucleotide
  Antisense strand to SEQ ID NO: 1873887
acauacgaucugauuccau

SEQ ID NO: 1873889 - RNA, 19 nt, Artificial Sequence
  Description of Artificial Sequence: Synthetic oligonucleotide
  Sense strand starting at position 2381 of SEQ ID NO: 1564358
aucagaucguauguacuau

SEQ ID NO: 1873890 - RNA, 19 nt, Artificial Sequence
  Description of Artificial Sequence: Synthetic oligonucleotide
  Antisense strand to SEQ ID NO: 1873889
auaguacauacgaucugau

SEQ ID NO: 1873891 - RNA, 19 nt, Artificial Sequence
  Description of Artificial Sequence: Synthetic oligonucleotide
  Sense strand starting at position 2442 of SEQ ID NO: 1564358
uuaucuauguuguugaaug

SEQ ID NO: 1873892 - RNA, 19 nt, Artificial Sequence
  Description of Artificial Sequence: Synthetic oligonucleotide
  Antisense strand to SEQ ID NO: 1873891
cauucaacaacauagauaa

SEQ ID NO: 1873893 - RNA, 19 nt, Artificial Sequence
  Description of Artificial Sequence: Synthetic oligonucleotide
  Sense strand starting at position 2477 of SEQ ID NO: 1564358
uaugcuauuguuuggauau

SEQ ID NO: 1873894 - RNA, 19 nt, Artificial Sequence
  Description of Artificial Sequence: Synthetic oligonucleotide
  Antisense strand to SEQ ID NO: 1873893
auauccaaacaauagcaua

SEQ ID NO: 1873895 - RNA, 19 nt, Artificial Sequence
  Description of Artificial Sequence: Synthetic oligonucleotide
  Sense strand starting at position 2494 of SEQ ID NO: 1564358
auaucagaguugguuuguu

SEQ ID NO: 1873896 - RNA, 19 nt, Artificial Sequence
  Description of Artificial Sequence: Synthetic oligonucleotide
  Antisense strand to SEQ ID NO: 1873895
aacaaaccaacucugauau

SEQ ID NO: 1873897 - RNA, 19 nt, Artificial Sequence
  Description of Artificial Sequence: Synthetic oligonucleotide
  Sense strand starting at position 2541 of SEQ ID NO: 1564358
uccaguuugggcgauuaua

SEQ ID NO: 1873898 - RNA, 19 nt, Artificial Sequence
  Description of Artificial Sequence: Synthetic oligonucleotide
  Antisense strand to SEQ ID NO: 1873897
uauaaucgcccaaacugga

SEQ ID NO: 1873899 - RNA, 19 nt, Artificial Sequence
  Description of Artificial Sequence: Synthetic oligonucleotide
  Sense strand starting at position 2647 of SEQ ID NO: 1564358
gccacaucacaggauaguu

SEQ ID NO: 1873900 - RNA, 19 nt, Artificial Sequence
  Description of Artificial Sequence: Synthetic oligonucleotide
  Antisense strand to SEQ ID NO: 1873899
aacuauccugugauguggc

SEQ ID NO: 1873901 - RNA, 19 nt, Artificial Sequence
  Description of Artificial Sequence: Synthetic oligonucleotide
  Sense strand starting at position 2699 of SEQ ID NO: 1564358
caaagugguugugcaauuu

SEQ ID NO: 1873902 - RNA, 19 nt, Artificial Sequence
  Description of Artificial Sequence: Synthetic oligonucleotide
  Antisense strand to SEQ ID NO: 1873901
aaauugcacaaccacuuug

SEQ ID NO: 1873903 - RNA, 19 nt, Artificial Sequence
  Description of Artificial Sequence: Synthetic oligonucleotide
  Sense strand starting at position 2861 of SEQ ID NO: 1564358
aauuauguugaguaugcuu

SEQ ID NO: 1873904 - RNA, 19 nt, Artificial Sequence
  Description of Artificial Sequence: Synthetic oligonucleotide
  Antisense strand to SEQ ID NO: 1873903
aagcauacucaacauaauu

SEQ ID NO: 1873905 - RNA, 19 nt, Artificial Sequence
  Description of Artificial Sequence: Synthetic oligonucleotide
  Sense strand starting at position 2942 of SEQ ID NO: 1564358
caauguuaugugcaguaua

SEQ ID NO: 1873906 - RNA, 19 nt, Artificial Sequence
  Description of Artificial Sequence: Synthetic oligonucleotide
  Antisense strand to SEQ ID NO: 1873905
uauacugcacauaacauug

SEQ ID NO: 1873907 - RNA, 19 nt, Artificial Sequence
  Description of Artificial Sequence: Synthetic oligonucleotide
  Sense strand starting at position 2945 of SEQ ID NO: 1564358
uguuaugugcaguauauau

SEQ ID NO: 1873908 - RNA, 19 nt, Artificial Sequence
  Description of Artificial Sequence: Synthetic oligonucleotide
  Antisense strand to SEQ ID NO: 1873907
auauauacugcacauaaca

SEQ ID NO: 1873909 - RNA, 19 nt, Artificial Sequence
  Description of Artificial Sequence: Synthetic oligonucleotide
  Sense strand starting at position 3009 of SEQ ID NO: 1564358
agagaaagcuagcccauua

SEQ ID NO: 1873910 - RNA, 19 nt, Artificial Sequence
  Description of Artificial Sequence: Synthetic oligonucleotide
  Antisense strand to SEQ ID NO: 1873909
uaaugggcuagcuuucucu

SEQ ID NO: 1873911 - RNA, 19 nt, Artificial Sequence
  Description of Artificial Sequence: Synthetic oligonucleotide
  Sense strand starting at position 3085 of SEQ ID NO: 1564358
cauguaguuccugagaaau

SEQ ID NO: 1873912 - RNA, 19 nt, Artificial Sequence
  Description of Artificial Sequence: Synthetic oligonucleotide
  Antisense strand to SEQ ID NO: 1873911
auuucucaggaacuacaug

SEQ ID NO: 1873913 - RNA, 19 nt, Artificial Sequence
  Description of Artificial Sequence: Synthetic oligonucleotide
  Sense strand starting at position 3191 of SEQ ID NO: 1564358
uacgaaugacccugucauc

SEQ ID NO: 1873914 - RNA, 19 nt, Artificial Sequence
  Description of Artificial Sequence: Synthetic oligonucleotide
  Antisense strand to SEQ ID NO: 1873913
gaugacagggucauucgua

SEQ ID NO: 1873915 - RNA, 19 nt, Artificial Sequence
  Description of Artificial Sequence: Synthetic oligonucleotide
  Sense strand starting at position 3515 of SEQ ID NO: 1564358
gaugaucaccuagguugau

SEQ ID NO: 1873916 - RNA, 19 nt, Artificial Sequence
  Description of Artificial Sequence: Synthetic oligonucleotide
  Antisense strand to SEQ ID NO: 1873915
aucaaccuaggugaucauc

SEQ ID NO: 1873917 - RNA, 19 nt, Artificial Sequence
  Description of Artificial Sequence: Synthetic oligonucleotide
  Sense strand starting at position 3516 of SEQ ID NO: 1564358
augaucaccuagguugauu

SEQ ID NO: 1873918 - RNA, 19 nt, Artificial Sequence
  Description of Artificial Sequence: Synthetic oligonucleotide
  Antisense strand to SEQ ID NO: 1873917
aaucaaccuaggugaucau

SEQ ID NO: 1873919 - RNA, 19 nt, Artificial Sequence
  Description of Artificial Sequence: Synthetic oligonucleotide
  Sense strand starting at position 3561 of SEQ ID NO: 1564358
cugugaugaccauacaggu

SEQ ID NO: 1873920 - RNA, 19 nt, Artificial Sequence
  Description of Artificial Sequence: Synthetic oligonucleotide
  Antisense strand to SEQ ID NO: 1873919
accuguauggucaucacag

SEQ ID NO: 1873921 - RNA, 19 nt, Artificial Sequence
  Description of Artificial Sequence: Synthetic oligonucleotide
  Sense strand starting at position 3650 of SEQ ID NO: 1564358
aaugguagcucuguuauaa

SEQ ID NO: 1873922 - RNA, 19 nt, Artificial Sequence
  Description of Artificial Sequence: Synthetic oligonucleotide
  Antisense strand to SEQ ID NO: 1873921
uuauaacagagcuaccauu

SEQ ID NO: 1873923 - RNA, 19 nt, Artificial Sequence
  Description of Artificial Sequence: Synthetic oligonucleotide
  Sense strand starting at position 3661 of SEQ ID NO: 1564358
uguuauaaguuguuugaga

SEQ ID NO: 1873924 - RNA, 19 nt, Artificial Sequence
  Description of Artificial Sequence: Synthetic oligonucleotide
  Antisense strand to SEQ ID NO: 1873923
ucucaaacaacuuauaaca

SEQ ID NO: 1873925 - RNA, 19 nt, Artificial Sequence
  Description of Artificial Sequence: Synthetic oligonucleotide
  Sense strand starting at position 3662 of SEQ ID NO: 1564358
guuauaaguuguuugagaa

SEQ ID NO: 1873926 - RNA, 19 nt, Artificial Sequence
  Description of Artificial Sequence: Synthetic oligonucleotide
  Antisense strand to SEQ ID NO: 1873925
uucucaaacaacuuauaac

SEQ ID NO: 1873927 - RNA, 19 nt, Artificial Sequence
  Description of Artificial Sequence: Synthetic oligonucleotide
  Sense strand starting at position 3798 of SEQ ID NO: 1564358
uggccauucucacuggagu

SEQ ID NO: 1873928 - RNA, 19 nt, Artificial Sequence
  Description of Artificial Sequence: Synthetic oligonucleotide
  Antisense strand to SEQ ID NO: 1873927
acuccagugagaauggcca

SEQ ID NO: 1873929 - RNA, 19 nt, Artificial Sequence
  Description of Artificial Sequence: Synthetic oligonucleotide
  Sense strand starting at position 3804 of SEQ ID NO: 1564358
uucucacuggagugagaua

SEQ ID NO: 1873930 - RNA, 19 nt, Artificial Sequence
  Description of Artificial Sequence: Synthetic oligonucleotide
  Antisense strand to SEQ ID NO: 1873929
uaucucacuccagugagaa

SEQ ID NO: 1873931 - RNA, 19 nt, Artificial Sequence
  Description of Artificial Sequence: Synthetic oligonucleotide
  Sense strand starting at position 3815 of SEQ ID NO: 1564358
gugagauagugucccauug

SEQ ID NO: 1873932 - RNA, 19 nt, Artificial Sequence
  Description of Artificial Sequence: Synthetic oligonucleotide
  Antisense strand to SEQ ID NO: 1873931
caaugggacacuaucucac

SEQ ID NO: 1873933 - RNA, 19 nt, Artificial Sequence
  Description of Artificial Sequence: Synthetic oligonucleotide
  Sense strand starting at position 488 of SEQ ID NO: 1564359
ucagaaagccuagguuuaa

SEQ ID NO: 1873934 - RNA, 19 nt, Artificial Sequence
  Description of Artificial Sequence: Synthetic oligonucleotide
  Antisense strand to SEQ ID NO: 1873933
uuaaaccuaggcuuucuga

SEQ ID NO: 1873935 - RNA, 19 nt, Artificial Sequence
  Description of Artificial Sequence: Synthetic oligonucleotide
  Sense strand starting at position 489 of SEQ ID NO: 1564359
cagaaagccuagguuuaag

SEQ ID NO: 1873936 - RNA, 19 nt, Artificial Sequence
  Description of Artificial Sequence: Synthetic oligonucleotide
  Antisense strand to SEQ ID NO: 1873935
cuuaaaccuaggcuuucug

SEQ ID NO: 1873937 - RNA, 19 nt, Artificial Sequence
  Description of Artificial Sequence: Synthetic oligonucleotide
  Sense strand starting at position 500 of SEQ ID NO: 1564359
gguuuaagaauugguucca

SEQ ID NO: 1873938 - RNA, 19 nt, Artificial Sequence
  Description of Artificial Sequence: Synthetic oligonucleotide
  Antisense strand to SEQ ID NO: 1873937
uggaaccaauucuuaaacc

SEQ ID NO: 1873939 - RNA, 19 nt, Artificial Sequence
  Description of Artificial Sequence: Synthetic oligonucleotide
  Sense strand starting at position 501 of SEQ ID NO: 1564359
guuuaagaauugguuccau

SEQ ID NO: 1873940 - RNA, 19 nt, Artificial Sequence
  Description of Artificial Sequence: Synthetic oligonucleotide
  Antisense strand to SEQ ID NO: 1873939
auggaaccaauucuuaaac

SEQ ID NO: 1873941 - RNA, 19 nt, Artificial Sequence
  Description of Artificial Sequence: Synthetic oligonucleotide
  Sense strand starting at position 529 of SEQ ID NO: 1564359
ggcacaugaccucgguaaa

SEQ ID NO: 1873942 - RNA, 19 nt, Artificial Sequence
  Description of Artificial Sequence: Synthetic oligonucleotide
  Antisense strand to SEQ ID NO: 1873941
uuuaccgaggucaugugcc

SEQ ID NO: 1873943 - RNA, 19 nt, Artificial Sequence
  Description of Artificial Sequence: Synthetic oligonucleotide
  Sense strand starting at position 530 of SEQ ID NO: 1564359
gcacaugaccucgguaaag

SEQ ID NO: 1873944 - RNA, 19 nt, Artificial Sequence
  Description of Artificial Sequence: Synthetic oligonucleotide
  Antisense strand to SEQ ID NO: 1873943
cuuuaccgaggucaugugc

SEQ ID NO: 1873945 - RNA, 19 nt, Artificial Sequence
  Description of Artificial Sequence: Synthetic oligonucleotide
  Sense strand starting at position 532 of SEQ ID NO: 1564359
acaugaccucgguaaaguu

SEQ ID NO: 1873946 - RNA, 19 nt, Artificial Sequence
  Description of Artificial Sequence: Synthetic oligonucleotide
  Antisense strand to SEQ ID NO: 1873945
aacuuuaccgaggucaugu

SEQ ID NO: 1873947 - RNA, 19 nt, Artificial Sequence
  Description of Artificial Sequence: Synthetic oligonucleotide
  Sense strand starting at position 617 of SEQ ID NO: 1564359
gggugcuaccaaugaaaua

SEQ ID NO: 1873948 - RNA, 19 nt, Artificial Sequence
  Description of Artificial Sequence: Synthetic oligonucleotide
  Antisense strand to SEQ ID NO: 1873947
uauuucauugguagcaccc

SEQ ID NO: 1873949 - RNA, 19 nt, Artificial Sequence
  Description of Artificial Sequence: Synthetic oligonucleotide
  Sense strand starting at position 665 of SEQ ID NO: 1564359
ucuguacugcuguagaaac

SEQ ID NO: 1873950 - RNA, 19 nt, Artificial Sequence
  Description of Artificial Sequence: Synthetic oligonucleotide
  Antisense strand to SEQ ID NO: 1873949
guuucuacagcaguacaga

SEQ ID NO: 1873951 - RNA, 19 nt, Artificial Sequence
  Description of Artificial Sequence: Synthetic oligonucleotide
  Sense strand starting at position 667 of SEQ ID NO: 1564359
uguacugcuguagaaacau

SEQ ID NO: 1873952 - RNA, 19 nt, Artificial Sequence
  Description of Artificial Sequence: Synthetic oligonucleotide
  Antisense strand to SEQ ID NO: 1873951
auguuucuacagcaguaca

SEQ ID NO: 1873953 - RNA, 19 nt, Artificial Sequence
  Description of Artificial Sequence: Synthetic oligonucleotide
  Sense strand starting at position 740 of SEQ ID NO: 1564359
gaaguuucugcguaaggag

SEQ ID NO: 1873954 - RNA, 19 nt, Artificial Sequence
  Description of Artificial Sequence: Synthetic oligonucleotide
  Antisense strand to SEQ ID NO: 1873953
cuccuuacgcagaaacuuc

SEQ ID NO: 1873955 - RNA, 19 nt, Artificial Sequence
  Description of Artificial Sequence: Synthetic oligonucleotide
  Sense strand starting at position 749 of SEQ ID NO: 1564359
gcguaaggagauuaaguuu

SEQ ID NO: 1873956 - RNA, 19 nt, Artificial Sequence
  Description of Artificial Sequence: Synthetic oligonucleotide
  Antisense strand to SEQ ID NO: 1873955
aaacuuaaucuccuuacgc

SEQ ID NO: 1873957 - RNA, 19 nt, Artificial Sequence
  Description of Artificial Sequence: Synthetic oligonucleotide
  Sense strand starting at position 755 of SEQ ID NO: 1564359
ggagauuaaguuugcacag

SEQ ID NO: 1873958 - RNA, 19 nt, Artificial Sequence
  Description of Artificial Sequence: Synthetic oligonucleotide
  Antisense strand to SEQ ID NO: 1873957
cugugcaaacuuaaucucc

SEQ ID NO: 1873959 - RNA, 19 nt, Artificial Sequence
  Description of Artificial Sequence: Synthetic oligonucleotide
  Sense strand starting at position 756 of SEQ ID NO: 1564359
gagauuaaguuugcacagu

SEQ ID NO: 1873960 - RNA, 19 nt, Artificial Sequence
  Description of Artificial Sequence: Synthetic oligonucleotide
  Antisense strand to SEQ ID NO: 1873959
acugugcaaacuuaaucuc

SEQ ID NO: 1873961 - RNA, 19 nt, Artificial Sequence
  Description of Artificial Sequence: Synthetic oligonucleotide
  Sense strand starting at position 917 of SEQ ID NO: 1564359
aauuuaaggucgcagauuu

SEQ ID NO: 1873962 - RNA, 19 nt, Artificial Sequence
  Description of Artificial Sequence: Synthetic oligonucleotide
  Antisense strand to SEQ ID NO: 1873961
aaaucugcgaccuuaaauu

SEQ ID NO: 1873963 - RNA, 19 nt, Artificial Sequence
  Description of Artificial Sequence: Synthetic oligonucleotide
  Sense strand starting at position 1095 of SEQ ID NO: 1564359
ucucuagagcaggaguaua

SEQ ID NO: 1873964 - RNA, 19 nt, Artificial Sequence
  Description of Artificial Sequence: Synthetic oligonucleotide
  Antisense strand to SEQ ID NO: 1873963
uauacuccugcucuagaga

SEQ ID NO: 1873965 - RNA, 19 nt, Artificial Sequence
  Description of Artificial Sequence: Synthetic oligonucleotide
  Sense strand starting at position 1105 of SEQ ID NO: 1564359
aggaguauaccucagcaua

SEQ ID NO: 1873966 - RNA, 19 nt, Artificial Sequence
  Description of Artificial Sequence: Synthetic oligonucleotide
  Antisense strand to SEQ ID NO: 1873965
uaugcugagguauacuccu

SEQ ID NO: 1873967 - RNA, 19 nt, Artificial Sequence
  Description of Artificial Sequence: Synthetic oligonucleotide
  Sense strand starting at position 1161 of SEQ ID NO: 1564359
cuaguuagaauauagugua

SEQ ID NO: 1873968 - RNA, 19 nt, Artificial Sequence
  Description of Artificial Sequence: Synthetic oligonucleotide
  Antisense strand to SEQ ID NO: 1873967
uacacuauauucuaacuag

SEQ ID NO: 1873969 - RNA, 19 nt, Artificial Sequence
  Description of Artificial Sequence: Synthetic oligonucleotide
  Sense strand starting at position 1202 of SEQ ID NO: 1564359
gggcucuuauccucuagac

SEQ ID NO: 1873970 - RNA, 19 nt, Artificial Sequence
  Description of Artificial Sequence: Synthetic oligonucleotide
  Antisense strand to SEQ ID NO: 1873969
gucuagaggauaagagccc

SEQ ID NO: 1873971 - RNA, 19 nt, Artificial Sequence
  Description of Artificial Sequence: Synthetic oligonucleotide
  Sense strand starting at position 1238 of SEQ ID NO: 1564359
cgauuucugugacagagaa

SEQ ID NO: 1873972 - RNA, 19 nt, Artificial Sequence
  Description of Artificial Sequence: Synthetic oligonucleotide
  Antisense strand to SEQ ID NO: 1873971
uucucugucacagaaaucg

SEQ ID NO: 1873973 - RNA, 19 nt, Artificial Sequence
  Description of Artificial Sequence: Synthetic oligonucleotide
  Sense strand starting at position 1345 of SEQ ID NO: 1564359
ggucucugaugccugaaag

SEQ ID NO: 1873974 - RNA, 19 nt, Artificial Sequence
  Description of Artificial Sequence: Synthetic oligonucleotide
  Antisense strand to SEQ ID NO: 1873973
cuuucaggcaucagagacc

SEQ ID NO: 1873975 - RNA, 19 nt, Artificial Sequence
  Description of Artificial Sequence: Synthetic oligonucleotide
  Sense strand starting at position 1386 of SEQ ID NO: 1564359
uuucguuugauugaagaga

SEQ ID NO: 1873976 - RNA, 19 nt, Artificial Sequence
  Description of Artificial Sequence: Synthetic oligonucleotide
  Antisense strand to SEQ ID NO: 1873975
ucucuucaaucaaacgaaa

SEQ ID NO: 1873977 - RNA, 19 nt, Artificial Sequence
  Description of Artificial Sequence: Synthetic oligonucleotide
  Sense strand starting at position 1425 of SEQ ID NO: 1564359
cgucaaacaucaguaucaa

SEQ ID NO: 1873978 - RNA, 19 nt, Artificial Sequence
  Description of Artificial Sequence: Synthetic oligonucleotide
  Antisense strand to SEQ ID NO: 1873977
uugauacugauguuugacg

SEQ ID NO: 1873979 - RNA, 19 nt, Artificial Sequence
  Description of Artificial Sequence: Synthetic oligonucleotide
  Sense strand starting at position 1461 of SEQ ID NO: 1564359
gggaguugccuccagaaug

SEQ ID NO: 1873980 - RNA, 19 nt, Artificial Sequence
  Description of Artificial Sequence: Synthetic oligonucleotide
  Antisense strand to SEQ ID NO: 1873979
cauucuggaggcaacuccc

SEQ ID NO: 1873981 - RNA, 19 nt, Artificial Sequence
  Description of Artificial Sequence: Synthetic oligonucleotide
  Sense strand starting at position 2116 of SEQ ID NO: 1564359
gaggaaguguaauugacua

SEQ ID NO: 1873982 - RNA, 19 nt, Artificial Sequence
  Description of Artificial Sequence: Synthetic oligonucleotide
  Antisense strand to SEQ ID NO: 1873981
uagucaauuacacuuccuc

SEQ ID NO: 1873983 - RNA, 19 nt, Artificial Sequence
  Description of Artificial Sequence: Synthetic oligonucleotide
  Sense strand starting at position 2153 of SEQ ID NO: 1564359
uaagcaaacgcucgauuua

SEQ ID NO: 1873984 - RNA, 19 nt, Artificial Sequence
  Description of Artificial Sequence: Synthetic oligonucleotide
  Antisense strand to SEQ ID NO: 1873983
uaaaucgagcguuugcuua

SEQ ID NO: 1873985 - RNA, 19 nt, Artificial Sequence
  Description of Artificial Sequence: Synthetic oligonucleotide
  Sense strand starting at position 2220 of SEQ ID NO: 1564359
acaugaauucugggucuuc

SEQ ID NO: 1873986 - RNA, 19 nt, Artificial Sequence
  Description of Artificial Sequence: Synthetic oligonucleotide
  Antisense strand to SEQ ID NO: 1873985
gaagacccagaauucaugu

SEQ ID NO: 1873987 - RNA, 19 nt, Artificial Sequence
  Description of Artificial Sequence: Synthetic oligonucleotide
  Sense strand starting at position 2250 of SEQ ID NO: 1564359
gggcuaaagacacgaguua

SEQ ID NO: 1873988 - RNA, 19 nt, Artificial Sequence
  Description of Artificial Sequence: Synthetic oligonucleotide
  Antisense strand to SEQ ID NO: 1873987
uaacucgugucuuuagccc

SEQ ID NO: 1873989 - RNA, 19 nt, Artificial Sequence
  Description of Artificial Sequence: Synthetic oligonucleotide
  Sense strand starting at position 2251 of SEQ ID NO: 1564359
ggcuaaagacacgaguuaa

SEQ ID NO: 1873990 - RNA, 19 nt, Artificial Sequence
  Description of Artificial Sequence: Synthetic oligonucleotide
  Antisense strand to SEQ ID NO: 1873989
uuaacucgugucuuuagcc

SEQ ID NO: 1873991 - RNA, 19 nt, Artificial Sequence
  Description of Artificial Sequence: Synthetic oligonucleotide
  Sense strand starting at position 2360 of SEQ ID NO: 1564359
uuugcuugucucucuguua

SEQ ID NO: 1873992 - RNA, 19 nt, Artificial Sequence
  Description of Artificial Sequence: Synthetic oligonucleotide
  Antisense strand to SEQ ID NO: 1873991
uaacagagagacaagcaaa

SEQ ID NO: 1873993 - RNA, 19 nt, Artificial Sequence
  Description of Artificial Sequence: Synthetic oligonucleotide
  Sense strand starting at position 2380 of SEQ ID NO: 1564359
uucuaauugccauauggau

SEQ ID NO: 1873994 - RNA, 19 nt, Artificial Sequence
  Description of Artificial Sequence: Synthetic oligonucleotide
  Antisense strand to SEQ ID NO: 1873993
auccauauggcaauuagaa

SEQ ID NO: 1873995 - RNA, 19 nt, Artificial Sequence
  Description of Artificial Sequence: Synthetic oligonucleotide
  Sense strand starting at position 2398 of SEQ ID NO: 1564359
ugccuauaguagguacaaa

SEQ ID NO: 1873996 - RNA, 19 nt, Artificial Sequence
  Description of Artificial Sequence: Synthetic oligonucleotide
  Antisense strand to SEQ ID NO: 1873995
uuuguaccuacuauaggca

SEQ ID NO: 1873997 - RNA, 19 nt, Artificial Sequence
  Description of Artificial Sequence: Synthetic oligonucleotide
  Sense strand starting at position 2477 of SEQ ID NO: 1564359
ucuguagucagguacaaug

SEQ ID NO: 1873998 - RNA, 19 nt, Artificial Sequence
  Description of Artificial Sequence: Synthetic oligonucleotide
  Antisense strand to SEQ ID NO: 1873997
cauuguaccugacuacaga

SEQ ID NO: 1873999 - RNA, 19 nt, Artificial Sequence
  Description of Artificial Sequence: Synthetic oligonucleotide
  Sense strand starting at position 2479 of SEQ ID NO: 1564359
uguagucagguacaaugua

SEQ ID NO: 1874000 - RNA, 19 nt, Artificial Sequence
  Description of Artificial Sequence: Synthetic oligonucleotide
  Antisense strand to SEQ ID NO: 1873999
uacauuguaccugacuaca

SEQ ID NO: 1874001 - RNA, 19 nt, Artificial Sequence
  Description of Artificial Sequence: Synthetic oligonucleotide
  Sense strand starting at position 2520 of SEQ ID NO: 1564359
guuaaaucgagcguuugcu

SEQ ID NO: 1874002 - RNA, 19 nt, Artificial Sequence
  Description of Artificial Sequence: Synthetic oligonucleotide
  Antisense strand to SEQ ID NO: 1874001
agcaaacgcucgauuuaac

SEQ ID NO: 1874003 - RNA, 19 nt, Artificial Sequence
  Description of Artificial Sequence: Synthetic oligonucleotide
  Sense strand starting at position 2522 of SEQ ID NO: 1564359
uaaaucgagcguuugcuua

SEQ ID NO: 1874004 - RNA, 19 nt, Artificial Sequence
  Description of Artificial Sequence: Synthetic oligonucleotide
  Antisense strand to SEQ ID NO: 1874003
uaagcaaacgcucgauuua

SEQ ID NO: 1874005 - RNA, 19 nt, Artificial Sequence
  Description of Artificial Sequence: Synthetic oligonucleotide
  Sense strand starting at position 2957 of SEQ ID NO: 1564359
uagacauugugcuuugaac

SEQ ID NO: 1874006 - RNA, 19 nt, Artificial Sequence
  Description of Artificial Sequence: Synthetic oligonucleotide
  Antisense strand to SEQ ID NO: 1874005
guucaaagcacaaugucua

SEQ ID NO: 1874007 - RNA, 19 nt, Artificial Sequence
  Description of Artificial Sequence: Synthetic oligonucleotide
  Sense strand starting at position 3714 of SEQ ID NO: 1564359
uuuggcauuggugggaaau

SEQ ID NO: 1874008 - RNA, 19 nt, Artificial Sequence
  Description of Artificial Sequence: Synthetic oligonucleotide
  Antisense strand to SEQ ID NO: 1874007
auuucccaccaaugccaaa

SEQ ID NO: 1874009 - RNA, 19 nt, Artificial Sequence
  Description of Artificial Sequence: Synthetic oligonucleotide
  Sense strand starting at position 3715 of SEQ ID NO: 1564359
uuggcauuggugggaaauu

SEQ ID NO: 1874010 - RNA, 19 nt, Artificial Sequence
  Description of Artificial Sequence: Synthetic oligonucleotide
  Antisense strand to SEQ ID NO: 1874009
aauuucccaccaaugccaa

SEQ ID NO: 1874011 - RNA, 19 nt, Artificial Sequence
  Description of Artificial Sequence: Synthetic oligonucleotide
  Sense strand starting at position 3751 of SEQ ID NO: 1564359
auuggugcaguugagaaau

SEQ ID NO: 1874012 - RNA, 19 nt, Artificial Sequence
  Description of Artificial Sequence: Synthetic oligonucleotide
  Antisense strand to SEQ ID NO: 1874011
auuucucaacugcaccaau

SEQ ID NO: 1874013 - RNA, 19 nt, Artificial Sequence
  Description of Artificial Sequence: Synthetic oligonucleotide
  Sense strand starting at position 115 of SEQ ID NO: 1564360
uaaauaacccagugguaag

SEQ ID NO: 1874014 - RNA, 19 nt, Artificial Sequence
  Description of Artificial Sequence: Synthetic oligonucleotide
  Antisense strand to SEQ ID NO: 1874013
cuuaccacuggguuauuua

SEQ ID NO: 1874015 - RNA, 19 nt, Artificial Sequence
  Description of Artificial Sequence: Synthetic oligonucleotide
  Sense strand starting at position 125 of SEQ ID NO: 1564360
agugguaagagugaacauu

SEQ ID NO: 1874016 - RNA, 19 nt, Artificial Sequence
  Description of Artificial Sequence: Synthetic oligonucleotide
  Antisense strand to SEQ ID NO: 1874015
aauguucacucuuaccacu

SEQ ID NO: 1874017 - RNA, 19 nt, Artificial Sequence
  Description of Artificial Sequence: Synthetic oligonucleotide
  Sense strand starting at position 262 of SEQ ID NO: 1564360
cuacuugaggauugcuuga

SEQ ID NO: 1874018 - RNA, 19 nt, Artificial Sequence
  Description of Artificial Sequence: Synthetic oligonucleotide
  Antisense strand to SEQ ID NO: 1874017
ucaagcaauccucaaguag

SEQ ID NO: 1874019 - RNA, 19 nt, Artificial Sequence
  Description of Artificial Sequence: Synthetic oligonucleotide
  Sense strand starting at position 887 of SEQ ID NO: 1564360
cgaaguuaagggcagauau

SEQ ID NO: 1874020 - RNA, 19 nt, Artificial Sequence
  Description of Artificial Sequence: Synthetic oligonucleotide
  Antisense strand to SEQ ID NO: 1874019
auaucugcccuuaacuucg

SEQ ID NO: 1874021 - RNA, 19 nt, Artificial Sequence
  Description of Artificial Sequence: Synthetic oligonucleotide
  Sense strand starting at position 1071 of SEQ ID NO: 1564360
gcaggaaccuuggucaauc

SEQ ID NO: 1874022 - RNA, 19 nt, Artificial Sequence
  Description of Artificial Sequence: Synthetic oligonucleotide
  Antisense strand to SEQ ID NO: 1874021
gauugaccaagguuccugc

SEQ ID NO: 1874023 - RNA, 19 nt, Artificial Sequence
  Description of Artificial Sequence: Synthetic oligonucleotide
  Sense strand starting at position 1072 of SEQ ID NO: 1564360
caggaaccuuggucaauca

SEQ ID NO: 1874024 - RNA, 19 nt, Artificial Sequence
  Description of Artificial Sequence: Synthetic oligonucleotide
  Antisense strand to SEQ ID NO: 1874023
ugauugaccaagguuccug

SEQ ID NO: 1874025 - RNA, 19 nt, Artificial Sequence
  Description of Artificial Sequence: Synthetic oligonucleotide
  Sense strand starting at position 1159 of SEQ ID NO: 1564360
acggacuucucaucacuca

SEQ ID NO: 1874026 - RNA, 19 nt, Artificial Sequence
  Description of Artificial Sequence: Synthetic oligonucleotide
  Antisense strand to SEQ ID NO: 1874025
ugagugaugagaaguccgu

SEQ ID NO: 1874027 - RNA, 19 nt, Artificial Sequence
  Description of Artificial Sequence: Synthetic oligonucleotide
  Sense strand starting at position 1160 of SEQ ID NO: 1564360
cggacuucucaucacucau

SEQ ID NO: 1874028 - RNA, 19 nt, Artificial Sequence
  Description of Artificial Sequence: Synthetic oligonucleotide
  Antisense strand to SEQ ID NO: 1874027
augagugaugagaaguccg

SEQ ID NO: 1874029 - RNA, 19 nt, Artificial Sequence
  Description of Artificial Sequence: Synthetic oligonucleotide
  Sense strand starting at position 1360 of SEQ ID NO: 1564360
agagaagccuccuuacuca

SEQ ID NO: 1874030 - RNA, 19 nt, Artificial Sequence
  Description of Artificial Sequence: Synthetic oligonucleotide
  Antisense strand to SEQ ID NO: 1874029
ugaguaaggaggcuucucu

SEQ ID NO: 1874031 - RNA, 19 nt, Artificial Sequence
  Description of Artificial Sequence: Synthetic oligonucleotide
  Sense strand starting at position 1487 of SEQ ID NO: 1564360
gcccuaaguccgucuguua

SEQ ID NO: 1874032 - RNA, 19 nt, Artificial Sequence
  Description of Artificial Sequence: Synthetic oligonucleotide
  Antisense strand to SEQ ID NO: 1874031
uaacagacggacuuagggc

SEQ ID NO: 1874033 - RNA, 19 nt, Artificial Sequence
  Description of Artificial Sequence: Synthetic oligonucleotide
  Sense strand starting at position 2249 of SEQ ID NO: 1564360
ggagucgugcgugucagau

SEQ ID NO: 1874034 - RNA, 19 nt, Artificial Sequence
  Description of Artificial Sequence: Synthetic oligonucleotide
  Antisense strand to SEQ ID NO: 1874033
aucugacacgcacgacucc

SEQ ID NO: 1874035 - RNA, 19 nt, Artificial Sequence
  Description of Artificial Sequence: Synthetic oligonucleotide
  Sense strand starting at position 2257 of SEQ ID NO: 1564360
gcgugucagauuuaggcca

SEQ ID NO: 1874036 - RNA, 19 nt, Artificial Sequence
  Description of Artificial Sequence: Synthetic oligonucleotide
  Antisense strand to SEQ ID NO: 1874035
uggccuaaaucugacacgc

SEQ ID NO: 1874037 - RNA, 19 nt, Artificial Sequence
  Description of Artificial Sequence: Synthetic oligonucleotide
  Sense strand starting at position 2381 of SEQ ID NO: 1564360
ugugacaucagugguggaa

SEQ ID NO: 1874038 - RNA, 19 nt, Artificial Sequence
  Description of Artificial Sequence: Synthetic oligonucleotide
  Antisense strand to SEQ ID NO: 1874037
uuccaccacugaugucaca

SEQ ID NO: 1874039 - RNA, 19 nt, Artificial Sequence
  Description of Artificial Sequence: Synthetic oligonucleotide
  Sense strand starting at position 2384 of SEQ ID NO: 1564360
gacaucagugguggaacau

SEQ ID NO: 1874040 - RNA, 19 nt, Artificial Sequence
  Description of Artificial Sequence: Synthetic oligonucleotide
  Antisense strand to SEQ ID NO: 1874039
auguuccaccacugauguc

SEQ ID NO: 1874041 - RNA, 19 nt, Artificial Sequence
  Description of Artificial Sequence: Synthetic oligonucleotide
  Sense strand starting at position 2453 of SEQ ID NO: 1564360
aagcauuaagguugaaguu

SEQ ID NO: 1874042 - RNA, 19 nt, Artificial Sequence
  Description of Artificial Sequence: Synthetic oligonucleotide
  Antisense strand to SEQ ID NO: 1874041
aacuucaaccuuaaugcuu

SEQ ID NO: 1874043 - RNA, 19 nt, Artificial Sequence
  Description of Artificial Sequence: Synthetic oligonucleotide
  Sense strand starting at position 2454 of SEQ ID NO: 1564360
agcauuaagguugaaguuu

SEQ ID NO: 1874044 - RNA, 19 nt, Artificial Sequence
  Description of Artificial Sequence: Synthetic oligonucleotide
  Antisense strand to SEQ ID NO: 1874043
aaacuucaaccuuaaugcu

SEQ ID NO: 1874045 - RNA, 19 nt, Artificial Sequence
  Description of Artificial Sequence: Synthetic oligonucleotide
  Sense strand starting at position 2499 of SEQ ID NO: 1564360
guuauauuaguucggauuu

SEQ ID NO: 1874046 - RNA, 19 nt, Artificial Sequence
  Description of Artificial Sequence: Synthetic oligonucleotide
  Antisense strand to SEQ ID NO: 1874045
aaauccgaacuaauauaac

SEQ ID NO: 1874047 - RNA, 19 nt, Artificial Sequence
  Description of Artificial Sequence: Synthetic oligonucleotide
  Sense strand starting at position 2505 of SEQ ID NO: 1564360
uuaguucggauuuguuuga

SEQ ID NO: 1874048 - RNA, 19 nt, Artificial Sequence
  Description of Artificial Sequence: Synthetic oligonucleotide
  Antisense strand to SEQ ID NO: 1874047
ucaaacaaauccgaacuaa

SEQ ID NO: 1874049 - RNA, 19 nt, Artificial Sequence
  Description of Artificial Sequence: Synthetic oligonucleotide
  Sense strand starting at position 2529 of SEQ ID NO: 1564360
guuuguguucgguuucaag

SEQ ID NO: 1874050 - RNA, 19 nt, Artificial Sequence
  Description of Artificial Sequence: Synthetic oligonucleotide
  Antisense strand to SEQ ID NO: 1874049
cuugaaaccgaacacaaac

SEQ ID NO: 1874051 - RNA, 19 nt, Artificial Sequence
  Description of Artificial Sequence: Synthetic oligonucleotide
  Sense strand starting at position 2624 of SEQ ID NO: 1564360
uggcaaacauccuccgaga

SEQ ID NO: 1874052 - RNA, 19 nt, Artificial Sequence
  Description of Artificial Sequence: Synthetic oligonucleotide
  Antisense strand to SEQ ID NO: 1874051
ucucggaggauguuugcca

SEQ ID NO: 1874053 - RNA, 19 nt, Artificial Sequence
  Description of Artificial Sequence: Synthetic oligonucleotide
  Sense strand starting at position 2800 of SEQ ID NO: 1564360
ggagcugucggcaguuuga

SEQ ID NO: 1874054 - RNA, 19 nt, Artificial Sequence
  Description of Artificial Sequence: Synthetic oligonucleotide
  Antisense strand to SEQ ID NO: 1874053
ucaaacugccgacagcucc

SEQ ID NO: 1874055 - RNA, 19 nt, Artificial Sequence
  Description of Artificial Sequence: Synthetic oligonucleotide
  Sense strand starting at position 2833 of SEQ ID NO: 1564360
ucgcguccuguucuaggaa

SEQ ID NO: 1874056 - RNA, 19 nt, Artificial Sequence
  Description of Artificial Sequence: Synthetic oligonucleotide
  Antisense strand to SEQ ID NO: 1874055
uuccuagaacaggacgcga

SEQ ID NO: 1874057 - RNA, 19 nt, Artificial Sequence
  Description of Artificial Sequence: Synthetic oligonucleotide
  Sense strand starting at position 2841 of SEQ ID NO: 1564360
uguucuaggaaucgauuau

SEQ ID NO: 1874058 - RNA, 19 nt, Artificial Sequence
  Description of Artificial Sequence: Synthetic oligonucleotide
  Antisense strand to SEQ ID NO: 1874057
auaaucgauuccuagaaca

SEQ ID NO: 1874059 - RNA, 19 nt, Artificial Sequence
  Description of Artificial Sequence: Synthetic oligonucleotide
  Sense strand starting at position 2842 of SEQ ID NO: 1564360
guucuaggaaucgauuauu

SEQ ID NO: 1874060 - RNA, 19 nt, Artificial Sequence
  Description of Artificial Sequence: Synthetic oligonucleotide
  Antisense strand to SEQ ID NO: 1874059
aauaaucgauuccuagaac

SEQ ID NO: 1874061 - RNA, 19 nt, Artificial Sequence
  Description of Artificial Sequence: Synthetic oligonucleotide
  Sense strand starting at position 2913 of SEQ ID NO: 1564360
uuugcauuuccgcaaacga

SEQ ID NO: 1874062 - RNA, 19 nt, Artificial Sequence
  Description of Artificial Sequence: Synthetic oligonucleotide
  Antisense strand to SEQ ID NO: 1874061
ucguuugcggaaaugcaaa

SEQ ID NO: 1874063 - RNA, 19 nt, Artificial Sequence
  Description of Artificial Sequence: Synthetic oligonucleotide
  Sense strand starting at position 2943 of SEQ ID NO: 1564360
aucccuguguuagugauuu

SEQ ID NO: 1874064 - RNA, 19 nt, Artificial Sequence
  Description of Artificial Sequence: Synthetic oligonucleotide
  Antisense strand to SEQ ID NO: 1874063
aaaucacuaacacagggau

SEQ ID NO: 1874065 - RNA, 19 nt, Artificial Sequence
  Description of Artificial Sequence: Synthetic oligonucleotide
  Sense strand starting at position 2947 of SEQ ID NO: 1564360
cuguguuagugauuucuaa

SEQ ID NO: 1874066 - RNA, 19 nt, Artificial Sequence
  Description of Artificial Sequence: Synthetic oligonucleotide
  Antisense strand to SEQ ID NO: 1874065
uuagaaaucacuaacacag

SEQ ID NO: 1874067 - RNA, 19 nt, Artificial Sequence
  Description of Artificial Sequence: Synthetic oligonucleotide
  Sense strand starting at position 2985 of SEQ ID NO: 1564360
caagaacguugaguuugaa

SEQ ID NO: 1874068 - RNA, 19 nt, Artificial Sequence
  Description of Artificial Sequence: Synthetic oligonucleotide
  Antisense strand to SEQ ID NO: 1874067
uucaaacucaacguucuug

SEQ ID NO: 1874069 - RNA, 19 nt, Artificial Sequence
  Description of Artificial Sequence: Synthetic oligonucleotide
  Sense strand starting at position 2988 of SEQ ID NO: 1564360
gaacguugaguuugaaauu

SEQ ID NO: 1874070 - RNA, 19 nt, Artificial Sequence
  Description of Artificial Sequence: Synthetic oligonucleotide
  Antisense strand to SEQ ID NO: 1874069
aauuucaaacucaacguuc

SEQ ID NO: 1874071 - RNA, 19 nt, Artificial Sequence
  Description of Artificial Sequence: Synthetic oligonucleotide
  Sense strand starting at position 3007 of SEQ ID NO: 1564360
ugaugaaacuugccuuaag

SEQ ID NO: 1874072 - RNA, 19 nt, Artificial Sequence
  Description of Artificial Sequence: Synthetic oligonucleotide
  Antisense strand to SEQ ID NO: 1874071
cuuaaggcaaguuucauca

SEQ ID NO: 1874073 - RNA, 19 nt, Artificial Sequence
  Description of Artificial Sequence: Synthetic oligonucleotide
  Sense strand starting at position 3010 of SEQ ID NO: 1564360
ugaaacuugccuuaaggcu

SEQ ID NO: 1874074 - RNA, 19 nt, Artificial Sequence
  Description of Artificial Sequence: Synthetic oligonucleotide
  Antisense strand to SEQ ID NO: 1874073
agccuuaaggcaaguuuca

SEQ ID NO: 1874075 - RNA, 19 nt, Artificial Sequence
  Description of Artificial Sequence: Synthetic oligonucleotide
  Sense strand starting at position 3195 of SEQ ID NO: 1564360
ggugauguggcagggagaa

SEQ ID NO: 1874076 - RNA, 19 nt, Artificial Sequence
  Description of Artificial Sequence: Synthetic oligonucleotide
  Antisense strand to SEQ ID NO: 1874075
uucucccugccacaucacc

SEQ ID NO: 1874077 - RNA, 19 nt, Artificial Sequence
  Description of Artificial Sequence: Synthetic oligonucleotide
  Sense strand starting at position 3196 of SEQ ID NO: 1564360
gugauguggcagggagaaa

SEQ ID NO: 1874078 - RNA, 19 nt, Artificial Sequence
  Description of Artificial Sequence: Synthetic oligonucleotide
  Antisense strand to SEQ ID NO: 1874077
uuucucccugccacaucac

SEQ ID NO: 1874079 - RNA, 19 nt, Artificial Sequence
  Description of Artificial Sequence: Synthetic oligonucleotide
  Sense strand starting at position 3455 of SEQ ID NO: 1564360
gacuacuuugugcaauuga

SEQ ID NO: 1874080 - RNA, 19 nt, Artificial Sequence
  Description of Artificial Sequence: Synthetic oligonucleotide
  Antisense strand to SEQ ID NO: 1874079
ucaauugcacaaaguaguc

SEQ ID NO: 1874081 - RNA, 19 nt, Artificial Sequence
  Description of Artificial Sequence: Synthetic oligonucleotide
  Sense strand starting at position 3460 of SEQ ID NO: 1564360
cuuugugcaauugaggauu

SEQ ID NO: 1874082 - RNA, 19 nt, Artificial Sequence
  Description of Artificial Sequence: Synthetic oligonucleotide
  Antisense strand to SEQ ID NO: 1874081
aauccucaauugcacaaag

SEQ ID NO: 1874083 - RNA, 19 nt, Artificial Sequence
  Description of Artificial Sequence: Synthetic oligonucleotide
  Sense strand starting at position 3463 of SEQ ID NO: 1564360
ugugcaauugaggauuguu

SEQ ID NO: 1874084 - RNA, 19 nt, Artificial Sequence
  Description of Artificial Sequence: Synthetic oligonucleotide
  Antisense strand to SEQ ID NO: 1874083
aacaauccucaauugcaca

SEQ ID NO: 1874085 - RNA, 19 nt, Artificial Sequence
  Description of Artificial Sequence: Synthetic oligonucleotide
  Sense strand starting at position 3574 of SEQ ID NO: 1564360
uuguaaacaguguacaaau

SEQ ID NO: 1874086 - RNA, 19 nt, Artificial Sequence
  Description of Artificial Sequence: Synthetic oligonucleotide
  Antisense strand to SEQ ID NO: 1874085
auuuguacacuguuuacaa

SEQ ID NO: 1874087 - RNA, 19 nt, Artificial Sequence
  Description of Artificial Sequence: Synthetic oligonucleotide
  Sense strand starting at position 3576 of SEQ ID NO: 1564360
guaaacaguguacaaauua

SEQ ID NO: 1874088 - RNA, 19 nt, Artificial Sequence
  Description of Artificial Sequence: Synthetic oligonucleotide
  Antisense strand to SEQ ID NO: 1874087
uaauuuguacacuguuuac

SEQ ID NO: 1874089 - RNA, 19 nt, Artificial Sequence
  Description of Artificial Sequence: Synthetic oligonucleotide
  Sense strand starting at position 3624 of SEQ ID NO: 1564360
ucaguuacacuguacauua

SEQ ID NO: 1874090 - RNA, 19 nt, Artificial Sequence
  Description of Artificial Sequence: Synthetic oligonucleotide
  Antisense strand to SEQ ID NO: 1874089
uaauguacaguguaacuga

SEQ ID NO: 1874091 - RNA, 19 nt, Artificial Sequence
  Description of Artificial Sequence: Synthetic oligonucleotide
  Sense strand starting at position 3668 of SEQ ID NO: 1564360
aucuuuguccauuaaggau

SEQ ID NO: 1874092 - RNA, 19 nt, Artificial Sequence
  Description of Artificial Sequence: Synthetic oligonucleotide
  Antisense strand to SEQ ID NO: 1874091
auccuuaauggacaaagau

SEQ ID NO: 1874093 - RNA, 19 nt, Artificial Sequence
  Description of Artificial Sequence: Synthetic oligonucleotide
  Sense strand starting at position 5 of SEQ ID NO: 1564361
uugcgcuugcuguccaaua

SEQ ID NO: 1874094 - RNA, 19 nt, Artificial Sequence
  Description of Artificial Sequence: Synthetic oligonucleotide
  Antisense strand to SEQ ID NO: 1874093
uauuggacagcaagcgcaa

SEQ ID NO: 1874095 - RNA, 19 nt, Artificial Sequence
  Description of Artificial Sequence: Synthetic oligonucleotide
  Sense strand starting at position 10 of SEQ ID NO: 1564361
cuugcuguccaauauggua

SEQ ID NO: 1874096 - RNA, 19 nt, Artificial Sequence
  Description of Artificial Sequence: Synthetic oligonucleotide
  Antisense strand to SEQ ID NO: 1874095
uaccauauuggacagcaag

SEQ ID NO: 1874097 - RNA, 19 nt, Artificial Sequence
  Description of Artificial Sequence: Synthetic oligonucleotide
  Sense strand starting at position 43 of SEQ ID NO: 1564361
gugacacuuuaaguuuagu

SEQ ID NO: 1874098 - RNA, 19 nt, Artificial Sequence
  Description of Artificial Sequence: Synthetic oligonucleotide
  Antisense strand to SEQ ID NO: 1874097
acuaaacuuaaagugucac

SEQ ID NO: 1874099 - RNA, 19 nt, Artificial Sequence
  Description of Artificial Sequence: Synthetic oligonucleotide
  Sense strand starting at position 46 of SEQ ID NO: 1564361
acacuuuaaguuuagucaa

SEQ ID NO: 1874100 - RNA, 19 nt, Artificial Sequence
  Description of Artificial Sequence: Synthetic oligonucleotide
  Antisense strand to SEQ ID NO: 1874099
uugacuaaacuuaaagugu

SEQ ID NO: 1874101 - RNA, 19 nt, Artificial Sequence
  Description of Artificial Sequence: Synthetic oligonucleotide
  Sense strand starting at position 137 of SEQ ID NO: 1564361
acaguucugcucuagaauu

SEQ ID NO: 1874102 - RNA, 19 nt, Artificial Sequence
  Description of Artificial Sequence: Synthetic oligonucleotide
  Antisense strand to SEQ ID NO: 1874101
aauucuagagcagaacugu

SEQ ID NO: 1874103 - RNA, 19 nt, Artificial Sequence
  Description of Artificial Sequence: Synthetic oligonucleotide
  Sense strand starting at position 148 of SEQ ID NO: 1564361
cuagaauuccaugguccca

SEQ ID NO: 1874104 - RNA, 19 nt, Artificial Sequence
  Description of Artificial Sequence: Synthetic oligonucleotide
  Antisense strand to SEQ ID NO: 1874103
ugggaccauggaauucuag

SEQ ID NO: 1874105 - RNA, 19 nt, Artificial Sequence
  Description of Artificial Sequence: Synthetic oligonucleotide
  Sense strand starting at position 252 of SEQ ID NO: 1564361
uguguuucugaauauaugu

SEQ ID NO: 1874106 - RNA, 19 nt, Artificial Sequence
  Description of Artificial Sequence: Synthetic oligonucleotide
  Antisense strand to SEQ ID NO: 1874105
acauauauucagaaacaca

SEQ ID NO: 1874107 - RNA, 19 nt, Artificial Sequence
  Description of Artificial Sequence: Synthetic oligonucleotide
  Sense strand starting at position 257 of SEQ ID NO: 1564361
uucugaauauauguagauc

SEQ ID NO: 1874108 - RNA, 19 nt, Artificial Sequence
  Description of Artificial Sequence: Synthetic oligonucleotide
  Antisense strand to SEQ ID NO: 1874107
gaucuacauauauucagaa

SEQ ID NO: 1874109 - RNA, 19 nt, Artificial Sequence
  Description of Artificial Sequence: Synthetic oligonucleotide
  Sense strand starting at position 505 of SEQ ID NO: 1564361
gaggaucuccuaugugaaa

SEQ ID NO: 1874110 - RNA, 19 nt, Artificial Sequence
  Description of Artificial Sequence: Synthetic oligonucleotide
  Antisense strand to SEQ ID NO: 1874109
uuucacauaggagauccuc

SEQ ID NO: 1874111 - RNA, 19 nt, Artificial Sequence
  Description of Artificial Sequence: Synthetic oligonucleotide
  Sense strand starting at position 753 of SEQ ID NO: 1564361
guaaaugccagagggaaau

SEQ ID NO: 1874112 - RNA, 19 nt, Artificial Sequence
  Description of Artificial Sequence: Synthetic oligonucleotide
  Antisense strand to SEQ ID NO: 1874111
auuucccucuggcauuuac

SEQ ID NO: 1874113 - RNA, 19 nt, Artificial Sequence
  Description of Artificial Sequence: Synthetic oligonucleotide
  Sense strand starting at position 765 of SEQ ID NO: 1564361
gggaaauggugauuacguc

SEQ ID NO: 1874114 - RNA, 19 nt, Artificial Sequence
  Description of Artificial Sequence: Synthetic oligonucleotide
  Antisense strand to SEQ ID NO: 1874113
gacguaaucaccauuuccc

SEQ ID NO: 1874115 - RNA, 19 nt, Artificial Sequence
  Description of Artificial Sequence: Synthetic oligonucleotide
  Sense strand starting at position 766 of SEQ ID NO: 1564361
ggaaauggugauuacguca

SEQ ID NO: 1874116 - RNA, 19 nt, Artificial Sequence
  Description of Artificial Sequence: Synthetic oligonucleotide
  Antisense strand to SEQ ID NO: 1874115
ugacguaaucaccauuucc

SEQ ID NO: 1874117 - RNA, 19 nt, Artificial Sequence
  Description of Artificial Sequence: Synthetic oligonucleotide
  Sense strand starting at position 834 of SEQ ID NO: 1564361
uugguauagucuuugaggu

SEQ ID NO: 1874118 - RNA, 19 nt, Artificial Sequence
  Description of Artificial Sequence: Synthetic oligonucleotide
  Antisense strand to SEQ ID NO: 1874117
accucaaagacuauaccaa

SEQ ID NO: 1874119 - RNA, 19 nt, Artificial Sequence
  Description of Artificial Sequence: Synthetic oligonucleotide
  Sense strand starting at position 1078 of SEQ ID NO: 1564361
agcagaucgguuuagguau

SEQ ID NO: 1874120 - RNA, 19 nt, Artificial Sequence
  Description of Artificial Sequence: Synthetic oligonucleotide
  Antisense strand to SEQ ID NO: 1874119
auaccuaaaccgaucugcu

SEQ ID NO: 1874121 - RNA, 19 nt, Artificial Sequence
  Description of Artificial Sequence: Synthetic oligonucleotide
  Sense strand starting at position 1084 of SEQ ID NO: 1564361
ucgguuuagguauaauaac

SEQ ID NO: 1874122 - RNA, 19 nt, Artificial Sequence
  Description of Artificial Sequence: Synthetic oligonucleotide
  Antisense strand to SEQ ID NO: 1874121
guuauuauaccuaaaccga

SEQ ID NO: 1874123 - RNA, 19 nt, Artificial Sequence
  Description of Artificial Sequence: Synthetic oligonucleotide
  Sense strand starting at position 1188 of SEQ ID NO: 1564361
gauccaauugcaugcgaag

SEQ ID NO: 1874124 - RNA, 19 nt, Artificial Sequence
  Description of Artificial Sequence: Synthetic oligonucleotide
  Antisense strand to SEQ ID NO: 1874123
cuucgcaugcaauuggauc

SEQ ID NO: 1874125 - RNA, 19 nt, Artificial Sequence
  Description of Artificial Sequence: Synthetic oligonucleotide
  Sense strand starting at position 1253 of SEQ ID NO: 1564361
auugcuugucaggagucau

SEQ ID NO: 1874126 - RNA, 19 nt, Artificial Sequence
  Description of Artificial Sequence: Synthetic oligonucleotide
  Antisense strand to SEQ ID NO: 1874125
augacuccugacaagcaau

SEQ ID NO: 1874127 - RNA, 19 nt, Artificial Sequence
  Description of Artificial Sequence: Synthetic oligonucleotide
  Sense strand starting at position 1280 of SEQ ID NO: 1564361
ggccucuauuucccagagu

SEQ ID NO: 1874128 - RNA, 19 nt, Artificial Sequence
  Description of Artificial Sequence: Synthetic oligonucleotide
  Antisense strand to SEQ ID NO: 1874127
acucugggaaauagaggcc

SEQ ID NO: 1874129 - RNA, 19 nt, Artificial Sequence
  Description of Artificial Sequence: Synthetic oligonucleotide
  Sense strand starting at position 1424 of SEQ ID NO: 1564361
ccacgucuaccagggaauu

SEQ ID NO: 1874130 - RNA, 19 nt, Artificial Sequence
  Description of Artificial Sequence: Synthetic oligonucleotide
  Antisense strand to SEQ ID NO: 1874129
aauucccugguagacgugg

SEQ ID NO: 1874131 - RNA, 19 nt, Artificial Sequence
  Description of Artificial Sequence: Synthetic oligonucleotide
  Sense strand starting at position 1561 of SEQ ID NO: 1564361
aagcgauguguguaaagag

SEQ ID NO: 1874132 - RNA, 19 nt, Artificial Sequence
  Description of Artificial Sequence: Synthetic oligonucleotide
  Antisense strand to SEQ ID NO: 1874131
cucuuuacacacaucgcuu

SEQ ID NO: 1874133 - RNA, 19 nt, Artificial Sequence
  Description of Artificial Sequence: Synthetic oligonucleotide
  Sense strand starting at position 1832 of SEQ ID NO: 1564361
gcuggaaucacccaguuag

SEQ ID NO: 1874134 - RNA, 19 nt, Artificial Sequence
  Description of Artificial Sequence: Synthetic oligonucleotide
  Antisense strand to SEQ ID NO: 1874133
cuaacugggugauuccagc

SEQ ID NO: 1874135 - RNA, 19 nt, Artificial Sequence
  Description of Artificial Sequence: Synthetic oligonucleotide
  Sense strand starting at position 2137 of SEQ ID NO: 1564361
ccuguuuaagcgcuucuua

SEQ ID NO: 1874136 - RNA, 19 nt, Artificial Sequence
  Description of Artificial Sequence: Synthetic oligonucleotide
  Antisense strand to SEQ ID NO: 1874135
uaagaagcgcuuaaacagg

SEQ ID NO: 1874137 - RNA, 19 nt, Artificial Sequence
  Description of Artificial Sequence: Synthetic oligonucleotide
  Sense strand starting at position 2139 of SEQ ID NO: 1564361
uguuuaagcgcuucuuagu

SEQ ID NO: 1874138 - RNA, 19 nt, Artificial Sequence
  Description of Artificial Sequence: Synthetic oligonucleotide
  Antisense strand to SEQ ID NO: 1874137
acuaagaagcgcuuaaaca

SEQ ID NO: 1874139 - RNA, 19 nt, Artificial Sequence
  Description of Artificial Sequence: Synthetic oligonucleotide
  Sense strand starting at position 2184 of SEQ ID NO: 1564361
cgggucgugauccaaauga

SEQ ID NO: 1874140 - RNA, 19 nt, Artificial Sequence
  Description of Artificial Sequence: Synthetic oligonucleotide
  Antisense strand to SEQ ID NO: 1874139
ucauuuggaucacgacccg

SEQ ID NO: 1874141 - RNA, 19 nt, Artificial Sequence
  Description of Artificial Sequence: Synthetic oligonucleotide
  Sense strand starting at position 2209 of SEQ ID NO: 1564361
cuccuugagccuuggagua

SEQ ID NO: 1874142 - RNA, 19 nt, Artificial Sequence
  Description of Artificial Sequence: Synthetic oligonucleotide
  Antisense strand to SEQ ID NO: 1874141
uacuccaaggcucaaggag

SEQ ID NO: 1874143 - RNA, 19 nt, Artificial Sequence
  Description of Artificial Sequence: Synthetic oligonucleotide
  Sense strand starting at position 2247 of SEQ ID NO: 1564361
accuuuaaaucuguuacga

SEQ ID NO: 1874144 - RNA, 19 nt, Artificial Sequence
  Description of Artificial Sequence: Synthetic oligonucleotide
  Antisense strand to SEQ ID NO: 1874143
ucguaacagauuuaaaggu

SEQ ID NO: 1874145 - RNA, 19 nt, Artificial Sequence
  Description of Artificial Sequence: Synthetic oligonucleotide
  Sense strand starting at position 2486 of SEQ ID NO: 1564361
agaccuaagcuucgaucua

SEQ ID NO: 1874146 - RNA, 19 nt, Artificial Sequence
  Description of Artificial Sequence: Synthetic oligonucleotide
  Antisense strand to SEQ ID NO: 1874145
uagaucgaagcuuaggucu

SEQ ID NO: 1874147 - RNA, 19 nt, Artificial Sequence
  Description of Artificial Sequence: Synthetic oligonucleotide
  Sense strand starting at position 2657 of SEQ ID NO: 1564361
guggcuagaccugauccaa

SEQ ID NO: 1874148 - RNA, 19 nt, Artificial Sequence
  Description of Artificial Sequence: Synthetic oligonucleotide
  Antisense strand to SEQ ID NO: 1874147
uuggaucaggucuagccac

SEQ ID NO: 1874149 - RNA, 19 nt, Artificial Sequence
  Description of Artificial Sequence: Synthetic oligonucleotide
  Sense strand starting at position 2723 of SEQ ID NO: 1564361
ugguccuaagcugacaaau

SEQ ID NO: 1874150 - RNA, 19 nt, Artificial Sequence
  Description of Artificial Sequence: Synthetic oligonucleotide
  Antisense strand to SEQ ID NO: 1874149
auuugucagcuuaggacca

SEQ ID NO: 1874151 - RNA, 19 nt, Artificial Sequence
  Description of Artificial Sequence: Synthetic oligonucleotide
  Sense strand starting at position 2735 of SEQ ID NO: 1564361
gacaaauuggucuguggac

SEQ ID NO: 1874152 - RNA, 19 nt, Artificial Sequence
  Description of Artificial Sequence: Synthetic oligonucleotide
  Antisense strand to SEQ ID NO: 1874151
guccacagaccaauuuguc

SEQ ID NO: 1874153 - RNA, 19 nt, Artificial Sequence
  Description of Artificial Sequence: Synthetic oligonucleotide
  Sense strand starting at position 2851 of SEQ ID NO: 1564361
cccggagguccugguagaa

SEQ ID NO: 1874154 - RNA, 19 nt, Artificial Sequence
  Description of Artificial Sequence: Synthetic oligonucleotide
  Antisense strand to SEQ ID NO: 1874153
uucuaccaggaccuccggg

SEQ ID NO: 1874155 - RNA, 19 nt, Artificial Sequence
  Description of Artificial Sequence: Synthetic oligonucleotide
  Sense strand starting at position 3285 of SEQ ID NO: 1564361
uggguguuucgccauggga

SEQ ID NO: 1874156 - RNA, 19 nt, Artificial Sequence
  Description of Artificial Sequence: Synthetic oligonucleotide
  Antisense strand to SEQ ID NO: 1874155
ucccauggcgaaacaccca

SEQ ID NO: 1874157 - RNA, 19 nt, Artificial Sequence
  Description of Artificial Sequence: Synthetic oligonucleotide
  Sense strand starting at position 3314 of SEQ ID NO: 1564361
gggugacuuuggccugaga

SEQ ID NO: 1874158 - RNA, 19 nt, Artificial Sequence
  Description of Artificial Sequence: Synthetic oligonucleotide
  Antisense strand to SEQ ID NO: 1874157
ucucaggccaaagucaccc

SEQ ID NO: 1874159 - RNA, 19 nt, Artificial Sequence
  Description of Artificial Sequence: Synthetic oligonucleotide
  Sense strand starting at position 3316 of SEQ ID NO: 1564361
gugacuuuggccugagaug

SEQ ID NO: 1874160 - RNA, 19 nt, Artificial Sequence
  Description of Artificial Sequence: Synthetic oligonucleotide
  Antisense strand to SEQ ID NO: 1874159
caucucaggccaaagucac

SEQ ID NO: 1874161 - RNA, 19 nt, Artificial Sequence
  Description of Artificial Sequence: Synthetic oligonucleotide
  Sense strand starting at position 3372 of SEQ ID NO: 1564361
aggaguuccugacuauccu

SEQ ID NO: 1874162 - RNA, 19 nt, Artificial Sequence
  Description of Artificial Sequence: Synthetic oligonucleotide
  Antisense strand to SEQ ID NO: 1874161
aggauagucaggaacuccu

SEQ ID NO: 1874163 - RNA, 19 nt, Artificial Sequence
  Description of Artificial Sequence: Synthetic oligonucleotide
  Sense strand starting at position 3436 of SEQ ID NO: 1564361
cugugaagaagcuguaacu

SEQ ID NO: 1874164 - RNA, 19 nt, Artificial Sequence
  Description of Artificial Sequence: Synthetic oligonucleotide
  Antisense strand to SEQ ID NO: 1874163
aguuacagcuucuucacag

SEQ ID NO: 1874165 - RNA, 19 nt, Artificial Sequence
  Description of Artificial Sequence: Synthetic oligonucleotide
  Sense strand starting at position 3643 of SEQ ID NO: 1564361
ucuugauugcccugaguag

SEQ ID NO: 1874166 - RNA, 19 nt, Artificial Sequence
  Description of Artificial Sequence: Synthetic oligonucleotide
  Antisense strand to SEQ ID NO: 1874165
cuacucagggcaaucaaga

SEQ ID NO: 1874167 - RNA, 19 nt, Artificial Sequence
  Description of Artificial Sequence: Synthetic oligonucleotide
  Sense strand starting at position 3644 of SEQ ID NO: 1564361
cuugauugcccugaguaga

SEQ ID NO: 1874168 - RNA, 19 nt, Artificial Sequence
  Description of Artificial Sequence: Synthetic oligonucleotide
  Antisense strand to SEQ ID NO: 1874167
ucuacucagggcaaucaag

SEQ ID NO: 1874169 - RNA, 19 nt, Artificial Sequence
  Description of Artificial Sequence: Synthetic oligonucleotide
  Sense strand starting at position 3703 of SEQ ID NO: 1564361
uugucuucucuggaaccuu

SEQ ID NO: 1874170 - RNA, 19 nt, Artificial Sequence
  Description of Artificial Sequence: Synthetic oligonucleotide
  Antisense strand to SEQ ID NO: 1874169
aagguuccagagaagacaa

SEQ ID NO: 1874171 - RNA, 19 nt, Artificial Sequence
  Description of Artificial Sequence: Synthetic oligonucleotide
  Sense strand starting at position 3785 of SEQ ID NO: 1564361
ggcagugucgcugucauag

SEQ ID NO: 1874172 - RNA, 19 nt, Artificial Sequence
  Description of Artificial Sequence: Synthetic oligonucleotide
  Antisense strand to SEQ ID NO: 1874171
cuaugacagcgacacugcc

SEQ ID NO: 1874173 - RNA, 19 nt, Artificial Sequence
  Description of Artificial Sequence: Synthetic oligonucleotide
  Sense strand starting at position 195 of SEQ ID NO: 1564362
aaauuaguucuuggaggca

SEQ ID NO: 1874174 - RNA, 19 nt, Artificial Sequence
  Description of Artificial Sequence: Synthetic oligonucleotide
  Antisense strand to SEQ ID NO: 1874173
ugccuccaagaacuaauuu

SEQ ID NO: 1874175 - RNA, 19 nt, Artificial Sequence
  Description of Artificial Sequence: Synthetic oligonucleotide
  Sense strand starting at position 608 of SEQ ID NO: 1564362
cuguccuagcacuaagauu

SEQ ID NO: 1874176 - RNA, 19 nt, Artificial Sequence
  Description of Artificial Sequence: Synthetic oligonucleotide
  Antisense strand to SEQ ID NO: 1874175
aaucuuagugcuaggacag

SEQ ID NO: 1874177 - RNA, 19 nt, Artificial Sequence
  Description of Artificial Sequence: Synthetic oligonucleotide
  Sense strand starting at position 1037 of SEQ ID NO: 1564362
ugaagaaugugcuuuacag

SEQ ID NO: 1874178 - RNA, 19 nt, Artificial Sequence
  Description of Artificial Sequence: Synthetic oligonucleotide
  Antisense strand to SEQ ID NO: 1874177
cuguaaagcacauucuuca

SEQ ID NO: 1874179 - RNA, 19 nt, Artificial Sequence
  Description of Artificial Sequence: Synthetic oligonucleotide
  Sense strand starting at position 1039 of SEQ ID NO: 1564362
aagaaugugcuuuacaguu

SEQ ID NO: 1874180 - RNA, 19 nt, Artificial Sequence
  Description of Artificial Sequence: Synthetic oligonucleotide
  Antisense strand to SEQ ID NO: 1874179
aacuguaaagcacauucuu

SEQ ID NO: 1874181 - RNA, 19 nt, Artificial Sequence
  Description of Artificial Sequence: Synthetic oligonucleotide
  Sense strand starting at position 1147 of SEQ ID NO: 1564362
cuacuaaaggagugguauc

SEQ ID NO: 1874182 - RNA, 19 nt, Artificial Sequence
  Description of Artificial Sequence: Synthetic oligonucleotide
  Antisense strand to SEQ ID NO: 1874181
gauaccacuccuuuaguag

SEQ ID NO: 1874183 - RNA, 19 nt, Artificial Sequence
  Description of Artificial Sequence: Synthetic oligonucleotide
  Sense strand starting at position 1376 of SEQ ID NO: 1564362
guaggauaauugcuagaac

SEQ ID NO: 1874184 - RNA, 19 nt, Artificial Sequence
  Description of Artificial Sequence: Synthetic oligonucleotide
  Antisense strand to SEQ ID NO: 1874183
guucuagcaauuauccuac

SEQ ID NO: 1874185 - RNA, 19 nt, Artificial Sequence
  Description of Artificial Sequence: Synthetic oligonucleotide
  Sense strand starting at position 1602 of SEQ ID NO: 1564362
ugcucaaacuuauugguca

SEQ ID NO: 1874186 - RNA, 19 nt, Artificial Sequence
  Description of Artificial Sequence: Synthetic oligonucleotide
  Antisense strand to SEQ ID NO: 1874185
ugaccaauaaguuugagca

SEQ ID NO: 1874187 - RNA, 19 nt, Artificial Sequence
  Description of Artificial Sequence: Synthetic oligonucleotide
  Sense strand starting at position 1605 of SEQ ID NO: 1564362
ucaaacuuauuggucauga

SEQ ID NO: 1874188 - RNA, 19 nt, Artificial Sequence
  Description of Artificial Sequence: Synthetic oligonucleotide
  Antisense strand to SEQ ID NO: 1874187
ucaugaccaauaaguuuga

SEQ ID NO: 1874189 - RNA, 19 nt, Artificial Sequence
  Description of Artificial Sequence: Synthetic oligonucleotide
  Sense strand starting at position 1606 of SEQ ID NO: 1564362
caaacuuauuggucaugag

SEQ ID NO: 1874190 - RNA, 19 nt, Artificial Sequence
  Description of Artificial Sequence: Synthetic oligonucleotide
  Antisense strand to SEQ ID NO: 1874189
cucaugaccaauaaguuug

SEQ ID NO: 1874191 - RNA, 19 nt, Artificial Sequence
  Description of Artificial Sequence: Synthetic oligonucleotide
  Sense strand starting at position 1648 of SEQ ID NO: 1564362
guuggacuucuccaucgga

SEQ ID NO: 1874192 - RNA, 19 nt, Artificial Sequence
  Description of Artificial Sequence: Synthetic oligonucleotide
  Antisense strand to SEQ ID NO: 1874191
uccgauggagaaguccaac

SEQ ID NO: 1874193 - RNA, 19 nt, Artificial Sequence
  Description of Artificial Sequence: Synthetic oligonucleotide
  Sense strand starting at position 1651 of SEQ ID NO: 1564362
ggacuucuccaucggaaug

SEQ ID NO: 1874194 - RNA, 19 nt, Artificial Sequence
  Description of Artificial Sequence: Synthetic oligonucleotide
  Antisense strand to SEQ ID NO: 1874193
cauuccgauggagaagucc

SEQ ID NO: 1874195 - RNA, 19 nt, Artificial Sequence
  Description of Artificial Sequence: Synthetic oligonucleotide
  Sense strand starting at position 1780 of SEQ ID NO: 1564362
ccauucuuguccucauaga

SEQ ID NO: 1874196 - RNA, 19 nt, Artificial Sequence
  Description of Artificial Sequence: Synthetic oligonucleotide
  Antisense strand to SEQ ID NO: 1874195
ucuaugaggacaagaaugg

SEQ ID NO: 1874197 - RNA, 19 nt, Artificial Sequence
  Description of Artificial Sequence: Synthetic oligonucleotide
  Sense strand starting at position 2072 of SEQ ID NO: 1564362
gucuccauccgucacugau

SEQ ID NO: 1874198 - RNA, 19 nt, Artificial Sequence
  Description of Artificial Sequence: Synthetic oligonucleotide
  Antisense strand to SEQ ID NO: 1874197
aucagugacggauggagac

SEQ ID NO: 1874199 - RNA, 19 nt, Artificial Sequence
  Description of Artificial Sequence: Synthetic oligonucleotide
  Sense strand starting at position 2078 of SEQ ID NO: 1564362
auccgucacugaucacaua

SEQ ID NO: 1874200 - RNA, 19 nt, Artificial Sequence
  Description of Artificial Sequence: Synthetic oligonucleotide
  Antisense strand to SEQ ID NO: 1874199
uaugugaucagugacggau

SEQ ID NO: 1874201 - RNA, 19 nt, Artificial Sequence
  Description of Artificial Sequence: Synthetic oligonucleotide
  Sense strand starting at position 2202 of SEQ ID NO: 1564362
cuuccagucuucccggaga

SEQ ID NO: 1874202 - RNA, 19 nt, Artificial Sequence
  Description of Artificial Sequence: Synthetic oligonucleotide
  Antisense strand to SEQ ID NO: 1874201
ucuccgggaagacuggaag

SEQ ID NO: 1874203 - RNA, 19 nt, Artificial Sequence
  Description of Artificial Sequence: Synthetic oligonucleotide
  Sense strand starting at position 2204 of SEQ ID NO: 1564362
uccagucuucccggagaga

SEQ ID NO: 1874204 - RNA, 19 nt, Artificial Sequence
  Description of Artificial Sequence: Synthetic oligonucleotide
  Antisense strand to SEQ ID NO: 1874203
ucucuccgggaagacugga

SEQ ID NO: 1874205 - RNA, 19 nt, Artificial Sequence
  Description of Artificial Sequence: Synthetic oligonucleotide
  Sense strand starting at position 2205 of SEQ ID NO: 1564362
ccagucuucccggagagau

SEQ ID NO: 1874206 - RNA, 19 nt, Artificial Sequence
  Description of Artificial Sequence: Synthetic oligonucleotide
  Antisense strand to SEQ ID NO: 1874205
aucucuccgggaagacugg

SEQ ID NO: 1874207 - RNA, 19 nt, Artificial Sequence
  Description of Artificial Sequence: Synthetic oligonucleotide
  Sense strand starting at position 2207 of SEQ ID NO: 1564362
agucuucccggagagaugu

SEQ ID NO: 1874208 - RNA, 19 nt, Artificial Sequence
  Description of Artificial Sequence: Synthetic oligonucleotide
  Antisense strand to SEQ ID NO: 1874207
acaucucuccgggaagacu

SEQ ID NO: 1874209 - RNA, 19 nt, Artificial Sequence
  Description of Artificial Sequence: Synthetic oligonucleotide
  Sense strand starting at position 2404 of SEQ ID NO: 1564362
gggaguccucgugauaucu

SEQ ID NO: 1874210 - RNA, 19 nt, Artificial Sequence
  Description of Artificial Sequence: Synthetic oligonucleotide
  Antisense strand to SEQ ID NO: 1874209
agauaucacgaggacuccc

SEQ ID NO: 1874211 - RNA, 19 nt, Artificial Sequence
  Description of Artificial Sequence: Synthetic oligonucleotide
  Sense strand starting at position 2412 of SEQ ID NO: 1564362
ucgugauaucuccgaguuu

SEQ ID NO: 1874212 - RNA, 19 nt, Artificial Sequence
  Description of Artificial Sequence: Synthetic oligonucleotide
  Antisense strand to SEQ ID NO: 1874211
aaacucggagauaucacga

SEQ ID NO: 1874213 - RNA, 19 nt, Artificial Sequence
  Description of Artificial Sequence: Synthetic oligonucleotide
  Sense strand starting at position 2425 of SEQ ID NO: 1564362
gaguuuggguauucggaau

SEQ ID NO: 1874214 - RNA, 19 nt, Artificial Sequence
  Description of Artificial Sequence: Synthetic oligonucleotide
  Antisense strand to SEQ ID NO: 1874213
auuccgaauacccaaacuc

SEQ ID NO: 1874215 - RNA, 19 nt, Artificial Sequence
  Description of Artificial Sequence: Synthetic oligonucleotide
  Sense strand starting at position 2438 of SEQ ID NO: 1564362
cggaauugauccuacgaaa

SEQ ID NO: 1874216 - RNA, 19 nt, Artificial Sequence
  Description of Artificial Sequence: Synthetic oligonucleotide
  Antisense strand to SEQ ID NO: 1874215
uuucguaggaucaauuccg

SEQ ID NO: 1874217 - RNA, 19 nt, Artificial Sequence
  Description of Artificial Sequence: Synthetic oligonucleotide
  Sense strand starting at position 2601 of SEQ ID NO: 1564362
gggagauuccuccgcagaa

SEQ ID NO: 1874218 - RNA, 19 nt, Artificial Sequence
  Description of Artificial Sequence: Synthetic oligonucleotide
  Antisense strand to SEQ ID NO: 1874217
uucugcggaggaaucuccc

SEQ ID NO: 1874219 - RNA, 19 nt, Artificial Sequence
  Description of Artificial Sequence: Synthetic oligonucleotide
  Sense strand starting at position 2602 of SEQ ID NO: 1564362
ggagauuccuccgcagaag

SEQ ID NO: 1874220 - RNA, 19 nt, Artificial Sequence
  Description of Artificial Sequence: Synthetic oligonucleotide
  Antisense strand to SEQ ID NO: 1874219
cuucugcggaggaaucucc

SEQ ID NO: 1874221 - RNA, 19 nt, Artificial Sequence
  Description of Artificial Sequence: Synthetic oligonucleotide
  Sense strand starting at position 2852 of SEQ ID NO: 1564362
uggacuucugccugcccua

SEQ ID NO: 1874222 - RNA, 19 nt, Artificial Sequence
  Description of Artificial Sequence: Synthetic oligonucleotide
  Antisense strand to SEQ ID NO: 1874221
uagggcaggcagaagucca

SEQ ID NO: 1874223 - RNA, 19 nt, Artificial Sequence
  Description of Artificial Sequence: Synthetic oligonucleotide
  Sense strand starting at position 2928 of SEQ ID NO: 1564362
gagucagagguucgaggua

SEQ ID NO: 1874224 - RNA, 19 nt, Artificial Sequence
  Description of Artificial Sequence: Synthetic oligonucleotide
  Antisense strand to SEQ ID NO: 1874223
uaccucgaaccucugacuc

SEQ ID NO: 1874225 - RNA, 19 nt, Artificial Sequence
  Description of Artificial Sequence: Synthetic oligonucleotide
  Sense strand starting at position 2930 of SEQ ID NO: 1564362
gucagagguucgagguaaa

SEQ ID NO: 1874226 - RNA, 19 nt, Artificial Sequence
  Description of Artificial Sequence: Synthetic oligonucleotide
  Antisense strand to SEQ ID NO: 1874225
uuuaccucgaaccucugac

SEQ ID NO: 1874227 - RNA, 19 nt, Artificial Sequence
  Description of Artificial Sequence: Synthetic oligonucleotide
  Sense strand starting at position 3052 of SEQ ID NO: 1564362
gggaacucugaugguuaca

SEQ ID NO: 1874228 - RNA, 19 nt, Artificial Sequence
  Description of Artificial Sequence: Synthetic oligonucleotide
  Antisense strand to SEQ ID NO: 1874227
uguaaccaucagaguuccc

SEQ ID NO: 1874229 - RNA, 19 nt, Artificial Sequence
  Description of Artificial Sequence: Synthetic oligonucleotide
  Sense strand starting at position 3054 of SEQ ID NO: 1564362
gaacucugaugguuacaau

SEQ ID NO: 1874230 - RNA, 19 nt, Artificial Sequence
  Description of Artificial Sequence: Synthetic oligonucleotide
  Antisense strand to SEQ ID NO: 1874229
auuguaaccaucagaguuc

SEQ ID NO: 1874231 - RNA, 19 nt, Artificial Sequence
  Description of Artificial Sequence: Synthetic oligonucleotide
  Sense strand starting at position 3063 of SEQ ID NO: 1564362
ugguuacaauaguuaagaa

SEQ ID NO: 1874232 - RNA, 19 nt, Artificial Sequence
  Description of Artificial Sequence: Synthetic oligonucleotide
  Antisense strand to SEQ ID NO: 1874231
uucuuaacuauuguaacca

SEQ ID NO: 1874233 - RNA, 19 nt, Artificial Sequence
  Description of Artificial Sequence: Synthetic oligonucleotide
  Sense strand starting at position 3075 of SEQ ID NO: 1564362
uuaagaaaguccuaggauu

SEQ ID NO: 1874234 - RNA, 19 nt, Artificial Sequence
  Description of Artificial Sequence: Synthetic oligonucleotide
  Antisense strand to SEQ ID NO: 1874233
aauccuaggacuuucuuaa

SEQ ID NO: 1874235 - RNA, 19 nt, Artificial Sequence
  Description of Artificial Sequence: Synthetic oligonucleotide
  Sense strand starting at position 3097 of SEQ ID NO: 1564362
gaccucuaucaggguguau

SEQ ID NO: 1874236 - RNA, 19 nt, Artificial Sequence
  Description of Artificial Sequence: Synthetic oligonucleotide
  Antisense strand to SEQ ID NO: 1874235
auacacccugauagagguc

SEQ ID NO: 1874237 - RNA, 19 nt, Artificial Sequence
  Description of Artificial Sequence: Synthetic oligonucleotide
  Sense strand starting at position 3175 of SEQ ID NO: 1564362
gugcaauaguaacccaauu

SEQ ID NO: 1874238 - RNA, 19 nt, Artificial Sequence
  Description of Artificial Sequence: Synthetic oligonucleotide
  Antisense strand to SEQ ID NO: 1874237
aauuggguuacuauugcac

SEQ ID NO: 1874239 - RNA, 19 nt, Artificial Sequence
  Description of Artificial Sequence: Synthetic oligonucleotide
  Sense strand starting at position 3237 of SEQ ID NO: 1564362
acccaaaucugagccaaga

SEQ ID NO: 1874240 - RNA, 19 nt, Artificial Sequence
  Description of Artificial Sequence: Synthetic oligonucleotide
  Antisense strand to SEQ ID NO: 1874239
ucuuggcucagauuugggu

SEQ ID NO: 1874241 - RNA, 19 nt, Artificial Sequence
  Description of Artificial Sequence: Synthetic oligonucleotide
  Sense strand starting at position 3266 of SEQ ID NO: 1564362
auuaaagucacgugaugug

SEQ ID NO: 1874242 - RNA, 19 nt, Artificial Sequence
  Description of Artificial Sequence: Synthetic oligonucleotide
  Antisense strand to SEQ ID NO: 1874241
cacaucacgugacuuuaau

SEQ ID NO: 1874243 - RNA, 19 nt, Artificial Sequence
  Description of Artificial Sequence: Synthetic oligonucleotide
  Sense strand starting at position 3271 of SEQ ID NO: 1564362
agucacgugaugugguuaa

SEQ ID NO: 1874244 - RNA, 19 nt, Artificial Sequence
  Description of Artificial Sequence: Synthetic oligonucleotide
  Antisense strand to SEQ ID NO: 1874243
uuaaccacaucacgugacu

SEQ ID NO: 1874245 - RNA, 19 nt, Artificial Sequence
  Description of Artificial Sequence: Synthetic oligonucleotide
  Sense strand starting at position 3275 of SEQ ID NO: 1564362
acgugaugugguuaacaga

SEQ ID NO: 1874246 - RNA, 19 nt, Artificial Sequence
  Description of Artificial Sequence: Synthetic oligonucleotide
  Antisense strand to SEQ ID NO: 1874245
ucuguuaaccacaucacgu

SEQ ID NO: 1874247 - RNA, 19 nt, Artificial Sequence
  Description of Artificial Sequence: Synthetic oligonucleotide
  Sense strand starting at position 3322 of SEQ ID NO: 1564362
ggguaaugaugguggaaga

SEQ ID NO: 1874248 - RNA, 19 nt, Artificial Sequence
  Description of Artificial Sequence: Synthetic oligonucleotide
  Antisense strand to SEQ ID NO: 1874247
ucuuccaccaucauuaccc

SEQ ID NO: 1874249 - RNA, 19 nt, Artificial Sequence
  Description of Artificial Sequence: Synthetic oligonucleotide
  Sense strand starting at position 3977 of SEQ ID NO: 1564362
aguguaaagaucugaggga

SEQ ID NO: 1874250 - RNA, 19 nt, Artificial Sequence
  Description of Artificial Sequence: Synthetic oligonucleotide
  Antisense strand to SEQ ID NO: 1874249
ucccucagaucuuuacacu

SEQ ID NO: 1874251 - RNA, 19 nt, Artificial Sequence
  Description of Artificial Sequence: Synthetic oligonucleotide
  Sense strand starting at position 3978 of SEQ ID NO: 1564362
guguaaagaucugagggau

SEQ ID NO: 1874252 - RNA, 19 nt, Artificial Sequence
  Description of Artificial Sequence: Synthetic oligonucleotide
  Antisense strand to SEQ ID NO: 1874251
aucccucagaucuuuacac

SEQ ID NO: 1874253 - RNA, 19 nt, Artificial Sequence
  Description of Artificial Sequence: Synthetic oligonucleotide
  Sense strand starting at position 91 of SEQ ID NO: 1564363
cuguccuagcacuaagauu

SEQ ID NO: 1874254 - RNA, 19 nt, Artificial Sequence
  Description of Artificial Sequence: Synthetic oligonucleotide
  Antisense strand to SEQ ID NO: 1874253
aaucuuagugcuaggacag

SEQ ID NO: 1874255 - RNA, 19 nt, Artificial Sequence
  Description of Artificial Sequence: Synthetic oligonucleotide
  Sense strand starting at position 520 of SEQ ID NO: 1564363
ugaagaaugugcuuuacag

SEQ ID NO: 1874256 - RNA, 19 nt, Artificial Sequence
  Description of Artificial Sequence: Synthetic oligonucleotide
  Antisense strand to SEQ ID NO: 1874255
cuguaaagcacauucuuca

SEQ ID NO: 1874257 - RNA, 19 nt, Artificial Sequence
  Description of Artificial Sequence: Synthetic oligonucleotide
  Sense strand starting at position 522 of SEQ ID NO: 1564363
aagaaugugcuuuacaguu

SEQ ID NO: 1874258 - RNA, 19 nt, Artificial Sequence
  Description of Artificial Sequence: Synthetic oligonucleotide
  Antisense strand to SEQ ID NO: 1874257
aacuguaaagcacauucuu

SEQ ID NO: 1874259 - RNA, 19 nt, Artificial Sequence
  Description of Artificial Sequence: Synthetic oligonucleotide
  Sense strand starting at position 630 of SEQ ID NO: 1564363
cuacuaaaggagugguauc

SEQ ID NO: 1874260 - RNA, 19 nt, Artificial Sequence
  Description of Artificial Sequence: Synthetic oligonucleotide
  Antisense strand to SEQ ID NO: 1874259
gauaccacuccuuuaguag

SEQ ID NO: 1874261 - RNA, 19 nt, Artificial Sequence
  Description of Artificial Sequence: Synthetic oligonucleotide
  Sense strand starting at position 859 of SEQ ID NO: 1564363
guaggauaauugcuagaac

SEQ ID NO: 1874262 - RNA, 19 nt, Artificial Sequence
  Description of Artificial Sequence: Synthetic oligonucleotide
  Antisense strand to SEQ ID NO: 1874261
guucuagcaauuauccuac

SEQ ID NO: 1874263 - RNA, 19 nt, Artificial Sequence
  Description of Artificial Sequence: Synthetic oligonucleotide
  Sense strand starting at position 1085 of SEQ ID NO: 1564363
ugcucaaacuuauugguca

SEQ ID NO: 1874264 - RNA, 19 nt, Artificial Sequence
  Description of Artificial Sequence: Synthetic oligonucleotide
  Antisense strand to SEQ ID NO: 1874263
ugaccaauaaguuugagca

SEQ ID NO: 1874265 - RNA, 19 nt, Artificial Sequence
  Description of Artificial Sequence: Synthetic oligonucleotide
  Sense strand starting at position 1088 of SEQ ID NO: 1564363
ucaaacuuauuggucauga

SEQ ID NO: 1874266 - RNA, 19 nt, Artificial Sequence
  Description of Artificial Sequence: Synthetic oligonucleotide
  Antisense strand to SEQ ID NO: 1874265
ucaugaccaauaaguuuga

SEQ ID NO: 1874267 - RNA, 19 nt, Artificial Sequence
  Description of Artificial Sequence: Synthetic oligonucleotide
  Sense strand starting at position 1089 of SEQ ID NO: 1564363
caaacuuauuggucaugag

SEQ ID NO: 1874268 - RNA, 19 nt, Artificial Sequence
  Description of Artificial Sequence: Synthetic oligonucleotide
  Antisense strand to SEQ ID NO: 1874267
cucaugaccaauaaguuug

SEQ ID NO: 1874269 - RNA, 19 nt, Artificial Sequence
  Description of Artificial Sequence: Synthetic oligonucleotide
  Sense strand starting at position 1131 of SEQ ID NO: 1564363
guuggacuucuccaucgga

SEQ ID NO: 1874270 - RNA, 19 nt, Artificial Sequence
  Description of Artificial Sequence: Synthetic oligonucleotide
  Antisense strand to SEQ ID NO: 1874269
uccgauggagaaguccaac

SEQ ID NO: 1874271 - RNA, 19 nt, Artificial Sequence
  Description of Artificial Sequence: Synthetic oligonucleotide
  Sense strand starting at position 1134 of SEQ ID NO: 1564363
ggacuucuccaucggaaug

SEQ ID NO: 1874272 - RNA, 19 nt, Artificial Sequence
  Description of Artificial Sequence: Synthetic oligonucleotide
  Antisense strand to SEQ ID NO: 1874271
cauuccgauggagaagucc

SEQ ID NO: 1874273 - RNA, 19 nt, Artificial Sequence
  Description of Artificial Sequence: Synthetic oligonucleotide
  Sense strand starting at position 1263 of SEQ ID NO: 1564363
ccauucuuguccucauaga

SEQ ID NO: 1874274 - RNA, 19 nt, Artificial Sequence
  Description of Artificial Sequence: Synthetic oligonucleotide
  Antisense strand to SEQ ID NO: 1874273
ucuaugaggacaagaaugg

SEQ ID NO: 1874275 - RNA, 19 nt, Artificial Sequence
  Description of Artificial Sequence: Synthetic oligonucleotide
  Sense strand starting at position 1555 of SEQ ID NO: 1564363
gucuccauccgucacugau

SEQ ID NO: 1874276 - RNA, 19 nt, Artificial Sequence
  Description of Artificial Sequence: Synthetic oligonucleotide
  Antisense strand to SEQ ID NO: 1874275
aucagugacggauggagac

SEQ ID NO: 1874277 - RNA, 19 nt, Artificial Sequence
  Description of Artificial Sequence: Synthetic oligonucleotide
  Sense strand starting at position 1561 of SEQ ID NO: 1564363
auccgucacugaucacaua

SEQ ID NO: 1874278 - RNA, 19 nt, Artificial Sequence
  Description of Artificial Sequence: Synthetic oligonucleotide
  Antisense strand to SEQ ID NO: 1874277
uaugugaucagugacggau

SEQ ID NO: 1874279 - RNA, 19 nt, Artificial Sequence
  Description of Artificial Sequence: Synthetic oligonucleotide
  Sense strand starting at position 1685 of SEQ ID NO: 1564363
cuuccagucuucccggaga

SEQ ID NO: 1874280 - RNA, 19 nt, Artificial Sequence
  Description of Artificial Sequence: Synthetic oligonucleotide
  Antisense strand to SEQ ID NO: 1874279
ucuccgggaagacuggaag

SEQ ID NO: 1874281 - RNA, 19 nt, Artificial Sequence
  Description of Artificial Sequence: Synthetic oligonucleotide
  Sense strand starting at position 1687 of SEQ ID NO: 1564363
uccagucuucccggagaga

SEQ ID NO: 1874282 - RNA, 19 nt, Artificial Sequence
  Description of Artificial Sequence: Synthetic oligonucleotide
  Antisense strand to SEQ ID NO: 1874281
ucucuccgggaagacugga

SEQ ID NO: 1874283 - RNA, 19 nt, Artificial Sequence
  Description of Artificial Sequence: Synthetic oligonucleotide
  Sense strand starting at position 1688 of SEQ ID NO: 1564363
ccagucuucccggagagau

SEQ ID NO: 1874284 - RNA, 19 nt, Artificial Sequence
  Description of Artificial Sequence: Synthetic oligonucleotide
  Antisense strand to SEQ ID NO: 1874283
aucucuccgggaagacugg

SEQ ID NO: 1874285 - RNA, 19 nt, Artificial Sequence
  Description of Artificial Sequence: Synthetic oligonucleotide
  Sense strand starting at position 1690 of SEQ ID NO: 1564363
agucuucccggagagaugu

SEQ ID NO: 1874286 - RNA, 19 nt, Artificial Sequence
  Description of Artificial Sequence: Synthetic oligonucleotide
  Antisense strand to SEQ ID NO: 1874285
acaucucuccgggaagacu

SEQ ID NO: 1874287 - RNA, 19 nt, Artificial Sequence
  Description of Artificial Sequence: Synthetic oligonucleotide
  Sense strand starting at position 1887 of SEQ ID NO: 1564363
gggaguccucgugauaucu

SEQ ID NO: 1874288 - RNA, 19 nt, Artificial Sequence
  Description of Artificial Sequence: Synthetic oligonucleotide
  Antisense strand to SEQ ID NO: 1874287
agauaucacgaggacuccc

SEQ ID NO: 1874289 - RNA, 19 nt, Artificial Sequence
  Description of Artificial Sequence: Synthetic oligonucleotide
  Sense strand starting at position 1908 of SEQ ID NO: 1564363
gaguuuggguauucggaau

SEQ ID NO: 1874290 - RNA, 19 nt, Artificial Sequence
  Description of Artificial Sequence: Synthetic oligonucleotide
  Antisense strand to SEQ ID NO: 1874289
auuccgaauacccaaacuc

SEQ ID NO: 1874291 - RNA, 19 nt, Artificial Sequence
  Description of Artificial Sequence: Synthetic oligonucleotide
  Sense strand starting at position 2084 of SEQ ID NO: 1564363
gggagauuccuccgcagaa

SEQ ID NO: 1874292 - RNA, 19 nt, Artificial Sequence
  Description of Artificial Sequence: Synthetic oligonucleotide
  Antisense strand to SEQ ID NO: 1874291
uucugcggaggaaucuccc

SEQ ID NO: 1874293 - RNA, 19 nt, Artificial Sequence
  Description of Artificial Sequence: Synthetic oligonucleotide
  Sense strand starting at position 2085 of SEQ ID NO: 1564363
ggagauuccuccgcagaag

SEQ ID NO: 1874294 - RNA, 19 nt, Artificial Sequence
  Description of Artificial Sequence: Synthetic oligonucleotide
  Antisense strand to SEQ ID NO: 1874293
cuucugcggaggaaucucc

SEQ ID NO: 1874295 - RNA, 19 nt, Artificial Sequence
  Description of Artificial Sequence: Synthetic oligonucleotide
  Sense strand starting at position 2335 of SEQ ID NO: 1564363
uggacuucugccugcccua

SEQ ID NO: 1874296 - RNA, 19 nt, Artificial Sequence
  Description of Artificial Sequence: Synthetic oligonucleotide
  Antisense strand to SEQ ID NO: 1874295
uagggcaggcagaagucca

SEQ ID NO: 1874297 - RNA, 19 nt, Artificial Sequence
  Description of Artificial Sequence: Synthetic oligonucleotide
  Sense strand starting at position 2411 of SEQ ID NO: 1564363
gagucagagguucgaggua

SEQ ID NO: 1874298 - RNA, 19 nt, Artificial Sequence
  Description of Artificial Sequence: Synthetic oligonucleotide
  Antisense strand to SEQ ID NO: 1874297
uaccucgaaccucugacuc

SEQ ID NO: 1874299 - RNA, 19 nt, Artificial Sequence
  Description of Artificial Sequence: Synthetic oligonucleotide
  Sense strand starting at position 2413 of SEQ ID NO: 1564363
gucagagguucgagguaaa

SEQ ID NO: 1874300 - RNA, 19 nt, Artificial Sequence
  Description of Artificial Sequence: Synthetic oligonucleotide
  Antisense strand to SEQ ID NO: 1874299
uuuaccucgaaccucugac

SEQ ID NO: 1874301 - RNA, 19 nt, Artificial Sequence
  Description of Artificial Sequence: Synthetic oligonucleotide
  Sense strand starting at position 2535 of SEQ ID NO: 1564363
gggaacucugaugguuaca

SEQ ID NO: 1874302 - RNA, 19 nt, Artificial Sequence
  Description of Artificial Sequence: Synthetic oligonucleotide
  Antisense strand to SEQ ID NO: 1874301
uguaaccaucagaguuccc

SEQ ID NO: 1874303 - RNA, 19 nt, Artificial Sequence
  Description of Artificial Sequence: Synthetic oligonucleotide
  Sense strand starting at position 2537 of SEQ ID NO: 1564363
gaacucugaugguuacaau

SEQ ID NO: 1874304 - RNA, 19 nt, Artificial Sequence
  Description of Artificial Sequence: Synthetic oligonucleotide
  Antisense strand to SEQ ID NO: 1874303
auuguaaccaucagaguuc

SEQ ID NO: 1874305 - RNA, 19 nt, Artificial Sequence
  Description of Artificial Sequence: Synthetic oligonucleotide
  Sense strand starting at position 2546 of SEQ ID NO: 1564363
ugguuacaauaguuaagaa

SEQ ID NO: 1874306 - RNA, 19 nt, Artificial Sequence
  Description of Artificial Sequence: Synthetic oligonucleotide
  Antisense strand to SEQ ID NO: 1874305
uucuuaacuauuguaacca

SEQ ID NO: 1874307 - RNA, 19 nt, Artificial Sequence
  Description of Artificial Sequence: Synthetic oligonucleotide
  Sense strand starting at position 2558 of SEQ ID NO: 1564363
uuaagaaaguccuaggauu

SEQ ID NO: 1874308 - RNA, 19 nt, Artificial Sequence
  Description of Artificial Sequence: Synthetic oligonucleotide
  Antisense strand to SEQ ID NO: 1874307
aauccuaggacuuucuuaa

SEQ ID NO: 1874309 - RNA, 19 nt, Artificial Sequence
  Description of Artificial Sequence: Synthetic oligonucleotide
  Sense strand starting at position 2580 of SEQ ID NO: 1564363
gaccucuaucaggguguau

SEQ ID NO: 1874310 - RNA, 19 nt, Artificial Sequence
  Description of Artificial Sequence: Synthetic oligonucleotide
  Antisense strand to SEQ ID NO: 1874309
auacacccugauagagguc

SEQ ID NO: 1874311 - RNA, 19 nt, Artificial Sequence
  Description of Artificial Sequence: Synthetic oligonucleotide
  Sense strand starting at position 2658 of SEQ ID NO: 1564363
gugcaauaguaacccaauu

SEQ ID NO: 1874312 - RNA, 19 nt, Artificial Sequence
  Description of Artificial Sequence: Synthetic oligonucleotide
  Antisense strand to SEQ ID NO: 1874311
aauuggguuacuauugcac

SEQ ID NO: 1874313 - RNA, 19 nt, Artificial Sequence
  Description of Artificial Sequence: Synthetic oligonucleotide
  Sense strand starting at position 2720 of SEQ ID NO: 1564363
acccaaaucugagccaaga

SEQ ID NO: 1874314 - RNA, 19 nt, Artificial Sequence
  Description of Artificial Sequence: Synthetic oligonucleotide
  Antisense strand to SEQ ID NO: 1874313
ucuuggcucagauuugggu

SEQ ID NO: 1874315 - RNA, 19 nt, Artificial Sequence
  Description of Artificial Sequence: Synthetic oligonucleotide
  Sense strand starting at position 2749 of SEQ ID NO: 1564363
auuaaagucacgugaugug

SEQ ID NO: 1874316 - RNA, 19 nt, Artificial Sequence
  Description of Artificial Sequence: Synthetic oligonucleotide
  Antisense strand to SEQ ID NO: 1874315
cacaucacgugacuuuaau

SEQ ID NO: 1874317 - RNA, 19 nt, Artificial Sequence
  Description of Artificial Sequence: Synthetic oligonucleotide
  Sense strand starting at position 2754 of SEQ ID NO: 1564363
agucacgugaugugguuaa

SEQ ID NO: 1874318 - RNA, 19 nt, Artificial Sequence
  Description of Artificial Sequence: Synthetic oligonucleotide
  Antisense strand to SEQ ID NO: 1874317
uuaaccacaucacgugacu

SEQ ID NO: 1874319 - RNA, 19 nt, Artificial Sequence
  Description of Artificial Sequence: Synthetic oligonucleotide
  Sense strand starting at position 2758 of SEQ ID NO: 1564363
acgugaugugguuaacaga

SEQ ID NO: 1874320 - RNA, 19 nt, Artificial Sequence
  Description of Artificial Sequence: Synthetic oligonucleotide
  Antisense strand to SEQ ID NO: 1874319
ucuguuaaccacaucacgu

SEQ ID NO: 1874321 - RNA, 19 nt, Artificial Sequence
  Description of Artificial Sequence: Synthetic oligonucleotide
  Sense strand starting at position 3460 of SEQ ID NO: 1564363
aguguaaagaucugaggga

SEQ ID NO: 1874322 - RNA, 19 nt, Artificial Sequence
  Description of Artificial Sequence: Synthetic oligonucleotide
  Antisense strand to SEQ ID NO: 1874321
ucccucagaucuuuacacu

SEQ ID NO: 1874323 - RNA, 19 nt, Artificial Sequence
  Description of Artificial Sequence: Synthetic oligonucleotide
  Sense strand starting at position 3461 of SEQ ID NO: 1564363
guguaaagaucugagggau

SEQ ID NO: 1874324 - RNA, 19 nt, Artificial Sequence
  Description of Artificial Sequence: Synthetic oligonucleotide
  Antisense strand to SEQ ID NO: 1874323
aucccucagaucuuuacac

SEQ ID NO: 1874325 - RNA, 19 nt, Artificial Sequence
  Description of Artificial Sequence: Synthetic oligonucleotide
  Sense strand starting at position 3649 of SEQ ID NO: 1564363
guggccgaagcaugagaau

SEQ ID NO: 1874326 - RNA, 19 nt, Artificial Sequence
  Description of Artificial Sequence: Synthetic oligonucleotide
  Antisense strand to SEQ ID NO: 1874325
auucucaugcuucggccac

SEQ ID NO: 1874327 - RNA, 19 nt, Artificial Sequence
  Description of Artificial Sequence: Synthetic oligonucleotide
  Sense strand starting at position 3758 of SEQ ID NO: 1564363
uguaaauugcccuggugau

SEQ ID NO: 1874328 - RNA, 19 nt, Artificial Sequence
  Description of Artificial Sequence: Synthetic oligonucleotide
  Antisense strand to SEQ ID NO: 1874327
aucaccagggcaauuuaca

SEQ ID NO: 1874329 - RNA, 19 nt, Artificial Sequence
  Description of Artificial Sequence: Synthetic oligonucleotide
  Sense strand starting at position 3759 of SEQ ID NO: 1564363
guaaauugcccuggugaug

SEQ ID NO: 1874330 - RNA, 19 nt, Artificial Sequence
  Description of Artificial Sequence: Synthetic oligonucleotide
  Antisense strand to SEQ ID NO: 1874329
caucaccagggcaauuuac

SEQ ID NO: 1874331 - RNA, 19 nt, Artificial Sequence
  Description of Artificial Sequence: Synthetic oligonucleotide
  Sense strand starting at position 3924 of SEQ ID NO: 1564363
ugauuuagguuggaagagu

SEQ ID NO: 1874332 - RNA, 19 nt, Artificial Sequence
  Description of Artificial Sequence: Synthetic oligonucleotide
  Antisense strand to SEQ ID NO: 1874331
acucuuccaaccuaaauca

SEQ ID NO: 1874333 - RNA, 19 nt, Artificial Sequence
  Description of Artificial Sequence: Synthetic oligonucleotide
  Sense strand starting at position 16 of SEQ ID NO: 1564364
uagcuuggagccuacagau

SEQ ID NO: 1874334 - RNA, 19 nt, Artificial Sequence
  Description of Artificial Sequence: Synthetic oligonucleotide
  Antisense strand to SEQ ID NO: 1874333
aucuguaggcuccaagcua

SEQ ID NO: 1874335 - RNA, 19 nt, Artificial Sequence
  Description of Artificial Sequence: Synthetic oligonucleotide
  Sense strand starting at position 46 of SEQ ID NO: 1564364
ggccauaucuuuccaaaug

SEQ ID NO: 1874336 - RNA, 19 nt, Artificial Sequence
  Description of Artificial Sequence: Synthetic oligonucleotide
  Antisense strand to SEQ ID NO: 1874335
cauuuggaaagauauggcc

SEQ ID NO: 1874337 - RNA, 19 nt, Artificial Sequence
  Description of Artificial Sequence: Synthetic oligonucleotide
  Sense strand starting at position 171 of SEQ ID NO: 1564364
cgaaaugcacuauacacuu

SEQ ID NO: 1874338 - RNA, 19 nt, Artificial Sequence
  Description of Artificial Sequence: Synthetic oligonucleotide
  Antisense strand to SEQ ID NO: 1874337
aaguguauagugcauuucg

SEQ ID NO: 1874339 - RNA, 19 nt, Artificial Sequence
  Description of Artificial Sequence: Synthetic oligonucleotide
  Sense strand starting at position 236 of SEQ ID NO: 1564364
ccauuuagcugucugcuuu

SEQ ID NO: 1874340 - RNA, 19 nt, Artificial Sequence
  Description of Artificial Sequence: Synthetic oligonucleotide
  Antisense strand to SEQ ID NO: 1874339
aaagcagacagcuaaaugg

SEQ ID NO: 1874341 - RNA, 19 nt, Artificial Sequence
  Description of Artificial Sequence: Synthetic oligonucleotide
  Sense strand starting at position 242 of SEQ ID NO: 1564364
agcugucugcuuuaacugu

SEQ ID NO: 1874342 - RNA, 19 nt, Artificial Sequence
  Description of Artificial Sequence: Synthetic oligonucleotide
  Antisense strand to SEQ ID NO: 1874341
acaguuaaagcagacagcu

SEQ ID NO: 1874343 - RNA, 19 nt, Artificial Sequence
  Description of Artificial Sequence: Synthetic oligonucleotide
  Sense strand starting at position 250 of SEQ ID NO: 1564364
gcuuuaacuguacauugua

SEQ ID NO: 1874344 - RNA, 19 nt, Artificial Sequence
  Description of Artificial Sequence: Synthetic oligonucleotide
  Antisense strand to SEQ ID NO: 1874343
uacaauguacaguuaaagc

SEQ ID NO: 1874345 - RNA, 19 nt, Artificial Sequence
  Description of Artificial Sequence: Synthetic oligonucleotide
  Sense strand starting at position 253 of SEQ ID NO: 1564364
uuaacuguacauuguagua

SEQ ID NO: 1874346 - RNA, 19 nt, Artificial Sequence
  Description of Artificial Sequence: Synthetic oligonucleotide
  Antisense strand to SEQ ID NO: 1874345
uacuacaauguacaguuaa

SEQ ID NO: 1874347 - RNA, 19 nt, Artificial Sequence
  Description of Artificial Sequence: Synthetic oligonucleotide
  Sense strand starting at position 258 of SEQ ID NO: 1564364
uguacauuguaguagauuu

SEQ ID NO: 1874348 - RNA, 19 nt, Artificial Sequence
  Description of Artificial Sequence: Synthetic oligonucleotide
  Antisense strand to SEQ ID NO: 1874347
aaaucuacuacaauguaca

SEQ ID NO: 1874349 - RNA, 19 nt, Artificial Sequence
  Description of Artificial Sequence: Synthetic oligonucleotide
  Sense strand starting at position 284 of SEQ ID NO: 1564364
uaggauuuguauuguacuu

SEQ ID NO: 1874350 - RNA, 19 nt, Artificial Sequence
  Description of Artificial Sequence: Synthetic oligonucleotide
  Antisense strand to SEQ ID NO: 1874349
aaguacaauacaaauccua

SEQ ID NO: 1874351 - RNA, 19 nt, Artificial Sequence
  Description of Artificial Sequence: Synthetic oligonucleotide
  Sense strand starting at position 289 of SEQ ID NO: 1564364
uuuguauuguacuuuggga

SEQ ID NO: 1874352 - RNA, 19 nt, Artificial Sequence
  Description of Artificial Sequence: Synthetic oligonucleotide
  Antisense strand to SEQ ID NO: 1874351
ucccaaaguacaauacaaa

SEQ ID NO: 1874353 - RNA, 19 nt, Artificial Sequence
  Description of Artificial Sequence: Synthetic oligonucleotide
  Sense strand starting at position 291 of SEQ ID NO: 1564364
uguauuguacuuugggaaa

SEQ ID NO: 1874354 - RNA, 19 nt, Artificial Sequence
  Description of Artificial Sequence: Synthetic oligonucleotide
  Antisense strand to SEQ ID NO: 1874353
uuucccaaaguacaauaca

SEQ ID NO: 1874355 - RNA, 19 nt, Artificial Sequence
  Description of Artificial Sequence: Synthetic oligonucleotide
  Sense strand starting at position 339 of SEQ ID NO: 1564364
augugacuaugcuugaguu

SEQ ID NO: 1874356 - RNA, 19 nt, Artificial Sequence
  Description of Artificial Sequence: Synthetic oligonucleotide
  Antisense strand to SEQ ID NO: 1874355
aacucaagcauagucacau

SEQ ID NO: 1874357 - RNA, 19 nt, Artificial Sequence
  Description of Artificial Sequence: Synthetic oligonucleotide
  Sense strand starting at position 2023 of SEQ ID NO: 1564364
aacuaugagugccuaguaa

SEQ ID NO: 1874358 - RNA, 19 nt, Artificial Sequence
  Description of Artificial Sequence: Synthetic oligonucleotide
  Antisense strand to SEQ ID NO: 1874357
uuacuaggcacucauaguu

SEQ ID NO: 1874359 - RNA, 19 nt, Artificial Sequence
  Description of Artificial Sequence: Synthetic oligonucleotide
  Sense strand starting at position 2046 of SEQ ID NO: 1564364
uuaucaacgucauuaggau

SEQ ID NO: 1874360 - RNA, 19 nt, Artificial Sequence
  Description of Artificial Sequence: Synthetic oligonucleotide
  Antisense strand to SEQ ID NO: 1874359
auccuaaugacguugauaa

SEQ ID NO: 1874361 - RNA, 19 nt, Artificial Sequence
  Description of Artificial Sequence: Synthetic oligonucleotide
  Sense strand starting at position 2280 of SEQ ID NO: 1564364
caguguugagguugcugau

SEQ ID NO: 1874362 - RNA, 19 nt, Artificial Sequence
  Description of Artificial Sequence: Synthetic oligonucleotide
  Antisense strand to SEQ ID NO: 1874361
aucagcaaccucaacacug

SEQ ID NO: 1874363 - RNA, 19 nt, Artificial Sequence
  Description of Artificial Sequence: Synthetic oligonucleotide
  Sense strand starting at position 2393 of SEQ ID NO: 1564364
gccuucuaggacugacuua

SEQ ID NO: 1874364 - RNA, 19 nt, Artificial Sequence
  Description of Artificial Sequence: Synthetic oligonucleotide
  Antisense strand to SEQ ID NO: 1874363
uaagucaguccuagaaggc

SEQ ID NO: 1874365 - RNA, 19 nt, Artificial Sequence
  Description of Artificial Sequence: Synthetic oligonucleotide
  Sense strand starting at position 2457 of SEQ ID NO: 1564364
ggaauaagauaggaugaua

SEQ ID NO: 1874366 - RNA, 19 nt, Artificial Sequence
  Description of Artificial Sequence: Synthetic oligonucleotide
  Antisense strand to SEQ ID NO: 1874365
uaucauccuaucuuauucc

SEQ ID NO: 1874367 - RNA, 19 nt, Artificial Sequence
  Description of Artificial Sequence: Synthetic oligonucleotide
  Sense strand starting at position 2468 of SEQ ID NO: 1564364
ggaugauaugucugugugu

SEQ ID NO: 1874368 - RNA, 19 nt, Artificial Sequence
  Description of Artificial Sequence: Synthetic oligonucleotide
  Antisense strand to SEQ ID NO: 1874367
acacacagacauaucaucc

SEQ ID NO: 1874369 - RNA, 19 nt, Artificial Sequence
  Description of Artificial Sequence: Synthetic oligonucleotide
  Sense strand starting at position 2545 of SEQ ID NO: 1564364
acgauacaguaaguuuaaa

SEQ ID NO: 1874370 - RNA, 19 nt, Artificial Sequence
  Description of Artificial Sequence: Synthetic oligonucleotide
  Antisense strand to SEQ ID NO: 1874369
uuuaaacuuacuguaucgu

SEQ ID NO: 1874371 - RNA, 19 nt, Artificial Sequence
  Description of Artificial Sequence: Synthetic oligonucleotide
  Sense strand starting at position 2564 of SEQ ID NO: 1564364
aucaccuuugucuggaaga

SEQ ID NO: 1874372 - RNA, 19 nt, Artificial Sequence
  Description of Artificial Sequence: Synthetic oligonucleotide
  Antisense strand to SEQ ID NO: 1874371
ucuuccagacaaaggugau

SEQ ID NO: 1874373 - RNA, 19 nt, Artificial Sequence
  Description of Artificial Sequence: Synthetic oligonucleotide
  Sense strand starting at position 2957 of SEQ ID NO: 1564364
gagugaauagaugguaacu

SEQ ID NO: 1874374 - RNA, 19 nt, Artificial Sequence
  Description of Artificial Sequence: Synthetic oligonucleotide
  Antisense strand to SEQ ID NO: 1874373
aguuaccaucuauucacuc

SEQ ID NO: 1874375 - RNA, 19 nt, Artificial Sequence
  Description of Artificial Sequence: Synthetic oligonucleotide
  Sense strand starting at position 3004 of SEQ ID NO: 1564364
ugcuguucuugcuuaauuu

SEQ ID NO: 1874376 - RNA, 19 nt, Artificial Sequence
  Description of Artificial Sequence: Synthetic oligonucleotide
  Antisense strand to SEQ ID NO: 1874375
aaauuaagcaagaacagca

SEQ ID NO: 1874377 - RNA, 19 nt, Artificial Sequence
  Description of Artificial Sequence: Synthetic oligonucleotide
  Sense strand starting at position 3261 of SEQ ID NO: 1564364
gaaguaucuuaugagacuu

SEQ ID NO: 1874378 - RNA, 19 nt, Artificial Sequence
  Description of Artificial Sequence: Synthetic oligonucleotide
  Antisense strand to SEQ ID NO: 1874377
aagucucauaagauacuuc

SEQ ID NO: 1874379 - RNA, 19 nt, Artificial Sequence
  Description of Artificial Sequence: Synthetic oligonucleotide
  Sense strand starting at position 3269 of SEQ ID NO: 1564364
uuaugagacuuacugcagu

SEQ ID NO: 1874380 - RNA, 19 nt, Artificial Sequence
  Description of Artificial Sequence: Synthetic oligonucleotide
  Antisense strand to SEQ ID NO: 1874379
acugcaguaagucucauaa

SEQ ID NO: 1874381 - RNA, 19 nt, Artificial Sequence
  Description of Artificial Sequence: Synthetic oligonucleotide
  Sense strand starting at position 3275 of SEQ ID NO: 1564364
gacuuacugcaguaugaga

SEQ ID NO: 1874382 - RNA, 19 nt, Artificial Sequence
  Description of Artificial Sequence: Synthetic oligonucleotide
  Antisense strand to SEQ ID NO: 1874381
ucucauacugcaguaaguc

SEQ ID NO: 1874383 - RNA, 19 nt, Artificial Sequence
  Description of Artificial Sequence: Synthetic oligonucleotide
  Sense strand starting at position 3282 of SEQ ID NO: 1564364
ugcaguaugagagaacucu

SEQ ID NO: 1874384 - RNA, 19 nt, Artificial Sequence
  Description of Artificial Sequence: Synthetic oligonucleotide
  Antisense strand to SEQ ID NO: 1874383
agaguucucucauacugca

SEQ ID NO: 1874385 - RNA, 19 nt, Artificial Sequence
  Description of Artificial Sequence: Synthetic oligonucleotide
  Sense strand starting at position 3288 of SEQ ID NO: 1564364
augagagaacucugccuua

SEQ ID NO: 1874386 - RNA, 19 nt, Artificial Sequence
  Description of Artificial Sequence: Synthetic oligonucleotide
  Antisense strand to SEQ ID NO: 1874385
uaaggcagaguucucucau

SEQ ID NO: 1874387 - RNA, 19 nt, Artificial Sequence
  Description of Artificial Sequence: Synthetic oligonucleotide
  Sense strand starting at position 3291 of SEQ ID NO: 1564364
agagaacucugccuuaaug

SEQ ID NO: 1874388 - RNA, 19 nt, Artificial Sequence
  Description of Artificial Sequence: Synthetic oligonucleotide
  Antisense strand to SEQ ID NO: 1874387
cauuaaggcagaguucucu

SEQ ID NO: 1874389 - RNA, 19 nt, Artificial Sequence
  Description of Artificial Sequence: Synthetic oligonucleotide
  Sense strand starting at position 3293 of SEQ ID NO: 1564364
agaacucugccuuaauggu

SEQ ID NO: 1874390 - RNA, 19 nt, Artificial Sequence
  Description of Artificial Sequence: Synthetic oligonucleotide
  Antisense strand to SEQ ID NO: 1874389
accauuaaggcagaguucu

SEQ ID NO: 1874391 - RNA, 19 nt, Artificial Sequence
  Description of Artificial Sequence: Synthetic oligonucleotide
  Sense strand starting at position 3302 of SEQ ID NO: 1564364
ccuuaauggugucuaggca

SEQ ID NO: 1874392 - RNA, 19 nt, Artificial Sequence
  Description of Artificial Sequence: Synthetic oligonucleotide
  Antisense strand to SEQ ID NO: 1874391
ugccuagacaccauuaagg

SEQ ID NO: 1874393 - RNA, 19 nt, Artificial Sequence
  Description of Artificial Sequence: Synthetic oligonucleotide
  Sense strand starting at position 3426 of SEQ ID NO: 1564364
ugacguaauagcuguagau

SEQ ID NO: 1874394 - RNA, 19 nt, Artificial Sequence
  Description of Artificial Sequence: Synthetic oligonucleotide
  Antisense strand to SEQ ID NO: 1874393
aucuacagcuauuacguca

SEQ ID NO: 1874395 - RNA, 19 nt, Artificial Sequence
  Description of Artificial Sequence: Synthetic oligonucleotide
  Sense strand starting at position 3428 of SEQ ID NO: 1564364
acguaauagcuguagauug

SEQ ID NO: 1874396 - RNA, 19 nt, Artificial Sequence
  Description of Artificial Sequence: Synthetic oligonucleotide
  Antisense strand to SEQ ID NO: 1874395
caaucuacagcuauuacgu

SEQ ID NO: 1874397 - RNA, 19 nt, Artificial Sequence
  Description of Artificial Sequence: Synthetic oligonucleotide
  Sense strand starting at position 3494 of SEQ ID NO: 1564364
gugguauucuuguuaagua

SEQ ID NO: 1874398 - RNA, 19 nt, Artificial Sequence
  Description of Artificial Sequence: Synthetic oligonucleotide
  Antisense strand to SEQ ID NO: 1874397
uacuuaacaagaauaccac

SEQ ID NO: 1874399 - RNA, 19 nt, Artificial Sequence
  Description of Artificial Sequence: Synthetic oligonucleotide
  Sense strand starting at position 3563 of SEQ ID NO: 1564364
ggagcaaguagcuaaguuu

SEQ ID NO: 1874400 - RNA, 19 nt, Artificial Sequence
  Description of Artificial Sequence: Synthetic oligonucleotide
  Antisense strand to SEQ ID NO: 1874399
aaacuuagcuacuugcucc

SEQ ID NO: 1874401 - RNA, 19 nt, Artificial Sequence
  Description of Artificial Sequence: Synthetic oligonucleotide
  Sense strand starting at position 3572 of SEQ ID NO: 1564364
agcuaaguuugcuuauucu

SEQ ID NO: 1874402 - RNA, 19 nt, Artificial Sequence
  Description of Artificial Sequence: Synthetic oligonucleotide
  Antisense strand to SEQ ID NO: 1874401
agaauaagcaaacuuagcu

SEQ ID NO: 1874403 - RNA, 19 nt, Artificial Sequence
  Description of Artificial Sequence: Synthetic oligonucleotide
  Sense strand starting at position 3595 of SEQ ID NO: 1564364
auggauuaauaugggaaca

SEQ ID NO: 1874404 - RNA, 19 nt, Artificial Sequence
  Description of Artificial Sequence: Synthetic oligonucleotide
  Antisense strand to SEQ ID NO: 1874403
uguucccauauuaauccau

SEQ ID NO: 1874405 - RNA, 19 nt, Artificial Sequence
  Description of Artificial Sequence: Synthetic oligonucleotide
  Sense strand starting at position 3597 of SEQ ID NO: 1564364
ggauuaauaugggaacaga

SEQ ID NO: 1874406 - RNA, 19 nt, Artificial Sequence
  Description of Artificial Sequence: Synthetic oligonucleotide
  Antisense strand to SEQ ID NO: 1874405
ucuguucccauauuaaucc

SEQ ID NO: 1874407 - RNA, 19 nt, Artificial Sequence
  Description of Artificial Sequence: Synthetic oligonucleotide
  Sense strand starting at position 3673 of SEQ ID NO: 1564364
aguacucaguuaccacaua

SEQ ID NO: 1874408 - RNA, 19 nt, Artificial Sequence
  Description of Artificial Sequence: Synthetic oligonucleotide
  Antisense strand to SEQ ID NO: 1874407
uaugugguaacugaguacu

SEQ ID NO: 1874409 - RNA, 19 nt, Artificial Sequence
  Description of Artificial Sequence: Synthetic oligonucleotide
  Sense strand starting at position 3684 of SEQ ID NO: 1564364
accacauagcagugaucau

SEQ ID NO: 1874410 - RNA, 19 nt, Artificial Sequence
  Description of Artificial Sequence: Synthetic oligonucleotide
  Antisense strand to SEQ ID NO: 1874409
augaucacugcuauguggu

SEQ ID NO: 1874411 - RNA, 19 nt, Artificial Sequence
  Description of Artificial Sequence: Synthetic oligonucleotide
  Sense strand starting at position 3950 of SEQ ID NO: 1564364
ccaaguuguugacucuuga

SEQ ID NO: 1874412 - RNA, 19 nt, Artificial Sequence
  Description of Artificial Sequence: Synthetic oligonucleotide
  Antisense strand to SEQ ID NO: 1874411
ucaagagucaacaacuugg

SEQ ID NO: 1874413 - RNA, 19 nt, Artificial Sequence
  Description of Artificial Sequence: Synthetic oligonucleotide
  Sense strand starting at position 212 of SEQ ID NO: 1564365
ccuccuucuuuggcagauu

SEQ ID NO: 1874414 - RNA, 19 nt, Artificial Sequence
  Description of Artificial Sequence: Synthetic oligonucleotide
  Antisense strand to SEQ ID NO: 1874413
aaucugccaaagaaggagg

SEQ ID NO: 1874415 - RNA, 19 nt, Artificial Sequence
  Description of Artificial Sequence: Synthetic oligonucleotide
  Sense strand starting at position 213 of SEQ ID NO: 1564365
cuccuucuuuggcagauuu

SEQ ID NO: 1874416 - RNA, 19 nt, Artificial Sequence
  Description of Artificial Sequence: Synthetic oligonucleotide
  Antisense strand to SEQ ID NO: 1874415
aaaucugccaaagaaggag

SEQ ID NO: 1874417 - RNA, 19 nt, Artificial Sequence
  Description of Artificial Sequence: Synthetic oligonucleotide
  Sense strand starting at position 249 of SEQ ID NO: 1564365
caaggagauucugugcaga

SEQ ID NO: 1874418 - RNA, 19 nt, Artificial Sequence
  Description of Artificial Sequence: Synthetic oligonucleotide
  Antisense strand to SEQ ID NO: 1874417
ucugcacagaaucuccuug

SEQ ID NO: 1874419 - RNA, 19 nt, Artificial Sequence
  Description of Artificial Sequence: Synthetic oligonucleotide
  Sense strand starting at position 251 of SEQ ID NO: 1564365
aggagauucugugcagagu

SEQ ID NO: 1874420 - RNA, 19 nt, Artificial Sequence
  Description of Artificial Sequence: Synthetic oligonucleotide
  Antisense strand to SEQ ID NO: 1874419
acucugcacagaaucuccu

SEQ ID NO: 1874421 - RNA, 19 nt, Artificial Sequence
  Description of Artificial Sequence: Synthetic oligonucleotide
  Sense strand starting at position 252 of SEQ ID NO: 1564365
ggagauucugugcagagua

SEQ ID NO: 1874422 - RNA, 19 nt, Artificial Sequence
  Description of Artificial Sequence: Synthetic oligonucleotide
  Antisense strand to SEQ ID NO: 1874421
uacucugcacagaaucucc

SEQ ID NO: 1874423 - RNA, 19 nt, Artificial Sequence
  Description of Artificial Sequence: Synthetic oligonucleotide
  Sense strand starting at position 283 of SEQ ID NO: 1564365
ugcagcaaucacugugaua

SEQ ID NO: 1874424 - RNA, 19 nt, Artificial Sequence
  Description of Artificial Sequence: Synthetic oligonucleotide
  Antisense strand to SEQ ID NO: 1874423
uaucacagugauugcugca

SEQ ID NO: 1874425 - RNA, 19 nt, Artificial Sequence
  Description of Artificial Sequence: Synthetic oligonucleotide
  Sense strand starting at position 410 of SEQ ID NO: 1564365
agagacuacucugaaauuc

SEQ ID NO: 1874426 - RNA, 19 nt, Artificial Sequence
  Description of Artificial Sequence: Synthetic oligonucleotide
  Antisense strand to SEQ ID NO: 1874425
gaauuucagaguagucucu

SEQ ID NO: 1874427 - RNA, 19 nt, Artificial Sequence
  Description of Artificial Sequence: Synthetic oligonucleotide
  Sense strand starting at position 449 of SEQ ID NO: 1564365
ucugcacuuuggucaggau

SEQ ID NO: 1874428 - RNA, 19 nt, Artificial Sequence
  Description of Artificial Sequence: Synthetic oligonucleotide
  Antisense strand to SEQ ID NO: 1874427
auccugaccaaagugcaga

SEQ ID NO: 1874429 - RNA, 19 nt, Artificial Sequence
  Description of Artificial Sequence: Synthetic oligonucleotide
  Sense strand starting at position 571 of SEQ ID NO: 1564365
ugcacaaauaggugugcua

SEQ ID NO: 1874430 - RNA, 19 nt, Artificial Sequence
  Description of Artificial Sequence: Synthetic oligonucleotide
  Antisense strand to SEQ ID NO: 1874429
uagcacaccuauuugugca

SEQ ID NO: 1874431 - RNA, 19 nt, Artificial Sequence
  Description of Artificial Sequence: Synthetic oligonucleotide
  Sense strand starting at position 863 of SEQ ID NO: 1564365
ccuccuuugcucugaggau

SEQ ID NO: 1874432 - RNA, 19 nt, Artificial Sequence
  Description of Artificial Sequence: Synthetic oligonucleotide
  Antisense strand to SEQ ID NO: 1874431
auccucagagcaaaggagg

SEQ ID NO: 1874433 - RNA, 19 nt, Artificial Sequence
  Description of Artificial Sequence: Synthetic oligonucleotide
  Sense strand starting at position 900 of SEQ ID NO: 1564365
ugaggcuucuccuccaacu

SEQ ID NO: 1874434 - RNA, 19 nt, Artificial Sequence
  Description of Artificial Sequence: Synthetic oligonucleotide
  Antisense strand to SEQ ID NO: 1874433
aguuggaggagaagccuca

SEQ ID NO: 1874435 - RNA, 19 nt, Artificial Sequence
  Description of Artificial Sequence: Synthetic oligonucleotide
  Sense strand starting at position 995 of SEQ ID NO: 1564365
gggccaucacuauagcacu

SEQ ID NO: 1874436 - RNA, 19 nt, Artificial Sequence
  Description of Artificial Sequence: Synthetic oligonucleotide
  Antisense strand to SEQ ID NO: 1874435
agugcuauagugauggccc

SEQ ID NO: 1874437 - RNA, 19 nt, Artificial Sequence
  Description of Artificial Sequence: Synthetic oligonucleotide
  Sense strand starting at position 1009 of SEQ ID NO: 1564365
gcacuagaucucugccugu

SEQ ID NO: 1874438 - RNA, 19 nt, Artificial Sequence
  Description of Artificial Sequence: Synthetic oligonucleotide
  Antisense strand to SEQ ID NO: 1874437
acaggcagagaucuagugc

SEQ ID NO: 1874439 - RNA, 19 nt, Artificial Sequence
  Description of Artificial Sequence: Synthetic oligonucleotide
  Sense strand starting at position 1059 of SEQ ID NO: 1564365
cagccuaagucuucugcga

SEQ ID NO: 1874440 - RNA, 19 nt, Artificial Sequence
  Description of Artificial Sequence: Synthetic oligonucleotide
  Antisense strand to SEQ ID NO: 1874439
ucgcagaagacuuaggcug

SEQ ID NO: 1874441 - RNA, 19 nt, Artificial Sequence
  Description of Artificial Sequence: Synthetic oligonucleotide
  Sense strand starting at position 1063 of SEQ ID NO: 1564365
cuaagucuucugcgacuaa

SEQ ID NO: 1874442 - RNA, 19 nt, Artificial Sequence
  Description of Artificial Sequence: Synthetic oligonucleotide
  Antisense strand to SEQ ID NO: 1874441
uuagucgcagaagacuuag

SEQ ID NO: 1874443 - RNA, 19 nt, Artificial Sequence
  Description of Artificial Sequence: Synthetic oligonucleotide
  Sense strand starting at position 1112 of SEQ ID NO: 1564365
gucugaaaucggugagcag

SEQ ID NO: 1874444 - RNA, 19 nt, Artificial Sequence
  Description of Artificial Sequence: Synthetic oligonucleotide
  Antisense strand to SEQ ID NO: 1874443
cugcucaccgauuucagac

SEQ ID NO: 1874445 - RNA, 19 nt, Artificial Sequence
  Description of Artificial Sequence: Synthetic oligonucleotide
  Sense strand starting at position 1113 of SEQ ID NO: 1564365
ucugaaaucggugagcagu

SEQ ID NO: 1874446 - RNA, 19 nt, Artificial Sequence
  Description of Artificial Sequence: Synthetic oligonucleotide
  Antisense strand to SEQ ID NO: 1874445
acugcucaccgauuucaga

SEQ ID NO: 1874447 - RNA, 19 nt, Artificial Sequence
  Description of Artificial Sequence: Synthetic oligonucleotide
  Sense strand starting at position 1203 of SEQ ID NO: 1564365
ccuuccaugcagugaaguu

SEQ ID NO: 1874448 - RNA, 19 nt, Artificial Sequence
  Description of Artificial Sequence: Synthetic oligonucleotide
  Antisense strand to SEQ ID NO: 1874447
aacuucacugcauggaagg

SEQ ID NO: 1874449 - RNA, 19 nt, Artificial Sequence
  Description of Artificial Sequence: Synthetic oligonucleotide
  Sense strand starting at position 1301 of SEQ ID NO: 1564365
gcucaauuauccucaguga

SEQ ID NO: 1874450 - RNA, 19 nt, Artificial Sequence
  Description of Artificial Sequence: Synthetic oligonucleotide
  Antisense strand to SEQ ID NO: 1874449
ucacugaggauaauugagc

SEQ ID NO: 1874451 - RNA, 19 nt, Artificial Sequence
  Description of Artificial Sequence: Synthetic oligonucleotide
  Sense strand starting at position 1302 of SEQ ID NO: 1564365
cucaauuauccucagugag

SEQ ID NO: 1874452 - RNA, 19 nt, Artificial Sequence
  Description of Artificial Sequence: Synthetic oligonucleotide
  Antisense strand to SEQ ID NO: 1874451
cucacugaggauaauugag

SEQ ID NO: 1874453 - RNA, 19 nt, Artificial Sequence
  Description of Artificial Sequence: Synthetic oligonucleotide
  Sense strand starting at position 1305 of SEQ ID NO: 1564365
aauuauccucagugagcga

SEQ ID NO: 1874454 - RNA, 19 nt, Artificial Sequence
  Description of Artificial Sequence: Synthetic oligonucleotide
  Antisense strand to SEQ ID NO: 1874453
ucgcucacugaggauaauu

SEQ ID NO: 1874455 - RNA, 19 nt, Artificial Sequence
  Description of Artificial Sequence: Synthetic oligonucleotide
  Sense strand starting at position 1392 of SEQ ID NO: 1564365
agaaaugauugccuuccau

SEQ ID NO: 1874456 - RNA, 19 nt, Artificial Sequence
  Description of Artificial Sequence: Synthetic oligonucleotide
  Antisense strand to SEQ ID NO: 1874455
auggaaggcaaucauuucu

SEQ ID NO: 1874457 - RNA, 19 nt, Artificial Sequence
  Description of Artificial Sequence: Synthetic oligonucleotide
  Sense strand starting at position 1414 of SEQ ID NO: 1564365
ccgguucuccguguugcaa

SEQ ID NO: 1874458 - RNA, 19 nt, Artificial Sequence
  Description of Artificial Sequence: Synthetic oligonucleotide
  Antisense strand to SEQ ID NO: 1874457
uugcaacacggagaaccgg

SEQ ID NO: 1874459 - RNA, 19 nt, Artificial Sequence
  Description of Artificial Sequence: Synthetic oligonucleotide
  Sense strand starting at position 1415 of SEQ ID NO: 1564365
cgguucuccguguugcaaa

SEQ ID NO: 1874460 - RNA, 19 nt, Artificial Sequence
  Description of Artificial Sequence: Synthetic oligonucleotide
  Antisense strand to SEQ ID NO: 1874459
uuugcaacacggagaaccg

SEQ ID NO: 1874461 - RNA, 19 nt, Artificial Sequence
  Description of Artificial Sequence: Synthetic oligonucleotide
  Sense strand starting at position 1427 of SEQ ID NO: 1564365
uugcaaauccaucagugaa

SEQ ID NO: 1874462 - RNA, 19 nt, Artificial Sequence
  Description of Artificial Sequence: Synthetic oligonucleotide
  Antisense strand to SEQ ID NO: 1874461
uucacugauggauuugcaa

SEQ ID NO: 1874463 - RNA, 19 nt, Artificial Sequence
  Description of Artificial Sequence: Synthetic oligonucleotide
  Sense strand starting at position 1429 of SEQ ID NO: 1564365
gcaaauccaucagugaaca

SEQ ID NO: 1874464 - RNA, 19 nt, Artificial Sequence
  Description of Artificial Sequence: Synthetic oligonucleotide
  Antisense strand to SEQ ID NO: 1874463
uguucacugauggauuugc

SEQ ID NO: 1874465 - RNA, 19 nt, Artificial Sequence
  Description of Artificial Sequence: Synthetic oligonucleotide
  Sense strand starting at position 1470 of SEQ ID NO: 1564365
gauuucuagucuggaggaa

SEQ ID NO: 1874466 - RNA, 19 nt, Artificial Sequence
  Description of Artificial Sequence: Synthetic oligonucleotide
  Antisense strand to SEQ ID NO: 1874465
uuccuccagacuagaaauc

SEQ ID NO: 1874467 - RNA, 19 nt, Artificial Sequence
  Description of Artificial Sequence: Synthetic oligonucleotide
  Sense strand starting at position 1544 of SEQ ID NO: 1564365
aaaggauuccucggguuug

SEQ ID NO: 1874468 - RNA, 19 nt, Artificial Sequence
  Description of Artificial Sequence: Synthetic oligonucleotide
  Antisense strand to SEQ ID NO: 1874467
caaacccgaggaauccuuu

SEQ ID NO: 1874469 - RNA, 19 nt, Artificial Sequence
  Description of Artificial Sequence: Synthetic oligonucleotide
  Sense strand starting at position 1664 of SEQ ID NO: 1564365
gugaaacauuugcaagagu

SEQ ID NO: 1874470 - RNA, 19 nt, Artificial Sequence
  Description of Artificial Sequence: Synthetic oligonucleotide
  Antisense strand to SEQ ID NO: 1874469
acucuugcaaauguuucac

SEQ ID NO: 1874471 - RNA, 19 nt, Artificial Sequence
  Description of Artificial Sequence: Synthetic oligonucleotide
  Sense strand starting at position 1706 of SEQ ID NO: 1564365
ggauacaagcgcugaguga

SEQ ID NO: 1874472 - RNA, 19 nt, Artificial Sequence
  Description of Artificial Sequence: Synthetic oligonucleotide
  Antisense strand to SEQ ID NO: 1874471
ucacucagcgcuuguaucc

SEQ ID NO: 1874473 - RNA, 19 nt, Artificial Sequence
  Description of Artificial Sequence: Synthetic oligonucleotide
  Sense strand starting at position 1715 of SEQ ID NO: 1564365
cgcugagugacucaaucaa

SEQ ID NO: 1874474 - RNA, 19 nt, Artificial Sequence
  Description of Artificial Sequence: Synthetic oligonucleotide
  Antisense strand to SEQ ID NO: 1874473
uugauugagucacucagcg

SEQ ID NO: 1874475 - RNA, 19 nt, Artificial Sequence
  Description of Artificial Sequence: Synthetic oligonucleotide
  Sense strand starting at position 2576 of SEQ ID NO: 1564365
gccucauucugauuguucu

SEQ ID NO: 1874476 - RNA, 19 nt, Artificial Sequence
  Description of Artificial Sequence: Synthetic oligonucleotide
  Antisense strand to SEQ ID NO: 1874475
agaacaaucagaaugaggc

SEQ ID NO: 1874477 - RNA, 19 nt, Artificial Sequence
  Description of Artificial Sequence: Synthetic oligonucleotide
  Sense strand starting at position 2579 of SEQ ID NO: 1564365
ucauucugauuguucucua

SEQ ID NO: 1874478 - RNA, 19 nt, Artificial Sequence
  Description of Artificial Sequence: Synthetic oligonucleotide
  Antisense strand to SEQ ID NO: 1874477
uagagaacaaucagaauga

SEQ ID NO: 1874479 - RNA, 19 nt, Artificial Sequence
  Description of Artificial Sequence: Synthetic oligonucleotide
  Sense strand starting at position 2583 of SEQ ID NO: 1564365
ucugauuguucucuaccca

SEQ ID NO: 1874480 - RNA, 19 nt, Artificial Sequence
  Description of Artificial Sequence: Synthetic oligonucleotide
  Antisense strand to SEQ ID NO: 1874479
uggguagagaacaaucaga

SEQ ID NO: 1874481 - RNA, 19 nt, Artificial Sequence
  Description of Artificial Sequence: Synthetic oligonucleotide
  Sense strand starting at position 2777 of SEQ ID NO: 1564365
gaacaaguguuguucucca

SEQ ID NO: 1874482 - RNA, 19 nt, Artificial Sequence
  Description of Artificial Sequence: Synthetic oligonucleotide
  Antisense strand to SEQ ID NO: 1874481
uggagaacaacacuuguuc

SEQ ID NO: 1874483 - RNA, 19 nt, Artificial Sequence
  Description of Artificial Sequence: Synthetic oligonucleotide
  Sense strand starting at position 2781 of SEQ ID NO: 1564365
aaguguuguucuccaugcu

SEQ ID NO: 1874484 - RNA, 19 nt, Artificial Sequence
  Description of Artificial Sequence: Synthetic oligonucleotide
  Antisense strand to SEQ ID NO: 1874483
agcauggagaacaacacuu

SEQ ID NO: 1874485 - RNA, 19 nt, Artificial Sequence
  Description of Artificial Sequence: Synthetic oligonucleotide
  Sense strand starting at position 2782 of SEQ ID NO: 1564365
aguguuguucuccaugcuu

SEQ ID NO: 1874486 - RNA, 19 nt, Artificial Sequence
  Description of Artificial Sequence: Synthetic oligonucleotide
  Antisense strand to SEQ ID NO: 1874485
aagcauggagaacaacacu

SEQ ID NO: 1874487 - RNA, 19 nt, Artificial Sequence
  Description of Artificial Sequence: Synthetic oligonucleotide
  Sense strand starting at position 2827 of SEQ ID NO: 1564365
gccucuuugggucaaguau

SEQ ID NO: 1874488 - RNA, 19 nt, Artificial Sequence
  Description of Artificial Sequence: Synthetic oligonucleotide
  Antisense strand to SEQ ID NO: 1874487
auacuugacccaaagaggc

SEQ ID NO: 1874489 - RNA, 19 nt, Artificial Sequence
  Description of Artificial Sequence: Synthetic oligonucleotide
  Sense strand starting at position 2833 of SEQ ID NO: 1564365
uugggucaaguaugacaga

SEQ ID NO: 1874490 - RNA, 19 nt, Artificial Sequence
  Description of Artificial Sequence: Synthetic oligonucleotide
  Antisense strand to SEQ ID NO: 1874489
ucugucauacuugacccaa

SEQ ID NO: 1874491 - RNA, 19 nt, Artificial Sequence
  Description of Artificial Sequence: Synthetic oligonucleotide
  Sense strand starting at position 2924 of SEQ ID NO: 1564365
ccaagacauuuguguaauc

SEQ ID NO: 1874492 - RNA, 19 nt, Artificial Sequence
  Description of Artificial Sequence: Synthetic oligonucleotide
  Antisense strand to SEQ ID NO: 1874491
gauuacacaaaugucuugg

SEQ ID NO: 1874493 - RNA, 19 nt, Artificial Sequence
  Description of Artificial Sequence: Synthetic oligonucleotide
  Sense strand starting at position 208 of SEQ ID NO: 1564366
augcucaaaucuguaguaa

SEQ ID NO: 1874494 - RNA, 19 nt, Artificial Sequence
  Description of Artificial Sequence: Synthetic oligonucleotide
  Antisense strand to SEQ ID NO: 1874493
uuacuacagauuugagcau

SEQ ID NO: 1874495 - RNA, 19 nt, Artificial Sequence
  Description of Artificial Sequence: Synthetic oligonucleotide
  Sense strand starting at position 209 of SEQ ID NO: 1564366
ugcucaaaucuguaguaau

SEQ ID NO: 1874496 - RNA, 19 nt, Artificial Sequence
  Description of Artificial Sequence: Synthetic oligonucleotide
  Antisense strand to SEQ ID NO: 1874495
auuacuacagauuugagca

SEQ ID NO: 1874497 - RNA, 19 nt, Artificial Sequence
  Description of Artificial Sequence: Synthetic oligonucleotide
  Sense strand starting at position 482 of SEQ ID NO: 1564366
aaaguauuacacuguguga

SEQ ID NO: 1874498 - RNA, 19 nt, Artificial Sequence
  Description of Artificial Sequence: Synthetic oligonucleotide
  Antisense strand to SEQ ID NO: 1874497
ucacacaguguaauacuuu

SEQ ID NO: 1874499 - RNA, 19 nt, Artificial Sequence
  Description of Artificial Sequence: Synthetic oligonucleotide
  Sense strand starting at position 485 of SEQ ID NO: 1564366
guauuacacugugugaaua

SEQ ID NO: 1874500 - RNA, 19 nt, Artificial Sequence
  Description of Artificial Sequence: Synthetic oligonucleotide
  Antisense strand to SEQ ID NO: 1874499
uauucacacaguguaauac

SEQ ID NO: 1874501 - RNA, 19 nt, Artificial Sequence
  Description of Artificial Sequence: Synthetic oligonucleotide
  Sense strand starting at position 511 of SEQ ID NO: 1564366
aauaaaccggaguaucuuu

SEQ ID NO: 1874502 - RNA, 19 nt, Artificial Sequence
  Description of Artificial Sequence: Synthetic oligonucleotide
  Antisense strand to SEQ ID NO: 1874501
aaagauacuccgguuuauu

SEQ ID NO: 1874503 - RNA, 19 nt, Artificial Sequence
  Description of Artificial Sequence: Synthetic oligonucleotide
  Sense strand starting at position 606 of SEQ ID NO: 1564366
auuagagauagcuaggcuu

SEQ ID NO: 1874504 - RNA, 19 nt, Artificial Sequence
  Description of Artificial Sequence: Synthetic oligonucleotide
  Antisense strand to SEQ ID NO: 1874503
aagccuagcuaucucuaau

SEQ ID NO: 1874505 - RNA, 19 nt, Artificial Sequence
  Description of Artificial Sequence: Synthetic oligonucleotide
  Sense strand starting at position 608 of SEQ ID NO: 1564366
uagagauagcuaggcuucu

SEQ ID NO: 1874506 - RNA, 19 nt, Artificial Sequence
  Description of Artificial Sequence: Synthetic oligonucleotide
  Antisense strand to SEQ ID NO: 1874505
agaagccuagcuaucucua

SEQ ID NO: 1874507 - RNA, 19 nt, Artificial Sequence
  Description of Artificial Sequence: Synthetic oligonucleotide
  Sense strand starting at position 609 of SEQ ID NO: 1564366
agagauagcuaggcuucuu

SEQ ID NO: 1874508 - RNA, 19 nt, Artificial Sequence
  Description of Artificial Sequence: Synthetic oligonucleotide
  Antisense strand to SEQ ID NO: 1874507
aagaagccuagcuaucucu

SEQ ID NO: 1874509 - RNA, 19 nt, Artificial Sequence
  Description of Artificial Sequence: Synthetic oligonucleotide
  Sense strand starting at position 634 of SEQ ID NO: 1564366
cucuaaguguaucucacau

SEQ ID NO: 1874510 - RNA, 19 nt, Artificial Sequence
  Description of Artificial Sequence: Synthetic oligonucleotide
  Antisense strand to SEQ ID NO: 1874509
augugagauacacuuagag

SEQ ID NO: 1874511 - RNA, 19 nt, Artificial Sequence
  Description of Artificial Sequence: Synthetic oligonucleotide
  Sense strand starting at position 768 of SEQ ID NO: 1564366
ggaccuagcuucuuaguga

SEQ ID NO: 1874512 - RNA, 19 nt, Artificial Sequence
  Description of Artificial Sequence: Synthetic oligonucleotide
  Antisense strand to SEQ ID NO: 1874511
ucacuaagaagcuaggucc

SEQ ID NO: 1874513 - RNA, 19 nt, Artificial Sequence
  Description of Artificial Sequence: Synthetic oligonucleotide
  Sense strand starting at position 781 of SEQ ID NO: 1564366
uagugaugucaauagggug

SEQ ID NO: 1874514 - RNA, 19 nt, Artificial Sequence
  Description of Artificial Sequence: Synthetic oligonucleotide
  Antisense strand to SEQ ID NO: 1874513
cacccuauugacaucacua

SEQ ID NO: 1874515 - RNA, 19 nt, Artificial Sequence
  Description of Artificial Sequence: Synthetic oligonucleotide
  Sense strand starting at position 2230 of SEQ ID NO: 1564366
ugaggaguuucugugggaa

SEQ ID NO: 1874516 - RNA, 19 nt, Artificial Sequence
  Description of Artificial Sequence: Synthetic oligonucleotide
  Antisense strand to SEQ ID NO: 1874515
uucccacagaaacuccuca

SEQ ID NO: 1874517 - RNA, 19 nt, Artificial Sequence
  Description of Artificial Sequence: Synthetic oligonucleotide
  Sense strand starting at position 2233 of SEQ ID NO: 1564366
ggaguuucugugggaagau

SEQ ID NO: 1874518 - RNA, 19 nt, Artificial Sequence
  Description of Artificial Sequence: Synthetic oligonucleotide
  Antisense strand to SEQ ID NO: 1874517
aucuucccacagaaacucc

SEQ ID NO: 1874519 - RNA, 19 nt, Artificial Sequence
  Description of Artificial Sequence: Synthetic oligonucleotide
  Sense strand starting at position 2263 of SEQ ID NO: 1564366
cagguuucccaagggaaac

SEQ ID NO: 1874520 - RNA, 19 nt, Artificial Sequence
  Description of Artificial Sequence: Synthetic oligonucleotide
  Antisense strand to SEQ ID NO: 1874519
guuucccuugggaaaccug

SEQ ID NO: 1874521 - RNA, 19 nt, Artificial Sequence
  Description of Artificial Sequence: Synthetic oligonucleotide
  Sense strand starting at position 2323 of SEQ ID NO: 1564366
gauguuggacgacguuaaa

SEQ ID NO: 1874522 - RNA, 19 nt, Artificial Sequence
  Description of Artificial Sequence: Synthetic oligonucleotide
  Antisense strand to SEQ ID NO: 1874521
uuuaacgucguccaacauc

SEQ ID NO: 1874523 - RNA, 19 nt, Artificial Sequence
  Description of Artificial Sequence: Synthetic oligonucleotide
  Sense strand starting at position 2355 of SEQ ID NO: 1564366
ggcccuacccucgaggauu

SEQ ID NO: 1874524 - RNA, 19 nt, Artificial Sequence
  Description of Artificial Sequence: Synthetic oligonucleotide
  Antisense strand to SEQ ID NO: 1874523
aauccucgaggguagggcc

SEQ ID NO: 1874525 - RNA, 19 nt, Artificial Sequence
  Description of Artificial Sequence: Synthetic oligonucleotide
  Sense strand starting at position 2363 of SEQ ID NO: 1564366
ccucgaggauuugacaaau

SEQ ID NO: 1874526 - RNA, 19 nt, Artificial Sequence
  Description of Artificial Sequence: Synthetic oligonucleotide
  Antisense strand to SEQ ID NO: 1874525
auuugucaaauccucgagg

SEQ ID NO: 1874527 - RNA, 19 nt, Artificial Sequence
  Description of Artificial Sequence: Synthetic oligonucleotide
  Sense strand starting at position 2476 of SEQ ID NO: 1564366
uuuguaaugguagacaauu

SEQ ID NO: 1874528 - RNA, 19 nt, Artificial Sequence
  Description of Artificial Sequence: Synthetic oligonucleotide
  Antisense strand to SEQ ID NO: 1874527
aauugucuaccauuacaaa

SEQ ID NO: 1874529 - RNA, 19 nt, Artificial Sequence
  Description of Artificial Sequence: Synthetic oligonucleotide
  Sense strand starting at position 2575 of SEQ ID NO: 1564366
auaucucaugaauguguca

SEQ ID NO: 1874530 - RNA, 19 nt, Artificial Sequence
  Description of Artificial Sequence: Synthetic oligonucleotide
  Antisense strand to SEQ ID NO: 1874529
ugacacauucaugagauau

SEQ ID NO: 1874531 - RNA, 19 nt, Artificial Sequence
  Description of Artificial Sequence: Synthetic oligonucleotide
  Sense strand starting at position 2662 of SEQ ID NO: 1564366
agugaugagaugugaugaa

SEQ ID NO: 1874532 - RNA, 19 nt, Artificial Sequence
  Description of Artificial Sequence: Synthetic oligonucleotide
  Antisense strand to SEQ ID NO: 1874531
uucaucacaucucaucacu

SEQ ID NO: 1874533 - RNA, 19 nt, Artificial Sequence
  Description of Artificial Sequence: Synthetic oligonucleotide
  Sense strand starting at position 2695 of SEQ ID NO: 1564366
uagauugcguaagcaaaga

SEQ ID NO: 1874534 - RNA, 19 nt, Artificial Sequence
  Description of Artificial Sequence: Synthetic oligonucleotide
  Antisense strand to SEQ ID NO: 1874533
ucuuugcuuacgcaaucua

SEQ ID NO: 1874535 - RNA, 19 nt, Artificial Sequence
  Description of Artificial Sequence: Synthetic oligonucleotide
  Sense strand starting at position 2769 of SEQ ID NO: 1564366
aguguuuaagcagggaaag

SEQ ID NO: 1874536 - RNA, 19 nt, Artificial Sequence
  Description of Artificial Sequence: Synthetic oligonucleotide
  Antisense strand to SEQ ID NO: 1874535
cuuucccugcuuaaacacu

SEQ ID NO: 1874537 - RNA, 19 nt, Artificial Sequence
  Description of Artificial Sequence: Synthetic oligonucleotide
  Sense strand starting at position 2786 of SEQ ID NO: 1564366
aggauaggauccuaaagaa

SEQ ID NO: 1874538 - RNA, 19 nt, Artificial Sequence
  Description of Artificial Sequence: Synthetic oligonucleotide
  Antisense strand to SEQ ID NO: 1874537
uucuuuaggauccuauccu

SEQ ID NO: 1874539 - RNA, 19 nt, Artificial Sequence
  Description of Artificial Sequence: Synthetic oligonucleotide
  Sense strand starting at position 2850 of SEQ ID NO: 1564366
gcauguuauuauucuagau

SEQ ID NO: 1874540 - RNA, 19 nt, Artificial Sequence
  Description of Artificial Sequence: Synthetic oligonucleotide
  Antisense strand to SEQ ID NO: 1874539
aucuagaauaauaacaugc

SEQ ID NO: 1874541 - RNA, 19 nt, Artificial Sequence
  Description of Artificial Sequence: Synthetic oligonucleotide
  Sense strand starting at position 2982 of SEQ ID NO: 1564366
cggcaaacuuucccuauga

SEQ ID NO: 1874542 - RNA, 19 nt, Artificial Sequence
  Description of Artificial Sequence: Synthetic oligonucleotide
  Antisense strand to SEQ ID NO: 1874541
ucauagggaaaguuugccg

SEQ ID NO: 1874543 - RNA, 19 nt, Artificial Sequence
  Description of Artificial Sequence: Synthetic oligonucleotide
  Sense strand starting at position 2983 of SEQ ID NO: 1564366
ggcaaacuuucccuaugaa

SEQ ID NO: 1874544 - RNA, 19 nt, Artificial Sequence
  Description of Artificial Sequence: Synthetic oligonucleotide
  Antisense strand to SEQ ID NO: 1874543
uucauagggaaaguuugcc

SEQ ID NO: 1874545 - RNA, 19 nt, Artificial Sequence
  Description of Artificial Sequence: Synthetic oligonucleotide
  Sense strand starting at position 2984 of SEQ ID NO: 1564366
gcaaacuuucccuaugaag

SEQ ID NO: 1874546 - RNA, 19 nt, Artificial Sequence
  Description of Artificial Sequence: Synthetic oligonucleotide
  Antisense strand to SEQ ID NO: 1874545
cuucauagggaaaguuugc

SEQ ID NO: 1874547 - RNA, 19 nt, Artificial Sequence
  Description of Artificial Sequence: Synthetic oligonucleotide
  Sense strand starting at position 3064 of SEQ ID NO: 1564366
ggcuauagcgucucuguca

SEQ ID NO: 1874548 - RNA, 19 nt, Artificial Sequence
  Description of Artificial Sequence: Synthetic oligonucleotide
  Antisense strand to SEQ ID NO: 1874547
ugacagagacgcuauagcc

SEQ ID NO: 1874549 - RNA, 19 nt, Artificial Sequence
  Description of Artificial Sequence: Synthetic oligonucleotide
  Sense strand starting at position 3191 of SEQ ID NO: 1564366
aaacgugaaguaugauaaa

SEQ ID NO: 1874550 - RNA, 19 nt, Artificial Sequence
  Description of Artificial Sequence: Synthetic oligonucleotide
  Antisense strand to SEQ ID NO: 1874549
uuuaucauacuucacguuu

SEQ ID NO: 1874551 - RNA, 19 nt, Artificial Sequence
  Description of Artificial Sequence: Synthetic oligonucleotide
  Sense strand starting at position 3347 of SEQ ID NO: 1564366
guguaugugcauguguaau

SEQ ID NO: 1874552 - RNA, 19 nt, Artificial Sequence
  Description of Artificial Sequence: Synthetic oligonucleotide
  Antisense strand to SEQ ID NO: 1874551
auuacacaugcacauacac

SEQ ID NO: 1874553 - RNA, 19 nt, Artificial Sequence
  Description of Artificial Sequence: Synthetic oligonucleotide
  Sense strand starting at position 3546 of SEQ ID NO: 1564366
uuagucauaggccauagaa

SEQ ID NO: 1874554 - RNA, 19 nt, Artificial Sequence
  Description of Artificial Sequence: Synthetic oligonucleotide
  Antisense strand to SEQ ID NO: 1874553
uucuauggccuaugacuaa

SEQ ID NO: 1874555 - RNA, 19 nt, Artificial Sequence
  Description of Artificial Sequence: Synthetic oligonucleotide
  Sense strand starting at position 3673 of SEQ ID NO: 1564366
augaguguguccucauaca

SEQ ID NO: 1874556 - RNA, 19 nt, Artificial Sequence
  Description of Artificial Sequence: Synthetic oligonucleotide
  Antisense strand to SEQ ID NO: 1874555
uguaugaggacacacucau

SEQ ID NO: 1874557 - RNA, 19 nt, Artificial Sequence
  Description of Artificial Sequence: Synthetic oligonucleotide
  Sense strand starting at position 3718 of SEQ ID NO: 1564366
ggcaaauacuacuuauggu

SEQ ID NO: 1874558 - RNA, 19 nt, Artificial Sequence
  Description of Artificial Sequence: Synthetic oligonucleotide
  Antisense strand to SEQ ID NO: 1874557
accauaaguaguauuugcc

SEQ ID NO: 1874559 - RNA, 19 nt, Artificial Sequence
  Description of Artificial Sequence: Synthetic oligonucleotide
  Sense strand starting at position 3771 of SEQ ID NO: 1564366
gaagaaagcugagaaagau

SEQ ID NO: 1874560 - RNA, 19 nt, Artificial Sequence
  Description of Artificial Sequence: Synthetic oligonucleotide
  Antisense strand to SEQ ID NO: 1874559
aucuuucucagcuuucuuc

SEQ ID NO: 1874561 - RNA, 19 nt, Artificial Sequence
  Description of Artificial Sequence: Synthetic oligonucleotide
  Sense strand starting at position 3804 of SEQ ID NO: 1564366
ucaaucaccuuugugaaug

SEQ ID NO: 1874562 - RNA, 19 nt, Artificial Sequence
  Description of Artificial Sequence: Synthetic oligonucleotide
  Antisense strand to SEQ ID NO: 1874561
cauucacaaaggugauuga

SEQ ID NO: 1874563 - RNA, 19 nt, Artificial Sequence
  Description of Artificial Sequence: Synthetic oligonucleotide
  Sense strand starting at position 3809 of SEQ ID NO: 1564366
caccuuugugaaugguaca

SEQ ID NO: 1874564 - RNA, 19 nt, Artificial Sequence
  Description of Artificial Sequence: Synthetic oligonucleotide
  Antisense strand to SEQ ID NO: 1874563
uguaccauucacaaaggug

SEQ ID NO: 1874565 - RNA, 19 nt, Artificial Sequence
  Description of Artificial Sequence: Synthetic oligonucleotide
  Sense strand starting at position 3921 of SEQ ID NO: 1564366
ucuuuaauauccguggaau

SEQ ID NO: 1874566 - RNA, 19 nt, Artificial Sequence
  Description of Artificial Sequence: Synthetic oligonucleotide
  Antisense strand to SEQ ID NO: 1874565
auuccacggauauuaaaga

SEQ ID NO: 1874567 - RNA, 19 nt, Artificial Sequence
  Description of Artificial Sequence: Synthetic oligonucleotide
  Sense strand starting at position 3922 of SEQ ID NO: 1564366
cuuuaauauccguggaauu

SEQ ID NO: 1874568 - RNA, 19 nt, Artificial Sequence
  Description of Artificial Sequence: Synthetic oligonucleotide
  Antisense strand to SEQ ID NO: 1874567
aauuccacggauauuaaag

SEQ ID NO: 1874569 - RNA, 19 nt, Artificial Sequence
  Description of Artificial Sequence: Synthetic oligonucleotide
  Sense strand starting at position 3923 of SEQ ID NO: 1564366
uuuaauauccguggaauua

SEQ ID NO: 1874570 - RNA, 19 nt, Artificial Sequence
  Description of Artificial Sequence: Synthetic oligonucleotide
  Antisense strand to SEQ ID NO: 1874569
uaauuccacggauauuaaa

SEQ ID NO: 1874571 - RNA, 19 nt, Artificial Sequence
  Description of Artificial Sequence: Synthetic oligonucleotide
  Sense strand starting at position 3924 of SEQ ID NO: 1564366
uuaauauccguggaauuaa

SEQ ID NO: 1874572 - RNA, 19 nt, Artificial Sequence
  Description of Artificial Sequence: Synthetic oligonucleotide
  Antisense strand to SEQ ID NO: 1874571
uuaauuccacggauauuaa

SEQ ID NO: 1874573 - RNA, 19 nt, Artificial Sequence
  Description of Artificial Sequence: Synthetic oligonucleotide
  Sense strand starting at position 149 of SEQ ID NO: 1564367
ugguaccaccuuugacaaa

SEQ ID NO: 1874574 - RNA, 19 nt, Artificial Sequence
  Description of Artificial Sequence: Synthetic oligonucleotide
  Antisense strand to SEQ ID NO: 1874573
uuugucaaaggugguacca

SEQ ID NO: 1874575 - RNA, 19 nt, Artificial Sequence
  Description of Artificial Sequence: Synthetic oligonucleotide
  Sense strand starting at position 160 of SEQ ID NO: 1564367
uugacaaaucagggugcau

SEQ ID NO: 1874576 - RNA, 19 nt, Artificial Sequence
  Description of Artificial Sequence: Synthetic oligonucleotide
  Antisense strand to SEQ ID NO: 1874575
augcacccugauuugucaa

SEQ ID NO: 1874577 - RNA, 19 nt, Artificial Sequence
  Description of Artificial Sequence: Synthetic oligonucleotide
  Sense strand starting at position 162 of SEQ ID NO: 1564367
gacaaaucagggugcauca

SEQ ID NO: 1874578 - RNA, 19 nt, Artificial Sequence
  Description of Artificial Sequence: Synthetic oligonucleotide
  Antisense strand to SEQ ID NO: 1874577
ugaugcacccugauuuguc

SEQ ID NO: 1874579 - RNA, 19 nt, Artificial Sequence
  Description of Artificial Sequence: Synthetic oligonucleotide
  Sense strand starting at position 197 of SEQ ID NO: 1564367
augaauuguucuucccaag

SEQ ID NO: 1874580 - RNA, 19 nt, Artificial Sequence
  Description of Artificial Sequence: Synthetic oligonucleotide
  Antisense strand to SEQ ID NO: 1874579
cuugggaagaacaauucau

SEQ ID NO: 1874581 - RNA, 19 nt, Artificial Sequence
  Description of Artificial Sequence: Synthetic oligonucleotide
  Sense strand starting at position 203 of SEQ ID NO: 1564367
uguucuucccaagagcacu

SEQ ID NO: 1874582 - RNA, 19 nt, Artificial Sequence
  Description of Artificial Sequence: Synthetic oligonucleotide
  Antisense strand to SEQ ID NO: 1874581
agugcucuugggaagaaca

SEQ ID NO: 1874583 - RNA, 19 nt, Artificial Sequence
  Description of Artificial Sequence: Synthetic oligonucleotide
  Sense strand starting at position 372 of SEQ ID NO: 1564367
gauuacucaggagguaagu

SEQ ID NO: 1874584 - RNA, 19 nt, Artificial Sequence
  Description of Artificial Sequence: Synthetic oligonucleotide
  Antisense strand to SEQ ID NO: 1874583
acuuaccuccugaguaauc

SEQ ID NO: 1874585 - RNA, 19 nt, Artificial Sequence
  Description of Artificial Sequence: Synthetic oligonucleotide
  Sense strand starting at position 374 of SEQ ID NO: 1564367
uuacucaggagguaaguuu

SEQ ID NO: 1874586 - RNA, 19 nt, Artificial Sequence
  Description of Artificial Sequence: Synthetic oligonucleotide
  Antisense strand to SEQ ID NO: 1874585
aaacuuaccuccugaguaa

SEQ ID NO: 1874587 - RNA, 19 nt, Artificial Sequence
  Description of Artificial Sequence: Synthetic oligonucleotide
  Sense strand starting at position 551 of SEQ ID NO: 1564367
aauacuuaaucuguggguu

SEQ ID NO: 1874588 - RNA, 19 nt, Artificial Sequence
  Description of Artificial Sequence: Synthetic oligonucleotide
  Antisense strand to SEQ ID NO: 1874587
aacccacagauuaaguauu

SEQ ID NO: 1874589 - RNA, 19 nt, Artificial Sequence
  Description of Artificial Sequence: Synthetic oligonucleotide
  Sense strand starting at position 825 of SEQ ID NO: 1564367
gcaagcagaucaucaacau

SEQ ID NO: 1874590 - RNA, 19 nt, Artificial Sequence
  Description of Artificial Sequence: Synthetic oligonucleotide
  Antisense strand to SEQ ID NO: 1874589
auguugaugaucugcuugc

SEQ ID NO: 1874591 - RNA, 19 nt, Artificial Sequence
  Description of Artificial Sequence: Synthetic oligonucleotide
  Sense strand starting at position 897 of SEQ ID NO: 1564367
agguuuguacuugcguauu

SEQ ID NO: 1874592 - RNA, 19 nt, Artificial Sequence
  Description of Artificial Sequence: Synthetic oligonucleotide
  Antisense strand to SEQ ID NO: 1874591
aauacgcaaguacaaaccu

SEQ ID NO: 1874593 - RNA, 19 nt, Artificial Sequence
  Description of Artificial Sequence: Synthetic oligonucleotide
  Sense strand starting at position 924 of SEQ ID NO: 1564367
uguuuacuuuaacuggaaa

SEQ ID NO: 1874594 - RNA, 19 nt, Artificial Sequence
  Description of Artificial Sequence: Synthetic oligonucleotide
  Antisense strand to SEQ ID NO: 1874593
uuuccaguuaaaguaaaca

SEQ ID NO: 1874595 - RNA, 19 nt, Artificial Sequence
  Description of Artificial Sequence: Synthetic oligonucleotide
  Sense strand starting at position 952 of SEQ ID NO: 1564367
auggucuuccuuuacauau

SEQ ID NO: 1874596 - RNA, 19 nt, Artificial Sequence
  Description of Artificial Sequence: Synthetic oligonucleotide
  Antisense strand to SEQ ID NO: 1874595
auauguaaaggaagaccau

SEQ ID NO: 1874597 - RNA, 19 nt, Artificial Sequence
  Description of Artificial Sequence: Synthetic oligonucleotide
  Sense strand starting at position 973 of SEQ ID NO: 1564367
acaaaugucaggugguuaa

SEQ ID NO: 1874598 - RNA, 19 nt, Artificial Sequence
  Description of Artificial Sequence: Synthetic oligonucleotide
  Antisense strand to SEQ ID NO: 1874597
uuaaccaccugacauuugu

SEQ ID NO: 1874599 - RNA, 19 nt, Artificial Sequence
  Description of Artificial Sequence: Synthetic oligonucleotide
  Sense strand starting at position 1018 of SEQ ID NO: 1564367
ugauuaagguucuuuauag

SEQ ID NO: 1874600 - RNA, 19 nt, Artificial Sequence
  Description of Artificial Sequence: Synthetic oligonucleotide
  Antisense strand to SEQ ID NO: 1874599
cuauaaagaaccuuaauca

SEQ ID NO: 1874601 - RNA, 19 nt, Artificial Sequence
  Description of Artificial Sequence: Synthetic oligonucleotide
  Sense strand starting at position 1019 of SEQ ID NO: 1564367
gauuaagguucuuuauaga

SEQ ID NO: 1874602 - RNA, 19 nt, Artificial Sequence
  Description of Artificial Sequence: Synthetic oligonucleotide
  Antisense strand to SEQ ID NO: 1874601
ucuauaaagaaccuuaauc

SEQ ID NO: 1874603 - RNA, 19 nt, Artificial Sequence
  Description of Artificial Sequence: Synthetic oligonucleotide
  Sense strand starting at position 1026 of SEQ ID NO: 1564367
guucuuuauagaugggaag

SEQ ID NO: 1874604 - RNA, 19 nt, Artificial Sequence
  Description of Artificial Sequence: Synthetic oligonucleotide
  Antisense strand to SEQ ID NO: 1874603
cuucccaucuauaaagaac

SEQ ID NO: 1874605 - RNA, 19 nt, Artificial Sequence
  Description of Artificial Sequence: Synthetic oligonucleotide
  Sense strand starting at position 1244 of SEQ ID NO: 1564367
gucuuuaauguugaaauga

SEQ ID NO: 1874606 - RNA, 19 nt, Artificial Sequence
  Description of Artificial Sequence: Synthetic oligonucleotide
  Antisense strand to SEQ ID NO: 1874605
ucauuucaacauuaaagac

SEQ ID NO: 1874607 - RNA, 19 nt, Artificial Sequence
  Description of Artificial Sequence: Synthetic oligonucleotide
  Sense strand starting at position 1392 of SEQ ID NO: 1564367
ccacaagaacucugaacgu

SEQ ID NO: 1874608 - RNA, 19 nt, Artificial Sequence
  Description of Artificial Sequence: Synthetic oligonucleotide
  Antisense strand to SEQ ID NO: 1874607
acguucagaguucuugugg

SEQ ID NO: 1874609 - RNA, 19 nt, Artificial Sequence
  Description of Artificial Sequence: Synthetic oligonucleotide
  Sense strand starting at position 1454 of SEQ ID NO: 1564367
uuguacauccgguagaaag

SEQ ID NO: 1874610 - RNA, 19 nt, Artificial Sequence
  Description of Artificial Sequence: Synthetic oligonucleotide
  Antisense strand to SEQ ID NO: 1874609
cuuucuaccggauguacaa

SEQ ID NO: 1874611 - RNA, 19 nt, Artificial Sequence
  Description of Artificial Sequence: Synthetic oligonucleotide
  Sense strand starting at position 1468 of SEQ ID NO: 1564367
gaaagaaguugcuuccaua

SEQ ID NO: 1874612 - RNA, 19 nt, Artificial Sequence
  Description of Artificial Sequence: Synthetic oligonucleotide
  Antisense strand to SEQ ID NO: 1874611
uauggaagcaacuucuuuc

SEQ ID NO: 1874613 - RNA, 19 nt, Artificial Sequence
  Description of Artificial Sequence: Synthetic oligonucleotide
  Sense strand starting at position 1476 of SEQ ID NO: 1564367
uugcuuccauagguaagaa

SEQ ID NO: 1874614 - RNA, 19 nt, Artificial Sequence
  Description of Artificial Sequence: Synthetic oligonucleotide
  Antisense strand to SEQ ID NO: 1874613
uucuuaccuauggaagcaa

SEQ ID NO: 1874615 - RNA, 19 nt, Artificial Sequence
  Description of Artificial Sequence: Synthetic oligonucleotide
  Sense strand starting at position 1910 of SEQ ID NO: 1564367
ggagucuuggaauaucagu

SEQ ID NO: 1874616 - RNA, 19 nt, Artificial Sequence
  Description of Artificial Sequence: Synthetic oligonucleotide
  Antisense strand to SEQ ID NO: 1874615
acugauauuccaagacucc

SEQ ID NO: 1874617 - RNA, 19 nt, Artificial Sequence
  Description of Artificial Sequence: Synthetic oligonucleotide
  Sense strand starting at position 1986 of SEQ ID NO: 1564367
ucgaguucuguggaccuga

SEQ ID NO: 1874618 - RNA, 19 nt, Artificial Sequence
  Description of Artificial Sequence: Synthetic oligonucleotide
  Antisense strand to SEQ ID NO: 1874617
ucagguccacagaacucga

SEQ ID NO: 1874619 - RNA, 19 nt, Artificial Sequence
  Description of Artificial Sequence: Synthetic oligonucleotide
  Sense strand starting at position 2177 of SEQ ID NO: 1564367
gcaagaaagaguuaaugcu

SEQ ID NO: 1874620 - RNA, 19 nt, Artificial Sequence
  Description of Artificial Sequence: Synthetic oligonucleotide
  Antisense strand to SEQ ID NO: 1874619
agcauuaacucuuucuugc

SEQ ID NO: 1874621 - RNA, 19 nt, Artificial Sequence
  Description of Artificial Sequence: Synthetic oligonucleotide
  Sense strand starting at position 2297 of SEQ ID NO: 1564367
ccugauuugccacguauug

SEQ ID NO: 1874622 - RNA, 19 nt, Artificial Sequence
  Description of Artificial Sequence: Synthetic oligonucleotide
  Antisense strand to SEQ ID NO: 1874621
caauacguggcaaaucagg

SEQ ID NO: 1874623 - RNA, 19 nt, Artificial Sequence
  Description of Artificial Sequence: Synthetic oligonucleotide
  Sense strand starting at position 2509 of SEQ ID NO: 1564367
agcuguagucacuagacuu

SEQ ID NO: 1874624 - RNA, 19 nt, Artificial Sequence
  Description of Artificial Sequence: Synthetic oligonucleotide
  Antisense strand to SEQ ID NO: 1874623
aagucuagugacuacagcu

SEQ ID NO: 1874625 - RNA, 19 nt, Artificial Sequence
  Description of Artificial Sequence: Synthetic oligonucleotide
  Sense strand starting at position 2614 of SEQ ID NO: 1564367
accauauucuaguuaucag

SEQ ID NO: 1874626 - RNA, 19 nt, Artificial Sequence
  Description of Artificial Sequence: Synthetic oligonucleotide
  Antisense strand to SEQ ID NO: 1874625
cugauaacuagaauauggu

SEQ ID NO: 1874627 - RNA, 19 nt, Artificial Sequence
  Description of Artificial Sequence: Synthetic oligonucleotide
  Sense strand starting at position 2617 of SEQ ID NO: 1564367
auauucuaguuaucagaca

SEQ ID NO: 1874628 - RNA, 19 nt, Artificial Sequence
  Description of Artificial Sequence: Synthetic oligonucleotide
  Antisense strand to SEQ ID NO: 1874627
ugucugauaacuagaauau

SEQ ID NO: 1874629 - RNA, 19 nt, Artificial Sequence
  Description of Artificial Sequence: Synthetic oligonucleotide
  Sense strand starting at position 2732 of SEQ ID NO: 1564367
uuugaaaugguaugacaug

SEQ ID NO: 1874630 - RNA, 19 nt, Artificial Sequence
  Description of Artificial Sequence: Synthetic oligonucleotide
  Antisense strand to SEQ ID NO: 1874629
caugucauaccauuucaaa

SEQ ID NO: 1874631 - RNA, 19 nt, Artificial Sequence
  Description of Artificial Sequence: Synthetic oligonucleotide
  Sense strand starting at position 2787 of SEQ ID NO: 1564367
auagauuaccaguggcaga

SEQ ID NO: 1874632 - RNA, 19 nt, Artificial Sequence
  Description of Artificial Sequence: Synthetic oligonucleotide
  Antisense strand to SEQ ID NO: 1874631
ucugccacugguaaucuau

SEQ ID NO: 1874633 - RNA, 19 nt, Artificial Sequence
  Description of Artificial Sequence: Synthetic oligonucleotide
  Sense strand starting at position 2922 of SEQ ID NO: 1564367
uaguucucugggcaaggua

SEQ ID NO: 1874634 - RNA, 19 nt, Artificial Sequence
  Description of Artificial Sequence: Synthetic oligonucleotide
  Antisense strand to SEQ ID NO: 1874633
uaccuugcccagagaacua

SEQ ID NO: 1874635 - RNA, 19 nt, Artificial Sequence
  Description of Artificial Sequence: Synthetic oligonucleotide
  Sense strand starting at position 3099 of SEQ ID NO: 1564367
ggaugaaacugacauauuu

SEQ ID NO: 1874636 - RNA, 19 nt, Artificial Sequence
  Description of Artificial Sequence: Synthetic oligonucleotide
  Antisense strand to SEQ ID NO: 1874635
aaauaugucaguuucaucc

SEQ ID NO: 1874637 - RNA, 19 nt, Artificial Sequence
  Description of Artificial Sequence: Synthetic oligonucleotide
  Sense strand starting at position 3161 of SEQ ID NO: 1564367
ucugcauguccaggaggaa

SEQ ID NO: 1874638 - RNA, 19 nt, Artificial Sequence
  Description of Artificial Sequence: Synthetic oligonucleotide
  Antisense strand to SEQ ID NO: 1874637
uuccuccuggacaugcaga

SEQ ID NO: 1874639 - RNA, 19 nt, Artificial Sequence
  Description of Artificial Sequence: Synthetic oligonucleotide
  Sense strand starting at position 3213 of SEQ ID NO: 1564367
ugcagaugacacuaaguua

SEQ ID NO: 1874640 - RNA, 19 nt, Artificial Sequence
  Description of Artificial Sequence: Synthetic oligonucleotide
  Antisense strand to SEQ ID NO: 1874639
uaacuuagugucaucugca

SEQ ID NO: 1874641 - RNA, 19 nt, Artificial Sequence
  Description of Artificial Sequence: Synthetic oligonucleotide
  Sense strand starting at position 3431 of SEQ ID NO: 1564367
cugugacuucuguauaauc

SEQ ID NO: 1874642 - RNA, 19 nt, Artificial Sequence
  Description of Artificial Sequence: Synthetic oligonucleotide
  Antisense strand to SEQ ID NO: 1874641
gauuauacagaagucacag

SEQ ID NO: 1874643 - RNA, 19 nt, Artificial Sequence
  Description of Artificial Sequence: Synthetic oligonucleotide
  Sense strand starting at position 3480 of SEQ ID NO: 1564367
cagugaggauggucagaua

SEQ ID NO: 1874644 - RNA, 19 nt, Artificial Sequence
  Description of Artificial Sequence: Synthetic oligonucleotide
  Antisense strand to SEQ ID NO: 1874643
uaucugaccauccucacug

SEQ ID NO: 1874645 - RNA, 19 nt, Artificial Sequence
  Description of Artificial Sequence: Synthetic oligonucleotide
  Sense strand starting at position 3623 of SEQ ID NO: 1564367
aggucaugaugagcaagau

SEQ ID NO: 1874646 - RNA, 19 nt, Artificial Sequence
  Description of Artificial Sequence: Synthetic oligonucleotide
  Antisense strand to SEQ ID NO: 1874645
aucuugcucaucaugaccu

SEQ ID NO: 1874647 - RNA, 19 nt, Artificial Sequence
  Description of Artificial Sequence: Synthetic oligonucleotide
  Sense strand starting at position 3747 of SEQ ID NO: 1564367
cuaagacgucuuuacagaa

SEQ ID NO: 1874648 - RNA, 19 nt, Artificial Sequence
  Description of Artificial Sequence: Synthetic oligonucleotide
  Antisense strand to SEQ ID NO: 1874647
uucuguaaagacgucuuag

SEQ ID NO: 1874649 - RNA, 19 nt, Artificial Sequence
  Description of Artificial Sequence: Synthetic oligonucleotide
  Sense strand starting at position 3785 of SEQ ID NO: 1564367
aggcuuaaccaguaaacau

SEQ ID NO: 1874650 - RNA, 19 nt, Artificial Sequence
  Description of Artificial Sequence: Synthetic oligonucleotide
  Antisense strand to SEQ ID NO: 1874649
auguuuacugguuaagccu

SEQ ID NO: 1874651 - RNA, 19 nt, Artificial Sequence
  Description of Artificial Sequence: Synthetic oligonucleotide
  Sense strand starting at position 3961 of SEQ ID NO: 1564367
uuuccauaagggcauuaau

SEQ ID NO: 1874652 - RNA, 19 nt, Artificial Sequence
  Description of Artificial Sequence: Synthetic oligonucleotide
  Antisense strand to SEQ ID NO: 1874651
auuaaugcccuuauggaaa

SEQ ID NO: 1874653 - RNA, 19 nt, Artificial Sequence
  Description of Artificial Sequence: Synthetic oligonucleotide
  Sense strand starting at position 22 of SEQ ID NO: 1564368
acaacacacuagucuguua

SEQ ID NO: 1874654 - RNA, 19 nt, Artificial Sequence
  Description of Artificial Sequence: Synthetic oligonucleotide
  Antisense strand to SEQ ID NO: 1874653
uaacagacuaguguguugu

SEQ ID NO: 1874655 - RNA, 19 nt, Artificial Sequence
  Description of Artificial Sequence: Synthetic oligonucleotide
  Sense strand starting at position 137 of SEQ ID NO: 1564368
cucaguauccauuggcuca

SEQ ID NO: 1874656 - RNA, 19 nt, Artificial Sequence
  Description of Artificial Sequence: Synthetic oligonucleotide
  Antisense strand to SEQ ID NO: 1874655
ugagccaauggauacugag

SEQ ID NO: 1874657 - RNA, 19 nt, Artificial Sequence
  Description of Artificial Sequence: Synthetic oligonucleotide
  Sense strand starting at position 213 of SEQ ID NO: 1564368
guccaugguguaugaucua

SEQ ID NO: 1874658 - RNA, 19 nt, Artificial Sequence
  Description of Artificial Sequence: Synthetic oligonucleotide
  Antisense strand to SEQ ID NO: 1874657
uagaucauacaccauggac

SEQ ID NO: 1874659 - RNA, 19 nt, Artificial Sequence
  Description of Artificial Sequence: Synthetic oligonucleotide
  Sense strand starting at position 216 of SEQ ID NO: 1564368
caugguguaugaucuagga

SEQ ID NO: 1874660 - RNA, 19 nt, Artificial Sequence
  Description of Artificial Sequence: Synthetic oligonucleotide
  Antisense strand to SEQ ID NO: 1874659
uccuagaucauacaccaug

SEQ ID NO: 1874661 - RNA, 19 nt, Artificial Sequence
  Description of Artificial Sequence: Synthetic oligonucleotide
  Sense strand starting at position 218 of SEQ ID NO: 1564368
ugguguaugaucuaggaac

SEQ ID NO: 1874662 - RNA, 19 nt, Artificial Sequence
  Description of Artificial Sequence: Synthetic oligonucleotide
  Antisense strand to SEQ ID NO: 1874661
guuccuagaucauacacca

SEQ ID NO: 1874663 - RNA, 19 nt, Artificial Sequence
  Description of Artificial Sequence: Synthetic oligonucleotide
  Sense strand starting at position 220 of SEQ ID NO: 1564368
guguaugaucuaggaacca

SEQ ID NO: 1874664 - RNA, 19 nt, Artificial Sequence
  Description of Artificial Sequence: Synthetic oligonucleotide
  Antisense strand to SEQ ID NO: 1874663
ugguuccuagaucauacac

SEQ ID NO: 1874665 - RNA, 19 nt, Artificial Sequence
  Description of Artificial Sequence: Synthetic oligonucleotide
  Sense strand starting at position 291 of SEQ ID NO: 1564368
acaggaaucugcguguaaa

SEQ ID NO: 1874666 - RNA, 19 nt, Artificial Sequence
  Description of Artificial Sequence: Synthetic oligonucleotide
  Antisense strand to SEQ ID NO: 1874665
uuuacacgcagauuccugu

SEQ ID NO: 1874667 - RNA, 19 nt, Artificial Sequence
  Description of Artificial Sequence: Synthetic oligonucleotide
  Sense strand starting at position 292 of SEQ ID NO: 1564368
caggaaucugcguguaaau

SEQ ID NO: 1874668 - RNA, 19 nt, Artificial Sequence
  Description of Artificial Sequence: Synthetic oligonucleotide
  Antisense strand to SEQ ID NO: 1874667
auuuacacgcagauuccug

SEQ ID NO: 1874669 - RNA, 19 nt, Artificial Sequence
  Description of Artificial Sequence: Synthetic oligonucleotide
  Sense strand starting at position 294 of SEQ ID NO: 1564368
ggaaucugcguguaaaucu

SEQ ID NO: 1874670 - RNA, 19 nt, Artificial Sequence
  Description of Artificial Sequence: Synthetic oligonucleotide
  Antisense strand to SEQ ID NO: 1874669
agauuuacacgcagauucc

SEQ ID NO: 1874671 - RNA, 19 nt, Artificial Sequence
  Description of Artificial Sequence: Synthetic oligonucleotide
  Sense strand starting at position 387 of SEQ ID NO: 1564368
ugccaugacccagagugaa

SEQ ID NO: 1874672 - RNA, 19 nt, Artificial Sequence
  Description of Artificial Sequence: Synthetic oligonucleotide
  Antisense strand to SEQ ID NO: 1874671
uucacucugggucauggca

SEQ ID NO: 1874673 - RNA, 19 nt, Artificial Sequence
  Description of Artificial Sequence: Synthetic oligonucleotide
  Sense strand starting at position 409 of SEQ ID NO: 1564368
guguaugugcuugugugga

SEQ ID NO: 1874674 - RNA, 19 nt, Artificial Sequence
  Description of Artificial Sequence: Synthetic oligonucleotide
  Antisense strand to SEQ ID NO: 1874673
uccacacaagcacauacac

SEQ ID NO: 1874675 - RNA, 19 nt, Artificial Sequence
  Description of Artificial Sequence: Synthetic oligonucleotide
  Sense strand starting at position 688 of SEQ ID NO: 1564368
gcgauuauuacggacauac

SEQ ID NO: 1874676 - RNA, 19 nt, Artificial Sequence
  Description of Artificial Sequence: Synthetic oligonucleotide
  Antisense strand to SEQ ID NO: 1874675
guauguccguaauaaucgc

SEQ ID NO: 1874677 - RNA, 19 nt, Artificial Sequence
  Description of Artificial Sequence: Synthetic oligonucleotide
  Sense strand starting at position 959 of SEQ ID NO: 1564368
ggaugaagguuccagagaa

SEQ ID NO: 1874678 - RNA, 19 nt, Artificial Sequence
  Description of Artificial Sequence: Synthetic oligonucleotide
  Antisense strand to SEQ ID NO: 1874677
uucucuggaaccuucaucc

SEQ ID NO: 1874679 - RNA, 19 nt, Artificial Sequence
  Description of Artificial Sequence: Synthetic oligonucleotide
  Sense strand starting at position 1002 of SEQ ID NO: 1564368
aaaucacuggcccguguaa

SEQ ID NO: 1874680 - RNA, 19 nt, Artificial Sequence
  Description of Artificial Sequence: Synthetic oligonucleotide
  Antisense strand to SEQ ID NO: 1874679
uuacacgggccagugauuu

SEQ ID NO: 1874681 - RNA, 19 nt, Artificial Sequence
  Description of Artificial Sequence: Synthetic oligonucleotide
  Sense strand starting at position 1056 of SEQ ID NO: 1564368
gaauuaagacagcgagaug

SEQ ID NO: 1874682 - RNA, 19 nt, Artificial Sequence
  Description of Artificial Sequence: Synthetic oligonucleotide
  Antisense strand to SEQ ID NO: 1874681
caucucgcugucuuaauuc

SEQ ID NO: 1874683 - RNA, 19 nt, Artificial Sequence
  Description of Artificial Sequence: Synthetic oligonucleotide
  Sense strand starting at position 1068 of SEQ ID NO: 1564368
cgagaugucucaguccucu

SEQ ID NO: 1874684 - RNA, 19 nt, Artificial Sequence
  Description of Artificial Sequence: Synthetic oligonucleotide
  Antisense strand to SEQ ID NO: 1874683
agaggacugagacaucucg

SEQ ID NO: 1874685 - RNA, 19 nt, Artificial Sequence
  Description of Artificial Sequence: Synthetic oligonucleotide
  Sense strand starting at position 1375 of SEQ ID NO: 1564368
gcgaaacucccauggcgaa

SEQ ID NO: 1874686 - RNA, 19 nt, Artificial Sequence
  Description of Artificial Sequence: Synthetic oligonucleotide
  Antisense strand to SEQ ID NO: 1874685
uucgccaugggaguuucgc

SEQ ID NO: 1874687 - RNA, 19 nt, Artificial Sequence
  Description of Artificial Sequence: Synthetic oligonucleotide
  Sense strand starting at position 1699 of SEQ ID NO: 1564368
cggcgugcuccgguuucaa

SEQ ID NO: 1874688 - RNA, 19 nt, Artificial Sequence
  Description of Artificial Sequence: Synthetic oligonucleotide
  Antisense strand to SEQ ID NO: 1874687
uugaaaccggagcacgccg

SEQ ID NO: 1874689 - RNA, 19 nt, Artificial Sequence
  Description of Artificial Sequence: Synthetic oligonucleotide
  Sense strand starting at position 1701 of SEQ ID NO: 1564368
gcgugcuccgguuucaagu

SEQ ID NO: 1874690 - RNA, 19 nt, Artificial Sequence
  Description of Artificial Sequence: Synthetic oligonucleotide
  Antisense strand to SEQ ID NO: 1874689
acuugaaaccggagcacgc

SEQ ID NO: 1874691 - RNA, 19 nt, Artificial Sequence
  Description of Artificial Sequence: Synthetic oligonucleotide
  Sense strand starting at position 1938 of SEQ ID NO: 1564368
agaccaauuugucagcuua

SEQ ID NO: 1874692 - RNA, 19 nt, Artificial Sequence
  Description of Artificial Sequence: Synthetic oligonucleotide
  Antisense strand to SEQ ID NO: 1874691
uaagcugacaaauuggucu

SEQ ID NO: 1874693 - RNA, 19 nt, Artificial Sequence
  Description of Artificial Sequence: Synthetic oligonucleotide
  Sense strand starting at position 1983 of SEQ ID NO: 1564368
gaacgacaccauuguauca

SEQ ID NO: 1874694 - RNA, 19 nt, Artificial Sequence
  Description of Artificial Sequence: Synthetic oligonucleotide
  Antisense strand to SEQ ID NO: 1874693
ugauacaauggugucguuc

SEQ ID NO: 1874695 - RNA, 19 nt, Artificial Sequence
  Description of Artificial Sequence: Synthetic oligonucleotide
  Sense strand starting at position 2189 of SEQ ID NO: 1564368
agcuuaggucuugaagaug

SEQ ID NO: 1874696 - RNA, 19 nt, Artificial Sequence
  Description of Artificial Sequence: Synthetic oligonucleotide
  Antisense strand to SEQ ID NO: 1874695
caucuucaagaccuaagcu

SEQ ID NO: 1874697 - RNA, 19 nt, Artificial Sequence
  Description of Artificial Sequence: Synthetic oligonucleotide
  Sense strand starting at position 2269 of SEQ ID NO: 1564368
ucuccaggaugguuuauua

SEQ ID NO: 1874698 - RNA, 19 nt, Artificial Sequence
  Description of Artificial Sequence: Synthetic oligonucleotide
  Antisense strand to SEQ ID NO: 1874697
uaauaaaccauccuggaga

SEQ ID NO: 1874699 - RNA, 19 nt, Artificial Sequence
  Description of Artificial Sequence: Synthetic oligonucleotide
  Sense strand starting at position 2390 of SEQ ID NO: 1564368
cacagccagguuuaagaau

SEQ ID NO: 1874700 - RNA, 19 nt, Artificial Sequence
  Description of Artificial Sequence: Synthetic oligonucleotide
  Antisense strand to SEQ ID NO: 1874699
auucuuaaaccuggcugug

SEQ ID NO: 1874701 - RNA, 19 nt, Artificial Sequence
  Description of Artificial Sequence: Synthetic oligonucleotide
  Sense strand starting at position 2830 of SEQ ID NO: 1564368
ccaugcuaacugggugauu

SEQ ID NO: 1874702 - RNA, 19 nt, Artificial Sequence
  Description of Artificial Sequence: Synthetic oligonucleotide
  Antisense strand to SEQ ID NO: 1874701
aaucacccaguuagcaugg

SEQ ID NO: 1874703 - RNA, 19 nt, Artificial Sequence
  Description of Artificial Sequence: Synthetic oligonucleotide
  Sense strand starting at position 3145 of SEQ ID NO: 1564368
guggauucccuacgagaag

SEQ ID NO: 1874704 - RNA, 19 nt, Artificial Sequence
  Description of Artificial Sequence: Synthetic oligonucleotide
  Antisense strand to SEQ ID NO: 1874703
cuucucguagggaauccac

SEQ ID NO: 1874705 - RNA, 19 nt, Artificial Sequence
  Description of Artificial Sequence: Synthetic oligonucleotide
  Sense strand starting at position 3172 of SEQ ID NO: 1564368
agaaaucacuggucccaca

SEQ ID NO: 1874706 - RNA, 19 nt, Artificial Sequence
  Description of Artificial Sequence: Synthetic oligonucleotide
  Antisense strand to SEQ ID NO: 1874705
ugugggaccagugauuucu

SEQ ID NO: 1874707 - RNA, 19 nt, Artificial Sequence
  Description of Artificial Sequence: Synthetic oligonucleotide
  Sense strand starting at position 3189 of SEQ ID NO: 1564368
cagugaaaugaacguuucu

SEQ ID NO: 1874708 - RNA, 19 nt, Artificial Sequence
  Description of Artificial Sequence: Synthetic oligonucleotide
  Antisense strand to SEQ ID NO: 1874707
agaaacguucauuucacug

SEQ ID NO: 1874709 - RNA, 19 nt, Artificial Sequence
  Description of Artificial Sequence: Synthetic oligonucleotide
  Sense strand starting at position 3196 of SEQ ID NO: 1564368
augaacguuucucugggaa

SEQ ID NO: 1874710 - RNA, 19 nt, Artificial Sequence
  Description of Artificial Sequence: Synthetic oligonucleotide
  Antisense strand to SEQ ID NO: 1874709
uucccagagaaacguucau

SEQ ID NO: 1874711 - RNA, 19 nt, Artificial Sequence
  Description of Artificial Sequence: Synthetic oligonucleotide
  Sense strand starting at position 3238 of SEQ ID NO: 1564368
gggucaauucccugguaga

SEQ ID NO: 1874712 - RNA, 19 nt, Artificial Sequence
  Description of Artificial Sequence: Synthetic oligonucleotide
  Antisense strand to SEQ ID NO: 1874711
ucuaccagggaauugaccc

SEQ ID NO: 1874713 - RNA, 19 nt, Artificial Sequence
  Description of Artificial Sequence: Synthetic oligonucleotide
  Sense strand starting at position 3239 of SEQ ID NO: 1564368
ggucaauucccugguagac

SEQ ID NO: 1874714 - RNA, 19 nt, Artificial Sequence
  Description of Artificial Sequence: Synthetic oligonucleotide
  Antisense strand to SEQ ID NO: 1874713
gucuaccagggaauugacc

SEQ ID NO: 1874715 - RNA, 19 nt, Artificial Sequence
  Description of Artificial Sequence: Synthetic oligonucleotide
  Sense strand starting at position 3379 of SEQ ID NO: 1564368
gugccuagacucugggaaa

SEQ ID NO: 1874716 - RNA, 19 nt, Artificial Sequence
  Description of Artificial Sequence: Synthetic oligonucleotide
  Antisense strand to SEQ ID NO: 1874715
uuucccagagucuaggcac

SEQ ID NO: 1874717 - RNA, 19 nt, Artificial Sequence
  Description of Artificial Sequence: Synthetic oligonucleotide
  Sense strand starting at position 3382 of SEQ ID NO: 1564368
ccuagacucugggaaauag

SEQ ID NO: 1874718 - RNA, 19 nt, Artificial Sequence
  Description of Artificial Sequence: Synthetic oligonucleotide
  Antisense strand to SEQ ID NO: 1874717
cuauuucccagagucuagg

SEQ ID NO: 1874719 - RNA, 19 nt, Artificial Sequence
  Description of Artificial Sequence: Synthetic oligonucleotide
  Sense strand starting at position 3468 of SEQ ID NO: 1564368
gcugcuauucgcuucgcau

SEQ ID NO: 1874720 - RNA, 19 nt, Artificial Sequence
  Description of Artificial Sequence: Synthetic oligonucleotide
  Antisense strand to SEQ ID NO: 1874719
augcgaagcgaauagcagc

SEQ ID NO: 1874721 - RNA, 19 nt, Artificial Sequence
  Description of Artificial Sequence: Synthetic oligonucleotide
  Sense strand starting at position 3525 of SEQ ID NO: 1564368
cuaugauuaucuucuguua

SEQ ID NO: 1874722 - RNA, 19 nt, Artificial Sequence
  Description of Artificial Sequence: Synthetic oligonucleotide
  Antisense strand to SEQ ID NO: 1874721
uaacagaagauaaucauag

SEQ ID NO: 1874723 - RNA, 19 nt, Artificial Sequence
  Description of Artificial Sequence: Synthetic oligonucleotide
  Sense strand starting at position 3573 of SEQ ID NO: 1564368
cagcuagcagguuauuaua

SEQ ID NO: 1874724 - RNA, 19 nt, Artificial Sequence
  Description of Artificial Sequence: Synthetic oligonucleotide
  Antisense strand to SEQ ID NO: 1874723
uauaauaaccugcuagcug

SEQ ID NO: 1874725 - RNA, 19 nt, Artificial Sequence
  Description of Artificial Sequence: Synthetic oligonucleotide
  Sense strand starting at position 3643 of SEQ ID NO: 1564368
aggacagagugcugauuua

SEQ ID NO: 1874726 - RNA, 19 nt, Artificial Sequence
  Description of Artificial Sequence: Synthetic oligonucleotide
  Antisense strand to SEQ ID NO: 1874725
uaaaucagcacucuguccu

SEQ ID NO: 1874727 - RNA, 19 nt, Artificial Sequence
  Description of Artificial Sequence: Synthetic oligonucleotide
  Sense strand starting at position 3801 of SEQ ID NO: 1564368
ccuguagaaacauguaugu

SEQ ID NO: 1874728 - RNA, 19 nt, Artificial Sequence
  Description of Artificial Sequence: Synthetic oligonucleotide
  Antisense strand to SEQ ID NO: 1874727
acauacauguuucuacagg

SEQ ID NO: 1874729 - RNA, 19 nt, Artificial Sequence
  Description of Artificial Sequence: Synthetic oligonucleotide
  Sense strand starting at position 3803 of SEQ ID NO: 1564368
uguagaaacauguauguga

SEQ ID NO: 1874730 - RNA, 19 nt, Artificial Sequence
  Description of Artificial Sequence: Synthetic oligonucleotide
  Antisense strand to SEQ ID NO: 1874729
ucacauacauguuucuaca

SEQ ID NO: 1874731 - RNA, 19 nt, Artificial Sequence
  Description of Artificial Sequence: Synthetic oligonucleotide
  Sense strand starting at position 3805 of SEQ ID NO: 1564368
uagaaacauguaugugacu

SEQ ID NO: 1874732 - RNA, 19 nt, Artificial Sequence
  Description of Artificial Sequence: Synthetic oligonucleotide
  Antisense strand to SEQ ID NO: 1874731
agucacauacauguuucua

SEQ ID NO: 1874733 - RNA, 19 nt, Artificial Sequence
  Description of Artificial Sequence: Synthetic oligonucleotide
  Sense strand starting at position 647 of SEQ ID NO: 1564369
auaugacaugauugcucau

SEQ ID NO: 1874734 - RNA, 19 nt, Artificial Sequence
  Description of Artificial Sequence: Synthetic oligonucleotide
  Antisense strand to SEQ ID NO: 1874733
augagcaaucaugucauau

SEQ ID NO: 1874735 - RNA, 19 nt, Artificial Sequence
  Description of Artificial Sequence: Synthetic oligonucleotide
  Sense strand starting at position 925 of SEQ ID NO: 1564369
gagacauacuauguauaug

SEQ ID NO: 1874736 - RNA, 19 nt, Artificial Sequence
  Description of Artificial Sequence: Synthetic oligonucleotide
  Antisense strand to SEQ ID NO: 1874735
cauauacauaguaugucuc

SEQ ID NO: 1874737 - RNA, 19 nt, Artificial Sequence
  Description of Artificial Sequence: Synthetic oligonucleotide
  Sense strand starting at position 967 of SEQ ID NO: 1564369
agacuuaacuucuucccga

SEQ ID NO: 1874738 - RNA, 19 nt, Artificial Sequence
  Description of Artificial Sequence: Synthetic oligonucleotide
  Antisense strand to SEQ ID NO: 1874737
ucgggaagaaguuaagucu

SEQ ID NO: 1874739 - RNA, 19 nt, Artificial Sequence
  Description of Artificial Sequence: Synthetic oligonucleotide
  Sense strand starting at position 989 of SEQ ID NO: 1564369
gguauacagguuuaaugca

SEQ ID NO: 1874740 - RNA, 19 nt, Artificial Sequence
  Description of Artificial Sequence: Synthetic oligonucleotide
  Antisense strand to SEQ ID NO: 1874739
ugcauuaaaccuguauacc

SEQ ID NO: 1874741 - RNA, 19 nt, Artificial Sequence
  Description of Artificial Sequence: Synthetic oligonucleotide
  Sense strand starting at position 1031 of SEQ ID NO: 1564369
augcuuuguagauagagac

SEQ ID NO: 1874742 - RNA, 19 nt, Artificial Sequence
  Description of Artificial Sequence: Synthetic oligonucleotide
  Antisense strand to SEQ ID NO: 1874741
gucucuaucuacaaagcau

SEQ ID NO: 1874743 - RNA, 19 nt, Artificial Sequence
  Description of Artificial Sequence: Synthetic oligonucleotide
  Sense strand starting at position 1159 of SEQ ID NO: 1564369
guaguacuggcagagggau

SEQ ID NO: 1874744 - RNA, 19 nt, Artificial Sequence
  Description of Artificial Sequence: Synthetic oligonucleotide
  Antisense strand to SEQ ID NO: 1874743
aucccucugccaguacuac

SEQ ID NO: 1874745 - RNA, 19 nt, Artificial Sequence
  Description of Artificial Sequence: Synthetic oligonucleotide
  Sense strand starting at position 1313 of SEQ ID NO: 1564369
ggacauccauaagcaaauu

SEQ ID NO: 1874746 - RNA, 19 nt, Artificial Sequence
  Description of Artificial Sequence: Synthetic oligonucleotide
  Antisense strand to SEQ ID NO: 1874745
aauuugcuuauggaugucc

SEQ ID NO: 1874747 - RNA, 19 nt, Artificial Sequence
  Description of Artificial Sequence: Synthetic oligonucleotide
  Sense strand starting at position 1687 of SEQ ID NO: 1564369
ugaauaacucccggguaaa

SEQ ID NO: 1874748 - RNA, 19 nt, Artificial Sequence
  Description of Artificial Sequence: Synthetic oligonucleotide
  Antisense strand to SEQ ID NO: 1874747
uuuacccgggaguuauuca

SEQ ID NO: 1874749 - RNA, 19 nt, Artificial Sequence
  Description of Artificial Sequence: Synthetic oligonucleotide
  Sense strand starting at position 1774 of SEQ ID NO: 1564369
acuuuaagaccuuaacggu

SEQ ID NO: 1874750 - RNA, 19 nt, Artificial Sequence
  Description of Artificial Sequence: Synthetic oligonucleotide
  Antisense strand to SEQ ID NO: 1874749
accguuaaggucuuaaagu

SEQ ID NO: 1874751 - RNA, 19 nt, Artificial Sequence
  Description of Artificial Sequence: Synthetic oligonucleotide
  Sense strand starting at position 1781 of SEQ ID NO: 1564369
gaccuuaacggugauguua

SEQ ID NO: 1874752 - RNA, 19 nt, Artificial Sequence
  Description of Artificial Sequence: Synthetic oligonucleotide
  Antisense strand to SEQ ID NO: 1874751
uaacaucaccguuaagguc

SEQ ID NO: 1874753 - RNA, 19 nt, Artificial Sequence
  Description of Artificial Sequence: Synthetic oligonucleotide
  Sense strand starting at position 1824 of SEQ ID NO: 1564369
augagugaaucauccaacu

SEQ ID NO: 1874754 - RNA, 19 nt, Artificial Sequence
  Description of Artificial Sequence: Synthetic oligonucleotide
  Antisense strand to SEQ ID NO: 1874753
aguuggaugauucacucau

SEQ ID NO: 1874755 - RNA, 19 nt, Artificial Sequence
  Description of Artificial Sequence: Synthetic oligonucleotide
  Sense strand starting at position 2218 of SEQ ID NO: 1564369
ugggauacaccauguugga

SEQ ID NO: 1874756 - RNA, 19 nt, Artificial Sequence
  Description of Artificial Sequence: Synthetic oligonucleotide
  Antisense strand to SEQ ID NO: 1874755
uccaacaugguguauccca

SEQ ID NO: 1874757 - RNA, 19 nt, Artificial Sequence
  Description of Artificial Sequence: Synthetic oligonucleotide
  Sense strand starting at position 2400 of SEQ ID NO: 1564369
ggaccuguagucuauggau

SEQ ID NO: 1874758 - RNA, 19 nt, Artificial Sequence
  Description of Artificial Sequence: Synthetic oligonucleotide
  Antisense strand to SEQ ID NO: 1874757
auccauagacuacaggucc

SEQ ID NO: 1874759 - RNA, 19 nt, Artificial Sequence
  Description of Artificial Sequence: Synthetic oligonucleotide
  Sense strand starting at position 2419 of SEQ ID NO: 1564369
cugugugauaccgcuccga

SEQ ID NO: 1874760 - RNA, 19 nt, Artificial Sequence
  Description of Artificial Sequence: Synthetic oligonucleotide
  Antisense strand to SEQ ID NO: 1874759
ucggagcgguaucacacag

SEQ ID NO: 1874761 - RNA, 19 nt, Artificial Sequence
  Description of Artificial Sequence: Synthetic oligonucleotide
  Sense strand starting at position 2535 of SEQ ID NO: 1564369
aggcuucuccuaggacaua

SEQ ID NO: 1874762 - RNA, 19 nt, Artificial Sequence
  Description of Artificial Sequence: Synthetic oligonucleotide
  Antisense strand to SEQ ID NO: 1874761
uauguccuaggagaagccu

SEQ ID NO: 1874763 - RNA, 19 nt, Artificial Sequence
  Description of Artificial Sequence: Synthetic oligonucleotide
  Sense strand starting at position 2575 of SEQ ID NO: 1564369
gagaaaucaugguuaugca

SEQ ID NO: 1874764 - RNA, 19 nt, Artificial Sequence
  Description of Artificial Sequence: Synthetic oligonucleotide
  Antisense strand to SEQ ID NO: 1874763
ugcauaaccaugauuucuc

SEQ ID NO: 1874765 - RNA, 19 nt, Artificial Sequence
  Description of Artificial Sequence: Synthetic oligonucleotide
  Sense strand starting at position 2785 of SEQ ID NO: 1564369
aguccaaugcaauauguca

SEQ ID NO: 1874766 - RNA, 19 nt, Artificial Sequence
  Description of Artificial Sequence: Synthetic oligonucleotide
  Antisense strand to SEQ ID NO: 1874765
ugacauauugcauuggacu

SEQ ID NO: 1874767 - RNA, 19 nt, Artificial Sequence
  Description of Artificial Sequence: Synthetic oligonucleotide
  Sense strand starting at position 2851 of SEQ ID NO: 1564369
aaauauauguggucauggu

SEQ ID NO: 1874768 - RNA, 19 nt, Artificial Sequence
  Description of Artificial Sequence: Synthetic oligonucleotide
  Antisense strand to SEQ ID NO: 1874767
accaugaccacauauauuu

SEQ ID NO: 1874769 - RNA, 19 nt, Artificial Sequence
  Description of Artificial Sequence: Synthetic oligonucleotide
  Sense strand starting at position 2879 of SEQ ID NO: 1564369
uuggaaauguagcuuuaau

SEQ ID NO: 1874770 - RNA, 19 nt, Artificial Sequence
  Description of Artificial Sequence: Synthetic oligonucleotide
  Antisense strand to SEQ ID NO: 1874769
auuaaagcuacauuuccaa

SEQ ID NO: 1874771 - RNA, 19 nt, Artificial Sequence
  Description of Artificial Sequence: Synthetic oligonucleotide
  Sense strand starting at position 2982 of SEQ ID NO: 1564369
gggagaugucacuggagca

SEQ ID NO: 1874772 - RNA, 19 nt, Artificial Sequence
  Description of Artificial Sequence: Synthetic oligonucleotide
  Antisense strand to SEQ ID NO: 1874771
ugcuccagugacaucuccc

SEQ ID NO: 1874773 - RNA, 19 nt, Artificial Sequence
  Description of Artificial Sequence: Synthetic oligonucleotide
  Sense strand starting at position 2983 of SEQ ID NO: 1564369
ggagaugucacuggagcag

SEQ ID NO: 1874774 - RNA, 19 nt, Artificial Sequence
  Description of Artificial Sequence: Synthetic oligonucleotide
  Antisense strand to SEQ ID NO: 1874773
cugcuccagugacaucucc

SEQ ID NO: 1874775 - RNA, 19 nt, Artificial Sequence
  Description of Artificial Sequence: Synthetic oligonucleotide
  Sense strand starting at position 3104 of SEQ ID NO: 1564369
gccugugugcccuccugaa

SEQ ID NO: 1874776 - RNA, 19 nt, Artificial Sequence
  Description of Artificial Sequence: Synthetic oligonucleotide
  Antisense strand to SEQ ID NO: 1874775
uucaggagggcacacaggc

SEQ ID NO: 1874777 - RNA, 19 nt, Artificial Sequence
  Description of Artificial Sequence: Synthetic oligonucleotide
  Sense strand starting at position 3118 of SEQ ID NO: 1564369
cugaaagccuuucugaauc

SEQ ID NO: 1874778 - RNA, 19 nt, Artificial Sequence
  Description of Artificial Sequence: Synthetic oligonucleotide
  Antisense strand to SEQ ID NO: 1874777
gauucagaaaggcuuucag

SEQ ID NO: 1874779 - RNA, 19 nt, Artificial Sequence
  Description of Artificial Sequence: Synthetic oligonucleotide
  Sense strand starting at position 3233 of SEQ ID NO: 1564369
uuuaacaaucucgaagguu

SEQ ID NO: 1874780 - RNA, 19 nt, Artificial Sequence
  Description of Artificial Sequence: Synthetic oligonucleotide
  Antisense strand to SEQ ID NO: 1874779
aaccuucgagauuguuaaa

SEQ ID NO: 1874781 - RNA, 19 nt, Artificial Sequence
  Description of Artificial Sequence: Synthetic oligonucleotide
  Sense strand starting at position 3236 of SEQ ID NO: 1564369
aacaaucucgaagguuaga

SEQ ID NO: 1874782 - RNA, 19 nt, Artificial Sequence
  Description of Artificial Sequence: Synthetic oligonucleotide
  Antisense strand to SEQ ID NO: 1874781
ucuaaccuucgagauuguu

SEQ ID NO: 1874783 - RNA, 19 nt, Artificial Sequence
  Description of Artificial Sequence: Synthetic oligonucleotide
  Sense strand starting at position 3245 of SEQ ID NO: 1564369
gaagguuagagguguccua

SEQ ID NO: 1874784 - RNA, 19 nt, Artificial Sequence
  Description of Artificial Sequence: Synthetic oligonucleotide
  Antisense strand to SEQ ID NO: 1874783
uaggacaccucuaaccuuc

SEQ ID NO: 1874785 - RNA, 19 nt, Artificial Sequence
  Description of Artificial Sequence: Synthetic oligonucleotide
  Sense strand starting at position 3456 of SEQ ID NO: 1564369
cuguauguaaaggguaauu

SEQ ID NO: 1874786 - RNA, 19 nt, Artificial Sequence
  Description of Artificial Sequence: Synthetic oligonucleotide
  Antisense strand to SEQ ID NO: 1874785
aauuacccuuuacauacag

SEQ ID NO: 1874787 - RNA, 19 nt, Artificial Sequence
  Description of Artificial Sequence: Synthetic oligonucleotide
  Sense strand starting at position 3458 of SEQ ID NO: 1564369
guauguaaaggguaauugu

SEQ ID NO: 1874788 - RNA, 19 nt, Artificial Sequence
  Description of Artificial Sequence: Synthetic oligonucleotide
  Antisense strand to SEQ ID NO: 1874787
acaauuacccuuuacauac

SEQ ID NO: 1874789 - RNA, 19 nt, Artificial Sequence
  Description of Artificial Sequence: Synthetic oligonucleotide
  Sense strand starting at position 3551 of SEQ ID NO: 1564369
agauaacucuugccuaaag

SEQ ID NO: 1874790 - RNA, 19 nt, Artificial Sequence
  Description of Artificial Sequence: Synthetic oligonucleotide
  Antisense strand to SEQ ID NO: 1874789
cuuuaggcaagaguuaucu

SEQ ID NO: 1874791 - RNA, 19 nt, Artificial Sequence
  Description of Artificial Sequence: Synthetic oligonucleotide
  Sense strand starting at position 3604 of SEQ ID NO: 1564369
ucugucuggaagugacuua

SEQ ID NO: 1874792 - RNA, 19 nt, Artificial Sequence
  Description of Artificial Sequence: Synthetic oligonucleotide
  Antisense strand to SEQ ID NO: 1874791
uaagucacuuccagacaga

SEQ ID NO: 1874793 - RNA, 19 nt, Artificial Sequence
  Description of Artificial Sequence: Synthetic oligonucleotide
  Sense strand starting at position 3638 of SEQ ID NO: 1564369
aucagauguuucccucuua

SEQ ID NO: 1874794 - RNA, 19 nt, Artificial Sequence
  Description of Artificial Sequence: Synthetic oligonucleotide
  Antisense strand to SEQ ID NO: 1874793
uaagagggaaacaucugau

SEQ ID NO: 1874795 - RNA, 19 nt, Artificial Sequence
  Description of Artificial Sequence: Synthetic oligonucleotide
  Sense strand starting at position 3679 of SEQ ID NO: 1564369
aguuucugauagucuauga

SEQ ID NO: 1874796 - RNA, 19 nt, Artificial Sequence
  Description of Artificial Sequence: Synthetic oligonucleotide
  Antisense strand to SEQ ID NO: 1874795
ucauagacuaucagaaacu

SEQ ID NO: 1874797 - RNA, 19 nt, Artificial Sequence
  Description of Artificial Sequence: Synthetic oligonucleotide
  Sense strand starting at position 3686 of SEQ ID NO: 1564369
gauagucuaugauuguaga

SEQ ID NO: 1874798 - RNA, 19 nt, Artificial Sequence
  Description of Artificial Sequence: Synthetic oligonucleotide
  Antisense strand to SEQ ID NO: 1874797
ucuacaaucauagacuauc

SEQ ID NO: 1874799 - RNA, 19 nt, Artificial Sequence
  Description of Artificial Sequence: Synthetic oligonucleotide
  Sense strand starting at position 3712 of SEQ ID NO: 1564369
guuucucauugaccaagaa

SEQ ID NO: 1874800 - RNA, 19 nt, Artificial Sequence
  Description of Artificial Sequence: Synthetic oligonucleotide
  Antisense strand to SEQ ID NO: 1874799
uucuuggucaaugagaaac

SEQ ID NO: 1874801 - RNA, 19 nt, Artificial Sequence
  Description of Artificial Sequence: Synthetic oligonucleotide
  Sense strand starting at position 3775 of SEQ ID NO: 1564369
gcagccuguccuuagaaga

SEQ ID NO: 1874802 - RNA, 19 nt, Artificial Sequence
  Description of Artificial Sequence: Synthetic oligonucleotide
  Antisense strand to SEQ ID NO: 1874801
ucuucuaaggacaggcugc

SEQ ID NO: 1874803 - RNA, 19 nt, Artificial Sequence
  Description of Artificial Sequence: Synthetic oligonucleotide
  Sense strand starting at position 3792 of SEQ ID NO: 1564369
gaaauaauguuuccuguga

SEQ ID NO: 1874804 - RNA, 19 nt, Artificial Sequence
  Description of Artificial Sequence: Synthetic oligonucleotide
  Antisense strand to SEQ ID NO: 1874803
ucacaggaaacauuauuuc

SEQ ID NO: 1874805 - RNA, 19 nt, Artificial Sequence
  Description of Artificial Sequence: Synthetic oligonucleotide
  Sense strand starting at position 3823 of SEQ ID NO: 1564369
gcuuuauaugugucuguuc

SEQ ID NO: 1874806 - RNA, 19 nt, Artificial Sequence
  Description of Artificial Sequence: Synthetic oligonucleotide
  Antisense strand to SEQ ID NO: 1874805
gaacagacacauauaaagc

SEQ ID NO: 1874807 - RNA, 19 nt, Artificial Sequence
  Description of Artificial Sequence: Synthetic oligonucleotide
  Sense strand starting at position 3851 of SEQ ID NO: 1564369
gaugaauagcaaggcagau

SEQ ID NO: 1874808 - RNA, 19 nt, Artificial Sequence
  Description of Artificial Sequence: Synthetic oligonucleotide
  Antisense strand to SEQ ID NO: 1874807
aucugccuugcuauucauc

SEQ ID NO: 1874809 - RNA, 19 nt, Artificial Sequence
  Description of Artificial Sequence: Synthetic oligonucleotide
  Sense strand starting at position 3899 of SEQ ID NO: 1564369
uuuagagaguugguaucuu

SEQ ID NO: 1874810 - RNA, 19 nt, Artificial Sequence
  Description of Artificial Sequence: Synthetic oligonucleotide
  Antisense strand to SEQ ID NO: 1874809
aagauaccaacucucuaaa

SEQ ID NO: 1874811 - RNA, 19 nt, Artificial Sequence
  Description of Artificial Sequence: Synthetic oligonucleotide
  Sense strand starting at position 3908 of SEQ ID NO: 1564369
uugguaucuuuguccauuu

SEQ ID NO: 1874812 - RNA, 19 nt, Artificial Sequence
  Description of Artificial Sequence: Synthetic oligonucleotide
  Antisense strand to SEQ ID NO: 1874811
aaauggacaaagauaccaa

SEQ ID NO: 1874813 - RNA, 19 nt, Artificial Sequence
  Description of Artificial Sequence: Synthetic oligonucleotide
  Sense strand starting at position 1038 of SEQ ID NO: 1564370
ggucucauauuagucaagu

SEQ ID NO: 1874814 - RNA, 19 nt, Artificial Sequence
  Description of Artificial Sequence: Synthetic oligonucleotide
  Antisense strand to SEQ ID NO: 1874813
acuugacuaauaugagacc

SEQ ID NO: 1874815 - RNA, 19 nt, Artificial Sequence
  Description of Artificial Sequence: Synthetic oligonucleotide
  Sense strand starting at position 1039 of SEQ ID NO: 1564370
gucucauauuagucaaguu

SEQ ID NO: 1874816 - RNA, 19 nt, Artificial Sequence
  Description of Artificial Sequence: Synthetic oligonucleotide
  Antisense strand to SEQ ID NO: 1874815
aacuugacuaauaugagac

SEQ ID NO: 1874817 - RNA, 19 nt, Artificial Sequence
  Description of Artificial Sequence: Synthetic oligonucleotide
  Sense strand starting at position 1046 of SEQ ID NO: 1564370
auuagucaaguuugagaaa

SEQ ID NO: 1874818 - RNA, 19 nt, Artificial Sequence
  Description of Artificial Sequence: Synthetic oligonucleotide
  Antisense strand to SEQ ID NO: 1874817
uuucucaaacuugacuaau

SEQ ID NO: 1874819 - RNA, 19 nt, Artificial Sequence
  Description of Artificial Sequence: Synthetic oligonucleotide
  Sense strand starting at position 1153 of SEQ ID NO: 1564370
cugugcuagcugcuguaau

SEQ ID NO: 1874820 - RNA, 19 nt, Artificial Sequence
  Description of Artificial Sequence: Synthetic oligonucleotide
  Antisense strand to SEQ ID NO: 1874819
auuacagcagcuagcacag

SEQ ID NO: 1874821 - RNA, 19 nt, Artificial Sequence
  Description of Artificial Sequence: Synthetic oligonucleotide
  Sense strand starting at position 1155 of SEQ ID NO: 1564370
gugcuagcugcuguaauuc

SEQ ID NO: 1874822 - RNA, 19 nt, Artificial Sequence
  Description of Artificial Sequence: Synthetic oligonucleotide
  Antisense strand to SEQ ID NO: 1874821
gaauuacagcagcuagcac

SEQ ID NO: 1874823 - RNA, 19 nt, Artificial Sequence
  Description of Artificial Sequence: Synthetic oligonucleotide
  Sense strand starting at position 1214 of SEQ ID NO: 1564370
cacagaaucagugggcgau

SEQ ID NO: 1874824 - RNA, 19 nt, Artificial Sequence
  Description of Artificial Sequence: Synthetic oligonucleotide
  Antisense strand to SEQ ID NO: 1874823
aucgcccacugauucugug

SEQ ID NO: 1874825 - RNA, 19 nt, Artificial Sequence
  Description of Artificial Sequence: Synthetic oligonucleotide
  Sense strand starting at position 1217 of SEQ ID NO: 1564370
agaaucagugggcgaucau

SEQ ID NO: 1874826 - RNA, 19 nt, Artificial Sequence
  Description of Artificial Sequence: Synthetic oligonucleotide
  Antisense strand to SEQ ID NO: 1874825
augaucgcccacugauucu

SEQ ID NO: 1874827 - RNA, 19 nt, Artificial Sequence
  Description of Artificial Sequence: Synthetic oligonucleotide
  Sense strand starting at position 1218 of SEQ ID NO: 1564370
gaaucagugggcgaucauu

SEQ ID NO: 1874828 - RNA, 19 nt, Artificial Sequence
  Description of Artificial Sequence: Synthetic oligonucleotide
  Antisense strand to SEQ ID NO: 1874827
aaugaucgcccacugauuc

SEQ ID NO: 1874829 - RNA, 19 nt, Artificial Sequence
  Description of Artificial Sequence: Synthetic oligonucleotide
  Sense strand starting at position 1256 of SEQ ID NO: 1564370
ugccuuuaguauguuaaca

SEQ ID NO: 1874830 - RNA, 19 nt, Artificial Sequence
  Description of Artificial Sequence: Synthetic oligonucleotide
  Antisense strand to SEQ ID NO: 1874829
uguuaacauacuaaaggca

SEQ ID NO: 1874831 - RNA, 19 nt, Artificial Sequence
  Description of Artificial Sequence: Synthetic oligonucleotide
  Sense strand starting at position 1275 of SEQ ID NO: 1564370
uuguuucugacauguguuu

SEQ ID NO: 1874832 - RNA, 19 nt, Artificial Sequence
  Description of Artificial Sequence: Synthetic oligonucleotide
  Antisense strand to SEQ ID NO: 1874831
aaacacaugucagaaacaa

SEQ ID NO: 1874833 - RNA, 19 nt, Artificial Sequence
  Description of Artificial Sequence: Synthetic oligonucleotide
  Sense strand starting at position 1277 of SEQ ID NO: 1564370
guuucugacauguguuucu

SEQ ID NO: 1874834 - RNA, 19 nt, Artificial Sequence
  Description of Artificial Sequence: Synthetic oligonucleotide
  Antisense strand to SEQ ID NO: 1874833
agaaacacaugucagaaac

SEQ ID NO: 1874835 - RNA, 19 nt, Artificial Sequence
  Description of Artificial Sequence: Synthetic oligonucleotide
  Sense strand starting at position 1280 of SEQ ID NO: 1564370
ucugacauguguuucuaaa

SEQ ID NO: 1874836 - RNA, 19 nt, Artificial Sequence
  Description of Artificial Sequence: Synthetic oligonucleotide
  Antisense strand to SEQ ID NO: 1874835
uuuagaaacacaugucaga

SEQ ID NO: 1874837 - RNA, 19 nt, Artificial Sequence
  Description of Artificial Sequence: Synthetic oligonucleotide
  Sense strand starting at position 1282 of SEQ ID NO: 1564370
ugacauguguuucuaaaua

SEQ ID NO: 1874838 - RNA, 19 nt, Artificial Sequence
  Description of Artificial Sequence: Synthetic oligonucleotide
  Antisense strand to SEQ ID NO: 1874837
uauuuagaaacacauguca

SEQ ID NO: 1874839 - RNA, 19 nt, Artificial Sequence
  Description of Artificial Sequence: Synthetic oligonucleotide
  Sense strand starting at position 1519 of SEQ ID NO: 1564370
cuggaagauuaagacauau

SEQ ID NO: 1874840 - RNA, 19 nt, Artificial Sequence
  Description of Artificial Sequence: Synthetic oligonucleotide
  Antisense strand to SEQ ID NO: 1874839
auaugucuuaaucuuccag

SEQ ID NO: 1874841 - RNA, 19 nt, Artificial Sequence
  Description of Artificial Sequence: Synthetic oligonucleotide
  Sense strand starting at position 1583 of SEQ ID NO: 1564370
cuccucugugcccaaugaa

SEQ ID NO: 1874842 - RNA, 19 nt, Artificial Sequence
  Description of Artificial Sequence: Synthetic oligonucleotide
  Antisense strand to SEQ ID NO: 1874841
uucauugggcacagaggag

SEQ ID NO: 1874843 - RNA, 19 nt, Artificial Sequence
  Description of Artificial Sequence: Synthetic oligonucleotide
  Sense strand starting at position 1692 of SEQ ID NO: 1564370
ccagacaguucuucuccau

SEQ ID NO: 1874844 - RNA, 19 nt, Artificial Sequence
  Description of Artificial Sequence: Synthetic oligonucleotide
  Antisense strand to SEQ ID NO: 1874843
auggagaagaacugucugg

SEQ ID NO: 1874845 - RNA, 19 nt, Artificial Sequence
  Description of Artificial Sequence: Synthetic oligonucleotide
  Sense strand starting at position 1913 of SEQ ID NO: 1564370
uaccuugguuucucgggaa

SEQ ID NO: 1874846 - RNA, 19 nt, Artificial Sequence
  Description of Artificial Sequence: Synthetic oligonucleotide
  Antisense strand to SEQ ID NO: 1874845
uucccgagaaaccaaggua

SEQ ID NO: 1874847 - RNA, 19 nt, Artificial Sequence
  Description of Artificial Sequence: Synthetic oligonucleotide
  Sense strand starting at position 2245 of SEQ ID NO: 1564370
guggcuaggcgguuaaagu

SEQ ID NO: 1874848 - RNA, 19 nt, Artificial Sequence
  Description of Artificial Sequence: Synthetic oligonucleotide
  Antisense strand to SEQ ID NO: 1874847
acuuuaaccgccuagccac

SEQ ID NO: 1874849 - RNA, 19 nt, Artificial Sequence
  Description of Artificial Sequence: Synthetic oligonucleotide
  Sense strand starting at position 2285 of SEQ ID NO: 1564370
gcauccacucaugaaguca

SEQ ID NO: 1874850 - RNA, 19 nt, Artificial Sequence
  Description of Artificial Sequence: Synthetic oligonucleotide
  Antisense strand to SEQ ID NO: 1874849
ugacuucaugaguggaugc

SEQ ID NO: 1874851 - RNA, 19 nt, Artificial Sequence
  Description of Artificial Sequence: Synthetic oligonucleotide
  Sense strand starting at position 2664 of SEQ ID NO: 1564370
gaugcuaagaguugaguuu

SEQ ID NO: 1874852 - RNA, 19 nt, Artificial Sequence
  Description of Artificial Sequence: Synthetic oligonucleotide
  Antisense strand to SEQ ID NO: 1874851
aaacucaacucuuagcauc

SEQ ID NO: 1874853 - RNA, 19 nt, Artificial Sequence
  Description of Artificial Sequence: Synthetic oligonucleotide
  Sense strand starting at position 2670 of SEQ ID NO: 1564370
aagaguugaguuuggaaag

SEQ ID NO: 1874854 - RNA, 19 nt, Artificial Sequence
  Description of Artificial Sequence: Synthetic oligonucleotide
  Antisense strand to SEQ ID NO: 1874853
cuuuccaaacucaacucuu

SEQ ID NO: 1874855 - RNA, 19 nt, Artificial Sequence
  Description of Artificial Sequence: Synthetic oligonucleotide
  Sense strand starting at position 2734 of SEQ ID NO: 1564370
gucagaucagcauaagcaa

SEQ ID NO: 1874856 - RNA, 19 nt, Artificial Sequence
  Description of Artificial Sequence: Synthetic oligonucleotide
  Antisense strand to SEQ ID NO: 1874855
uugcuuaugcugaucugac

SEQ ID NO: 1874857 - RNA, 19 nt, Artificial Sequence
  Description of Artificial Sequence: Synthetic oligonucleotide
  Sense strand starting at position 2771 of SEQ ID NO: 1564370
guggaauaugcugggaaca

SEQ ID NO: 1874858 - RNA, 19 nt, Artificial Sequence
  Description of Artificial Sequence: Synthetic oligonucleotide
  Antisense strand to SEQ ID NO: 1874857
uguucccagcauauuccac

SEQ ID NO: 1874859 - RNA, 19 nt, Artificial Sequence
  Description of Artificial Sequence: Synthetic oligonucleotide
  Sense strand starting at position 3312 of SEQ ID NO: 1564370
agugcaauucgagaauauc

SEQ ID NO: 1874860 - RNA, 19 nt, Artificial Sequence
  Description of Artificial Sequence: Synthetic oligonucleotide
  Antisense strand to SEQ ID NO: 1874859
gauauucucgaauugcacu

SEQ ID NO: 1874861 - RNA, 19 nt, Artificial Sequence
  Description of Artificial Sequence: Synthetic oligonucleotide
  Sense strand starting at position 3318 of SEQ ID NO: 1564370
auucgagaauaucaaggaa

SEQ ID NO: 1874862 - RNA, 19 nt, Artificial Sequence
  Description of Artificial Sequence: Synthetic oligonucleotide
  Antisense strand to SEQ ID NO: 1874861
uuccuugauauucucgaau

SEQ ID NO: 1874863 - RNA, 19 nt, Artificial Sequence
  Description of Artificial Sequence: Synthetic oligonucleotide
  Sense strand starting at position 3333 of SEQ ID NO: 1564370
ggaauauaguuguugugau

SEQ ID NO: 1874864 - RNA, 19 nt, Artificial Sequence
  Description of Artificial Sequence: Synthetic oligonucleotide
  Antisense strand to SEQ ID NO: 1874863
aucacaacaacuauauucc

SEQ ID NO: 1874865 - RNA, 19 nt, Artificial Sequence
  Description of Artificial Sequence: Synthetic oligonucleotide
  Sense strand starting at position 3379 of SEQ ID NO: 1564370
ccuggugugccauguuaag

SEQ ID NO: 1874866 - RNA, 19 nt, Artificial Sequence
  Description of Artificial Sequence: Synthetic oligonucleotide
  Antisense strand to SEQ ID NO: 1874865
cuuaacauggcacaccagg

SEQ ID NO: 1874867 - RNA, 19 nt, Artificial Sequence
  Description of Artificial Sequence: Synthetic oligonucleotide
  Sense strand starting at position 3393 of SEQ ID NO: 1564370
uuaagacgcucuguuuaca

SEQ ID NO: 1874868 - RNA, 19 nt, Artificial Sequence
  Description of Artificial Sequence: Synthetic oligonucleotide
  Antisense strand to SEQ ID NO: 1874867
uguaaacagagcgucuuaa

SEQ ID NO: 1874869 - RNA, 19 nt, Artificial Sequence
  Description of Artificial Sequence: Synthetic oligonucleotide
  Sense strand starting at position 3404 of SEQ ID NO: 1564370
uguuuacauucuguagaga

SEQ ID NO: 1874870 - RNA, 19 nt, Artificial Sequence
  Description of Artificial Sequence: Synthetic oligonucleotide
  Antisense strand to SEQ ID NO: 1874869
ucucuacagaauguaaaca

SEQ ID NO: 1874871 - RNA, 19 nt, Artificial Sequence
  Description of Artificial Sequence: Synthetic oligonucleotide
  Sense strand starting at position 3405 of SEQ ID NO: 1564370
guuuacauucuguagagac

SEQ ID NO: 1874872 - RNA, 19 nt, Artificial Sequence
  Description of Artificial Sequence: Synthetic oligonucleotide
  Antisense strand to SEQ ID NO: 1874871
gucucuacagaauguaaac

SEQ ID NO: 1874873 - RNA, 19 nt, Artificial Sequence
  Description of Artificial Sequence: Synthetic oligonucleotide
  Sense strand starting at position 3426 of SEQ ID NO: 1564370
cagugaaccguugaaagcu

SEQ ID NO: 1874874 - RNA, 19 nt, Artificial Sequence
  Description of Artificial Sequence: Synthetic oligonucleotide
  Antisense strand to SEQ ID NO: 1874873
agcuuucaacgguucacug

SEQ ID NO: 1874875 - RNA, 19 nt, Artificial Sequence
  Description of Artificial Sequence: Synthetic oligonucleotide
  Sense strand starting at position 3484 of SEQ ID NO: 1564370
gguaaaucacucugcuuug

SEQ ID NO: 1874876 - RNA, 19 nt, Artificial Sequence
  Description of Artificial Sequence: Synthetic oligonucleotide
  Antisense strand to SEQ ID NO: 1874875
caaagcagagugauuuacc

SEQ ID NO: 1874877 - RNA, 19 nt, Artificial Sequence
  Description of Artificial Sequence: Synthetic oligonucleotide
  Sense strand starting at position 3494 of SEQ ID NO: 1564370
ucugcuuugcaauauaaag

SEQ ID NO: 1874878 - RNA, 19 nt, Artificial Sequence
  Description of Artificial Sequence: Synthetic oligonucleotide
  Antisense strand to SEQ ID NO: 1874877
cuuuauauugcaaagcaga

SEQ ID NO: 1874879 - RNA, 19 nt, Artificial Sequence
  Description of Artificial Sequence: Synthetic oligonucleotide
  Sense strand starting at position 3551 of SEQ ID NO: 1564370
gugagagguguugaggaau

SEQ ID NO: 1874880 - RNA, 19 nt, Artificial Sequence
  Description of Artificial Sequence: Synthetic oligonucleotide
  Antisense strand to SEQ ID NO: 1874879
auuccucaacaccucucac

SEQ ID NO: 1874881 - RNA, 19 nt, Artificial Sequence
  Description of Artificial Sequence: Synthetic oligonucleotide
  Sense strand starting at position 3959 of SEQ ID NO: 1564370
auugguuggcugugaucuu

SEQ ID NO: 1874882 - RNA, 19 nt, Artificial Sequence
  Description of Artificial Sequence: Synthetic oligonucleotide
  Antisense strand to SEQ ID NO: 1874881
aagaucacagccaaccaau

SEQ ID NO: 1874883 - RNA, 19 nt, Artificial Sequence
  Description of Artificial Sequence: Synthetic oligonucleotide
  Sense strand starting at position 3966 of SEQ ID NO: 1564370
ggcugugaucuugaguaaa

SEQ ID NO: 1874884 - RNA, 19 nt, Artificial Sequence
  Description of Artificial Sequence: Synthetic oligonucleotide
  Antisense strand to SEQ ID NO: 1874883
uuuacucaagaucacagcc

SEQ ID NO: 1874885 - RNA, 19 nt, Artificial Sequence
  Description of Artificial Sequence: Synthetic oligonucleotide
  Sense strand starting at position 3968 of SEQ ID NO: 1564370
cugugaucuugaguaaauu

SEQ ID NO: 1874886 - RNA, 19 nt, Artificial Sequence
  Description of Artificial Sequence: Synthetic oligonucleotide
  Antisense strand to SEQ ID NO: 1874885
aauuuacucaagaucacag

SEQ ID NO: 1874887 - RNA, 19 nt, Artificial Sequence
  Description of Artificial Sequence: Synthetic oligonucleotide
  Sense strand starting at position 3969 of SEQ ID NO: 1564370
ugugaucuugaguaaauuc

SEQ ID NO: 1874888 - RNA, 19 nt, Artificial Sequence
  Description of Artificial Sequence: Synthetic oligonucleotide
  Antisense strand to SEQ ID NO: 1874887
gaauuuacucaagaucaca

SEQ ID NO: 1874889 - RNA, 19 nt, Artificial Sequence
  Description of Artificial Sequence: Synthetic oligonucleotide
  Sense strand starting at position 3976 of SEQ ID NO: 1564370
uugaguaaauuccuuaaug

SEQ ID NO: 1874890 - RNA, 19 nt, Artificial Sequence
  Description of Artificial Sequence: Synthetic oligonucleotide
  Antisense strand to SEQ ID NO: 1874889
cauuaaggaauuuacucaa

SEQ ID NO: 1874891 - RNA, 19 nt, Artificial Sequence
  Description of Artificial Sequence: Synthetic oligonucleotide
  Sense strand starting at position 3977 of SEQ ID NO: 1564370
ugaguaaauuccuuaaugu

SEQ ID NO: 1874892 - RNA, 19 nt, Artificial Sequence
  Description of Artificial Sequence: Synthetic oligonucleotide
  Antisense strand to SEQ ID NO: 1874891
acauuaaggaauuuacuca

SEQ ID NO: 1874893 - RNA, 19 nt, Artificial Sequence
  Description of Artificial Sequence: Synthetic oligonucleotide
  Sense strand starting at position 23 of SEQ ID NO: 1564371
cacugcuggguguaagaga

SEQ ID NO: 1874894 - RNA, 19 nt, Artificial Sequence
  Description of Artificial Sequence: Synthetic oligonucleotide
  Antisense strand to SEQ ID NO: 1874893
ucucuuacacccagcagug

SEQ ID NO: 1874895 - RNA, 19 nt, Artificial Sequence
  Description of Artificial Sequence: Synthetic oligonucleotide
  Sense strand starting at position 34 of SEQ ID NO: 1564371
guaagagaauuugcugcuu

SEQ ID NO: 1874896 - RNA, 19 nt, Artificial Sequence
  Description of Artificial Sequence: Synthetic oligonucleotide
  Antisense strand to SEQ ID NO: 1874895
aagcagcaaauucucuuac

SEQ ID NO: 1874897 - RNA, 19 nt, Artificial Sequence
  Description of Artificial Sequence: Synthetic oligonucleotide
  Sense strand starting at position 117 of SEQ ID NO: 1564371
cuuggaugugaagaguuua

SEQ ID NO: 1874898 - RNA, 19 nt, Artificial Sequence
  Description of Artificial Sequence: Synthetic oligonucleotide
  Antisense strand to SEQ ID NO: 1874897
uaaacucuucacauccaag

SEQ ID NO: 1874899 - RNA, 19 nt, Artificial Sequence
  Description of Artificial Sequence: Synthetic oligonucleotide
  Sense strand starting at position 188 of SEQ ID NO: 1564371
guuucuuggagugaaugua

SEQ ID NO: 1874900 - RNA, 19 nt, Artificial Sequence
  Description of Artificial Sequence: Synthetic oligonucleotide
  Antisense strand to SEQ ID NO: 1874899
uacauucacuccaagaaac

SEQ ID NO: 1874901 - RNA, 19 nt, Artificial Sequence
  Description of Artificial Sequence: Synthetic oligonucleotide
  Sense strand starting at position 454 of SEQ ID NO: 1564371
gugugacuccgcaggugaa

SEQ ID NO: 1874902 - RNA, 19 nt, Artificial Sequence
  Description of Artificial Sequence: Synthetic oligonucleotide
  Antisense strand to SEQ ID NO: 1874901
uucaccugcggagucacac

SEQ ID NO: 1874903 - RNA, 19 nt, Artificial Sequence
  Description of Artificial Sequence: Synthetic oligonucleotide
  Sense strand starting at position 457 of SEQ ID NO: 1564371
ugacuccgcaggugaauuu

SEQ ID NO: 1874904 - RNA, 19 nt, Artificial Sequence
  Description of Artificial Sequence: Synthetic oligonucleotide
  Antisense strand to SEQ ID NO: 1874903
aaauucaccugcggaguca

SEQ ID NO: 1874905 - RNA, 19 nt, Artificial Sequence
  Description of Artificial Sequence: Synthetic oligonucleotide
  Sense strand starting at position 570 of SEQ ID NO: 1564371
cagagcacucacugugaua

SEQ ID NO: 1874906 - RNA, 19 nt, Artificial Sequence
  Description of Artificial Sequence: Synthetic oligonucleotide
  Antisense strand to SEQ ID NO: 1874905
uaucacagugagugcucug

SEQ ID NO: 1874907 - RNA, 19 nt, Artificial Sequence
  Description of Artificial Sequence: Synthetic oligonucleotide
  Sense strand starting at position 572 of SEQ ID NO: 1564371
gagcacucacugugauaaa

SEQ ID NO: 1874908 - RNA, 19 nt, Artificial Sequence
  Description of Artificial Sequence: Synthetic oligonucleotide
  Antisense strand to SEQ ID NO: 1874907
uuuaucacagugagugcuc

SEQ ID NO: 1874909 - RNA, 19 nt, Artificial Sequence
  Description of Artificial Sequence: Synthetic oligonucleotide
  Sense strand starting at position 806 of SEQ ID NO: 1564371
gcaguuuaucgugcgacug

SEQ ID NO: 1874910 - RNA, 19 nt, Artificial Sequence
  Description of Artificial Sequence: Synthetic oligonucleotide
  Antisense strand to SEQ ID NO: 1874909
cagucgcacgauaaacugc

SEQ ID NO: 1874911 - RNA, 19 nt, Artificial Sequence
  Description of Artificial Sequence: Synthetic oligonucleotide
  Sense strand starting at position 1966 of SEQ ID NO: 1564371
gggucucuggaacggaaua

SEQ ID NO: 1874912 - RNA, 19 nt, Artificial Sequence
  Description of Artificial Sequence: Synthetic oligonucleotide
  Antisense strand to SEQ ID NO: 1874911
uauuccguuccagagaccc

SEQ ID NO: 1874913 - RNA, 19 nt, Artificial Sequence
  Description of Artificial Sequence: Synthetic oligonucleotide
  Sense strand starting at position 2087 of SEQ ID NO: 1564371
ucaauaaugcuguggaaca

SEQ ID NO: 1874914 - RNA, 19 nt, Artificial Sequence
  Description of Artificial Sequence: Synthetic oligonucleotide
  Antisense strand to SEQ ID NO: 1874913
uguuccacagcauuauuga

SEQ ID NO: 1874915 - RNA, 19 nt, Artificial Sequence
  Description of Artificial Sequence: Synthetic oligonucleotide
  Sense strand starting at position 2107 of SEQ ID NO: 1564371
cuagguaucuaucugguaa

SEQ ID NO: 1874916 - RNA, 19 nt, Artificial Sequence
  Description of Artificial Sequence: Synthetic oligonucleotide
  Antisense strand to SEQ ID NO: 1874915
uuaccagauagauaccuag

SEQ ID NO: 1874917 - RNA, 19 nt, Artificial Sequence
  Description of Artificial Sequence: Synthetic oligonucleotide
  Sense strand starting at position 2295 of SEQ ID NO: 1564371
cugugucagcauuaaacca

SEQ ID NO: 1874918 - RNA, 19 nt, Artificial Sequence
  Description of Artificial Sequence: Synthetic oligonucleotide
  Antisense strand to SEQ ID NO: 1874917
ugguuuaaugcugacacag

SEQ ID NO: 1874919 - RNA, 19 nt, Artificial Sequence
  Description of Artificial Sequence: Synthetic oligonucleotide
  Sense strand starting at position 2321 of SEQ ID NO: 1564371
gcuggcauuucugcggaaa

SEQ ID NO: 1874920 - RNA, 19 nt, Artificial Sequence
  Description of Artificial Sequence: Synthetic oligonucleotide
  Antisense strand to SEQ ID NO: 1874919
uuuccgcagaaaugccagc

SEQ ID NO: 1874921 - RNA, 19 nt, Artificial Sequence
  Description of Artificial Sequence: Synthetic oligonucleotide
  Sense strand starting at position 2322 of SEQ ID NO: 1564371
cuggcauuucugcggaaau

SEQ ID NO: 1874922 - RNA, 19 nt, Artificial Sequence
  Description of Artificial Sequence: Synthetic oligonucleotide
  Antisense strand to SEQ ID NO: 1874921
auuuccgcagaaaugccag

SEQ ID NO: 1874923 - RNA, 19 nt, Artificial Sequence
  Description of Artificial Sequence: Synthetic oligonucleotide
  Sense strand starting at position 2717 of SEQ ID NO: 1564371
aggaguuccaguuaaaugu

SEQ ID NO: 1874924 - RNA, 19 nt, Artificial Sequence
  Description of Artificial Sequence: Synthetic oligonucleotide
  Antisense strand to SEQ ID NO: 1874923
acauuuaacuggaacuccu

SEQ ID NO: 1874925 - RNA, 19 nt, Artificial Sequence
  Description of Artificial Sequence: Synthetic oligonucleotide
  Sense strand starting at position 2774 of SEQ ID NO: 1564371
aaguaaugugcacagacga

SEQ ID NO: 1874926 - RNA, 19 nt, Artificial Sequence
  Description of Artificial Sequence: Synthetic oligonucleotide
  Antisense strand to SEQ ID NO: 1874925
ucgucugugcacauuacuu

SEQ ID NO: 1874927 - RNA, 19 nt, Artificial Sequence
  Description of Artificial Sequence: Synthetic oligonucleotide
  Sense strand starting at position 2884 of SEQ ID NO: 1564371
ugacgacaauccuccaauu

SEQ ID NO: 1874928 - RNA, 19 nt, Artificial Sequence
  Description of Artificial Sequence: Synthetic oligonucleotide
  Antisense strand to SEQ ID NO: 1874927
aauuggaggauugucguca

SEQ ID NO: 1874929 - RNA, 19 nt, Artificial Sequence
  Description of Artificial Sequence: Synthetic oligonucleotide
  Sense strand starting at position 2896 of SEQ ID NO: 1564371
uccaauuugucugucacga

SEQ ID NO: 1874930 - RNA, 19 nt, Artificial Sequence
  Description of Artificial Sequence: Synthetic oligonucleotide
  Antisense strand to SEQ ID NO: 1874929
ucgugacagacaaauugga

SEQ ID NO: 1874931 - RNA, 19 nt, Artificial Sequence
  Description of Artificial Sequence: Synthetic oligonucleotide
  Sense strand starting at position 2910 of SEQ ID NO: 1564371
cacgaaugaguuuggaauu

SEQ ID NO: 1874932 - RNA, 19 nt, Artificial Sequence
  Description of Artificial Sequence: Synthetic oligonucleotide
  Antisense strand to SEQ ID NO: 1874931
aauuccaaacucauucgug

SEQ ID NO: 1874933 - RNA, 19 nt, Artificial Sequence
  Description of Artificial Sequence: Synthetic oligonucleotide
  Sense strand starting at position 2916 of SEQ ID NO: 1564371
ugaguuuggaauugacaca

SEQ ID NO: 1874934 - RNA, 19 nt, Artificial Sequence
  Description of Artificial Sequence: Synthetic oligonucleotide
  Antisense strand to SEQ ID NO: 1874933
ugugucaauuccaaacuca

SEQ ID NO: 1874935 - RNA, 19 nt, Artificial Sequence
  Description of Artificial Sequence: Synthetic oligonucleotide
  Sense strand starting at position 2961 of SEQ ID NO: 1564371
gaaggcuuagagugaugaa

SEQ ID NO: 1874936 - RNA, 19 nt, Artificial Sequence
  Description of Artificial Sequence: Synthetic oligonucleotide
  Antisense strand to SEQ ID NO: 1874935
uucaucacucuaagccuuc

SEQ ID NO: 1874937 - RNA, 19 nt, Artificial Sequence
  Description of Artificial Sequence: Synthetic oligonucleotide
  Sense strand starting at position 3062 of SEQ ID NO: 1564371
gacacuuggucucuugaaa

SEQ ID NO: 1874938 - RNA, 19 nt, Artificial Sequence
  Description of Artificial Sequence: Synthetic oligonucleotide
  Antisense strand to SEQ ID NO: 1874937
uuucaagagaccaaguguc

SEQ ID NO: 1874939 - RNA, 19 nt, Artificial Sequence
  Description of Artificial Sequence: Synthetic oligonucleotide
  Sense strand starting at position 3182 of SEQ ID NO: 1564371
aaauuagaagagugcauau

SEQ ID NO: 1874940 - RNA, 19 nt, Artificial Sequence
  Description of Artificial Sequence: Synthetic oligonucleotide
  Antisense strand to SEQ ID NO: 1874939
auaugcacucuucuaauuu

SEQ ID NO: 1874941 - RNA, 19 nt, Artificial Sequence
  Description of Artificial Sequence: Synthetic oligonucleotide
  Sense strand starting at position 3439 of SEQ ID NO: 1564371
gaaguuguauaaguggaau

SEQ ID NO: 1874942 - RNA, 19 nt, Artificial Sequence
  Description of Artificial Sequence: Synthetic oligonucleotide
  Antisense strand to SEQ ID NO: 1874941
auuccacuuauacaacuuc

SEQ ID NO: 1874943 - RNA, 19 nt, Artificial Sequence
  Description of Artificial Sequence: Synthetic oligonucleotide
  Sense strand starting at position 3441 of SEQ ID NO: 1564371
aguuguauaaguggaauca

SEQ ID NO: 1874944 - RNA, 19 nt, Artificial Sequence
  Description of Artificial Sequence: Synthetic oligonucleotide
  Antisense strand to SEQ ID NO: 1874943
ugauuccacuuauacaacu

SEQ ID NO: 1874945 - RNA, 19 nt, Artificial Sequence
  Description of Artificial Sequence: Synthetic oligonucleotide
  Sense strand starting at position 3496 of SEQ ID NO: 1564371
ucuguauuauacuugagag

SEQ ID NO: 1874946 - RNA, 19 nt, Artificial Sequence
  Description of Artificial Sequence: Synthetic oligonucleotide
  Antisense strand to SEQ ID NO: 1874945
cucucaaguauaauacaga

SEQ ID NO: 1874947 - RNA, 19 nt, Artificial Sequence
  Description of Artificial Sequence: Synthetic oligonucleotide
  Sense strand starting at position 3510 of SEQ ID NO: 1564371
gagagacucguccauguug

SEQ ID NO: 1874948 - RNA, 19 nt, Artificial Sequence
  Description of Artificial Sequence: Synthetic oligonucleotide
  Antisense strand to SEQ ID NO: 1874947
caacauggacgagucucuc

SEQ ID NO: 1874949 - RNA, 19 nt, Artificial Sequence
  Description of Artificial Sequence: Synthetic oligonucleotide
  Sense strand starting at position 3593 of SEQ ID NO: 1564371
uagcaaagugauuauugua

SEQ ID NO: 1874950 - RNA, 19 nt, Artificial Sequence
  Description of Artificial Sequence: Synthetic oligonucleotide
  Antisense strand to SEQ ID NO: 1874949
uacaauaaucacuuugcua

SEQ ID NO: 1874951 - RNA, 19 nt, Artificial Sequence
  Description of Artificial Sequence: Synthetic oligonucleotide
  Sense strand starting at position 3606 of SEQ ID NO: 1564371
auuguaugauuauuccacu

SEQ ID NO: 1874952 - RNA, 19 nt, Artificial Sequence
  Description of Artificial Sequence: Synthetic oligonucleotide
  Antisense strand to SEQ ID NO: 1874951
aguggaauaaucauacaau

SEQ ID NO: 1874953 - RNA, 19 nt, Artificial Sequence
  Description of Artificial Sequence: Synthetic oligonucleotide
  Sense strand starting at position 3641 of SEQ ID NO: 1564371
ggagauuaggauugcuucu

SEQ ID NO: 1874954 - RNA, 19 nt, Artificial Sequence
  Description of Artificial Sequence: Synthetic oligonucleotide
  Antisense strand to SEQ ID NO: 1874953
agaagcaauccuaaucucc

SEQ ID NO: 1874955 - RNA, 19 nt, Artificial Sequence
  Description of Artificial Sequence: Synthetic oligonucleotide
  Sense strand starting at position 3717 of SEQ ID NO: 1564371
aucucucuaggguauauau

SEQ ID NO: 1874956 - RNA, 19 nt, Artificial Sequence
  Description of Artificial Sequence: Synthetic oligonucleotide
  Antisense strand to SEQ ID NO: 1874955
auauauacccuagagagau

SEQ ID NO: 1874957 - RNA, 19 nt, Artificial Sequence
  Description of Artificial Sequence: Synthetic oligonucleotide
  Sense strand starting at position 3742 of SEQ ID NO: 1564371
auagaaucacagggccaua

SEQ ID NO: 1874958 - RNA, 19 nt, Artificial Sequence
  Description of Artificial Sequence: Synthetic oligonucleotide
  Antisense strand to SEQ ID NO: 1874957
uauggcccugugauucuau

SEQ ID NO: 1874959 - RNA, 19 nt, Artificial Sequence
  Description of Artificial Sequence: Synthetic oligonucleotide
  Sense strand starting at position 3754 of SEQ ID NO: 1564371
ggccauagggaauggauau

SEQ ID NO: 1874960 - RNA, 19 nt, Artificial Sequence
  Description of Artificial Sequence: Synthetic oligonucleotide
  Antisense strand to SEQ ID NO: 1874959
auauccauucccuauggcc

SEQ ID NO: 1874961 - RNA, 19 nt, Artificial Sequence
  Description of Artificial Sequence: Synthetic oligonucleotide
  Sense strand starting at position 3775 of SEQ ID NO: 1564371
ucagcuuuacuagaugaug

SEQ ID NO: 1874962 - RNA, 19 nt, Artificial Sequence
  Description of Artificial Sequence: Synthetic oligonucleotide
  Antisense strand to SEQ ID NO: 1874961
caucaucuaguaaagcuga

SEQ ID NO: 1874963 - RNA, 19 nt, Artificial Sequence
  Description of Artificial Sequence: Synthetic oligonucleotide
  Sense strand starting at position 3804 of SEQ ID NO: 1564371
cucuguagugauugggaga

SEQ ID NO: 1874964 - RNA, 19 nt, Artificial Sequence
  Description of Artificial Sequence: Synthetic oligonucleotide
  Antisense strand to SEQ ID NO: 1874963
ucucccaaucacuacagag

SEQ ID NO: 1874965 - RNA, 19 nt, Artificial Sequence
  Description of Artificial Sequence: Synthetic oligonucleotide
  Sense strand starting at position 3809 of SEQ ID NO: 1564371
uagugauugggagaguugu

SEQ ID NO: 1874966 - RNA, 19 nt, Artificial Sequence
  Description of Artificial Sequence: Synthetic oligonucleotide
  Antisense strand to SEQ ID NO: 1874965
acaacucucccaaucacua

SEQ ID NO: 1874967 - RNA, 19 nt, Artificial Sequence
  Description of Artificial Sequence: Synthetic oligonucleotide
  Sense strand starting at position 3843 of SEQ ID NO: 1564371
cauagagaguccuuacuga

SEQ ID NO: 1874968 - RNA, 19 nt, Artificial Sequence
  Description of Artificial Sequence: Synthetic oligonucleotide
  Antisense strand to SEQ ID NO: 1874967
ucaguaaggacucucuaug

SEQ ID NO: 1874969 - RNA, 19 nt, Artificial Sequence
  Description of Artificial Sequence: Synthetic oligonucleotide
  Sense strand starting at position 3850 of SEQ ID NO: 1564371
aguccuuacugauccacau

SEQ ID NO: 1874970 - RNA, 19 nt, Artificial Sequence
  Description of Artificial Sequence: Synthetic oligonucleotide
  Antisense strand to SEQ ID NO: 1874969
auguggaucaguaaggacu

SEQ ID NO: 1874971 - RNA, 19 nt, Artificial Sequence
  Description of Artificial Sequence: Synthetic oligonucleotide
  Sense strand starting at position 3880 of SEQ ID NO: 1564371
ccaaguauugcccgaauuu

SEQ ID NO: 1874972 - RNA, 19 nt, Artificial Sequence
  Description of Artificial Sequence: Synthetic oligonucleotide
  Antisense strand to SEQ ID NO: 1874971
aaauucgggcaauacuugg

SEQ ID NO: 1874973 - RNA, 19 nt, Artificial Sequence
  Description of Artificial Sequence: Synthetic oligonucleotide
  Sense strand starting at position 2092 of SEQ ID NO: 1564372
ucaguaaugcuguggaaca

SEQ ID NO: 1874974 - RNA, 19 nt, Artificial Sequence
  Description of Artificial Sequence: Synthetic oligonucleotide
  Antisense strand to SEQ ID NO: 1874973
uguuccacagcauuacuga

SEQ ID NO: 1874975 - RNA, 19 nt, Artificial Sequence
  Description of Artificial Sequence: Synthetic oligonucleotide
  Sense strand starting at position 2114 of SEQ ID NO: 1564372
agguaucuauccgcuggaa

SEQ ID NO: 1874976 - RNA, 19 nt, Artificial Sequence
  Description of Artificial Sequence: Synthetic oligonucleotide
  Antisense strand to SEQ ID NO: 1874975
uuccagcggauagauaccu

SEQ ID NO: 1874977 - RNA, 19 nt, Artificial Sequence
  Description of Artificial Sequence: Synthetic oligonucleotide
  Sense strand starting at position 2142 of SEQ ID NO: 1564372
auccaugacucauuguaua

SEQ ID NO: 1874978 - RNA, 19 nt, Artificial Sequence
  Description of Artificial Sequence: Synthetic oligonucleotide
  Antisense strand to SEQ ID NO: 1874977
uauacaaugagucauggau

SEQ ID NO: 1874979 - RNA, 19 nt, Artificial Sequence
  Description of Artificial Sequence: Synthetic oligonucleotide
  Sense strand starting at position 2194 of SEQ ID NO: 1564372
guuagauauguugcuucgu

SEQ ID NO: 1874980 - RNA, 19 nt, Artificial Sequence
  Description of Artificial Sequence: Synthetic oligonucleotide
  Antisense strand to SEQ ID NO: 1874979
acgaagcaacauaucuaac

SEQ ID NO: 1874981 - RNA, 19 nt, Artificial Sequence
  Description of Artificial Sequence: Synthetic oligonucleotide
  Sense strand starting at position 2296 of SEQ ID NO: 1564372
cugugucagcauuaaacca

SEQ ID NO: 1874982 - RNA, 19 nt, Artificial Sequence
  Description of Artificial Sequence: Synthetic oligonucleotide
  Antisense strand to SEQ ID NO: 1874981
ugguuuaaugcugacacag

SEQ ID NO: 1874983 - RNA, 19 nt, Artificial Sequence
  Description of Artificial Sequence: Synthetic oligonucleotide
  Sense strand starting at position 2400 of SEQ ID NO: 1564372
caaagucuucgguacaauu

SEQ ID NO: 1874984 - RNA, 19 nt, Artificial Sequence
  Description of Artificial Sequence: Synthetic oligonucleotide
  Antisense strand to SEQ ID NO: 1874983
aauuguaccgaagacuuug

SEQ ID NO: 1874985 - RNA, 19 nt, Artificial Sequence
  Description of Artificial Sequence: Synthetic oligonucleotide
  Sense strand starting at position 2412 of SEQ ID NO: 1564372
uacaauuugccgcauaguu

SEQ ID NO: 1874986 - RNA, 19 nt, Artificial Sequence
  Description of Artificial Sequence: Synthetic oligonucleotide
  Antisense strand to SEQ ID NO: 1874985
aacuaugcggcaaauugua

SEQ ID NO: 1874987 - RNA, 19 nt, Artificial Sequence
  Description of Artificial Sequence: Synthetic oligonucleotide
  Sense strand starting at position 2735 of SEQ ID NO: 1564372
guuaaauguguuuagguua

SEQ ID NO: 1874988 - RNA, 19 nt, Artificial Sequence
  Description of Artificial Sequence: Synthetic oligonucleotide
  Antisense strand to SEQ ID NO: 1874987
uaaccuaaacacauuuaac

SEQ ID NO: 1874989 - RNA, 19 nt, Artificial Sequence
  Description of Artificial Sequence: Synthetic oligonucleotide
  Sense strand starting at position 2748 of SEQ ID NO: 1564372
agguuaaauccugagucac

SEQ ID NO: 1874990 - RNA, 19 nt, Artificial Sequence
  Description of Artificial Sequence: Synthetic oligonucleotide
  Antisense strand to SEQ ID NO: 1874989
gugacucaggauuuaaccu

SEQ ID NO: 1874991 - RNA, 19 nt, Artificial Sequence
  Description of Artificial Sequence: Synthetic oligonucleotide
  Sense strand starting at position 2750 of SEQ ID NO: 1564372
guuaaauccugagucacug

SEQ ID NO: 1874992 - RNA, 19 nt, Artificial Sequence
  Description of Artificial Sequence: Synthetic oligonucleotide
  Antisense strand to SEQ ID NO: 1874991
cagugacucaggauuuaac

SEQ ID NO: 1874993 - RNA, 19 nt, Artificial Sequence
  Description of Artificial Sequence: Synthetic oligonucleotide
  Sense strand starting at position 2796 of SEQ ID NO: 1564372
agacgaucuuguccaauca

SEQ ID NO: 1874994 - RNA, 19 nt, Artificial Sequence
  Description of Artificial Sequence: Synthetic oligonucleotide
  Antisense strand to SEQ ID NO: 1874993
ugauuggacaagaucgucu

SEQ ID NO: 1874995 - RNA, 19 nt, Artificial Sequence
  Description of Artificial Sequence: Synthetic oligonucleotide
  Sense strand starting at position 2797 of SEQ ID NO: 1564372
gacgaucuuguccaaucaa

SEQ ID NO: 1874996 - RNA, 19 nt, Artificial Sequence
  Description of Artificial Sequence: Synthetic oligonucleotide
  Antisense strand to SEQ ID NO: 1874995
uugauuggacaagaucguc

SEQ ID NO: 1874997 - RNA, 19 nt, Artificial Sequence
  Description of Artificial Sequence: Synthetic oligonucleotide
  Sense strand starting at position 2869 of SEQ ID NO: 1564372
ggugccuaaugaucuuauu

SEQ ID NO: 1874998 - RNA, 19 nt, Artificial Sequence
  Description of Artificial Sequence: Synthetic oligonucleotide
  Antisense strand to SEQ ID NO: 1874997
aauaagaucauuaggcacc

SEQ ID NO: 1874999 - RNA, 19 nt, Artificial Sequence
  Description of Artificial Sequence: Synthetic oligonucleotide
  Sense strand starting at position 2918 of SEQ ID NO: 1564372
uuacgacugaguugggaau

SEQ ID NO: 1875000 - RNA, 19 nt, Artificial Sequence
  Description of Artificial Sequence: Synthetic oligonucleotide
  Antisense strand to SEQ ID NO: 1874999
auucccaacucagucguaa

SEQ ID NO: 1875001 - RNA, 19 nt, Artificial Sequence
  Description of Artificial Sequence: Synthetic oligonucleotide
  Sense strand starting at position 2953 of SEQ ID NO: 1564372
ugaaauaucugagauaaga

SEQ ID NO: 1875002 - RNA, 19 nt, Artificial Sequence
  Description of Artificial Sequence: Synthetic oligonucleotide
  Antisense strand to SEQ ID NO: 1875001
ucuuaucucagauauuuca

SEQ ID NO: 1875003 - RNA, 19 nt, Artificial Sequence
  Description of Artificial Sequence: Synthetic oligonucleotide
  Sense strand starting at position 3017 of SEQ ID NO: 1564372
guaaccuguuguuuaaaua

SEQ ID NO: 1875004 - RNA, 19 nt, Artificial Sequence
  Description of Artificial Sequence: Synthetic oligonucleotide
  Antisense strand to SEQ ID NO: 1875003
uauuuaaacaacagguuac

SEQ ID NO: 1875005 - RNA, 19 nt, Artificial Sequence
  Description of Artificial Sequence: Synthetic oligonucleotide
  Sense strand starting at position 3070 of SEQ ID NO: 1564372
gacacuuggucucuugaaa

SEQ ID NO: 1875006 - RNA, 19 nt, Artificial Sequence
  Description of Artificial Sequence: Synthetic oligonucleotide
  Antisense strand to SEQ ID NO: 1875005
uuucaagagaccaaguguc

SEQ ID NO: 1875007 - RNA, 19 nt, Artificial Sequence
  Description of Artificial Sequence: Synthetic oligonucleotide
  Sense strand starting at position 3191 of SEQ ID NO: 1564372
gguauagaagagugcauaa

SEQ ID NO: 1875008 - RNA, 19 nt, Artificial Sequence
  Description of Artificial Sequence: Synthetic oligonucleotide
  Antisense strand to SEQ ID NO: 1875007
uuaugcacucuucuauacc

SEQ ID NO: 1875009 - RNA, 19 nt, Artificial Sequence
  Description of Artificial Sequence: Synthetic oligonucleotide
  Sense strand starting at position 3289 of SEQ ID NO: 1564372
gccagccuuccagaauaca

SEQ ID NO: 1875010 - RNA, 19 nt, Artificial Sequence
  Description of Artificial Sequence: Synthetic oligonucleotide
  Antisense strand to SEQ ID NO: 1875009
uguauucuggaaggcuggc

SEQ ID NO: 1875011 - RNA, 19 nt, Artificial Sequence
  Description of Artificial Sequence: Synthetic oligonucleotide
  Sense strand starting at position 3349 of SEQ ID NO: 1564372
ugaauauagucauugcccu

SEQ ID NO: 1875012 - RNA, 19 nt, Artificial Sequence
  Description of Artificial Sequence: Synthetic oligonucleotide
  Antisense strand to SEQ ID NO: 1875011
agggcaaugacuauauuca

SEQ ID NO: 1875013 - RNA, 19 nt, Artificial Sequence
  Description of Artificial Sequence: Synthetic oligonucleotide
  Sense strand starting at position 3362 of SEQ ID NO: 1564372
ugcccugacuuuguaauaa

SEQ ID NO: 1875014 - RNA, 19 nt, Artificial Sequence
  Description of Artificial Sequence: Synthetic oligonucleotide
  Antisense strand to SEQ ID NO: 1875013
uuauuacaaagucagggca

SEQ ID NO: 1875015 - RNA, 19 nt, Artificial Sequence
  Description of Artificial Sequence: Synthetic oligonucleotide
  Sense strand starting at position 3424 of SEQ ID NO: 1564372
auccguaaacaauagaguu

SEQ ID NO: 1875016 - RNA, 19 nt, Artificial Sequence
  Description of Artificial Sequence: Synthetic oligonucleotide
  Antisense strand to SEQ ID NO: 1875015
aacucuauuguuuacggau

SEQ ID NO: 1875017 - RNA, 19 nt, Artificial Sequence
  Description of Artificial Sequence: Synthetic oligonucleotide
  Sense strand starting at position 3441 of SEQ ID NO: 1564372
uugauacgaaguuguauaa

SEQ ID NO: 1875018 - RNA, 19 nt, Artificial Sequence
  Description of Artificial Sequence: Synthetic oligonucleotide
  Antisense strand to SEQ ID NO: 1875017
uuauacaacuucguaucaa

SEQ ID NO: 1875019 - RNA, 19 nt, Artificial Sequence
  Description of Artificial Sequence: Synthetic oligonucleotide
  Sense strand starting at position 3462 of SEQ ID NO: 1564372
ggaaucauacggcaaguuu

SEQ ID NO: 1875020 - RNA, 19 nt, Artificial Sequence
  Description of Artificial Sequence: Synthetic oligonucleotide
  Antisense strand to SEQ ID NO: 1875019
aaacuugccguaugauucc

SEQ ID NO: 1875021 - RNA, 19 nt, Artificial Sequence
  Description of Artificial Sequence: Synthetic oligonucleotide
  Sense strand starting at position 3505 of SEQ ID NO: 1564372
ucuguauuauacuugagac

SEQ ID NO: 1875022 - RNA, 19 nt, Artificial Sequence
  Description of Artificial Sequence: Synthetic oligonucleotide
  Antisense strand to SEQ ID NO: 1875021
gucucaaguauaauacaga

SEQ ID NO: 1875023 - RNA, 19 nt, Artificial Sequence
  Description of Artificial Sequence: Synthetic oligonucleotide
  Sense strand starting at position 3586 of SEQ ID NO: 1564372
ccagcauaugcuuauagca

SEQ ID NO: 1875024 - RNA, 19 nt, Artificial Sequence
  Description of Artificial Sequence: Synthetic oligonucleotide
  Antisense strand to SEQ ID NO: 1875023
ugcuauaagcauaugcugg

SEQ ID NO: 1875025 - RNA, 19 nt, Artificial Sequence
  Description of Artificial Sequence: Synthetic oligonucleotide
  Sense strand starting at position 3599 of SEQ ID NO: 1564372
auagcaaagugauuauggu

SEQ ID NO: 1875026 - RNA, 19 nt, Artificial Sequence
  Description of Artificial Sequence: Synthetic oligonucleotide
  Antisense strand to SEQ ID NO: 1875025
accauaaucacuuugcuau

SEQ ID NO: 1875027 - RNA, 19 nt, Artificial Sequence
  Description of Artificial Sequence: Synthetic oligonucleotide
  Sense strand starting at position 3600 of SEQ ID NO: 1564372
uagcaaagugauuauggua

SEQ ID NO: 1875028 - RNA, 19 nt, Artificial Sequence
  Description of Artificial Sequence: Synthetic oligonucleotide
  Antisense strand to SEQ ID NO: 1875027
uaccauaaucacuuugcua

SEQ ID NO: 1875029 - RNA, 19 nt, Artificial Sequence
  Description of Artificial Sequence: Synthetic oligonucleotide
  Sense strand starting at position 3607 of SEQ ID NO: 1564372
gugauuaugguaugauuau

SEQ ID NO: 1875030 - RNA, 19 nt, Artificial Sequence
  Description of Artificial Sequence: Synthetic oligonucleotide
  Antisense strand to SEQ ID NO: 1875029
auaaucauaccauaaucac

SEQ ID NO: 1875031 - RNA, 19 nt, Artificial Sequence
  Description of Artificial Sequence: Synthetic oligonucleotide
  Sense strand starting at position 3650 of SEQ ID NO: 1564372
acauuaggauugcuucuau

SEQ ID NO: 1875032 - RNA, 19 nt, Artificial Sequence
  Description of Artificial Sequence: Synthetic oligonucleotide
  Antisense strand to SEQ ID NO: 1875031
auagaagcaauccuaaugu

SEQ ID NO: 1875033 - RNA, 19 nt, Artificial Sequence
  Description of Artificial Sequence: Synthetic oligonucleotide
  Sense strand starting at position 3694 of SEQ ID NO: 1564372
uugcacauuucucauggga

SEQ ID NO: 1875034 - RNA, 19 nt, Artificial Sequence
  Description of Artificial Sequence: Synthetic oligonucleotide
  Antisense strand to SEQ ID NO: 1875033
ucccaugagaaaugugcaa

SEQ ID NO: 1875035 - RNA, 19 nt, Artificial Sequence
  Description of Artificial Sequence: Synthetic oligonucleotide
  Sense strand starting at position 3726 of SEQ ID NO: 1564372
aucucucuaggguauauau

SEQ ID NO: 1875036 - RNA, 19 nt, Artificial Sequence
  Description of Artificial Sequence: Synthetic oligonucleotide
  Antisense strand to SEQ ID NO: 1875035
auauauacccuagagagau

SEQ ID NO: 1875037 - RNA, 19 nt, Artificial Sequence
  Description of Artificial Sequence: Synthetic oligonucleotide
  Sense strand starting at position 3751 of SEQ ID NO: 1564372
auagaaucacagggccaua

SEQ ID NO: 1875038 - RNA, 19 nt, Artificial Sequence
  Description of Artificial Sequence: Synthetic oligonucleotide
  Antisense strand to SEQ ID NO: 1875037
uauggcccugugauucuau

SEQ ID NO: 1875039 - RNA, 19 nt, Artificial Sequence
  Description of Artificial Sequence: Synthetic oligonucleotide
  Sense strand starting at position 3763 of SEQ ID NO: 1564372
ggccauaggguauggauau

SEQ ID NO: 1875040 - RNA, 19 nt, Artificial Sequence
  Description of Artificial Sequence: Synthetic oligonucleotide
  Antisense strand to SEQ ID NO: 1875039
auauccauacccuauggcc

SEQ ID NO: 1875041 - RNA, 19 nt, Artificial Sequence
  Description of Artificial Sequence: Synthetic oligonucleotide
  Sense strand starting at position 3773 of SEQ ID NO: 1564372
uauggauauccugagcuuu

SEQ ID NO: 1875042 - RNA, 19 nt, Artificial Sequence
  Description of Artificial Sequence: Synthetic oligonucleotide
  Antisense strand to SEQ ID NO: 1875041
aaagcucaggauauccaua

SEQ ID NO: 1875043 - RNA, 19 nt, Artificial Sequence
  Description of Artificial Sequence: Synthetic oligonucleotide
  Sense strand starting at position 3775 of SEQ ID NO: 1564372
uggauauccugagcuuuac

SEQ ID NO: 1875044 - RNA, 19 nt, Artificial Sequence
  Description of Artificial Sequence: Synthetic oligonucleotide
  Antisense strand to SEQ ID NO: 1875043
guaaagcucaggauaucca

SEQ ID NO: 1875045 - RNA, 19 nt, Artificial Sequence
  Description of Artificial Sequence: Synthetic oligonucleotide
  Sense strand starting at position 3781 of SEQ ID NO: 1564372
uccugagcuuuacuagaug

SEQ ID NO: 1875046 - RNA, 19 nt, Artificial Sequence
  Description of Artificial Sequence: Synthetic oligonucleotide
  Antisense strand to SEQ ID NO: 1875045
caucuaguaaagcucagga

SEQ ID NO: 1875047 - RNA, 19 nt, Artificial Sequence
  Description of Artificial Sequence: Synthetic oligonucleotide
  Sense strand starting at position 3806 of SEQ ID NO: 1564372
aauuguucucuguagugau

SEQ ID NO: 1875048 - RNA, 19 nt, Artificial Sequence
  Description of Artificial Sequence: Synthetic oligonucleotide
  Antisense strand to SEQ ID NO: 1875047
aucacuacagagaacaauu

SEQ ID NO: 1875049 - RNA, 19 nt, Artificial Sequence
  Description of Artificial Sequence: Synthetic oligonucleotide
  Sense strand starting at position 3918 of SEQ ID NO: 1564372
agucuacuggugggcaaua

SEQ ID NO: 1875050 - RNA, 19 nt, Artificial Sequence
  Description of Artificial Sequence: Synthetic oligonucleotide
  Antisense strand to SEQ ID NO: 1875049
uauugcccaccaguagacu

SEQ ID NO: 1875051 - RNA, 19 nt, Artificial Sequence
  Description of Artificial Sequence: Synthetic oligonucleotide
  Sense strand starting at position 3945 of SEQ ID NO: 1564372
acuaguaagcuuuagcaca

SEQ ID NO: 1875052 - RNA, 19 nt, Artificial Sequence
  Description of Artificial Sequence: Synthetic oligonucleotide
  Antisense strand to SEQ ID NO: 1875051
ugugcuaaagcuuacuagu

SEQ ID NO: 1875053 - RNA, 19 nt, Artificial Sequence
  Description of Artificial Sequence: Synthetic oligonucleotide
  Sense strand starting at position 1 of SEQ ID NO: 1564374
guagaaauggguggugaua

SEQ ID NO: 1875054 - RNA, 19 nt, Artificial Sequence
  Description of Artificial Sequence: Synthetic oligonucleotide
  Antisense strand to SEQ ID NO: 1875053
uaucaccacccauuucuac

SEQ ID NO: 1875055 - RNA, 19 nt, Artificial Sequence
  Description of Artificial Sequence: Synthetic oligonucleotide
  Sense strand starting at position 66 of SEQ ID NO: 1564374
aauagaguccugggcccaa

SEQ ID NO: 1875056 - RNA, 19 nt, Artificial Sequence
  Description of Artificial Sequence: Synthetic oligonucleotide
  Antisense strand to SEQ ID NO: 1875055
uugggcccaggacucuauu

SEQ ID NO: 1875057 - RNA, 19 nt, Artificial Sequence
  Description of Artificial Sequence: Synthetic oligonucleotide
  Sense strand starting at position 316 of SEQ ID NO: 1564374
ugcgaaugagcaugaaaga

SEQ ID NO: 1875058 - RNA, 19 nt, Artificial Sequence
  Description of Artificial Sequence: Synthetic oligonucleotide
  Antisense strand to SEQ ID NO: 1875057
ucuuucaugcucauucgca

SEQ ID NO: 1875059 - RNA, 19 nt, Artificial Sequence
  Description of Artificial Sequence: Synthetic oligonucleotide
  Sense strand starting at position 476 of SEQ ID NO: 1564374
auuuccacguuuguaaauu

SEQ ID NO: 1875060 - RNA, 19 nt, Artificial Sequence
  Description of Artificial Sequence: Synthetic oligonucleotide
  Antisense strand to SEQ ID NO: 1875059
aauuuacaaacguggaaau

SEQ ID NO: 1875061 - RNA, 19 nt, Artificial Sequence
  Description of Artificial Sequence: Synthetic oligonucleotide
  Sense strand starting at position 672 of SEQ ID NO: 1564374
ugcauuugucuguggguag

SEQ ID NO: 1875062 - RNA, 19 nt, Artificial Sequence
  Description of Artificial Sequence: Synthetic oligonucleotide
  Antisense strand to SEQ ID NO: 1875061
cuacccacagacaaaugca

SEQ ID NO: 1875063 - RNA, 19 nt, Artificial Sequence
  Description of Artificial Sequence: Synthetic oligonucleotide
  Sense strand starting at position 675 of SEQ ID NO: 1564374
auuugucuguggguagcaa

SEQ ID NO: 1875064 - RNA, 19 nt, Artificial Sequence
  Description of Artificial Sequence: Synthetic oligonucleotide
  Antisense strand to SEQ ID NO: 1875063
uugcuacccacagacaaau

SEQ ID NO: 1875065 - RNA, 19 nt, Artificial Sequence
  Description of Artificial Sequence: Synthetic oligonucleotide
  Sense strand starting at position 683 of SEQ ID NO: 1564374
guggguagcaaguaggaua

SEQ ID NO: 1875066 - RNA, 19 nt, Artificial Sequence
  Description of Artificial Sequence: Synthetic oligonucleotide
  Antisense strand to SEQ ID NO: 1875065
uauccuacuugcuacccac

SEQ ID NO: 1875067 - RNA, 19 nt, Artificial Sequence
  Description of Artificial Sequence: Synthetic oligonucleotide
  Sense strand starting at position 848 of SEQ ID NO: 1564374
uuuggaaugccauauuccu

SEQ ID NO: 1875068 - RNA, 19 nt, Artificial Sequence
  Description of Artificial Sequence: Synthetic oligonucleotide
  Antisense strand to SEQ ID NO: 1875067
aggaauauggcauuccaaa

SEQ ID NO: 1875069 - RNA, 19 nt, Artificial Sequence
  Description of Artificial Sequence: Synthetic oligonucleotide
  Sense strand starting at position 960 of SEQ ID NO: 1564374
ccgucaagguagguauuua

SEQ ID NO: 1875070 - RNA, 19 nt, Artificial Sequence
  Description of Artificial Sequence: Synthetic oligonucleotide
  Antisense strand to SEQ ID NO: 1875069
uaaauaccuaccuugacgg

SEQ ID NO: 1875071 - RNA, 19 nt, Artificial Sequence
  Description of Artificial Sequence: Synthetic oligonucleotide
  Sense strand starting at position 1038 of SEQ ID NO: 1564374
uuauccaucuagguauuga

SEQ ID NO: 1875072 - RNA, 19 nt, Artificial Sequence
  Description of Artificial Sequence: Synthetic oligonucleotide
  Antisense strand to SEQ ID NO: 1875071
ucaauaccuagauggauaa

SEQ ID NO: 1875073 - RNA, 19 nt, Artificial Sequence
  Description of Artificial Sequence: Synthetic oligonucleotide
  Sense strand starting at position 1408 of SEQ ID NO: 1564374
uggcucaaauuauugacua

SEQ ID NO: 1875074 - RNA, 19 nt, Artificial Sequence
  Description of Artificial Sequence: Synthetic oligonucleotide
  Antisense strand to SEQ ID NO: 1875073
uagucaauaauuugagcca

SEQ ID NO: 1875075 - RNA, 19 nt, Artificial Sequence
  Description of Artificial Sequence: Synthetic oligonucleotide
  Sense strand starting at position 1462 of SEQ ID NO: 1564374
ugguaaagacagugaauau

SEQ ID NO: 1875076 - RNA, 19 nt, Artificial Sequence
  Description of Artificial Sequence: Synthetic oligonucleotide
  Antisense strand to SEQ ID NO: 1875075
auauucacugucuuuacca

SEQ ID NO: 1875077 - RNA, 19 nt, Artificial Sequence
  Description of Artificial Sequence: Synthetic oligonucleotide
  Sense strand starting at position 1485 of SEQ ID NO: 1564374
uguaguaaugcugauauga

SEQ ID NO: 1875078 - RNA, 19 nt, Artificial Sequence
  Description of Artificial Sequence: Synthetic oligonucleotide
  Antisense strand to SEQ ID NO: 1875077
ucauaucagcauuacuaca

SEQ ID NO: 1875079 - RNA, 19 nt, Artificial Sequence
  Description of Artificial Sequence: Synthetic oligonucleotide
  Sense strand starting at position 1493 of SEQ ID NO: 1564374
ugcugauaugaguacuaca

SEQ ID NO: 1875080 - RNA, 19 nt, Artificial Sequence
  Description of Artificial Sequence: Synthetic oligonucleotide
  Antisense strand to SEQ ID NO: 1875079
uguaguacucauaucagca

SEQ ID NO: 1875081 - RNA, 19 nt, Artificial Sequence
  Description of Artificial Sequence: Synthetic oligonucleotide
  Sense strand starting at position 1744 of SEQ ID NO: 1564374
agacaaaugcuuugaagca

SEQ ID NO: 1875082 - RNA, 19 nt, Artificial Sequence
  Description of Artificial Sequence: Synthetic oligonucleotide
  Antisense strand to SEQ ID NO: 1875081
ugcuucaaagcauuugucu

SEQ ID NO: 1875083 - RNA, 19 nt, Artificial Sequence
  Description of Artificial Sequence: Synthetic oligonucleotide
  Sense strand starting at position 1958 of SEQ ID NO: 1564374
cagagaaacuuucuuugug

SEQ ID NO: 1875084 - RNA, 19 nt, Artificial Sequence
  Description of Artificial Sequence: Synthetic oligonucleotide
  Antisense strand to SEQ ID NO: 1875083
cacaaagaaaguuucucug

SEQ ID NO: 1875085 - RNA, 19 nt, Artificial Sequence
  Description of Artificial Sequence: Synthetic oligonucleotide
  Sense strand starting at position 2122 of SEQ ID NO: 1564374
ugcaaccauggcuaaauau

SEQ ID NO: 1875086 - RNA, 19 nt, Artificial Sequence
  Description of Artificial Sequence: Synthetic oligonucleotide
  Antisense strand to SEQ ID NO: 1875085
auauuuagccaugguugca

SEQ ID NO: 1875087 - RNA, 19 nt, Artificial Sequence
  Description of Artificial Sequence: Synthetic oligonucleotide
  Sense strand starting at position 2152 of SEQ ID NO: 1564374
uugugauuaguccauauag

SEQ ID NO: 1875088 - RNA, 19 nt, Artificial Sequence
  Description of Artificial Sequence: Synthetic oligonucleotide
  Antisense strand to SEQ ID NO: 1875087
cuauauggacuaaucacaa

SEQ ID NO: 1875089 - RNA, 19 nt, Artificial Sequence
  Description of Artificial Sequence: Synthetic oligonucleotide
  Sense strand starting at position 2268 of SEQ ID NO: 1564374
ucagacuuauguuuaagag

SEQ ID NO: 1875090 - RNA, 19 nt, Artificial Sequence
  Description of Artificial Sequence: Synthetic oligonucleotide
  Antisense strand to SEQ ID NO: 1875089
cucuuaaacauaagucuga

SEQ ID NO: 1875091 - RNA, 19 nt, Artificial Sequence
  Description of Artificial Sequence: Synthetic oligonucleotide
  Sense strand starting at position 2283 of SEQ ID NO: 1564374
agaggaucuuaugucauug

SEQ ID NO: 1875092 - RNA, 19 nt, Artificial Sequence
  Description of Artificial Sequence: Synthetic oligonucleotide
  Antisense strand to SEQ ID NO: 1875091
caaugacauaagauccucu

SEQ ID NO: 1875093 - RNA, 19 nt, Artificial Sequence
  Description of Artificial Sequence: Synthetic oligonucleotide
  Sense strand starting at position 2377 of SEQ ID NO: 1564374
uguugcuacucauuuguca

SEQ ID NO: 1875094 - RNA, 19 nt, Artificial Sequence
  Description of Artificial Sequence: Synthetic oligonucleotide
  Antisense strand to SEQ ID NO: 1875093
ugacaaaugaguagcaaca

SEQ ID NO: 1875095 - RNA, 19 nt, Artificial Sequence
  Description of Artificial Sequence: Synthetic oligonucleotide
  Sense strand starting at position 2531 of SEQ ID NO: 1564374
acacauuggucagcacaca

SEQ ID NO: 1875096 - RNA, 19 nt, Artificial Sequence
  Description of Artificial Sequence: Synthetic oligonucleotide
  Antisense strand to SEQ ID NO: 1875095
ugugugcugaccaaugugu

SEQ ID NO: 1875097 - RNA, 19 nt, Artificial Sequence
  Description of Artificial Sequence: Synthetic oligonucleotide
  Sense strand starting at position 2659 of SEQ ID NO: 1564374
guguacuucuagcccauuu

SEQ ID NO: 1875098 - RNA, 19 nt, Artificial Sequence
  Description of Artificial Sequence: Synthetic oligonucleotide
  Antisense strand to SEQ ID NO: 1875097
aaaugggcuagaaguacac

SEQ ID NO: 1875099 - RNA, 19 nt, Artificial Sequence
  Description of Artificial Sequence: Synthetic oligonucleotide
  Sense strand starting at position 2798 of SEQ ID NO: 1564374
cucugaggacugugaucua

SEQ ID NO: 1875100 - RNA, 19 nt, Artificial Sequence
  Description of Artificial Sequence: Synthetic oligonucleotide
  Antisense strand to SEQ ID NO: 1875099
uagaucacaguccucagag

SEQ ID NO: 1875101 - RNA, 19 nt, Artificial Sequence
  Description of Artificial Sequence: Synthetic oligonucleotide
  Sense strand starting at position 2801 of SEQ ID NO: 1564374
ugaggacugugaucuauua

SEQ ID NO: 1875102 - RNA, 19 nt, Artificial Sequence
  Description of Artificial Sequence: Synthetic oligonucleotide
  Antisense strand to SEQ ID NO: 1875101
uaauagaucacaguccuca

SEQ ID NO: 1875103 - RNA, 19 nt, Artificial Sequence
  Description of Artificial Sequence: Synthetic oligonucleotide
  Sense strand starting at position 2983 of SEQ ID NO: 1564374
auagcugaaucucuuugaa

SEQ ID NO: 1875104 - RNA, 19 nt, Artificial Sequence
  Description of Artificial Sequence: Synthetic oligonucleotide
  Antisense strand to SEQ ID NO: 1875103
uucaaagagauucagcuau

SEQ ID NO: 1875105 - RNA, 19 nt, Artificial Sequence
  Description of Artificial Sequence: Synthetic oligonucleotide
  Sense strand starting at position 2985 of SEQ ID NO: 1564374
agcugaaucucuuugaaua

SEQ ID NO: 1875106 - RNA, 19 nt, Artificial Sequence
  Description of Artificial Sequence: Synthetic oligonucleotide
  Antisense strand to SEQ ID NO: 1875105
uauucaaagagauucagcu

SEQ ID NO: 1875107 - RNA, 19 nt, Artificial Sequence
  Description of Artificial Sequence: Synthetic oligonucleotide
  Sense strand starting at position 3054 of SEQ ID NO: 1564374
ugagccaaauuugaagaau

SEQ ID NO: 1875108 - RNA, 19 nt, Artificial Sequence
  Description of Artificial Sequence: Synthetic oligonucleotide
  Antisense strand to SEQ ID NO: 1875107
auucuucaaauuuggcuca

SEQ ID NO: 1875109 - RNA, 19 nt, Artificial Sequence
  Description of Artificial Sequence: Synthetic oligonucleotide
  Sense strand starting at position 3182 of SEQ ID NO: 1564374
aguuauuuagccugucuga

SEQ ID NO: 1875110 - RNA, 19 nt, Artificial Sequence
  Description of Artificial Sequence: Synthetic oligonucleotide
  Antisense strand to SEQ ID NO: 1875109
ucagacaggcuaaauaacu

SEQ ID NO: 1875111 - RNA, 19 nt, Artificial Sequence
  Description of Artificial Sequence: Synthetic oligonucleotide
  Sense strand starting at position 3275 of SEQ ID NO: 1564374
gagacauccuuaguaaaug

SEQ ID NO: 1875112 - RNA, 19 nt, Artificial Sequence
  Description of Artificial Sequence: Synthetic oligonucleotide
  Antisense strand to SEQ ID NO: 1875111
cauuuacuaaggaugucuc

SEQ ID NO: 1875113 - RNA, 19 nt, Artificial Sequence
  Description of Artificial Sequence: Synthetic oligonucleotide
  Sense strand starting at position 3497 of SEQ ID NO: 1564374
gggcaacacagaugaguua

SEQ ID NO: 1875114 - RNA, 19 nt, Artificial Sequence
  Description of Artificial Sequence: Synthetic oligonucleotide
  Antisense strand to SEQ ID NO: 1875113
uaacucaucuguguugccc

SEQ ID NO: 1875115 - RNA, 19 nt, Artificial Sequence
  Description of Artificial Sequence: Synthetic oligonucleotide
  Sense strand starting at position 3508 of SEQ ID NO: 1564374
augaguuaaagugaacgua

SEQ ID NO: 1875116 - RNA, 19 nt, Artificial Sequence
  Description of Artificial Sequence: Synthetic oligonucleotide
  Antisense strand to SEQ ID NO: 1875115
uacguucacuuuaacucau

SEQ ID NO: 1875117 - RNA, 19 nt, Artificial Sequence
  Description of Artificial Sequence: Synthetic oligonucleotide
  Sense strand starting at position 3511 of SEQ ID NO: 1564374
aguuaaagugaacguagaa

SEQ ID NO: 1875118 - RNA, 19 nt, Artificial Sequence
  Description of Artificial Sequence: Synthetic oligonucleotide
  Antisense strand to SEQ ID NO: 1875117
uucuacguucacuuuaacu

SEQ ID NO: 1875119 - RNA, 19 nt, Artificial Sequence
  Description of Artificial Sequence: Synthetic oligonucleotide
  Sense strand starting at position 3629 of SEQ ID NO: 1564374
uuguauauugaaggcaaga

SEQ ID NO: 1875120 - RNA, 19 nt, Artificial Sequence
  Description of Artificial Sequence: Synthetic oligonucleotide
  Antisense strand to SEQ ID NO: 1875119
ucuugccuucaauauacaa

SEQ ID NO: 1875121 - RNA, 19 nt, Artificial Sequence
  Description of Artificial Sequence: Synthetic oligonucleotide
  Sense strand starting at position 3644 of SEQ ID NO: 1564374
aagaauacgcuuugaagga

SEQ ID NO: 1875122 - RNA, 19 nt, Artificial Sequence
  Description of Artificial Sequence: Synthetic oligonucleotide
  Antisense strand to SEQ ID NO: 1875121
uccuucaaagcguauucuu

SEQ ID NO: 1875123 - RNA, 19 nt, Artificial Sequence
  Description of Artificial Sequence: Synthetic oligonucleotide
  Sense strand starting at position 3648 of SEQ ID NO: 1564374
auacgcuuugaaggaaauu

SEQ ID NO: 1875124 - RNA, 19 nt, Artificial Sequence
  Description of Artificial Sequence: Synthetic oligonucleotide
  Antisense strand to SEQ ID NO: 1875123
aauuuccuucaaagcguau

SEQ ID NO: 1875125 - RNA, 19 nt, Artificial Sequence
  Description of Artificial Sequence: Synthetic oligonucleotide
  Sense strand starting at position 3694 of SEQ ID NO: 1564374
uuuagcguauuuguagaga

SEQ ID NO: 1875126 - RNA, 19 nt, Artificial Sequence
  Description of Artificial Sequence: Synthetic oligonucleotide
  Antisense strand to SEQ ID NO: 1875125
ucucuacaaauacgcuaaa

SEQ ID NO: 1875127 - RNA, 19 nt, Artificial Sequence
  Description of Artificial Sequence: Synthetic oligonucleotide
  Sense strand starting at position 3698 of SEQ ID NO: 1564374
gcguauuuguagagaagag

SEQ ID NO: 1875128 - RNA, 19 nt, Artificial Sequence
  Description of Artificial Sequence: Synthetic oligonucleotide
  Antisense strand to SEQ ID NO: 1875127
cucuucucuacaaauacgc

SEQ ID NO: 1875129 - RNA, 19 nt, Artificial Sequence
  Description of Artificial Sequence: Synthetic oligonucleotide
  Sense strand starting at position 3863 of SEQ ID NO: 1564374
augggugagcucuacuaaa

SEQ ID NO: 1875130 - RNA, 19 nt, Artificial Sequence
  Description of Artificial Sequence: Synthetic oligonucleotide
  Antisense strand to SEQ ID NO: 1875129
uuuaguagagcucacccau

SEQ ID NO: 1875131 - RNA, 19 nt, Artificial Sequence
  Description of Artificial Sequence: Synthetic oligonucleotide
  Sense strand starting at position 3907 of SEQ ID NO: 1564374
ggucuuuggcuuuaacaau

SEQ ID NO: 1875132 - RNA, 19 nt, Artificial Sequence
  Description of Artificial Sequence: Synthetic oligonucleotide
  Antisense strand to SEQ ID NO: 1875131
auuguuaaagccaaagacc

SEQ ID NO: 1875133 - RNA, 19 nt, Artificial Sequence
  Description of Artificial Sequence: Synthetic oligonucleotide
  Sense strand starting at position 188 of SEQ ID NO: 1564382
ucuaacaugugagcagaaa

SEQ ID NO: 1875134 - RNA, 19 nt, Artificial Sequence
  Description of Artificial Sequence: Synthetic oligonucleotide
  Antisense strand to SEQ ID NO: 1875133
uuucugcucacauguuaga

SEQ ID NO: 1875135 - RNA, 19 nt, Artificial Sequence
  Description of Artificial Sequence: Synthetic oligonucleotide
  Sense strand starting at position 230 of SEQ ID NO: 1564382
uggguagacccucagguaa

SEQ ID NO: 1875136 - RNA, 19 nt, Artificial Sequence
  Description of Artificial Sequence: Synthetic oligonucleotide
  Antisense strand to SEQ ID NO: 1875135
uuaccugagggucuaccca

SEQ ID NO: 1875137 - RNA, 19 nt, Artificial Sequence
  Description of Artificial Sequence: Synthetic oligonucleotide
  Sense strand starting at position 267 of SEQ ID NO: 1564382
guagacagauuugaugaaa

SEQ ID NO: 1875138 - RNA, 19 nt, Artificial Sequence
  Description of Artificial Sequence: Synthetic oligonucleotide
  Antisense strand to SEQ ID NO: 1875137
uuucaucaaaucugucuac

SEQ ID NO: 1875139 - RNA, 19 nt, Artificial Sequence
  Description of Artificial Sequence: Synthetic oligonucleotide
  Sense strand starting at position 417 of SEQ ID NO: 1564382
caauuuauuugguggacag

SEQ ID NO: 1875140 - RNA, 19 nt, Artificial Sequence
  Description of Artificial Sequence: Synthetic oligonucleotide
  Antisense strand to SEQ ID NO: 1875139
cuguccaccaaauaaauug

SEQ ID NO: 1875141 - RNA, 19 nt, Artificial Sequence
  Description of Artificial Sequence: Synthetic oligonucleotide
  Sense strand starting at position 443 of SEQ ID NO: 1564382
gcaggaguauuaccuagau

SEQ ID NO: 1875142 - RNA, 19 nt, Artificial Sequence
  Description of Artificial Sequence: Synthetic oligonucleotide
  Antisense strand to SEQ ID NO: 1875141
aucuagguaauacuccugc

SEQ ID NO: 1875143 - RNA, 19 nt, Artificial Sequence
  Description of Artificial Sequence: Synthetic oligonucleotide
  Sense strand starting at position 445 of SEQ ID NO: 1564382
aggaguauuaccuagaugc

SEQ ID NO: 1875144 - RNA, 19 nt, Artificial Sequence
  Description of Artificial Sequence: Synthetic oligonucleotide
  Antisense strand to SEQ ID NO: 1875143
gcaucuagguaauacuccu

SEQ ID NO: 1875145 - RNA, 19 nt, Artificial Sequence
  Description of Artificial Sequence: Synthetic oligonucleotide
  Sense strand starting at position 447 of SEQ ID NO: 1564382
gaguauuaccuagaugcug

SEQ ID NO: 1875146 - RNA, 19 nt, Artificial Sequence
  Description of Artificial Sequence: Synthetic oligonucleotide
  Antisense strand to SEQ ID NO: 1875145
cagcaucuagguaauacuc

SEQ ID NO: 1875147 - RNA, 19 nt, Artificial Sequence
  Description of Artificial Sequence: Synthetic oligonucleotide
  Sense strand starting at position 458 of SEQ ID NO: 1564382
agaugcuguaucuagugau

SEQ ID NO: 1875148 - RNA, 19 nt, Artificial Sequence
  Description of Artificial Sequence: Synthetic oligonucleotide
  Antisense strand to SEQ ID NO: 1875147
aucacuagauacagcaucu

SEQ ID NO: 1875149 - RNA, 19 nt, Artificial Sequence
  Description of Artificial Sequence: Synthetic oligonucleotide
  Sense strand starting at position 689 of SEQ ID NO: 1564382
accuuuaacggugacacaa

SEQ ID NO: 1875150 - RNA, 19 nt, Artificial Sequence
  Description of Artificial Sequence: Synthetic oligonucleotide
  Antisense strand to SEQ ID NO: 1875149
uugugucaccguuaaaggu

SEQ ID NO: 1875151 - RNA, 19 nt, Artificial Sequence
  Description of Artificial Sequence: Synthetic oligonucleotide
  Sense strand starting at position 750 of SEQ ID NO: 1564382
gugugugcugacccuugua

SEQ ID NO: 1875152 - RNA, 19 nt, Artificial Sequence
  Description of Artificial Sequence: Synthetic oligonucleotide
  Antisense strand to SEQ ID NO: 1875151
uacaagggucagcacacac

SEQ ID NO: 1875153 - RNA, 19 nt, Artificial Sequence
  Description of Artificial Sequence: Synthetic oligonucleotide
  Sense strand starting at position 798 of SEQ ID NO: 1564382
auacaacaugccugagagu

SEQ ID NO: 1875154 - RNA, 19 nt, Artificial Sequence
  Description of Artificial Sequence: Synthetic oligonucleotide
  Antisense strand to SEQ ID NO: 1875153
acucucaggcauguuguau

SEQ ID NO: 1875155 - RNA, 19 nt, Artificial Sequence
  Description of Artificial Sequence: Synthetic oligonucleotide
  Sense strand starting at position 799 of SEQ ID NO: 1564382
uacaacaugccugagaguu

SEQ ID NO: 1875156 - RNA, 19 nt, Artificial Sequence
  Description of Artificial Sequence: Synthetic oligonucleotide
  Antisense strand to SEQ ID NO: 1875155
aacucucaggcauguugua

SEQ ID NO: 1875157 - RNA, 19 nt, Artificial Sequence
  Description of Artificial Sequence: Synthetic oligonucleotide
  Sense strand starting at position 870 of SEQ ID NO: 1564382
gcccuaaaccaagguauga

SEQ ID NO: 1875158 - RNA, 19 nt, Artificial Sequence
  Description of Artificial Sequence: Synthetic oligonucleotide
  Antisense strand to SEQ ID NO: 1875157
ucauaccuugguuuagggc

SEQ ID NO: 1875159 - RNA, 19 nt, Artificial Sequence
  Description of Artificial Sequence: Synthetic oligonucleotide
  Sense strand starting at position 953 of SEQ ID NO: 1564382
accagauauguaugaguca

SEQ ID NO: 1875160 - RNA, 19 nt, Artificial Sequence
  Description of Artificial Sequence: Synthetic oligonucleotide
  Antisense strand to SEQ ID NO: 1875159
ugacucauacauaucuggu

SEQ ID NO: 1875161 - RNA, 19 nt, Artificial Sequence
  Description of Artificial Sequence: Synthetic oligonucleotide
  Sense strand starting at position 956 of SEQ ID NO: 1564382
agauauguaugagucacca

SEQ ID NO: 1875162 - RNA, 19 nt, Artificial Sequence
  Description of Artificial Sequence: Synthetic oligonucleotide
  Antisense strand to SEQ ID NO: 1875161
uggugacucauacauaucu

SEQ ID NO: 1875163 - RNA, 19 nt, Artificial Sequence
  Description of Artificial Sequence: Synthetic oligonucleotide
  Sense strand starting at position 1063 of SEQ ID NO: 1564382
auuuguaaaugugagaaga

SEQ ID NO: 1875164 - RNA, 19 nt, Artificial Sequence
  Description of Artificial Sequence: Synthetic oligonucleotide
  Antisense strand to SEQ ID NO: 1875163
ucuucucacauuuacaaau

SEQ ID NO: 1875165 - RNA, 19 nt, Artificial Sequence
  Description of Artificial Sequence: Synthetic oligonucleotide
  Sense strand starting at position 1209 of SEQ ID NO: 1564382
cucugagcucuguauaaau

SEQ ID NO: 1875166 - RNA, 19 nt, Artificial Sequence
  Description of Artificial Sequence: Synthetic oligonucleotide
  Antisense strand to SEQ ID NO: 1875165
auuuauacagagcucagag

SEQ ID NO: 1875167 - RNA, 19 nt, Artificial Sequence
  Description of Artificial Sequence: Synthetic oligonucleotide
  Sense strand starting at position 1211 of SEQ ID NO: 1564382
cugagcucuguauaaauau

SEQ ID NO: 1875168 - RNA, 19 nt, Artificial Sequence
  Description of Artificial Sequence: Synthetic oligonucleotide
  Antisense strand to SEQ ID NO: 1875167
auauuuauacagagcucag

SEQ ID NO: 1875169 - RNA, 19 nt, Artificial Sequence
  Description of Artificial Sequence: Synthetic oligonucleotide
  Sense strand starting at position 1218 of SEQ ID NO: 1564382
cuguauaaauaugcaauga

SEQ ID NO: 1875170 - RNA, 19 nt, Artificial Sequence
  Description of Artificial Sequence: Synthetic oligonucleotide
  Antisense strand to SEQ ID NO: 1875169
ucauugcauauuuauacag

SEQ ID NO: 1875171 - RNA, 19 nt, Artificial Sequence
  Description of Artificial Sequence: Synthetic oligonucleotide
  Sense strand starting at position 1238 of SEQ ID NO: 1564382
gggacuaacuuauugaugu

SEQ ID NO: 1875172 - RNA, 19 nt, Artificial Sequence
  Description of Artificial Sequence: Synthetic oligonucleotide
  Antisense strand to SEQ ID NO: 1875171
acaucaauaaguuaguccc

SEQ ID NO: 1875173 - RNA, 19 nt, Artificial Sequence
  Description of Artificial Sequence: Synthetic oligonucleotide
  Sense strand starting at position 1301 of SEQ ID NO: 1564382
cgauauaagcuugaucauc

SEQ ID NO: 1875174 - RNA, 19 nt, Artificial Sequence
  Description of Artificial Sequence: Synthetic oligonucleotide
  Antisense strand to SEQ ID NO: 1875173
gaugaucaagcuuauaucg

SEQ ID NO: 1875175 - RNA, 19 nt, Artificial Sequence
  Description of Artificial Sequence: Synthetic oligonucleotide
  Sense strand starting at position 1333 of SEQ ID NO: 1564382
gaaucaagguaucugucau

SEQ ID NO: 1875176 - RNA, 19 nt, Artificial Sequence
  Description of Artificial Sequence: Synthetic oligonucleotide
  Antisense strand to SEQ ID NO: 1875175
augacagauaccuugauuc

SEQ ID NO: 1875177 - RNA, 19 nt, Artificial Sequence
  Description of Artificial Sequence: Synthetic oligonucleotide
  Sense strand starting at position 1835 of SEQ ID NO: 1564382
agguuaugugcucagagau

SEQ ID NO: 1875178 - RNA, 19 nt, Artificial Sequence
  Description of Artificial Sequence: Synthetic oligonucleotide
  Antisense strand to SEQ ID NO: 1875177
aucucugagcacauaaccu

SEQ ID NO: 1875179 - RNA, 19 nt, Artificial Sequence
  Description of Artificial Sequence: Synthetic oligonucleotide
  Sense strand starting at position 1848 of SEQ ID NO: 1564382
agagauauggccgaauguc

SEQ ID NO: 1875180 - RNA, 19 nt, Artificial Sequence
  Description of Artificial Sequence: Synthetic oligonucleotide
  Antisense strand to SEQ ID NO: 1875179
gacauucggccauaucucu

SEQ ID NO: 1875181 - RNA, 19 nt, Artificial Sequence
  Description of Artificial Sequence: Synthetic oligonucleotide
  Sense strand starting at position 1934 of SEQ ID NO: 1564382
acacuuuaauaugugggaa

SEQ ID NO: 1875182 - RNA, 19 nt, Artificial Sequence
  Description of Artificial Sequence: Synthetic oligonucleotide
  Antisense strand to SEQ ID NO: 1875181
uucccacauauuaaagugu

SEQ ID NO: 1875183 - RNA, 19 nt, Artificial Sequence
  Description of Artificial Sequence: Synthetic oligonucleotide
  Sense strand starting at position 2126 of SEQ ID NO: 1564382
ggcauagagauaugucaca

SEQ ID NO: 1875184 - RNA, 19 nt, Artificial Sequence
  Description of Artificial Sequence: Synthetic oligonucleotide
  Antisense strand to SEQ ID NO: 1875183
ugugacauaucucuaugcc

SEQ ID NO: 1875185 - RNA, 19 nt, Artificial Sequence
  Description of Artificial Sequence: Synthetic oligonucleotide
  Sense strand starting at position 2768 of SEQ ID NO: 1564382
gucugugucauggugcagu

SEQ ID NO: 1875186 - RNA, 19 nt, Artificial Sequence
  Description of Artificial Sequence: Synthetic oligonucleotide
  Antisense strand to SEQ ID NO: 1875185
acugcaccaugacacagac

SEQ ID NO: 1875187 - RNA, 19 nt, Artificial Sequence
  Description of Artificial Sequence: Synthetic oligonucleotide
  Sense strand starting at position 2778 of SEQ ID NO: 1564382
uggugcagucaagaauaua

SEQ ID NO: 1875188 - RNA, 19 nt, Artificial Sequence
  Description of Artificial Sequence: Synthetic oligonucleotide
  Antisense strand to SEQ ID NO: 1875187
uauauucuugacugcacca

SEQ ID NO: 1875189 - RNA, 19 nt, Artificial Sequence
  Description of Artificial Sequence: Synthetic oligonucleotide
  Sense strand starting at position 2875 of SEQ ID NO: 1564382
caagguuggcccugggaga

SEQ ID NO: 1875190 - RNA, 19 nt, Artificial Sequence
  Description of Artificial Sequence: Synthetic oligonucleotide
  Antisense strand to SEQ ID NO: 1875189
ucucccagggccaaccuug

SEQ ID NO: 1875191 - RNA, 19 nt, Artificial Sequence
  Description of Artificial Sequence: Synthetic oligonucleotide
  Sense strand starting at position 2876 of SEQ ID NO: 1564382
aagguuggcccugggagau

SEQ ID NO: 1875192 - RNA, 19 nt, Artificial Sequence
  Description of Artificial Sequence: Synthetic oligonucleotide
  Antisense strand to SEQ ID NO: 1875191
aucucccagggccaaccuu

SEQ ID NO: 1875193 - RNA, 19 nt, Artificial Sequence
  Description of Artificial Sequence: Synthetic oligonucleotide
  Sense strand starting at position 2940 of SEQ ID NO: 1564382
cacaauggugcaugacaaa

SEQ ID NO: 1875194 - RNA, 19 nt, Artificial Sequence
  Description of Artificial Sequence: Synthetic oligonucleotide
  Antisense strand to SEQ ID NO: 1875193
uuugucaugcaccauugug

SEQ ID NO: 1875195 - RNA, 19 nt, Artificial Sequence
  Description of Artificial Sequence: Synthetic oligonucleotide
  Sense strand starting at position 2953 of SEQ ID NO: 1564382
gacaaagauuuguaucaga

SEQ ID NO: 1875196 - RNA, 19 nt, Artificial Sequence
  Description of Artificial Sequence: Synthetic oligonucleotide
  Antisense strand to SEQ ID NO: 1875195
ucugauacaaaucuuuguc

SEQ ID NO: 1875197 - RNA, 19 nt, Artificial Sequence
  Description of Artificial Sequence: Synthetic oligonucleotide
  Sense strand starting at position 3054 of SEQ ID NO: 1564382
gucuaugauggugaaaguu

SEQ ID NO: 1875198 - RNA, 19 nt, Artificial Sequence
  Description of Artificial Sequence: Synthetic oligonucleotide
  Antisense strand to SEQ ID NO: 1875197
aacuuucaccaucauagac

SEQ ID NO: 1875199 - RNA, 19 nt, Artificial Sequence
  Description of Artificial Sequence: Synthetic oligonucleotide
  Sense strand starting at position 3286 of SEQ ID NO: 1564382
auaugacagucacuaucau

SEQ ID NO: 1875200 - RNA, 19 nt, Artificial Sequence
  Description of Artificial Sequence: Synthetic oligonucleotide
  Antisense strand to SEQ ID NO: 1875199
augauagugacugucauau

SEQ ID NO: 1875201 - RNA, 19 nt, Artificial Sequence
  Description of Artificial Sequence: Synthetic oligonucleotide
  Sense strand starting at position 3346 of SEQ ID NO: 1564382
ugguuauuaaaugggcaga

SEQ ID NO: 1875202 - RNA, 19 nt, Artificial Sequence
  Description of Artificial Sequence: Synthetic oligonucleotide
  Antisense strand to SEQ ID NO: 1875201
ucugcccauuuaauaacca

SEQ ID NO: 1875203 - RNA, 19 nt, Artificial Sequence
  Description of Artificial Sequence: Synthetic oligonucleotide
  Sense strand starting at position 3347 of SEQ ID NO: 1564382
gguuauuaaaugggcagaa

SEQ ID NO: 1875204 - RNA, 19 nt, Artificial Sequence
  Description of Artificial Sequence: Synthetic oligonucleotide
  Antisense strand to SEQ ID NO: 1875203
uucugcccauuuaauaacc

SEQ ID NO: 1875205 - RNA, 19 nt, Artificial Sequence
  Description of Artificial Sequence: Synthetic oligonucleotide
  Sense strand starting at position 3348 of SEQ ID NO: 1564382
guuauuaaaugggcagaaa

SEQ ID NO: 1875206 - RNA, 19 nt, Artificial Sequence
  Description of Artificial Sequence: Synthetic oligonucleotide
  Antisense strand to SEQ ID NO: 1875205
uuucugcccauuuaauaac

SEQ ID NO: 1875207 - RNA, 19 nt, Artificial Sequence
  Description of Artificial Sequence: Synthetic oligonucleotide
  Sense strand starting at position 3771 of SEQ ID NO: 1564382
uuaucucugggcuauaaau

SEQ ID NO: 1875208 - RNA, 19 nt, Artificial Sequence
  Description of Artificial Sequence: Synthetic oligonucleotide
  Antisense strand to SEQ ID NO: 1875207
auuuauagcccagagauaa

SEQ ID NO: 1875209 - RNA, 19 nt, Artificial Sequence
  Description of Artificial Sequence: Synthetic oligonucleotide
  Sense strand starting at position 3853 of SEQ ID NO: 1564382
aagguucagggaugagagu

SEQ ID NO: 1875210 - RNA, 19 nt, Artificial Sequence
  Description of Artificial Sequence: Synthetic oligonucleotide
  Antisense strand to SEQ ID NO: 1875209
acucucaucccugaaccuu

SEQ ID NO: 1875211 - RNA, 19 nt, Artificial Sequence
  Description of Artificial Sequence: Synthetic oligonucleotide
  Sense strand starting at position 3862 of SEQ ID NO: 1564382
ggaugagagucaccauccu

SEQ ID NO: 1875212 - RNA, 19 nt, Artificial Sequence
  Description of Artificial Sequence: Synthetic oligonucleotide
  Antisense strand to SEQ ID NO: 1875211
aggauggugacucucaucc

SEQ ID NO: 1875213 - RNA, 19 nt, Artificial Sequence
  Description of Artificial Sequence: Synthetic oligonucleotide
  Sense strand starting at position 188 of SEQ ID NO: 1564385
ucuaacaugugagcagaaa

SEQ ID NO: 1875214 - RNA, 19 nt, Artificial Sequence
  Description of Artificial Sequence: Synthetic oligonucleotide
  Antisense strand to SEQ ID NO: 1875213
uuucugcucacauguuaga

SEQ ID NO: 1875215 - RNA, 19 nt, Artificial Sequence
  Description of Artificial Sequence: Synthetic oligonucleotide
  Sense strand starting at position 230 of SEQ ID NO: 1564385
uggguagacccucagguaa

SEQ ID NO: 1875216 - RNA, 19 nt, Artificial Sequence
  Description of Artificial Sequence: Synthetic oligonucleotide
  Antisense strand to SEQ ID NO: 1875215
uuaccugagggucuaccca

SEQ ID NO: 1875217 - RNA, 19 nt, Artificial Sequence
  Description of Artificial Sequence: Synthetic oligonucleotide
  Sense strand starting at position 267 of SEQ ID NO: 1564385
guagacagauuugaugaaa

SEQ ID NO: 1875218 - RNA, 19 nt, Artificial Sequence
  Description of Artificial Sequence: Synthetic oligonucleotide
  Antisense strand to SEQ ID NO: 1875217
uuucaucaaaucugucuac

SEQ ID NO: 1875219 - RNA, 19 nt, Artificial Sequence
  Description of Artificial Sequence: Synthetic oligonucleotide
  Sense strand starting at position 417 of SEQ ID NO: 1564385
caauuuauuugguggacag

SEQ ID NO: 1875220 - RNA, 19 nt, Artificial Sequence
  Description of Artificial Sequence: Synthetic oligonucleotide
  Antisense strand to SEQ ID NO: 1875219
cuguccaccaaauaaauug

SEQ ID NO: 1875221 - RNA, 19 nt, Artificial Sequence
  Description of Artificial Sequence: Synthetic oligonucleotide
  Sense strand starting at position 443 of SEQ ID NO: 1564385
gcaggaguauuaccuagau

SEQ ID NO: 1875222 - RNA, 19 nt, Artificial Sequence
  Description of Artificial Sequence: Synthetic oligonucleotide
  Antisense strand to SEQ ID NO: 1875221
aucuagguaauacuccugc

SEQ ID NO: 1875223 - RNA, 19 nt, Artificial Sequence
  Description of Artificial Sequence: Synthetic oligonucleotide
  Sense strand starting at position 445 of SEQ ID NO: 1564385
aggaguauuaccuagaugc

SEQ ID NO: 1875224 - RNA, 19 nt, Artificial Sequence
  Description of Artificial Sequence: Synthetic oligonucleotide
  Antisense strand to SEQ ID NO: 1875223
gcaucuagguaauacuccu

SEQ ID NO: 1875225 - RNA, 19 nt, Artificial Sequence
  Description of Artificial Sequence: Synthetic oligonucleotide
  Sense strand starting at position 447 of SEQ ID NO: 1564385
gaguauuaccuagaugcug

SEQ ID NO: 1875226 - RNA, 19 nt, Artificial Sequence
  Description of Artificial Sequence: Synthetic oligonucleotide
  Antisense strand to SEQ ID NO: 1875225
cagcaucuagguaauacuc

SEQ ID NO: 1875227 - RNA, 19 nt, Artificial Sequence
  Description of Artificial Sequence: Synthetic oligonucleotide
  Sense strand starting at position 458 of SEQ ID NO: 1564385
agaugcuguaucuagugau

SEQ ID NO: 1875228 - RNA, 19 nt, Artificial Sequence
  Description of Artificial Sequence: Synthetic oligonucleotide
  Antisense strand to SEQ ID NO: 1875227
aucacuagauacagcaucu

SEQ ID NO: 1875229 - RNA, 19 nt, Artificial Sequence
  Description of Artificial Sequence: Synthetic oligonucleotide
  Sense strand starting at position 689 of SEQ ID NO: 1564385
accuuuaacggugacacaa

SEQ ID NO: 1875230 - RNA, 19 nt, Artificial Sequence
  Description of Artificial Sequence: Synthetic oligonucleotide
  Antisense strand to SEQ ID NO: 1875229
uugugucaccguuaaaggu

SEQ ID NO: 1875231 - RNA, 19 nt, Artificial Sequence
  Description of Artificial Sequence: Synthetic oligonucleotide
  Sense strand starting at position 750 of SEQ ID NO: 1564385
gugugugcugacccuugua

SEQ ID NO: 1875232 - RNA, 19 nt, Artificial Sequence
  Description of Artificial Sequence: Synthetic oligonucleotide
  Antisense strand to SEQ ID NO: 1875231
uacaagggucagcacacac

SEQ ID NO: 1875233 - RNA, 19 nt, Artificial Sequence
  Description of Artificial Sequence: Synthetic oligonucleotide
  Sense strand starting at position 798 of SEQ ID NO: 1564385
auacaacaugccugagagu

SEQ ID NO: 1875234 - RNA, 19 nt, Artificial Sequence
  Description of Artificial Sequence: Synthetic oligonucleotide
  Antisense strand to SEQ ID NO: 1875233
acucucaggcauguuguau

SEQ ID NO: 1875235 - RNA, 19 nt, Artificial Sequence
  Description of Artificial Sequence: Synthetic oligonucleotide
  Sense strand starting at position 799 of SEQ ID NO: 1564385
uacaacaugccugagaguu

SEQ ID NO: 1875236 - RNA, 19 nt, Artificial Sequence
  Description of Artificial Sequence: Synthetic oligonucleotide
  Antisense strand to SEQ ID NO: 1875235
aacucucaggcauguugua

SEQ ID NO: 1875237 - RNA, 19 nt, Artificial Sequence
  Description of Artificial Sequence: Synthetic oligonucleotide
  Sense strand starting at position 870 of SEQ ID NO: 1564385
gcccuaaaccaagguauga

SEQ ID NO: 1875238 - RNA, 19 nt, Artificial Sequence
  Description of Artificial Sequence: Synthetic oligonucleotide
  Antisense strand to SEQ ID NO: 1875237
ucauaccuugguuuagggc

SEQ ID NO: 1875239 - RNA, 19 nt, Artificial Sequence
  Description of Artificial Sequence: Synthetic oligonucleotide
  Sense strand starting at position 953 of SEQ ID NO: 1564385
accagauauguaugaguca

SEQ ID NO: 1875240 - RNA, 19 nt, Artificial Sequence
  Description of Artificial Sequence: Synthetic oligonucleotide
  Antisense strand to SEQ ID NO: 1875239
ugacucauacauaucuggu

SEQ ID NO: 1875241 - RNA, 19 nt, Artificial Sequence
  Description of Artificial Sequence: Synthetic oligonucleotide
  Sense strand starting at position 956 of SEQ ID NO: 1564385
agauauguaugagucacca

SEQ ID NO: 1875242 - RNA, 19 nt, Artificial Sequence
  Description of Artificial Sequence: Synthetic oligonucleotide
  Antisense strand to SEQ ID NO: 1875241
uggugacucauacauaucu

SEQ ID NO: 1875243 - RNA, 19 nt, Artificial Sequence
  Description of Artificial Sequence: Synthetic oligonucleotide
  Sense strand starting at position 1063 of SEQ ID NO: 1564385
auuuguaaaugugagaaga

SEQ ID NO: 1875244 - RNA, 19 nt, Artificial Sequence
  Description of Artificial Sequence: Synthetic oligonucleotide
  Antisense strand to SEQ ID NO: 1875243
ucuucucacauuuacaaau

SEQ ID NO: 1875245 - RNA, 19 nt, Artificial Sequence
  Description of Artificial Sequence: Synthetic oligonucleotide
  Sense strand starting at position 1209 of SEQ ID NO: 1564385
cucugagcucuguauaaau

SEQ ID NO: 1875246 - RNA, 19 nt, Artificial Sequence
  Description of Artificial Sequence: Synthetic oligonucleotide
  Antisense strand to SEQ ID NO: 1875245
auuuauacagagcucagag

SEQ ID NO: 1875247 - RNA, 19 nt, Artificial Sequence
  Description of Artificial Sequence: Synthetic oligonucleotide
  Sense strand starting at position 1211 of SEQ ID NO: 1564385
cugagcucuguauaaauau

SEQ ID NO: 1875248 - RNA, 19 nt, Artificial Sequence
  Description of Artificial Sequence: Synthetic oligonucleotide
  Antisense strand to SEQ ID NO: 1875247
auauuuauacagagcucag

SEQ ID NO: 1875249 - RNA, 19 nt, Artificial Sequence
  Description of Artificial Sequence: Synthetic oligonucleotide
  Sense strand starting at position 1218 of SEQ ID NO: 1564385
cuguauaaauaugcaauga

SEQ ID NO: 1875250 - RNA, 19 nt, Artificial Sequence
  Description of Artificial Sequence: Synthetic oligonucleotide
  Antisense strand to SEQ ID NO: 1875249
ucauugcauauuuauacag

SEQ ID NO: 1875251 - RNA, 19 nt, Artificial Sequence
  Description of Artificial Sequence: Synthetic oligonucleotide
  Sense strand starting at position 1238 of SEQ ID NO: 1564385
gggacuaacuuauugaugu

SEQ ID NO: 1875252 - RNA, 19 nt, Artificial Sequence
  Description of Artificial Sequence: Synthetic oligonucleotide
  Antisense strand to SEQ ID NO: 1875251
acaucaauaaguuaguccc

SEQ ID NO: 1875253 - RNA, 19 nt, Artificial Sequence
  Description of Artificial Sequence: Synthetic oligonucleotide
  Sense strand starting at position 1301 of SEQ ID NO: 1564385
cgauauaagcuugaucauc

SEQ ID NO: 1875254 - RNA, 19 nt, Artificial Sequence
  Description of Artificial Sequence: Synthetic oligonucleotide
  Antisense strand to SEQ ID NO: 1875253
gaugaucaagcuuauaucg

SEQ ID NO: 1875255 - RNA, 19 nt, Artificial Sequence
  Description of Artificial Sequence: Synthetic oligonucleotide
  Sense strand starting at position 1333 of SEQ ID NO: 1564385
gaaucaagguaucugucau

SEQ ID NO: 1875256 - RNA, 19 nt, Artificial Sequence
  Description of Artificial Sequence: Synthetic oligonucleotide
  Antisense strand to SEQ ID NO: 1875255
augacagauaccuugauuc

SEQ ID NO: 1875257 - RNA, 19 nt, Artificial Sequence
  Description of Artificial Sequence: Synthetic oligonucleotide
  Sense strand starting at position 1835 of SEQ ID NO: 1564385
agguuaugugcucagagau

SEQ ID NO: 1875258 - RNA, 19 nt, Artificial Sequence
  Description of Artificial Sequence: Synthetic oligonucleotide
  Antisense strand to SEQ ID NO: 1875257
aucucugagcacauaaccu

SEQ ID NO: 1875259 - RNA, 19 nt, Artificial Sequence
  Description of Artificial Sequence: Synthetic oligonucleotide
  Sense strand starting at position 1848 of SEQ ID NO: 1564385
agagauauggccgaauguc

SEQ ID NO: 1875260 - RNA, 19 nt, Artificial Sequence
  Description of Artificial Sequence: Synthetic oligonucleotide
  Antisense strand to SEQ ID NO: 1875259
gacauucggccauaucucu

SEQ ID NO: 1875261 - RNA, 19 nt, Artificial Sequence
  Description of Artificial Sequence: Synthetic oligonucleotide
  Sense strand starting at position 1934 of SEQ ID NO: 1564385
acacuuuaauaugugggaa

SEQ ID NO: 1875262 - RNA, 19 nt, Artificial Sequence
  Description of Artificial Sequence: Synthetic oligonucleotide
  Antisense strand to SEQ ID NO: 1875261
uucccacauauuaaagugu

SEQ ID NO: 1875263 - RNA, 19 nt, Artificial Sequence
  Description of Artificial Sequence: Synthetic oligonucleotide
  Sense strand starting at position 2126 of SEQ ID NO: 1564385
ggcauagagauaugucaca

SEQ ID NO: 1875264 - RNA, 19 nt, Artificial Sequence
  Description of Artificial Sequence: Synthetic oligonucleotide
  Antisense strand to SEQ ID NO: 1875263
ugugacauaucucuaugcc

SEQ ID NO: 1875265 - RNA, 19 nt, Artificial Sequence
  Description of Artificial Sequence: Synthetic oligonucleotide
  Sense strand starting at position 2768 of SEQ ID NO: 1564385
gucugugucauggugcagu

SEQ ID NO: 1875266 - RNA, 19 nt, Artificial Sequence
  Description of Artificial Sequence: Synthetic oligonucleotide
  Antisense strand to SEQ ID NO: 1875265
acugcaccaugacacagac

SEQ ID NO: 1875267 - RNA, 19 nt, Artificial Sequence
  Description of Artificial Sequence: Synthetic oligonucleotide
  Sense strand starting at position 2778 of SEQ ID NO: 1564385
uggugcagucaagaauaua

SEQ ID NO: 1875268 - RNA, 19 nt, Artificial Sequence
  Description of Artificial Sequence: Synthetic oligonucleotide
  Antisense strand to SEQ ID NO: 1875267
uauauucuugacugcacca

SEQ ID NO: 1875269 - RNA, 19 nt, Artificial Sequence
  Description of Artificial Sequence: Synthetic oligonucleotide
  Sense strand starting at position 2875 of SEQ ID NO: 1564385
caagguuggcccugggaga

SEQ ID NO: 1875270 - RNA, 19 nt, Artificial Sequence
  Description of Artificial Sequence: Synthetic oligonucleotide
  Antisense strand to SEQ ID NO: 1875269
ucucccagggccaaccuug

SEQ ID NO: 1875271 - RNA, 19 nt, Artificial Sequence
  Description of Artificial Sequence: Synthetic oligonucleotide
  Sense strand starting at position 2876 of SEQ ID NO: 1564385
aagguuggcccugggagau

SEQ ID NO: 1875272 - RNA, 19 nt, Artificial Sequence
  Description of Artificial Sequence: Synthetic oligonucleotide
  Antisense strand to SEQ ID NO: 1875271
aucucccagggccaaccuu

SEQ ID NO: 1875273 - RNA, 19 nt, Artificial Sequence
  Description of Artificial Sequence: Synthetic oligonucleotide
  Sense strand starting at position 2940 of SEQ ID NO: 1564385
cacaauggugcaugacaaa

SEQ ID NO: 1875274 - RNA, 19 nt, Artificial Sequence
  Description of Artificial Sequence: Synthetic oligonucleotide
  Antisense strand to SEQ ID NO: 1875273
uuugucaugcaccauugug

SEQ ID NO: 1875275 - RNA, 19 nt, Artificial Sequence
  Description of Artificial Sequence: Synthetic oligonucleotide
  Sense strand starting at position 2953 of SEQ ID NO: 1564385
gacaaagauuuguaucaga

SEQ ID NO: 1875276 - RNA, 19 nt, Artificial Sequence
  Description of Artificial Sequence: Synthetic oligonucleotide
  Antisense strand to SEQ ID NO: 1875275
ucugauacaaaucuuuguc

SEQ ID NO: 1875277 - RNA, 19 nt, Artificial Sequence
  Description of Artificial Sequence: Synthetic oligonucleotide
  Sense strand starting at position 3054 of SEQ ID NO: 1564385
gucuaugauggugaaaguu

SEQ ID NO: 1875278 - RNA, 19 nt, Artificial Sequence
  Description of Artificial Sequence: Synthetic oligonucleotide
  Antisense strand to SEQ ID NO: 1875277
aacuuucaccaucauagac

SEQ ID NO: 1875279 - RNA, 19 nt, Artificial Sequence
  Description of Artificial Sequence: Synthetic oligonucleotide
  Sense strand starting at position 3286 of SEQ ID NO: 1564385
auaugacagucacuaucau

SEQ ID NO: 1875280 - RNA, 19 nt, Artificial Sequence
  Description of Artificial Sequence: Synthetic oligonucleotide
  Antisense strand to SEQ ID NO: 1875279
augauagugacugucauau

SEQ ID NO: 1875281 - RNA, 19 nt, Artificial Sequence
  Description of Artificial Sequence: Synthetic oligonucleotide
  Sense strand starting at position 3346 of SEQ ID NO: 1564385
ugguuauuaaaugggcaga

SEQ ID NO: 1875282 - RNA, 19 nt, Artificial Sequence
  Description of Artificial Sequence: Synthetic oligonucleotide
  Antisense strand to SEQ ID NO: 1875281
ucugcccauuuaauaacca

SEQ ID NO: 1875283 - RNA, 19 nt, Artificial Sequence
  Description of Artificial Sequence: Synthetic oligonucleotide
  Sense strand starting at position 3347 of SEQ ID NO: 1564385
gguuauuaaaugggcagaa

SEQ ID NO: 1875284 - RNA, 19 nt, Artificial Sequence
  Description of Artificial Sequence: Synthetic oligonucleotide
  Antisense strand to SEQ ID NO: 1875283
uucugcccauuuaauaacc

SEQ ID NO: 1875285 - RNA, 19 nt, Artificial Sequence
  Description of Artificial Sequence: Synthetic oligonucleotide
  Sense strand starting at position 3348 of SEQ ID NO: 1564385
guuauuaaaugggcagaaa

SEQ ID NO: 1875286 - RNA, 19 nt, Artificial Sequence
  Description of Artificial Sequence: Synthetic oligonucleotide
  Antisense strand to SEQ ID NO: 1875285
uuucugcccauuuaauaac

SEQ ID NO: 1875287 - RNA, 19 nt, Artificial Sequence
  Description of Artificial Sequence: Synthetic oligonucleotide
  Sense strand starting at position 3771 of SEQ ID NO: 1564385
uuaucucugggcuauaaau

SEQ ID NO: 1875288 - RNA, 19 nt, Artificial Sequence
  Description of Artificial Sequence: Synthetic oligonucleotide
  Antisense strand to SEQ ID NO: 1875287
auuuauagcccagagauaa

SEQ ID NO: 1875289 - RNA, 19 nt, Artificial Sequence
  Description of Artificial Sequence: Synthetic oligonucleotide
  Sense strand starting at position 3853 of SEQ ID NO: 1564385
aagguucagggaugagagu

SEQ ID NO: 1875290 - RNA, 19 nt, Artificial Sequence
  Description of Artificial Sequence: Synthetic oligonucleotide
  Antisense strand to SEQ ID NO: 1875289
acucucaucccugaaccuu

SEQ ID NO: 1875291 - RNA, 19 nt, Artificial Sequence
  Description of Artificial Sequence: Synthetic oligonucleotide
  Sense strand starting at position 3862 of SEQ ID NO: 1564385
ggaugagagucaccauccu

SEQ ID NO: 1875292 - RNA, 19 nt, Artificial Sequence
  Description of Artificial Sequence: Synthetic oligonucleotide
  Antisense strand to SEQ ID NO: 1875291
aggauggugacucucaucc

SEQ ID NO: 1875293 - RNA, 19 nt, Artificial Sequence
  Description of Artificial Sequence: Synthetic oligonucleotide
  Sense strand starting at position 188 of SEQ ID NO: 1564388
ucuaacaugugagcagaaa

SEQ ID NO: 1875294 - RNA, 19 nt, Artificial Sequence
  Description of Artificial Sequence: Synthetic oligonucleotide
  Antisense strand to SEQ ID NO: 1875293
uuucugcucacauguuaga

SEQ ID NO: 1875295 - RNA, 19 nt, Artificial Sequence
  Description of Artificial Sequence: Synthetic oligonucleotide
  Sense strand starting at position 230 of SEQ ID NO: 1564388
uggguagacccucagguaa

SEQ ID NO: 1875296 - RNA, 19 nt, Artificial Sequence
  Description of Artificial Sequence: Synthetic oligonucleotide
  Antisense strand to SEQ ID NO: 1875295
uuaccugagggucuaccca

SEQ ID NO: 1875297 - RNA, 19 nt, Artificial Sequence
  Description of Artificial Sequence: Synthetic oligonucleotide
  Sense strand starting at position 267 of SEQ ID NO: 1564388
guagacagauuugaugaaa

SEQ ID NO: 1875298 - RNA, 19 nt, Artificial Sequence
  Description of Artificial Sequence: Synthetic oligonucleotide
  Antisense strand to SEQ ID NO: 1875297
uuucaucaaaucugucuac

SEQ ID NO: 1875299 - RNA, 19 nt, Artificial Sequence
  Description of Artificial Sequence: Synthetic oligonucleotide
  Sense strand starting at position 417 of SEQ ID NO: 1564388
caauuuauuugguggacag

SEQ ID NO: 1875300 - RNA, 19 nt, Artificial Sequence
  Description of Artificial Sequence: Synthetic oligonucleotide
  Antisense strand to SEQ ID NO: 1875299
cuguccaccaaauaaauug

SEQ ID NO: 1875301 - RNA, 19 nt, Artificial Sequence
  Description of Artificial Sequence: Synthetic oligonucleotide
  Sense strand starting at position 443 of SEQ ID NO: 1564388
gcaggaguauuaccuagau

SEQ ID NO: 1875302 - RNA, 19 nt, Artificial Sequence
  Description of Artificial Sequence: Synthetic oligonucleotide
  Antisense strand to SEQ ID NO: 1875301
aucuagguaauacuccugc

SEQ ID NO: 1875303 - RNA, 19 nt, Artificial Sequence
  Description of Artificial Sequence: Synthetic oligonucleotide
  Sense strand starting at position 445 of SEQ ID NO: 1564388
aggaguauuaccuagaugc

SEQ ID NO: 1875304 - RNA, 19 nt, Artificial Sequence
  Description of Artificial Sequence: Synthetic oligonucleotide
  Antisense strand to SEQ ID NO: 1875303
gcaucuagguaauacuccu

SEQ ID NO: 1875305 - RNA, 19 nt, Artificial Sequence
  Description of Artificial Sequence: Synthetic oligonucleotide
  Sense strand starting at position 447 of SEQ ID NO: 1564388
gaguauuaccuagaugcug

SEQ ID NO: 1875306 - RNA, 19 nt, Artificial Sequence
  Description of Artificial Sequence: Synthetic oligonucleotide
  Antisense strand to SEQ ID NO: 1875305
cagcaucuagguaauacuc

SEQ ID NO: 1875307 - RNA, 19 nt, Artificial Sequence
  Description of Artificial Sequence: Synthetic oligonucleotide
  Sense strand starting at position 458 of SEQ ID NO: 1564388
agaugcuguaucuagugau

SEQ ID NO: 1875308 - RNA, 19 nt, Artificial Sequence
  Description of Artificial Sequence: Synthetic oligonucleotide
  Antisense strand to SEQ ID NO: 1875307
aucacuagauacagcaucu

SEQ ID NO: 1875309 - RNA, 19 nt, Artificial Sequence
  Description of Artificial Sequence: Synthetic oligonucleotide
  Sense strand starting at position 689 of SEQ ID NO: 1564388
accuuuaacggugacacaa

SEQ ID NO: 1875310 - RNA, 19 nt, Artificial Sequence
  Description of Artificial Sequence: Synthetic oligonucleotide
  Antisense strand to SEQ ID NO: 1875309
uugugucaccguuaaaggu

SEQ ID NO: 1875311 - RNA, 19 nt, Artificial Sequence
  Description of Artificial Sequence: Synthetic oligonucleotide
  Sense strand starting at position 750 of SEQ ID NO: 1564388
gugugugcugacccuugua

SEQ ID NO: 1875312 - RNA, 19 nt, Artificial Sequence
  Description of Artificial Sequence: Synthetic oligonucleotide
  Antisense strand to SEQ ID NO: 1875311
uacaagggucagcacacac

SEQ ID NO: 1875313 - RNA, 19 nt, Artificial Sequence
  Description of Artificial Sequence: Synthetic oligonucleotide
  Sense strand starting at position 798 of SEQ ID NO: 1564388
auacaacaugccugagagu

SEQ ID NO: 1875314 - RNA, 19 nt, Artificial Sequence
  Description of Artificial Sequence: Synthetic oligonucleotide
  Antisense strand to SEQ ID NO: 1875313
acucucaggcauguuguau

SEQ ID NO: 1875315 - RNA, 19 nt, Artificial Sequence
  Description of Artificial Sequence: Synthetic oligonucleotide
  Sense strand starting at position 799 of SEQ ID NO: 1564388
uacaacaugccugagaguu

SEQ ID NO: 1875316 - RNA, 19 nt, Artificial Sequence
  Description of Artificial Sequence: Synthetic oligonucleotide
  Antisense strand to SEQ ID NO: 1875315
aacucucaggcauguugua

SEQ ID NO: 1875317 - RNA, 19 nt, Artificial Sequence
  Description of Artificial Sequence: Synthetic oligonucleotide
  Sense strand starting at position 870 of SEQ ID NO: 1564388
gcccuaaaccaagguauga

SEQ ID NO: 1875318 - RNA, 19 nt, Artificial Sequence
  Description of Artificial Sequence: Synthetic oligonucleotide
  Antisense strand to SEQ ID NO: 1875317
ucauaccuugguuuagggc

SEQ ID NO: 1875319 - RNA, 19 nt, Artificial Sequence
  Description of Artificial Sequence: Synthetic oligonucleotide
  Sense strand starting at position 953 of SEQ ID NO: 1564388
accagauauguaugaguca

SEQ ID NO: 1875320 - RNA, 19 nt, Artificial Sequence
  Description of Artificial Sequence: Synthetic oligonucleotide
  Antisense strand to SEQ ID NO: 1875319
ugacucauacauaucuggu

SEQ ID NO: 1875321 - RNA, 19 nt, Artificial Sequence
  Description of Artificial Sequence: Synthetic oligonucleotide
  Sense strand starting at position 956 of SEQ ID NO: 1564388
agauauguaugagucacca

SEQ ID NO: 1875322 - RNA, 19 nt, Artificial Sequence
  Description of Artificial Sequence: Synthetic oligonucleotide
  Antisense strand to SEQ ID NO: 1875321
uggugacucauacauaucu

SEQ ID NO: 1875323 - RNA, 19 nt, Artificial Sequence
  Description of Artificial Sequence: Synthetic oligonucleotide
  Sense strand starting at position 1063 of SEQ ID NO: 1564388
auuuguaaaugugagaaga

SEQ ID NO: 1875324 - RNA, 19 nt, Artificial Sequence
  Description of Artificial Sequence: Synthetic oligonucleotide
  Antisense strand to SEQ ID NO: 1875323
ucuucucacauuuacaaau

SEQ ID NO: 1875325 - RNA, 19 nt, Artificial Sequence
  Description of Artificial Sequence: Synthetic oligonucleotide
  Sense strand starting at position 1209 of SEQ ID NO: 1564388
cucugagcucuguauaaau

SEQ ID NO: 1875326 - RNA, 19 nt, Artificial Sequence
  Description of Artificial Sequence: Synthetic oligonucleotide
  Antisense strand to SEQ ID NO: 1875325
auuuauacagagcucagag

SEQ ID NO: 1875327 - RNA, 19 nt, Artificial Sequence
  Description of Artificial Sequence: Synthetic oligonucleotide
  Sense strand starting at position 1211 of SEQ ID NO: 1564388
cugagcucuguauaaauau

SEQ ID NO: 1875328 - RNA, 19 nt, Artificial Sequence
  Description of Artificial Sequence: Synthetic oligonucleotide
  Antisense strand to SEQ ID NO: 1875327
auauuuauacagagcucag

SEQ ID NO: 1875329 - RNA, 19 nt, Artificial Sequence
  Description of Artificial Sequence: Synthetic oligonucleotide
  Sense strand starting at position 1218 of SEQ ID NO: 1564388
cuguauaaauaugcaauga

SEQ ID NO: 1875330 - RNA, 19 nt, Artificial Sequence
  Description of Artificial Sequence: Synthetic oligonucleotide
  Antisense strand to SEQ ID NO: 1875329
ucauugcauauuuauacag

SEQ ID NO: 1875331 - RNA, 19 nt, Artificial Sequence
  Description of Artificial Sequence: Synthetic oligonucleotide
  Sense strand starting at position 1238 of SEQ ID NO: 1564388
gggacuaacuuauugaugu

SEQ ID NO: 1875332 - RNA, 19 nt, Artificial Sequence
  Description of Artificial Sequence: Synthetic oligonucleotide
  Antisense strand to SEQ ID NO: 1875331
acaucaauaaguuaguccc

SEQ ID NO: 1875333 - RNA, 19 nt, Artificial Sequence
  Description of Artificial Sequence: Synthetic oligonucleotide
  Sense strand starting at position 1301 of SEQ ID NO: 1564388
cgauauaagcuugaucauc

SEQ ID NO: 1875334 - RNA, 19 nt, Artificial Sequence
  Description of Artificial Sequence: Synthetic oligonucleotide
  Antisense strand to SEQ ID NO: 1875333
gaugaucaagcuuauaucg

SEQ ID NO: 1875335 - RNA, 19 nt, Artificial Sequence
  Description of Artificial Sequence: Synthetic oligonucleotide
  Sense strand starting at position 1333 of SEQ ID NO: 1564388
gaaucaagguaucugucau

SEQ ID NO: 1875336 - RNA, 19 nt, Artificial Sequence
  Description of Artificial Sequence: Synthetic oligonucleotide
  Antisense strand to SEQ ID NO: 1875335
augacagauaccuugauuc

SEQ ID NO: 1875337 - RNA, 19 nt, Artificial Sequence
  Description of Artificial Sequence: Synthetic oligonucleotide
  Sense strand starting at position 1835 of SEQ ID NO: 1564388
agguuaugugcucagagau

SEQ ID NO: 1875338 - RNA, 19 nt, Artificial Sequence
  Description of Artificial Sequence: Synthetic oligonucleotide
  Antisense strand to SEQ ID NO: 1875337
aucucugagcacauaaccu

SEQ ID NO: 1875339 - RNA, 19 nt, Artificial Sequence
  Description of Artificial Sequence: Synthetic oligonucleotide
  Sense strand starting at position 1848 of SEQ ID NO: 1564388
agagauauggccgaauguc

SEQ ID NO: 1875340 - RNA, 19 nt, Artificial Sequence
  Description of Artificial Sequence: Synthetic oligonucleotide
  Antisense strand to SEQ ID NO: 1875339
gacauucggccauaucucu

SEQ ID NO: 1875341 - RNA, 19 nt, Artificial Sequence
  Description of Artificial Sequence: Synthetic oligonucleotide
  Sense strand starting at position 1934 of SEQ ID NO: 1564388
acacuuuaauaugugggaa

SEQ ID NO: 1875342 - RNA, 19 nt, Artificial Sequence
  Description of Artificial Sequence: Synthetic oligonucleotide
  Antisense strand to SEQ ID NO: 1875341
uucccacauauuaaagugu

SEQ ID NO: 1875343 - RNA, 19 nt, Artificial Sequence
  Description of Artificial Sequence: Synthetic oligonucleotide
  Sense strand starting at position 2126 of SEQ ID NO: 1564388
ggcauagagauaugucaca

SEQ ID NO: 1875344 - RNA, 19 nt, Artificial Sequence
  Description of Artificial Sequence: Synthetic oligonucleotide
  Antisense strand to SEQ ID NO: 1875343
ugugacauaucucuaugcc

SEQ ID NO: 1875345 - RNA, 19 nt, Artificial Sequence
  Description of Artificial Sequence: Synthetic oligonucleotide
  Sense strand starting at position 2768 of SEQ ID NO: 1564388
gucugugucauggugcagu

SEQ ID NO: 1875346 - RNA, 19 nt, Artificial Sequence
  Description of Artificial Sequence: Synthetic oligonucleotide
  Antisense strand to SEQ ID NO: 1875345
acugcaccaugacacagac

SEQ ID NO: 1875347 - RNA, 19 nt, Artificial Sequence
  Description of Artificial Sequence: Synthetic oligonucleotide
  Sense strand starting at position 2778 of SEQ ID NO: 1564388
uggugcagucaagaauaua

SEQ ID NO: 1875348 - RNA, 19 nt, Artificial Sequence
  Description of Artificial Sequence: Synthetic oligonucleotide
  Antisense strand to SEQ ID NO: 1875347
uauauucuugacugcacca

SEQ ID NO: 1875349 - RNA, 19 nt, Artificial Sequence
  Description of Artificial Sequence: Synthetic oligonucleotide
  Sense strand starting at position 2875 of SEQ ID NO: 1564388
caagguuggcccugggaga

SEQ ID NO: 1875350 - RNA, 19 nt, Artificial Sequence
  Description of Artificial Sequence: Synthetic oligonucleotide
  Antisense strand to SEQ ID NO: 1875349
ucucccagggccaaccuug

SEQ ID NO: 1875351 - RNA, 19 nt, Artificial Sequence
  Description of Artificial Sequence: Synthetic oligonucleotide
  Sense strand starting at position 2876 of SEQ ID NO: 1564388
aagguuggcccugggagau

SEQ ID NO: 1875352 - RNA, 19 nt, Artificial Sequence
  Description of Artificial Sequence: Synthetic oligonucleotide
  Antisense strand to SEQ ID NO: 1875351
aucucccagggccaaccuu

SEQ ID NO: 1875353 - RNA, 19 nt, Artificial Sequence
  Description of Artificial Sequence: Synthetic oligonucleotide
  Sense strand starting at position 2940 of SEQ ID NO: 1564388
cacaauggugcaugacaaa

SEQ ID NO: 1875354 - RNA, 19 nt, Artificial Sequence
  Description of Artificial Sequence: Synthetic oligonucleotide
  Antisense strand to SEQ ID NO: 1875353
uuugucaugcaccauugug

SEQ ID NO: 1875355 - RNA, 19 nt, Artificial Sequence
  Description of Artificial Sequence: Synthetic oligonucleotide
  Sense strand starting at position 2953 of SEQ ID NO: 1564388
gacaaagauuuguaucaga

SEQ ID NO: 1875356 - RNA, 19 nt, Artificial Sequence
  Description of Artificial Sequence: Synthetic oligonucleotide
  Antisense strand to SEQ ID NO: 1875355
ucugauacaaaucuuuguc

SEQ ID NO: 1875357 - RNA, 19 nt, Artificial Sequence
  Description of Artificial Sequence: Synthetic oligonucleotide
  Sense strand starting at position 3054 of SEQ ID NO: 1564388
gucuaugauggugaaaguu

SEQ ID NO: 1875358 - RNA, 19 nt, Artificial Sequence
  Description of Artificial Sequence: Synthetic oligonucleotide
  Antisense strand to SEQ ID NO: 1875357
aacuuucaccaucauagac

SEQ ID NO: 1875359 - RNA, 19 nt, Artificial Sequence
  Description of Artificial Sequence: Synthetic oligonucleotide
  Sense strand starting at position 3286 of SEQ ID NO: 1564388
auaugacagucacuaucau

SEQ ID NO: 1875360 - RNA, 19 nt, Artificial Sequence
  Description of Artificial Sequence: Synthetic oligonucleotide
  Antisense strand to SEQ ID NO: 1875359
augauagugacugucauau

SEQ ID NO: 1875361 - RNA, 19 nt, Artificial Sequence
  Description of Artificial Sequence: Synthetic oligonucleotide
  Sense strand starting at position 3346 of SEQ ID NO: 1564388
ugguuauuaaaugggcaga

SEQ ID NO: 1875362 - RNA, 19 nt, Artificial Sequence
  Description of Artificial Sequence: Synthetic oligonucleotide
  Antisense strand to SEQ ID NO: 1875361
ucugcccauuuaauaacca

SEQ ID NO: 1875363 - RNA, 19 nt, Artificial Sequence
  Description of Artificial Sequence: Synthetic oligonucleotide
  Sense strand starting at position 3347 of SEQ ID NO: 1564388
gguuauuaaaugggcagaa

SEQ ID NO: 1875364 - RNA, 19 nt, Artificial Sequence
  Description of Artificial Sequence: Synthetic oligonucleotide
  Antisense strand to SEQ ID NO: 1875363
uucugcccauuuaauaacc

SEQ ID NO: 1875365 - RNA, 19 nt, Artificial Sequence
  Description of Artificial Sequence: Synthetic oligonucleotide
  Sense strand starting at position 3348 of SEQ ID NO: 1564388
guuauuaaaugggcagaaa

SEQ ID NO: 1875366 - RNA, 19 nt, Artificial Sequence
  Description of Artificial Sequence: Synthetic oligonucleotide
  Antisense strand to SEQ ID NO: 1875365
uuucugcccauuuaauaac

SEQ ID NO: 1875367 - RNA, 19 nt, Artificial Sequence
  Description of Artificial Sequence: Synthetic oligonucleotide
  Sense strand starting at position 3771 of SEQ ID NO: 1564388
uuaucucugggcuauaaau

SEQ ID NO: 1875368 - RNA, 19 nt, Artificial Sequence
  Description of Artificial Sequence: Synthetic oligonucleotide
  Antisense strand to SEQ ID NO: 1875367
auuuauagcccagagauaa

SEQ ID NO: 1875369 - RNA, 19 nt, Artificial Sequence
  Description of Artificial Sequence: Synthetic oligonucleotide
  Sense strand starting at position 3853 of SEQ ID NO: 1564388
aagguucagggaugagagu

SEQ ID NO: 1875370 - RNA, 19 nt, Artificial Sequence
  Description of Artificial Sequence: Synthetic oligonucleotide
  Antisense strand to SEQ ID NO: 1875369
acucucaucccugaaccuu

SEQ ID NO: 1875371 - RNA, 19 nt, Artificial Sequence
  Description of Artificial Sequence: Synthetic oligonucleotide
  Sense strand starting at position 3862 of SEQ ID NO: 1564388
ggaugagagucaccauccu

SEQ ID NO: 1875372 - RNA, 19 nt, Artificial Sequence
  Description of Artificial Sequence: Synthetic oligonucleotide
  Antisense strand to SEQ ID NO: 1875371
aggauggugacucucaucc

SEQ ID NO: 1875373 - RNA, 19 nt, Artificial Sequence
  Description of Artificial Sequence: Synthetic oligonucleotide
  Sense strand starting at position 207 of SEQ ID NO: 1564390
guacaauuggauuguauga

SEQ ID NO: 1875374 - RNA, 19 nt, Artificial Sequence
  Description of Artificial Sequence: Synthetic oligonucleotide
  Antisense strand to SEQ ID NO: 1875373
ucauacaauccaauuguac

SEQ ID NO: 1875375 - RNA, 19 nt, Artificial Sequence
  Description of Artificial Sequence: Synthetic oligonucleotide
  Sense strand starting at position 212 of SEQ ID NO: 1564390
auuggauuguaugaggcaa

SEQ ID NO: 1875376 - RNA, 19 nt, Artificial Sequence
  Description of Artificial Sequence: Synthetic oligonucleotide
  Antisense strand to SEQ ID NO: 1875375
uugccucauacaauccaau

SEQ ID NO: 1875377 - RNA, 19 nt, Artificial Sequence
  Description of Artificial Sequence: Synthetic oligonucleotide
  Sense strand starting at position 596 of SEQ ID NO: 1564390
guguuucuguuauuccuua

SEQ ID NO: 1875378 - RNA, 19 nt, Artificial Sequence
  Description of Artificial Sequence: Synthetic oligonucleotide
  Antisense strand to SEQ ID NO: 1875377
uaaggaauaacagaaacac

SEQ ID NO: 1875379 - RNA, 19 nt, Artificial Sequence
  Description of Artificial Sequence: Synthetic oligonucleotide
  Sense strand starting at position 597 of SEQ ID NO: 1564390
uguuucuguuauuccuuaa

SEQ ID NO: 1875380 - RNA, 19 nt, Artificial Sequence
  Description of Artificial Sequence: Synthetic oligonucleotide
  Antisense strand to SEQ ID NO: 1875379
uuaaggaauaacagaaaca

SEQ ID NO: 1875381 - RNA, 19 nt, Artificial Sequence
  Description of Artificial Sequence: Synthetic oligonucleotide
  Sense strand starting at position 600 of SEQ ID NO: 1564390
uucuguuauuccuuaagug

SEQ ID NO: 1875382 - RNA, 19 nt, Artificial Sequence
  Description of Artificial Sequence: Synthetic oligonucleotide
  Antisense strand to SEQ ID NO: 1875381
cacuuaaggaauaacagaa

SEQ ID NO: 1875383 - RNA, 19 nt, Artificial Sequence
  Description of Artificial Sequence: Synthetic oligonucleotide
  Sense strand starting at position 1050 of SEQ ID NO: 1564390
gcgacauuaguggguguau

SEQ ID NO: 1875384 - RNA, 19 nt, Artificial Sequence
  Description of Artificial Sequence: Synthetic oligonucleotide
  Antisense strand to SEQ ID NO: 1875383
auacacccacuaaugucgc

SEQ ID NO: 1875385 - RNA, 19 nt, Artificial Sequence
  Description of Artificial Sequence: Synthetic oligonucleotide
  Sense strand starting at position 1061 of SEQ ID NO: 1564390
ggguguaucugagucuugu

SEQ ID NO: 1875386 - RNA, 19 nt, Artificial Sequence
  Description of Artificial Sequence: Synthetic oligonucleotide
  Antisense strand to SEQ ID NO: 1875385
acaagacucagauacaccc

SEQ ID NO: 1875387 - RNA, 19 nt, Artificial Sequence
  Description of Artificial Sequence: Synthetic oligonucleotide
  Sense strand starting at position 1285 of SEQ ID NO: 1564390
cuuugugucggagagaauu

SEQ ID NO: 1875388 - RNA, 19 nt, Artificial Sequence
  Description of Artificial Sequence: Synthetic oligonucleotide
  Antisense strand to SEQ ID NO: 1875387
aauucucuccgacacaaag

SEQ ID NO: 1875389 - RNA, 19 nt, Artificial Sequence
  Description of Artificial Sequence: Synthetic oligonucleotide
  Sense strand starting at position 1287 of SEQ ID NO: 1564390
uugugucggagagaauuga

SEQ ID NO: 1875390 - RNA, 19 nt, Artificial Sequence
  Description of Artificial Sequence: Synthetic oligonucleotide
  Antisense strand to SEQ ID NO: 1875389
ucaauucucuccgacacaa

SEQ ID NO: 1875391 - RNA, 19 nt, Artificial Sequence
  Description of Artificial Sequence: Synthetic oligonucleotide
  Sense strand starting at position 2319 of SEQ ID NO: 1564390
ggagucucgcccugucaau

SEQ ID NO: 1875392 - RNA, 19 nt, Artificial Sequence
  Description of Artificial Sequence: Synthetic oligonucleotide
  Antisense strand to SEQ ID NO: 1875391
auugacagggcgagacucc

SEQ ID NO: 1875393 - RNA, 19 nt, Artificial Sequence
  Description of Artificial Sequence: Synthetic oligonucleotide
  Sense strand starting at position 2453 of SEQ ID NO: 1564390
gcccuacgaauuuguugua

SEQ ID NO: 1875394 - RNA, 19 nt, Artificial Sequence
  Description of Artificial Sequence: Synthetic oligonucleotide
  Antisense strand to SEQ ID NO: 1875393
uacaacaaauucguagggc

SEQ ID NO: 1875395 - RNA, 19 nt, Artificial Sequence
  Description of Artificial Sequence: Synthetic oligonucleotide
  Sense strand starting at position 2456 of SEQ ID NO: 1564390
cuacgaauuuguuguauuu

SEQ ID NO: 1875396 - RNA, 19 nt, Artificial Sequence
  Description of Artificial Sequence: Synthetic oligonucleotide
  Antisense strand to SEQ ID NO: 1875395
aaauacaacaaauucguag

SEQ ID NO: 1875397 - RNA, 19 nt, Artificial Sequence
  Description of Artificial Sequence: Synthetic oligonucleotide
  Sense strand starting at position 2635 of SEQ ID NO: 1564390
accuuaaucuuuguuuguu

SEQ ID NO: 1875398 - RNA, 19 nt, Artificial Sequence
  Description of Artificial Sequence: Synthetic oligonucleotide
  Antisense strand to SEQ ID NO: 1875397
aacaaacaaagauuaaggu

SEQ ID NO: 1875399 - RNA, 19 nt, Artificial Sequence
  Description of Artificial Sequence: Synthetic oligonucleotide
  Sense strand starting at position 2664 of SEQ ID NO: 1564390
uugaguaucuguccauucu

SEQ ID NO: 1875400 - RNA, 19 nt, Artificial Sequence
  Description of Artificial Sequence: Synthetic oligonucleotide
  Antisense strand to SEQ ID NO: 1875399
agaauggacagauacucaa

SEQ ID NO: 1875401 - RNA, 19 nt, Artificial Sequence
  Description of Artificial Sequence: Synthetic oligonucleotide
  Sense strand starting at position 2665 of SEQ ID NO: 1564390
ugaguaucuguccauucua

SEQ ID NO: 1875402 - RNA, 19 nt, Artificial Sequence
  Description of Artificial Sequence: Synthetic oligonucleotide
  Antisense strand to SEQ ID NO: 1875401
uagaauggacagauacuca

SEQ ID NO: 1875403 - RNA, 19 nt, Artificial Sequence
  Description of Artificial Sequence: Synthetic oligonucleotide
  Sense strand starting at position 2744 of SEQ ID NO: 1564390
uuuauaugggaaugucaua

SEQ ID NO: 1875404 - RNA, 19 nt, Artificial Sequence
  Description of Artificial Sequence: Synthetic oligonucleotide
  Antisense strand to SEQ ID NO: 1875403
uaugacauucccauauaaa

SEQ ID NO: 1875405 - RNA, 19 nt, Artificial Sequence
  Description of Artificial Sequence: Synthetic oligonucleotide
  Sense strand starting at position 2826 of SEQ ID NO: 1564390
cugacaucacuuggaauau

SEQ ID NO: 1875406 - RNA, 19 nt, Artificial Sequence
  Description of Artificial Sequence: Synthetic oligonucleotide
  Antisense strand to SEQ ID NO: 1875405
auauuccaagugaugucag

SEQ ID NO: 1875407 - RNA, 19 nt, Artificial Sequence
  Description of Artificial Sequence: Synthetic oligonucleotide
  Sense strand starting at position 2827 of SEQ ID NO: 1564390
ugacaucacuuggaauaua

SEQ ID NO: 1875408 - RNA, 19 nt, Artificial Sequence
  Description of Artificial Sequence: Synthetic oligonucleotide
  Antisense strand to SEQ ID NO: 1875407
uauauuccaagugauguca

SEQ ID NO: 1875409 - RNA, 19 nt, Artificial Sequence
  Description of Artificial Sequence: Synthetic oligonucleotide
  Sense strand starting at position 2846 of SEQ ID NO: 1564390
ugaggcuacugcuuucuau

SEQ ID NO: 1875410 - RNA, 19 nt, Artificial Sequence
  Description of Artificial Sequence: Synthetic oligonucleotide
  Antisense strand to SEQ ID NO: 1875409
auagaaagcaguagccuca

SEQ ID NO: 1875411 - RNA, 19 nt, Artificial Sequence
  Description of Artificial Sequence: Synthetic oligonucleotide
  Sense strand starting at position 2853 of SEQ ID NO: 1564390
acugcuuucuaucucaguu

SEQ ID NO: 1875412 - RNA, 19 nt, Artificial Sequence
  Description of Artificial Sequence: Synthetic oligonucleotide
  Antisense strand to SEQ ID NO: 1875411
aacugagauagaaagcagu

SEQ ID NO: 1875413 - RNA, 19 nt, Artificial Sequence
  Description of Artificial Sequence: Synthetic oligonucleotide
  Sense strand starting at position 2895 of SEQ ID NO: 1564390
uucggugguuauucagaua

SEQ ID NO: 1875414 - RNA, 19 nt, Artificial Sequence
  Description of Artificial Sequence: Synthetic oligonucleotide
  Antisense strand to SEQ ID NO: 1875413
uaucugaauaaccaccgaa

SEQ ID NO: 1875415 - RNA, 19 nt, Artificial Sequence
  Description of Artificial Sequence: Synthetic oligonucleotide
  Sense strand starting at position 2983 of SEQ ID NO: 1564390
ccucaagguucucuuugua

SEQ ID NO: 1875416 - RNA, 19 nt, Artificial Sequence
  Description of Artificial Sequence: Synthetic oligonucleotide
  Antisense strand to SEQ ID NO: 1875415
uacaaagagaaccuugagg

SEQ ID NO: 1875417 - RNA, 19 nt, Artificial Sequence
  Description of Artificial Sequence: Synthetic oligonucleotide
  Sense strand starting at position 2988 of SEQ ID NO: 1564390
agguucucuuuguauuuau

SEQ ID NO: 1875418 - RNA, 19 nt, Artificial Sequence
  Description of Artificial Sequence: Synthetic oligonucleotide
  Antisense strand to SEQ ID NO: 1875417
auaaauacaaagagaaccu

SEQ ID NO: 1875419 - RNA, 19 nt, Artificial Sequence
  Description of Artificial Sequence: Synthetic oligonucleotide
  Sense strand starting at position 3132 of SEQ ID NO: 1564390
guuaaauaguauccaugag

SEQ ID NO: 1875420 - RNA, 19 nt, Artificial Sequence
  Description of Artificial Sequence: Synthetic oligonucleotide
  Antisense strand to SEQ ID NO: 1875419
cucauggauacuauuuaac

SEQ ID NO: 1875421 - RNA, 19 nt, Artificial Sequence
  Description of Artificial Sequence: Synthetic oligonucleotide
  Sense strand starting at position 3283 of SEQ ID NO: 1564390
acccgaaggguguguauca

SEQ ID NO: 1875422 - RNA, 19 nt, Artificial Sequence
  Description of Artificial Sequence: Synthetic oligonucleotide
  Antisense strand to SEQ ID NO: 1875421
ugauacacacccuucgggu

SEQ ID NO: 1875423 - RNA, 19 nt, Artificial Sequence
  Description of Artificial Sequence: Synthetic oligonucleotide
  Sense strand starting at position 3339 of SEQ ID NO: 1564390
ugaugcaucccagagcuca

SEQ ID NO: 1875424 - RNA, 19 nt, Artificial Sequence
  Description of Artificial Sequence: Synthetic oligonucleotide
  Antisense strand to SEQ ID NO: 1875423
ugagcucugggaugcauca

SEQ ID NO: 1875425 - RNA, 19 nt, Artificial Sequence
  Description of Artificial Sequence: Synthetic oligonucleotide
  Sense strand starting at position 3410 of SEQ ID NO: 1564390
cucuaauugugagauauca

SEQ ID NO: 1875426 - RNA, 19 nt, Artificial Sequence
  Description of Artificial Sequence: Synthetic oligonucleotide
  Antisense strand to SEQ ID NO: 1875425
ugauaucucacaauuagag

SEQ ID NO: 1875427 - RNA, 19 nt, Artificial Sequence
  Description of Artificial Sequence: Synthetic oligonucleotide
  Sense strand starting at position 3532 of SEQ ID NO: 1564390
gguggaaugugagugguuu

SEQ ID NO: 1875428 - RNA, 19 nt, Artificial Sequence
  Description of Artificial Sequence: Synthetic oligonucleotide
  Antisense strand to SEQ ID NO: 1875427
aaaccacucacauuccacc

SEQ ID NO: 1875429 - RNA, 19 nt, Artificial Sequence
  Description of Artificial Sequence: Synthetic oligonucleotide
  Sense strand starting at position 3533 of SEQ ID NO: 1564390
guggaaugugagugguuua

SEQ ID NO: 1875430 - RNA, 19 nt, Artificial Sequence
  Description of Artificial Sequence: Synthetic oligonucleotide
  Antisense strand to SEQ ID NO: 1875429
uaaaccacucacauuccac

SEQ ID NO: 1875431 - RNA, 19 nt, Artificial Sequence
  Description of Artificial Sequence: Synthetic oligonucleotide
  Sense strand starting at position 3536 of SEQ ID NO: 1564390
gaaugugagugguuuaccu

SEQ ID NO: 1875432 - RNA, 19 nt, Artificial Sequence
  Description of Artificial Sequence: Synthetic oligonucleotide
  Antisense strand to SEQ ID NO: 1875431
agguaaaccacucacauuc

SEQ ID NO: 1875433 - RNA, 19 nt, Artificial Sequence
  Description of Artificial Sequence: Synthetic oligonucleotide
  Sense strand starting at position 3560 of SEQ ID NO: 1564390
gaggcugugcuuuacaguu

SEQ ID NO: 1875434 - RNA, 19 nt, Artificial Sequence
  Description of Artificial Sequence: Synthetic oligonucleotide
  Antisense strand to SEQ ID NO: 1875433
aacuguaaagcacagccuc

SEQ ID NO: 1875435 - RNA, 19 nt, Artificial Sequence
  Description of Artificial Sequence: Synthetic oligonucleotide
  Sense strand starting at position 3568 of SEQ ID NO: 1564390
gcuuuacaguuucuaagga

SEQ ID NO: 1875436 - RNA, 19 nt, Artificial Sequence
  Description of Artificial Sequence: Synthetic oligonucleotide
  Antisense strand to SEQ ID NO: 1875435
uccuuagaaacuguaaagc

SEQ ID NO: 1875437 - RNA, 19 nt, Artificial Sequence
  Description of Artificial Sequence: Synthetic oligonucleotide
  Sense strand starting at position 3572 of SEQ ID NO: 1564390
uacaguuucuaaggacaga

SEQ ID NO: 1875438 - RNA, 19 nt, Artificial Sequence
  Description of Artificial Sequence: Synthetic oligonucleotide
  Antisense strand to SEQ ID NO: 1875437
ucuguccuuagaaacugua

SEQ ID NO: 1875439 - RNA, 19 nt, Artificial Sequence
  Description of Artificial Sequence: Synthetic oligonucleotide
  Sense strand starting at position 3591 of SEQ ID NO: 1564390
gaaguaaagaaaugugguu

SEQ ID NO: 1875440 - RNA, 19 nt, Artificial Sequence
  Description of Artificial Sequence: Synthetic oligonucleotide
  Antisense strand to SEQ ID NO: 1875439
aaccacauuucuuuacuuc

SEQ ID NO: 1875441 - RNA, 19 nt, Artificial Sequence
  Description of Artificial Sequence: Synthetic oligonucleotide
  Sense strand starting at position 3596 of SEQ ID NO: 1564390
aaagaaaugugguuagugu

SEQ ID NO: 1875442 - RNA, 19 nt, Artificial Sequence
  Description of Artificial Sequence: Synthetic oligonucleotide
  Antisense strand to SEQ ID NO: 1875441
acacuaaccacauuucuuu

SEQ ID NO: 1875443 - RNA, 19 nt, Artificial Sequence
  Description of Artificial Sequence: Synthetic oligonucleotide
  Sense strand starting at position 3597 of SEQ ID NO: 1564390
aagaaaugugguuaguguu

SEQ ID NO: 1875444 - RNA, 19 nt, Artificial Sequence
  Description of Artificial Sequence: Synthetic oligonucleotide
  Antisense strand to SEQ ID NO: 1875443
aacacuaaccacauuucuu

SEQ ID NO: 1875445 - RNA, 19 nt, Artificial Sequence
  Description of Artificial Sequence: Synthetic oligonucleotide
  Sense strand starting at position 3603 of SEQ ID NO: 1564390
ugugguuaguguucuugga

SEQ ID NO: 1875446 - RNA, 19 nt, Artificial Sequence
  Description of Artificial Sequence: Synthetic oligonucleotide
  Antisense strand to SEQ ID NO: 1875445
uccaagaacacuaaccaca

SEQ ID NO: 1875447 - RNA, 19 nt, Artificial Sequence
  Description of Artificial Sequence: Synthetic oligonucleotide
  Sense strand starting at position 3605 of SEQ ID NO: 1564390
ugguuaguguucuuggagu

SEQ ID NO: 1875448 - RNA, 19 nt, Artificial Sequence
  Description of Artificial Sequence: Synthetic oligonucleotide
  Antisense strand to SEQ ID NO: 1875447
acuccaagaacacuaacca

SEQ ID NO: 1875449 - RNA, 19 nt, Artificial Sequence
  Description of Artificial Sequence: Synthetic oligonucleotide
  Sense strand starting at position 3607 of SEQ ID NO: 1564390
guuaguguucuuggaguag

SEQ ID NO: 1875450 - RNA, 19 nt, Artificial Sequence
  Description of Artificial Sequence: Synthetic oligonucleotide
  Antisense strand to SEQ ID NO: 1875449
cuacuccaagaacacuaac

SEQ ID NO: 1875451 - RNA, 19 nt, Artificial Sequence
  Description of Artificial Sequence: Synthetic oligonucleotide
  Sense strand starting at position 3611 of SEQ ID NO: 1564390
guguucuuggaguaggugu

SEQ ID NO: 1875452 - RNA, 19 nt, Artificial Sequence
  Description of Artificial Sequence: Synthetic oligonucleotide
  Antisense strand to SEQ ID NO: 1875451
acaccuacuccaagaacac

SEQ ID NO: 1875453 - RNA, 19 nt, Artificial Sequence
  Description of Artificial Sequence: Synthetic oligonucleotide
  Sense strand starting at position 2454 of SEQ ID NO: 1564391
gcccuacgaauuuguugua

SEQ ID NO: 1875454 - RNA, 19 nt, Artificial Sequence
  Description of Artificial Sequence: Synthetic oligonucleotide
  Antisense strand to SEQ ID NO: 1875453
uacaacaaauucguagggc

SEQ ID NO: 1875455 - RNA, 19 nt, Artificial Sequence
  Description of Artificial Sequence: Synthetic oligonucleotide
  Sense strand starting at position 2457 of SEQ ID NO: 1564391
cuacgaauuuguuguauuu

SEQ ID NO: 1875456 - RNA, 19 nt, Artificial Sequence
  Description of Artificial Sequence: Synthetic oligonucleotide
  Antisense strand to SEQ ID NO: 1875455
aaauacaacaaauucguag

SEQ ID NO: 1875457 - RNA, 19 nt, Artificial Sequence
  Description of Artificial Sequence: Synthetic oligonucleotide
  Sense strand starting at position 2636 of SEQ ID NO: 1564391
accuuaaucuuuguuuguu

SEQ ID NO: 1875458 - RNA, 19 nt, Artificial Sequence
  Description of Artificial Sequence: Synthetic oligonucleotide
  Antisense strand to SEQ ID NO: 1875457
aacaaacaaagauuaaggu

SEQ ID NO: 1875459 - RNA, 19 nt, Artificial Sequence
  Description of Artificial Sequence: Synthetic oligonucleotide
  Sense strand starting at position 2665 of SEQ ID NO: 1564391
uugaguaucuguccauucu

SEQ ID NO: 1875460 - RNA, 19 nt, Artificial Sequence
  Description of Artificial Sequence: Synthetic oligonucleotide
  Antisense strand to SEQ ID NO: 1875459
agaauggacagauacucaa

SEQ ID NO: 1875461 - RNA, 19 nt, Artificial Sequence
  Description of Artificial Sequence: Synthetic oligonucleotide
  Sense strand starting at position 2666 of SEQ ID NO: 1564391
ugaguaucuguccauucua

SEQ ID NO: 1875462 - RNA, 19 nt, Artificial Sequence
  Description of Artificial Sequence: Synthetic oligonucleotide
  Antisense strand to SEQ ID NO: 1875461
uagaauggacagauacuca

SEQ ID NO: 1875463 - RNA, 19 nt, Artificial Sequence
  Description of Artificial Sequence: Synthetic oligonucleotide
  Sense strand starting at position 2745 of SEQ ID NO: 1564391
uuuauaugggaaugucaua

SEQ ID NO: 1875464 - RNA, 19 nt, Artificial Sequence
  Description of Artificial Sequence: Synthetic oligonucleotide
  Antisense strand to SEQ ID NO: 1875463
uaugacauucccauauaaa

SEQ ID NO: 1875465 - RNA, 19 nt, Artificial Sequence
  Description of Artificial Sequence: Synthetic oligonucleotide
  Sense strand starting at position 2828 of SEQ ID NO: 1564391
ugacaucacuuggaauaua

SEQ ID NO: 1875466 - RNA, 19 nt, Artificial Sequence
  Description of Artificial Sequence: Synthetic oligonucleotide
  Antisense strand to SEQ ID NO: 1875465
uauauuccaagugauguca

SEQ ID NO: 1875467 - RNA, 19 nt, Artificial Sequence
  Description of Artificial Sequence: Synthetic oligonucleotide
  Sense strand starting at position 2854 of SEQ ID NO: 1564391
acugcuuucuaucucaguu

SEQ ID NO: 1875468 - RNA, 19 nt, Artificial Sequence
  Description of Artificial Sequence: Synthetic oligonucleotide
  Antisense strand to SEQ ID NO: 1875467
aacugagauagaaagcagu

SEQ ID NO: 1875469 - RNA, 19 nt, Artificial Sequence
  Description of Artificial Sequence: Synthetic oligonucleotide
  Sense strand starting at position 2896 of SEQ ID NO: 1564391
uucggugguuauucagaua

SEQ ID NO: 1875470 - RNA, 19 nt, Artificial Sequence
  Description of Artificial Sequence: Synthetic oligonucleotide
  Antisense strand to SEQ ID NO: 1875469
uaucugaauaaccaccgaa

SEQ ID NO: 1875471 - RNA, 19 nt, Artificial Sequence
  Description of Artificial Sequence: Synthetic oligonucleotide
  Sense strand starting at position 2899 of SEQ ID NO: 1564391
ggugguuauucagauaagu

SEQ ID NO: 1875472 - RNA, 19 nt, Artificial Sequence
  Description of Artificial Sequence: Synthetic oligonucleotide
  Antisense strand to SEQ ID NO: 1875471
acuuaucugaauaaccacc

SEQ ID NO: 1875473 - RNA, 19 nt, Artificial Sequence
  Description of Artificial Sequence: Synthetic oligonucleotide
  Sense strand starting at position 2984 of SEQ ID NO: 1564391
ccucaagguucucuuugua

SEQ ID NO: 1875474 - RNA, 19 nt, Artificial Sequence
  Description of Artificial Sequence: Synthetic oligonucleotide
  Antisense strand to SEQ ID NO: 1875473
uacaaagagaaccuugagg

SEQ ID NO: 1875475 - RNA, 19 nt, Artificial Sequence
  Description of Artificial Sequence: Synthetic oligonucleotide
  Sense strand starting at position 3133 of SEQ ID NO: 1564391
guuaaauaguauccaugag

SEQ ID NO: 1875476 - RNA, 19 nt, Artificial Sequence
  Description of Artificial Sequence: Synthetic oligonucleotide
  Antisense strand to SEQ ID NO: 1875475
cucauggauacuauuuaac

SEQ ID NO: 1875477 - RNA, 19 nt, Artificial Sequence
  Description of Artificial Sequence: Synthetic oligonucleotide
  Sense strand starting at position 3284 of SEQ ID NO: 1564391
acccgaaggguguguauca

SEQ ID NO: 1875478 - RNA, 19 nt, Artificial Sequence
  Description of Artificial Sequence: Synthetic oligonucleotide
  Antisense strand to SEQ ID NO: 1875477
ugauacacacccuucgggu

SEQ ID NO: 1875479 - RNA, 19 nt, Artificial Sequence
  Description of Artificial Sequence: Synthetic oligonucleotide
  Sense strand starting at position 3340 of SEQ ID NO: 1564391
ugaugcaucccagagcuca

SEQ ID NO: 1875480 - RNA, 19 nt, Artificial Sequence
  Description of Artificial Sequence: Synthetic oligonucleotide
  Antisense strand to SEQ ID NO: 1875479
ugagcucugggaugcauca

SEQ ID NO: 1875481 - RNA, 19 nt, Artificial Sequence
  Description of Artificial Sequence: Synthetic oligonucleotide
  Sense strand starting at position 3411 of SEQ ID NO: 1564391
cucuaauugugagauauca

SEQ ID NO: 1875482 - RNA, 19 nt, Artificial Sequence
  Description of Artificial Sequence: Synthetic oligonucleotide
  Antisense strand to SEQ ID NO: 1875481
ugauaucucacaauuagag

SEQ ID NO: 1875483 - RNA, 19 nt, Artificial Sequence
  Description of Artificial Sequence: Synthetic oligonucleotide
  Sense strand starting at position 3533 of SEQ ID NO: 1564391
gguggaaugugagugguuu

SEQ ID NO: 1875484 - RNA, 19 nt, Artificial Sequence
  Description of Artificial Sequence: Synthetic oligonucleotide
  Antisense strand to SEQ ID NO: 1875483
aaaccacucacauuccacc

SEQ ID NO: 1875485 - RNA, 19 nt, Artificial Sequence
  Description of Artificial Sequence: Synthetic oligonucleotide
  Sense strand starting at position 3534 of SEQ ID NO: 1564391
guggaaugugagugguuua

SEQ ID NO: 1875486 - RNA, 19 nt, Artificial Sequence
  Description of Artificial Sequence: Synthetic oligonucleotide
  Antisense strand to SEQ ID NO: 1875485
uaaaccacucacauuccac

SEQ ID NO: 1875487 - RNA, 19 nt, Artificial Sequence
  Description of Artificial Sequence: Synthetic oligonucleotide
  Sense strand starting at position 3537 of SEQ ID NO: 1564391
gaaugugagugguuuaccu

SEQ ID NO: 1875488 - RNA, 19 nt, Artificial Sequence
  Description of Artificial Sequence: Synthetic oligonucleotide
  Antisense strand to SEQ ID NO: 1875487
agguaaaccacucacauuc

SEQ ID NO: 1875489 - RNA, 19 nt, Artificial Sequence
  Description of Artificial Sequence: Synthetic oligonucleotide
  Sense strand starting at position 3561 of SEQ ID NO: 1564391
gaggcugugcuuuacaguu

SEQ ID NO: 1875490 - RNA, 19 nt, Artificial Sequence
  Description of Artificial Sequence: Synthetic oligonucleotide
  Antisense strand to SEQ ID NO: 1875489
aacuguaaagcacagccuc

SEQ ID NO: 1875491 - RNA, 19 nt, Artificial Sequence
  Description of Artificial Sequence: Synthetic oligonucleotide
  Sense strand starting at position 3569 of SEQ ID NO: 1564391
gcuuuacaguuucuaagga

SEQ ID NO: 1875492 - RNA, 19 nt, Artificial Sequence
  Description of Artificial Sequence: Synthetic oligonucleotide
  Antisense strand to SEQ ID NO: 1875491
uccuuagaaacuguaaagc

SEQ ID NO: 1875493 - RNA, 19 nt, Artificial Sequence
  Description of Artificial Sequence: Synthetic oligonucleotide
  Sense strand starting at position 3573 of SEQ ID NO: 1564391
uacaguuucuaaggacaga

SEQ ID NO: 1875494 - RNA, 19 nt, Artificial Sequence
  Description of Artificial Sequence: Synthetic oligonucleotide
  Antisense strand to SEQ ID NO: 1875493
ucuguccuuagaaacugua

SEQ ID NO: 1875495 - RNA, 19 nt, Artificial Sequence
  Description of Artificial Sequence: Synthetic oligonucleotide
  Sense strand starting at position 3592 of SEQ ID NO: 1564391
gaaguaaagaaaugugguu

SEQ ID NO: 1875496 - RNA, 19 nt, Artificial Sequence
  Description of Artificial Sequence: Synthetic oligonucleotide
  Antisense strand to SEQ ID NO: 1875495
aaccacauuucuuuacuuc

SEQ ID NO: 1875497 - RNA, 19 nt, Artificial Sequence
  Description of Artificial Sequence: Synthetic oligonucleotide
  Sense strand starting at position 3598 of SEQ ID NO: 1564391
aagaaaugugguuaguguu

SEQ ID NO: 1875498 - RNA, 19 nt, Artificial Sequence
  Description of Artificial Sequence: Synthetic oligonucleotide
  Antisense strand to SEQ ID NO: 1875497
aacacuaaccacauuucuu

SEQ ID NO: 1875499 - RNA, 19 nt, Artificial Sequence
  Description of Artificial Sequence: Synthetic oligonucleotide
  Sense strand starting at position 3601 of SEQ ID NO: 1564391
aaaugugguuaguguucuu

SEQ ID NO: 1875500 - RNA, 19 nt, Artificial Sequence
  Description of Artificial Sequence: Synthetic oligonucleotide
  Antisense strand to SEQ ID NO: 1875499
aagaacacuaaccacauuu

SEQ ID NO: 1875501 - RNA, 19 nt, Artificial Sequence
  Description of Artificial Sequence: Synthetic oligonucleotide
  Sense strand starting at position 3604 of SEQ ID NO: 1564391
ugugguuaguguucuugga

SEQ ID NO: 1875502 - RNA, 19 nt, Artificial Sequence
  Description of Artificial Sequence: Synthetic oligonucleotide
  Antisense strand to SEQ ID NO: 1875501
uccaagaacacuaaccaca

SEQ ID NO: 1875503 - RNA, 19 nt, Artificial Sequence
  Description of Artificial Sequence: Synthetic oligonucleotide
  Sense strand starting at position 3606 of SEQ ID NO: 1564391
ugguuaguguucuuggagu

SEQ ID NO: 1875504 - RNA, 19 nt, Artificial Sequence
  Description of Artificial Sequence: Synthetic oligonucleotide
  Antisense strand to SEQ ID NO: 1875503
acuccaagaacacuaacca

SEQ ID NO: 1875505 - RNA, 19 nt, Artificial Sequence
  Description of Artificial Sequence: Synthetic oligonucleotide
  Sense strand starting at position 3608 of SEQ ID NO: 1564391
guuaguguucuuggaguag

SEQ ID NO: 1875506 - RNA, 19 nt, Artificial Sequence
  Description of Artificial Sequence: Synthetic oligonucleotide
  Antisense strand to SEQ ID NO: 1875505
cuacuccaagaacacuaac

SEQ ID NO: 1875507 - RNA, 19 nt, Artificial Sequence
  Description of Artificial Sequence: Synthetic oligonucleotide
  Sense strand starting at position 3612 of SEQ ID NO: 1564391
guguucuuggaguaggugu

SEQ ID NO: 1875508 - RNA, 19 nt, Artificial Sequence
  Description of Artificial Sequence: Synthetic oligonucleotide
  Antisense strand to SEQ ID NO: 1875507
acaccuacuccaagaacac

SEQ ID NO: 1875509 - RNA, 19 nt, Artificial Sequence
  Description of Artificial Sequence: Synthetic oligonucleotide
  Sense strand starting at position 3958 of SEQ ID NO: 1564391
ugcaccuauuccgaaggau

SEQ ID NO: 1875510 - RNA, 19 nt, Artificial Sequence
  Description of Artificial Sequence: Synthetic oligonucleotide
  Antisense strand to SEQ ID NO: 1875509
auccuucggaauaggugca

SEQ ID NO: 1875511 - RNA, 19 nt, Artificial Sequence
  Description of Artificial Sequence: Synthetic oligonucleotide
  Sense strand starting at position 207 of SEQ ID NO: 1564392
guacaauuggauuguauga

SEQ ID NO: 1875512 - RNA, 19 nt, Artificial Sequence
  Description of Artificial Sequence: Synthetic oligonucleotide
  Antisense strand to SEQ ID NO: 1875511
ucauacaauccaauuguac

SEQ ID NO: 1875513 - RNA, 19 nt, Artificial Sequence
  Description of Artificial Sequence: Synthetic oligonucleotide
  Sense strand starting at position 212 of SEQ ID NO: 1564392
auuggauuguaugaggcaa

SEQ ID NO: 1875514 - RNA, 19 nt, Artificial Sequence
  Description of Artificial Sequence: Synthetic oligonucleotide
  Antisense strand to SEQ ID NO: 1875513
uugccucauacaauccaau

SEQ ID NO: 1875515 - RNA, 19 nt, Artificial Sequence
  Description of Artificial Sequence: Synthetic oligonucleotide
  Sense strand starting at position 596 of SEQ ID NO: 1564392
guguuucuguuauuccuua

SEQ ID NO: 1875516 - RNA, 19 nt, Artificial Sequence
  Description of Artificial Sequence: Synthetic oligonucleotide
  Antisense strand to SEQ ID NO: 1875515
uaaggaauaacagaaacac

SEQ ID NO: 1875517 - RNA, 19 nt, Artificial Sequence
  Description of Artificial Sequence: Synthetic oligonucleotide
  Sense strand starting at position 597 of SEQ ID NO: 1564392
uguuucuguuauuccuuaa

SEQ ID NO: 1875518 - RNA, 19 nt, Artificial Sequence
  Description of Artificial Sequence: Synthetic oligonucleotide
  Antisense strand to SEQ ID NO: 1875517
uuaaggaauaacagaaaca

SEQ ID NO: 1875519 - RNA, 19 nt, Artificial Sequence
  Description of Artificial Sequence: Synthetic oligonucleotide
  Sense strand starting at position 600 of SEQ ID NO: 1564392
uucuguuauuccuuaagug

SEQ ID NO: 1875520 - RNA, 19 nt, Artificial Sequence
  Description of Artificial Sequence: Synthetic oligonucleotide
  Antisense strand to SEQ ID NO: 1875519
cacuuaaggaauaacagaa

SEQ ID NO: 1875521 - RNA, 19 nt, Artificial Sequence
  Description of Artificial Sequence: Synthetic oligonucleotide
  Sense strand starting at position 1050 of SEQ ID NO: 1564392
gcgacauuaguggguguau

SEQ ID NO: 1875522 - RNA, 19 nt, Artificial Sequence
  Description of Artificial Sequence: Synthetic oligonucleotide
  Antisense strand to SEQ ID NO: 1875521
auacacccacuaaugucgc

SEQ ID NO: 1875523 - RNA, 19 nt, Artificial Sequence
  Description of Artificial Sequence: Synthetic oligonucleotide
  Sense strand starting at position 1061 of SEQ ID NO: 1564392
ggguguaucugagucuugu

SEQ ID NO: 1875524 - RNA, 19 nt, Artificial Sequence
  Description of Artificial Sequence: Synthetic oligonucleotide
  Antisense strand to SEQ ID NO: 1875523
acaagacucagauacaccc

SEQ ID NO: 1875525 - RNA, 19 nt, Artificial Sequence
  Description of Artificial Sequence: Synthetic oligonucleotide
  Sense strand starting at position 1285 of SEQ ID NO: 1564392
cuuugugucggagagaauu

SEQ ID NO: 1875526 - RNA, 19 nt, Artificial Sequence
  Description of Artificial Sequence: Synthetic oligonucleotide
  Antisense strand to SEQ ID NO: 1875525
aauucucuccgacacaaag

SEQ ID NO: 1875527 - RNA, 19 nt, Artificial Sequence
  Description of Artificial Sequence: Synthetic oligonucleotide
  Sense strand starting at position 1287 of SEQ ID NO: 1564392
uugugucggagagaauuga

SEQ ID NO: 1875528 - RNA, 19 nt, Artificial Sequence
  Description of Artificial Sequence: Synthetic oligonucleotide
  Antisense strand to SEQ ID NO: 1875527
ucaauucucuccgacacaa

SEQ ID NO: 1875529 - RNA, 19 nt, Artificial Sequence
  Description of Artificial Sequence: Synthetic oligonucleotide
  Sense strand starting at position 2319 of SEQ ID NO: 1564392
ggagucucgcccugucaau

SEQ ID NO: 1875530 - RNA, 19 nt, Artificial Sequence
  Description of Artificial Sequence: Synthetic oligonucleotide
  Antisense strand to SEQ ID NO: 1875529
auugacagggcgagacucc

SEQ ID NO: 1875531 - RNA, 19 nt, Artificial Sequence
  Description of Artificial Sequence: Synthetic oligonucleotide
  Sense strand starting at position 2453 of SEQ ID NO: 1564392
gcccuacgaauuuguugua

SEQ ID NO: 1875532 - RNA, 19 nt, Artificial Sequence
  Description of Artificial Sequence: Synthetic oligonucleotide
  Antisense strand to SEQ ID NO: 1875531
uacaacaaauucguagggc

SEQ ID NO: 1875533 - RNA, 19 nt, Artificial Sequence
  Description of Artificial Sequence: Synthetic oligonucleotide
  Sense strand starting at position 2456 of SEQ ID NO: 1564392
cuacgaauuuguuguauuu

SEQ ID NO: 1875534 - RNA, 19 nt, Artificial Sequence
  Description of Artificial Sequence: Synthetic oligonucleotide
  Antisense strand to SEQ ID NO: 1875533
aaauacaacaaauucguag

SEQ ID NO: 1875535 - RNA, 19 nt, Artificial Sequence
  Description of Artificial Sequence: Synthetic oligonucleotide
  Sense strand starting at position 2635 of SEQ ID NO: 1564392
accuuaaucuuuguuuguu

SEQ ID NO: 1875536 - RNA, 19 nt, Artificial Sequence
  Description of Artificial Sequence: Synthetic oligonucleotide
  Antisense strand to SEQ ID NO: 1875535
aacaaacaaagauuaaggu

SEQ ID NO: 1875537 - RNA, 19 nt, Artificial Sequence
  Description of Artificial Sequence: Synthetic oligonucleotide
  Sense strand starting at position 2664 of SEQ ID NO: 1564392
uugaguaucuguccauucu

SEQ ID NO: 1875538 - RNA, 19 nt, Artificial Sequence
  Description of Artificial Sequence: Synthetic oligonucleotide
  Antisense strand to SEQ ID NO: 1875537
agaauggacagauacucaa

SEQ ID NO: 1875539 - RNA, 19 nt, Artificial Sequence
  Description of Artificial Sequence: Synthetic oligonucleotide
  Sense strand starting at position 2665 of SEQ ID NO: 1564392
ugaguaucuguccauucua

SEQ ID NO: 1875540 - RNA, 19 nt, Artificial Sequence
  Description of Artificial Sequence: Synthetic oligonucleotide
  Antisense strand to SEQ ID NO: 1875539
uagaauggacagauacuca

SEQ ID NO: 1875541 - RNA, 19 nt, Artificial Sequence
  Description of Artificial Sequence: Synthetic oligonucleotide
  Sense strand starting at position 2744 of SEQ ID NO: 1564392
uuuauaugggaaugucaua

SEQ ID NO: 1875542 - RNA, 19 nt, Artificial Sequence
  Description of Artificial Sequence: Synthetic oligonucleotide
  Antisense strand to SEQ ID NO: 1875541
uaugacauucccauauaaa

SEQ ID NO: 1875543 - RNA, 19 nt, Artificial Sequence
  Description of Artificial Sequence: Synthetic oligonucleotide
  Sense strand starting at position 2826 of SEQ ID NO: 1564392
cugacaucacuuggaauau

SEQ ID NO: 1875544 - RNA, 19 nt, Artificial Sequence
  Description of Artificial Sequence: Synthetic oligonucleotide
  Antisense strand to SEQ ID NO: 1875543
auauuccaagugaugucag

SEQ ID NO: 1875545 - RNA, 19 nt, Artificial Sequence
  Description of Artificial Sequence: Synthetic oligonucleotide
  Sense strand starting at position 2827 of SEQ ID NO: 1564392
ugacaucacuuggaauaua

SEQ ID NO: 1875546 - RNA, 19 nt, Artificial Sequence
  Description of Artificial Sequence: Synthetic oligonucleotide
  Antisense strand to SEQ ID NO: 1875545
uauauuccaagugauguca

SEQ ID NO: 1875547 - RNA, 19 nt, Artificial Sequence
  Description of Artificial Sequence: Synthetic oligonucleotide
  Sense strand starting at position 2846 of SEQ ID NO: 1564392
ugaggcuacugcuuucuau

SEQ ID NO: 1875548 - RNA, 19 nt, Artificial Sequence
  Description of Artificial Sequence: Synthetic oligonucleotide
  Antisense strand to SEQ ID NO: 1875547
auagaaagcaguagccuca

SEQ ID NO: 1875549 - RNA, 19 nt, Artificial Sequence
  Description of Artificial Sequence: Synthetic oligonucleotide
  Sense strand starting at position 2853 of SEQ ID NO: 1564392
acugcuuucuaucucaguu

SEQ ID NO: 1875550 - RNA, 19 nt, Artificial Sequence
  Description of Artificial Sequence: Synthetic oligonucleotide
  Antisense strand to SEQ ID NO: 1875549
aacugagauagaaagcagu

SEQ ID NO: 1875551 - RNA, 19 nt, Artificial Sequence
  Description of Artificial Sequence: Synthetic oligonucleotide
  Sense strand starting at position 2895 of SEQ ID NO: 1564392
uucggugguuauucagaua

SEQ ID NO: 1875552 - RNA, 19 nt, Artificial Sequence
  Description of Artificial Sequence: Synthetic oligonucleotide
  Antisense strand to SEQ ID NO: 1875551
uaucugaauaaccaccgaa

SEQ ID NO: 1875553 - RNA, 19 nt, Artificial Sequence
  Description of Artificial Sequence: Synthetic oligonucleotide
  Sense strand starting at position 2983 of SEQ ID NO: 1564392
ccucaagguucucuuugua

SEQ ID NO: 1875554 - RNA, 19 nt, Artificial Sequence
  Description of Artificial Sequence: Synthetic oligonucleotide
  Antisense strand to SEQ ID NO: 1875553
uacaaagagaaccuugagg

SEQ ID NO: 1875555 - RNA, 19 nt, Artificial Sequence
  Description of Artificial Sequence: Synthetic oligonucleotide
  Sense strand starting at position 2988 of SEQ ID NO: 1564392
agguucucuuuguauuuau

SEQ ID NO: 1875556 - RNA, 19 nt, Artificial Sequence
  Description of Artificial Sequence: Synthetic oligonucleotide
  Antisense strand to SEQ ID NO: 1875555
auaaauacaaagagaaccu

SEQ ID NO: 1875557 - RNA, 19 nt, Artificial Sequence
  Description of Artificial Sequence: Synthetic oligonucleotide
  Sense strand starting at position 3132 of SEQ ID NO: 1564392
guuaaauaguauccaugag

SEQ ID NO: 1875558 - RNA, 19 nt, Artificial Sequence
  Description of Artificial Sequence: Synthetic oligonucleotide
  Antisense strand to SEQ ID NO: 1875557
cucauggauacuauuuaac

SEQ ID NO: 1875559 - RNA, 19 nt, Artificial Sequence
  Description of Artificial Sequence: Synthetic oligonucleotide
  Sense strand starting at position 3283 of SEQ ID NO: 1564392
acccgaaggguguguauca

SEQ ID NO: 1875560 - RNA, 19 nt, Artificial Sequence
  Description of Artificial Sequence: Synthetic oligonucleotide
  Antisense strand to SEQ ID NO: 1875559
ugauacacacccuucgggu

SEQ ID NO: 1875561 - RNA, 19 nt, Artificial Sequence
  Description of Artificial Sequence: Synthetic oligonucleotide
  Sense strand starting at position 3339 of SEQ ID NO: 1564392
ugaugcaucccagagcuca

SEQ ID NO: 1875562 - RNA, 19 nt, Artificial Sequence
  Description of Artificial Sequence: Synthetic oligonucleotide
  Antisense strand to SEQ ID NO: 1875561
ugagcucugggaugcauca

SEQ ID NO: 1875563 - RNA, 19 nt, Artificial Sequence
  Description of Artificial Sequence: Synthetic oligonucleotide
  Sense strand starting at position 3410 of SEQ ID NO: 1564392
cucuaauugugagauauca

SEQ ID NO: 1875564 - RNA, 19 nt, Artificial Sequence
  Description of Artificial Sequence: Synthetic oligonucleotide
  Antisense strand to SEQ ID NO: 1875563
ugauaucucacaauuagag

SEQ ID NO: 1875565 - RNA, 19 nt, Artificial Sequence
  Description of Artificial Sequence: Synthetic oligonucleotide
  Sense strand starting at position 3532 of SEQ ID NO: 1564392
gguggaaugugagugguuu

SEQ ID NO: 1875566 - RNA, 19 nt, Artificial Sequence
  Description of Artificial Sequence: Synthetic oligonucleotide
  Antisense strand to SEQ ID NO: 1875565
aaaccacucacauuccacc

SEQ ID NO: 1875567 - RNA, 19 nt, Artificial Sequence
  Description of Artificial Sequence: Synthetic oligonucleotide
  Sense strand starting at position 3533 of SEQ ID NO: 1564392
guggaaugugagugguuua

SEQ ID NO: 1875568 - RNA, 19 nt, Artificial Sequence
  Description of Artificial Sequence: Synthetic oligonucleotide
  Antisense strand to SEQ ID NO: 1875567
uaaaccacucacauuccac

SEQ ID NO: 1875569 - RNA, 19 nt, Artificial Sequence
  Description of Artificial Sequence: Synthetic oligonucleotide
  Sense strand starting at position 3536 of SEQ ID NO: 1564392
gaaugugagugguuuaccu

SEQ ID NO: 1875570 - RNA, 19 nt, Artificial Sequence
  Description of Artificial Sequence: Synthetic oligonucleotide
  Antisense strand to SEQ ID NO: 1875569
agguaaaccacucacauuc

SEQ ID NO: 1875571 - RNA, 19 nt, Artificial Sequence
  Description of Artificial Sequence: Synthetic oligonucleotide
  Sense strand starting at position 3560 of SEQ ID NO: 1564392
gaggcugugcuuuacaguu

SEQ ID NO: 1875572 - RNA, 19 nt, Artificial Sequence
  Description of Artificial Sequence: Synthetic oligonucleotide
  Antisense strand to SEQ ID NO: 1875571
aacuguaaagcacagccuc

SEQ ID NO: 1875573 - RNA, 19 nt, Artificial Sequence
  Description of Artificial Sequence: Synthetic oligonucleotide
  Sense strand starting at position 3568 of SEQ ID NO: 1564392
gcuuuacaguuucuaagga

SEQ ID NO: 1875574 - RNA, 19 nt, Artificial Sequence
  Description of Artificial Sequence: Synthetic oligonucleotide
  Antisense strand to SEQ ID NO: 1875573
uccuuagaaacuguaaagc

SEQ ID NO: 1875575 - RNA, 19 nt, Artificial Sequence
  Description of Artificial Sequence: Synthetic oligonucleotide
  Sense strand starting at position 3572 of SEQ ID NO: 1564392
uacaguuucuaaggacaga

SEQ ID NO: 1875576 - RNA, 19 nt, Artificial Sequence
  Description of Artificial Sequence: Synthetic oligonucleotide
  Antisense strand to SEQ ID NO: 1875575
ucuguccuuagaaacugua

SEQ ID NO: 1875577 - RNA, 19 nt, Artificial Sequence
  Description of Artificial Sequence: Synthetic oligonucleotide
  Sense strand starting at position 3591 of SEQ ID NO: 1564392
gaaguaaagaaaugugguu

SEQ ID NO: 1875578 - RNA, 19 nt, Artificial Sequence
  Description of Artificial Sequence: Synthetic oligonucleotide
  Antisense strand to SEQ ID NO: 1875577
aaccacauuucuuuacuuc

SEQ ID NO: 1875579 - RNA, 19 nt, Artificial Sequence
  Description of Artificial Sequence: Synthetic oligonucleotide
  Sense strand starting at position 3596 of SEQ ID NO: 1564392
aaagaaaugugguuagugu

SEQ ID NO: 1875580 - RNA, 19 nt, Artificial Sequence
  Description of Artificial Sequence: Synthetic oligonucleotide
  Antisense strand to SEQ ID NO: 1875579
acacuaaccacauuucuuu

SEQ ID NO: 1875581 - RNA, 19 nt, Artificial Sequence
  Description of Artificial Sequence: Synthetic oligonucleotide
  Sense strand starting at position 3597 of SEQ ID NO: 1564392
aagaaaugugguuaguguu

SEQ ID NO: 1875582 - RNA, 19 nt, Artificial Sequence
  Description of Artificial Sequence: Synthetic oligonucleotide
  Antisense strand to SEQ ID NO: 1875581
aacacuaaccacauuucuu

SEQ ID NO: 1875583 - RNA, 19 nt, Artificial Sequence
  Description of Artificial Sequence: Synthetic oligonucleotide
  Sense strand starting at position 3603 of SEQ ID NO: 1564392
ugugguuaguguucuugga

SEQ ID NO: 1875584 - RNA, 19 nt, Artificial Sequence
  Description of Artificial Sequence: Synthetic oligonucleotide
  Antisense strand to SEQ ID NO: 1875583
uccaagaacacuaaccaca

SEQ ID NO: 1875585 - RNA, 19 nt, Artificial Sequence
  Description of Artificial Sequence: Synthetic oligonucleotide
  Sense strand starting at position 3605 of SEQ ID NO: 1564392
ugguuaguguucuuggagu

SEQ ID NO: 1875586 - RNA, 19 nt, Artificial Sequence
  Description of Artificial Sequence: Synthetic oligonucleotide
  Antisense strand to SEQ ID NO: 1875585
acuccaagaacacuaacca

SEQ ID NO: 1875587 - RNA, 19 nt, Artificial Sequence
  Description of Artificial Sequence: Synthetic oligonucleotide
  Sense strand starting at position 3607 of SEQ ID NO: 1564392
guuaguguucuuggaguag

SEQ ID NO: 1875588 - RNA, 19 nt, Artificial Sequence
  Description of Artificial Sequence: Synthetic oligonucleotide
  Antisense strand to SEQ ID NO: 1875587
cuacuccaagaacacuaac

SEQ ID NO: 1875589 - RNA, 19 nt, Artificial Sequence
  Description of Artificial Sequence: Synthetic oligonucleotide
  Sense strand starting at position 3611 of SEQ ID NO: 1564392
guguucuuggaguaggugu

SEQ ID NO: 1875590 - RNA, 19 nt, Artificial Sequence
  Description of Artificial Sequence: Synthetic oligonucleotide
  Antisense strand to SEQ ID NO: 1875589
acaccuacuccaagaacac

SEQ ID NO: 1875591 - RNA, 19 nt, Artificial Sequence
  Description of Artificial Sequence: Synthetic oligonucleotide
  Sense strand starting at position 2454 of SEQ ID NO: 1564393
gcccuacgaauuuguugua

SEQ ID NO: 1875592 - RNA, 19 nt, Artificial Sequence
  Description of Artificial Sequence: Synthetic oligonucleotide
  Antisense strand to SEQ ID NO: 1875591
uacaacaaauucguagggc

SEQ ID NO: 1875593 - RNA, 19 nt, Artificial Sequence
  Description of Artificial Sequence: Synthetic oligonucleotide
  Sense strand starting at position 2457 of SEQ ID NO: 1564393
cuacgaauuuguuguauuu

SEQ ID NO: 1875594 - RNA, 19 nt, Artificial Sequence
  Description of Artificial Sequence: Synthetic oligonucleotide
  Antisense strand to SEQ ID NO: 1875593
aaauacaacaaauucguag

SEQ ID NO: 1875595 - RNA, 19 nt, Artificial Sequence
  Description of Artificial Sequence: Synthetic oligonucleotide
  Sense strand starting at position 2636 of SEQ ID NO: 1564393
accuuaaucuuuguuuguu

SEQ ID NO: 1875596 - RNA, 19 nt, Artificial Sequence
  Description of Artificial Sequence: Synthetic oligonucleotide
  Antisense strand to SEQ ID NO: 1875595
aacaaacaaagauuaaggu

SEQ ID NO: 1875597 - RNA, 19 nt, Artificial Sequence
  Description of Artificial Sequence: Synthetic oligonucleotide
  Sense strand starting at position 2665 of SEQ ID NO: 1564393
uugaguaucuguccauucu

SEQ ID NO: 1875598 - RNA, 19 nt, Artificial Sequence
  Description of Artificial Sequence: Synthetic oligonucleotide
  Antisense strand to SEQ ID NO: 1875597
agaauggacagauacucaa

SEQ ID NO: 1875599 - RNA, 19 nt, Artificial Sequence
  Description of Artificial Sequence: Synthetic oligonucleotide
  Sense strand starting at position 2666 of SEQ ID NO: 1564393
ugaguaucuguccauucua

SEQ ID NO: 1875600 - RNA, 19 nt, Artificial Sequence
  Description of Artificial Sequence: Synthetic oligonucleotide
  Antisense strand to SEQ ID NO: 1875599
uagaauggacagauacuca

SEQ ID NO: 1875601 - RNA, 19 nt, Artificial Sequence
  Description of Artificial Sequence: Synthetic oligonucleotide
  Sense strand starting at position 2745 of SEQ ID NO: 1564393
uuuauaugggaaugucaua

SEQ ID NO: 1875602 - RNA, 19 nt, Artificial Sequence
  Description of Artificial Sequence: Synthetic oligonucleotide
  Antisense strand to SEQ ID NO: 1875601
uaugacauucccauauaaa

SEQ ID NO: 1875603 - RNA, 19 nt, Artificial Sequence
  Description of Artificial Sequence: Synthetic oligonucleotide
  Sense strand starting at position 2828 of SEQ ID NO: 1564393
ugacaucacuuggaauaua

SEQ ID NO: 1875604 - RNA, 19 nt, Artificial Sequence
  Description of Artificial Sequence: Synthetic oligonucleotide
  Antisense strand to SEQ ID NO: 1875603
uauauuccaagugauguca

SEQ ID NO: 1875605 - RNA, 19 nt, Artificial Sequence
  Description of Artificial Sequence: Synthetic oligonucleotide
  Sense strand starting at position 2854 of SEQ ID NO: 1564393
acugcuuucuaucucaguu

SEQ ID NO: 1875606 - RNA, 19 nt, Artificial Sequence
  Description of Artificial Sequence: Synthetic oligonucleotide
  Antisense strand to SEQ ID NO: 1875605
aacugagauagaaagcagu

SEQ ID NO: 1875607 - RNA, 19 nt, Artificial Sequence
  Description of Artificial Sequence: Synthetic oligonucleotide
  Sense strand starting at position 2896 of SEQ ID NO: 1564393
uucggugguuauucagaua

SEQ ID NO: 1875608 - RNA, 19 nt, Artificial Sequence
  Description of Artificial Sequence: Synthetic oligonucleotide
  Antisense strand to SEQ ID NO: 1875607
uaucugaauaaccaccgaa

SEQ ID NO: 1875609 - RNA, 19 nt, Artificial Sequence
  Description of Artificial Sequence: Synthetic oligonucleotide
  Sense strand starting at position 2899 of SEQ ID NO: 1564393
ggugguuauucagauaagu

SEQ ID NO: 1875610 - RNA, 19 nt, Artificial Sequence
  Description of Artificial Sequence: Synthetic oligonucleotide
  Antisense strand to SEQ ID NO: 1875609
acuuaucugaauaaccacc

SEQ ID NO: 1875611 - RNA, 19 nt, Artificial Sequence
  Description of Artificial Sequence: Synthetic oligonucleotide
  Sense strand starting at position 2984 of SEQ ID NO: 1564393
ccucaagguucucuuugua

SEQ ID NO: 1875612 - RNA, 19 nt, Artificial Sequence
  Description of Artificial Sequence: Synthetic oligonucleotide
  Antisense strand to SEQ ID NO: 1875611
uacaaagagaaccuugagg

SEQ ID NO: 1875613 - RNA, 19 nt, Artificial Sequence
  Description of Artificial Sequence: Synthetic oligonucleotide
  Sense strand starting at position 3133 of SEQ ID NO: 1564393
guuaaauaguauccaugag

SEQ ID NO: 1875614 - RNA, 19 nt, Artificial Sequence
  Description of Artificial Sequence: Synthetic oligonucleotide
  Antisense strand to SEQ ID NO: 1875613
cucauggauacuauuuaac

SEQ ID NO: 1875615 - RNA, 19 nt, Artificial Sequence
  Description of Artificial Sequence: Synthetic oligonucleotide
  Sense strand starting at position 3284 of SEQ ID NO: 1564393
acccgaaggguguguauca

SEQ ID NO: 1875616 - RNA, 19 nt, Artificial Sequence
  Description of Artificial Sequence: Synthetic oligonucleotide
  Antisense strand to SEQ ID NO: 1875615
ugauacacacccuucgggu

SEQ ID NO: 1875617 - RNA, 19 nt, Artificial Sequence
  Description of Artificial Sequence: Synthetic oligonucleotide
  Sense strand starting at position 3340 of SEQ ID NO: 1564393
ugaugcaucccagagcuca

SEQ ID NO: 1875618 - RNA, 19 nt, Artificial Sequence
  Description of Artificial Sequence: Synthetic oligonucleotide
  Antisense strand to SEQ ID NO: 1875617
ugagcucugggaugcauca

SEQ ID NO: 1875619 - RNA, 19 nt, Artificial Sequence
  Description of Artificial Sequence: Synthetic oligonucleotide
  Sense strand starting at position 3411 of SEQ ID NO: 1564393
cucuaauugugagauauca

SEQ ID NO: 1875620 - RNA, 19 nt, Artificial Sequence
  Description of Artificial Sequence: Synthetic oligonucleotide
  Antisense strand to SEQ ID NO: 1875619
ugauaucucacaauuagag

SEQ ID NO: 1875621 - RNA, 19 nt, Artificial Sequence
  Description of Artificial Sequence: Synthetic oligonucleotide
  Sense strand starting at position 3533 of SEQ ID NO: 1564393
gguggaaugugagugguuu

SEQ ID NO: 1875622 - RNA, 19 nt, Artificial Sequence
  Description of Artificial Sequence: Synthetic oligonucleotide
  Antisense strand to SEQ ID NO: 1875621
aaaccacucacauuccacc

SEQ ID NO: 1875623 - RNA, 19 nt, Artificial Sequence
  Description of Artificial Sequence: Synthetic oligonucleotide
  Sense strand starting at position 3534 of SEQ ID NO: 1564393
guggaaugugagugguuua

SEQ ID NO: 1875624 - RNA, 19 nt, Artificial Sequence
  Description of Artificial Sequence: Synthetic oligonucleotide
  Antisense strand to SEQ ID NO: 1875623
uaaaccacucacauuccac

SEQ ID NO: 1875625 - RNA, 19 nt, Artificial Sequence
  Description of Artificial Sequence: Synthetic oligonucleotide
  Sense strand starting at position 3537 of SEQ ID NO: 1564393
gaaugugagugguuuaccu

SEQ ID NO: 1875626 - RNA, 19 nt, Artificial Sequence
  Description of Artificial Sequence: Synthetic oligonucleotide
  Antisense strand to SEQ ID NO: 1875625
agguaaaccacucacauuc

SEQ ID NO: 1875627 - RNA, 19 nt, Artificial Sequence
  Description of Artificial Sequence: Synthetic oligonucleotide
  Sense strand starting at position 3561 of SEQ ID NO: 1564393
gaggcugugcuuuacaguu

SEQ ID NO: 1875628 - RNA, 19 nt, Artificial Sequence
  Description of Artificial Sequence: Synthetic oligonucleotide
  Antisense strand to SEQ ID NO: 1875627
aacuguaaagcacagccuc

SEQ ID NO: 1875629 - RNA, 19 nt, Artificial Sequence
  Description of Artificial Sequence: Synthetic oligonucleotide
  Sense strand starting at position 3569 of SEQ ID NO: 1564393
gcuuuacaguuucuaagga

SEQ ID NO: 1875630 - RNA, 19 nt, Artificial Sequence
  Description of Artificial Sequence: Synthetic oligonucleotide
  Antisense strand to SEQ ID NO: 1875629
uccuuagaaacuguaaagc

SEQ ID NO: 1875631 - RNA, 19 nt, Artificial Sequence
  Description of Artificial Sequence: Synthetic oligonucleotide
  Sense strand starting at position 3573 of SEQ ID NO: 1564393
uacaguuucuaaggacaga

SEQ ID NO: 1875632 - RNA, 19 nt, Artificial Sequence
  Description of Artificial Sequence: Synthetic oligonucleotide
  Antisense strand to SEQ ID NO: 1875631
ucuguccuuagaaacugua

SEQ ID NO: 1875633 - RNA, 19 nt, Artificial Sequence
  Description of Artificial Sequence: Synthetic oligonucleotide
  Sense strand starting at position 3592 of SEQ ID NO: 1564393
gaaguaaagaaaugugguu

SEQ ID NO: 1875634 - RNA, 19 nt, Artificial Sequence
  Description of Artificial Sequence: Synthetic oligonucleotide
  Antisense strand to SEQ ID NO: 1875633
aaccacauuucuuuacuuc

SEQ ID NO: 1875635 - RNA, 19 nt, Artificial Sequence
  Description of Artificial Sequence: Synthetic oligonucleotide
  Sense strand starting at position 3598 of SEQ ID NO: 1564393
aagaaaugugguuaguguu

SEQ ID NO: 1875636 - RNA, 19 nt, Artificial Sequence
  Description of Artificial Sequence: Synthetic oligonucleotide
  Antisense strand to SEQ ID NO: 1875635
aacacuaaccacauuucuu

SEQ ID NO: 1875637 - RNA, 19 nt, Artificial Sequence
  Description of Artificial Sequence: Synthetic oligonucleotide
  Sense strand starting at position 3601 of SEQ ID NO: 1564393
aaaugugguuaguguucuu

SEQ ID NO: 1875638 - RNA, 19 nt, Artificial Sequence
  Description of Artificial Sequence: Synthetic oligonucleotide
  Antisense strand to SEQ ID NO: 1875637
aagaacacuaaccacauuu

SEQ ID NO: 1875639 - RNA, 19 nt, Artificial Sequence
  Description of Artificial Sequence: Synthetic oligonucleotide
  Sense strand starting at position 3604 of SEQ ID NO: 1564393
ugugguuaguguucuugga

SEQ ID NO: 1875640 - RNA, 19 nt, Artificial Sequence
  Description of Artificial Sequence: Synthetic oligonucleotide
  Antisense strand to SEQ ID NO: 1875639
uccaagaacacuaaccaca

SEQ ID NO: 1875641 - RNA, 19 nt, Artificial Sequence
  Description of Artificial Sequence: Synthetic oligonucleotide
  Sense strand starting at position 3606 of SEQ ID NO: 1564393
ugguuaguguucuuggagu

SEQ ID NO: 1875642 - RNA, 19 nt, Artificial Sequence
  Description of Artificial Sequence: Synthetic oligonucleotide
  Antisense strand to SEQ ID NO: 1875641
acuccaagaacacuaacca

SEQ ID NO: 1875643 - RNA, 19 nt, Artificial Sequence
  Description of Artificial Sequence: Synthetic oligonucleotide
  Sense strand starting at position 3608 of SEQ ID NO: 1564393
guuaguguucuuggaguag

SEQ ID NO: 1875644 - RNA, 19 nt, Artificial Sequence
  Description of Artificial Sequence: Synthetic oligonucleotide
  Antisense strand to SEQ ID NO: 1875643
cuacuccaagaacacuaac

SEQ ID NO: 1875645 - RNA, 19 nt, Artificial Sequence
  Description of Artificial Sequence: Synthetic oligonucleotide
  Sense strand starting at position 3612 of SEQ ID NO: 1564393
guguucuuggaguaggugu

SEQ ID NO: 1875646 - RNA, 19 nt, Artificial Sequence
  Description of Artificial Sequence: Synthetic oligonucleotide
  Antisense strand to SEQ ID NO: 1875645
acaccuacuccaagaacac

SEQ ID NO: 1875647 - RNA, 19 nt, Artificial Sequence
  Description of Artificial Sequence: Synthetic oligonucleotide
  Sense strand starting at position 3958 of SEQ ID NO: 1564393
ugcaccuauuccgaaggau

SEQ ID NO: 1875648 - RNA, 19 nt, Artificial Sequence
  Description of Artificial Sequence: Synthetic oligonucleotide
  Antisense strand to SEQ ID NO: 1875647
auccuucggaauaggugca

SEQ ID NO: 1875649 - RNA, 19 nt, Artificial Sequence
  Description of Artificial Sequence: Synthetic oligonucleotide
  Sense strand starting at position 199 of SEQ ID NO: 1564394
ccaguacaauugcauugua

SEQ ID NO: 1875650 - RNA, 19 nt, Artificial Sequence
  Description of Artificial Sequence: Synthetic oligonucleotide
  Antisense strand to SEQ ID NO: 1875649
uacaaugcaauuguacugg

SEQ ID NO: 1875651 - RNA, 19 nt, Artificial Sequence
  Description of Artificial Sequence: Synthetic oligonucleotide
  Sense strand starting at position 202 of SEQ ID NO: 1564394
guacaauugcauuguauga

SEQ ID NO: 1875652 - RNA, 19 nt, Artificial Sequence
  Description of Artificial Sequence: Synthetic oligonucleotide
  Antisense strand to SEQ ID NO: 1875651
ucauacaaugcaauuguac

SEQ ID NO: 1875653 - RNA, 19 nt, Artificial Sequence
  Description of Artificial Sequence: Synthetic oligonucleotide
  Sense strand starting at position 207 of SEQ ID NO: 1564394
auugcauuguaugaggcaa

SEQ ID NO: 1875654 - RNA, 19 nt, Artificial Sequence
  Description of Artificial Sequence: Synthetic oligonucleotide
  Antisense strand to SEQ ID NO: 1875653
uugccucauacaaugcaau

SEQ ID NO: 1875655 - RNA, 19 nt, Artificial Sequence
  Description of Artificial Sequence: Synthetic oligonucleotide
  Sense strand starting at position 589 of SEQ ID NO: 1564394
cuguguuucugucauuccu

SEQ ID NO: 1875656 - RNA, 19 nt, Artificial Sequence
  Description of Artificial Sequence: Synthetic oligonucleotide
  Antisense strand to SEQ ID NO: 1875655
aggaaugacagaaacacag

SEQ ID NO: 1875657 - RNA, 19 nt, Artificial Sequence
  Description of Artificial Sequence: Synthetic oligonucleotide
  Sense strand starting at position 591 of SEQ ID NO: 1564394
guguuucugucauuccuua

SEQ ID NO: 1875658 - RNA, 19 nt, Artificial Sequence
  Description of Artificial Sequence: Synthetic oligonucleotide
  Antisense strand to SEQ ID NO: 1875657
uaaggaaugacagaaacac

SEQ ID NO: 1875659 - RNA, 19 nt, Artificial Sequence
  Description of Artificial Sequence: Synthetic oligonucleotide
  Sense strand starting at position 595 of SEQ ID NO: 1564394
uucugucauuccuuaagug

SEQ ID NO: 1875660 - RNA, 19 nt, Artificial Sequence
  Description of Artificial Sequence: Synthetic oligonucleotide
  Antisense strand to SEQ ID NO: 1875659
cacuuaaggaaugacagaa

SEQ ID NO: 1875661 - RNA, 19 nt, Artificial Sequence
  Description of Artificial Sequence: Synthetic oligonucleotide
  Sense strand starting at position 607 of SEQ ID NO: 1564394
uuaagugccucacaaagua

SEQ ID NO: 1875662 - RNA, 19 nt, Artificial Sequence
  Description of Artificial Sequence: Synthetic oligonucleotide
  Antisense strand to SEQ ID NO: 1875661
uacuuugugaggcacuuaa

SEQ ID NO: 1875663 - RNA, 19 nt, Artificial Sequence
  Description of Artificial Sequence: Synthetic oligonucleotide
  Sense strand starting at position 1045 of SEQ ID NO: 1564394
gcgacauuagugggugcau

SEQ ID NO: 1875664 - RNA, 19 nt, Artificial Sequence
  Description of Artificial Sequence: Synthetic oligonucleotide
  Antisense strand to SEQ ID NO: 1875663
augcacccacuaaugucgc

SEQ ID NO: 1875665 - RNA, 19 nt, Artificial Sequence
  Description of Artificial Sequence: Synthetic oligonucleotide
  Sense strand starting at position 1281 of SEQ ID NO: 1564394
uucuuugugucggagagag

SEQ ID NO: 1875666 - RNA, 19 nt, Artificial Sequence
  Description of Artificial Sequence: Synthetic oligonucleotide
  Antisense strand to SEQ ID NO: 1875665
cucucuccgacacaaagaa

SEQ ID NO: 1875667 - RNA, 19 nt, Artificial Sequence
  Description of Artificial Sequence: Synthetic oligonucleotide
  Sense strand starting at position 1283 of SEQ ID NO: 1564394
cuuugugucggagagaguu

SEQ ID NO: 1875668 - RNA, 19 nt, Artificial Sequence
  Description of Artificial Sequence: Synthetic oligonucleotide
  Antisense strand to SEQ ID NO: 1875667
aacucucuccgacacaaag

SEQ ID NO: 1875669 - RNA, 19 nt, Artificial Sequence
  Description of Artificial Sequence: Synthetic oligonucleotide
  Sense strand starting at position 1364 of SEQ ID NO: 1564394
guguuuaucagucacugga

SEQ ID NO: 1875670 - RNA, 19 nt, Artificial Sequence
  Description of Artificial Sequence: Synthetic oligonucleotide
  Antisense strand to SEQ ID NO: 1875669
uccagugacugauaaacac

SEQ ID NO: 1875671 - RNA, 19 nt, Artificial Sequence
  Description of Artificial Sequence: Synthetic oligonucleotide
  Sense strand starting at position 1366 of SEQ ID NO: 1564394
guuuaucagucacuggagu

SEQ ID NO: 1875672 - RNA, 19 nt, Artificial Sequence
  Description of Artificial Sequence: Synthetic oligonucleotide
  Antisense strand to SEQ ID NO: 1875671
acuccagugacugauaaac

SEQ ID NO: 1875673 - RNA, 19 nt, Artificial Sequence
  Description of Artificial Sequence: Synthetic oligonucleotide
  Sense strand starting at position 1367 of SEQ ID NO: 1564394
uuuaucagucacuggaguu

SEQ ID NO: 1875674 - RNA, 19 nt, Artificial Sequence
  Description of Artificial Sequence: Synthetic oligonucleotide
  Antisense strand to SEQ ID NO: 1875673
aacuccagugacugauaaa

SEQ ID NO: 1875675 - RNA, 19 nt, Artificial Sequence
  Description of Artificial Sequence: Synthetic oligonucleotide
  Sense strand starting at position 1889 of SEQ ID NO: 1564394
ggcuuugucucguggugca

SEQ ID NO: 1875676 - RNA, 19 nt, Artificial Sequence
  Description of Artificial Sequence: Synthetic oligonucleotide
  Antisense strand to SEQ ID NO: 1875675
ugcaccacgagacaaagcc

SEQ ID NO: 1875677 - RNA, 19 nt, Artificial Sequence
  Description of Artificial Sequence: Synthetic oligonucleotide
  Sense strand starting at position 1906 of SEQ ID NO: 1564394
caugacagcuugcucagua

SEQ ID NO: 1875678 - RNA, 19 nt, Artificial Sequence
  Description of Artificial Sequence: Synthetic oligonucleotide
  Antisense strand to SEQ ID NO: 1875677
uacugagcaagcugucaug

SEQ ID NO: 1875679 - RNA, 19 nt, Artificial Sequence
  Description of Artificial Sequence: Synthetic oligonucleotide
  Sense strand starting at position 2233 of SEQ ID NO: 1564394
uuaaguuguguggagaaca

SEQ ID NO: 1875680 - RNA, 19 nt, Artificial Sequence
  Description of Artificial Sequence: Synthetic oligonucleotide
  Antisense strand to SEQ ID NO: 1875679
uguucuccacacaacuuaa

SEQ ID NO: 1875681 - RNA, 19 nt, Artificial Sequence
  Description of Artificial Sequence: Synthetic oligonucleotide
  Sense strand starting at position 2749 of SEQ ID NO: 1564394
ccaguuuguauaugggaau

SEQ ID NO: 1875682 - RNA, 19 nt, Artificial Sequence
  Description of Artificial Sequence: Synthetic oligonucleotide
  Antisense strand to SEQ ID NO: 1875681
auucccauauacaaacugg

SEQ ID NO: 1875683 - RNA, 19 nt, Artificial Sequence
  Description of Artificial Sequence: Synthetic oligonucleotide
  Sense strand starting at position 2755 of SEQ ID NO: 1564394
uguauaugggaaugucaua

SEQ ID NO: 1875684 - RNA, 19 nt, Artificial Sequence
  Description of Artificial Sequence: Synthetic oligonucleotide
  Antisense strand to SEQ ID NO: 1875683
uaugacauucccauauaca

SEQ ID NO: 1875685 - RNA, 19 nt, Artificial Sequence
  Description of Artificial Sequence: Synthetic oligonucleotide
  Sense strand starting at position 3398 of SEQ ID NO: 1564394
ucauuagugcacuacgauc

SEQ ID NO: 1875686 - RNA, 19 nt, Artificial Sequence
  Description of Artificial Sequence: Synthetic oligonucleotide
  Antisense strand to SEQ ID NO: 1875685
gaucguagugcacuaauga

SEQ ID NO: 1875687 - RNA, 19 nt, Artificial Sequence
  Description of Artificial Sequence: Synthetic oligonucleotide
  Sense strand starting at position 3418 of SEQ ID NO: 1564394
agaaaucucuaauugugag

SEQ ID NO: 1875688 - RNA, 19 nt, Artificial Sequence
  Description of Artificial Sequence: Synthetic oligonucleotide
  Antisense strand to SEQ ID NO: 1875687
cucacaauuagagauuucu

SEQ ID NO: 1875689 - RNA, 19 nt, Artificial Sequence
  Description of Artificial Sequence: Synthetic oligonucleotide
  Sense strand starting at position 3421 of SEQ ID NO: 1564394
aaucucuaauugugaggua

SEQ ID NO: 1875690 - RNA, 19 nt, Artificial Sequence
  Description of Artificial Sequence: Synthetic oligonucleotide
  Antisense strand to SEQ ID NO: 1875689
uaccucacaauuagagauu

SEQ ID NO: 1875691 - RNA, 19 nt, Artificial Sequence
  Description of Artificial Sequence: Synthetic oligonucleotide
  Sense strand starting at position 3422 of SEQ ID NO: 1564394
aucucuaauugugagguau

SEQ ID NO: 1875692 - RNA, 19 nt, Artificial Sequence
  Description of Artificial Sequence: Synthetic oligonucleotide
  Antisense strand to SEQ ID NO: 1875691
auaccucacaauuagagau

SEQ ID NO: 1875693 - RNA, 19 nt, Artificial Sequence
  Description of Artificial Sequence: Synthetic oligonucleotide
  Sense strand starting at position 3547 of SEQ ID NO: 1564394
ggugaaaugugagugguuu

SEQ ID NO: 1875694 - RNA, 19 nt, Artificial Sequence
  Description of Artificial Sequence: Synthetic oligonucleotide
  Antisense strand to SEQ ID NO: 1875693
aaaccacucacauuucacc

SEQ ID NO: 1875695 - RNA, 19 nt, Artificial Sequence
  Description of Artificial Sequence: Synthetic oligonucleotide
  Sense strand starting at position 3548 of SEQ ID NO: 1564394
gugaaaugugagugguuua

SEQ ID NO: 1875696 - RNA, 19 nt, Artificial Sequence
  Description of Artificial Sequence: Synthetic oligonucleotide
  Antisense strand to SEQ ID NO: 1875695
uaaaccacucacauuucac

SEQ ID NO: 1875697 - RNA, 19 nt, Artificial Sequence
  Description of Artificial Sequence: Synthetic oligonucleotide
  Sense strand starting at position 3549 of SEQ ID NO: 1564394
ugaaaugugagugguuuac

SEQ ID NO: 1875698 - RNA, 19 nt, Artificial Sequence
  Description of Artificial Sequence: Synthetic oligonucleotide
  Antisense strand to SEQ ID NO: 1875697
guaaaccacucacauuuca

SEQ ID NO: 1875699 - RNA, 19 nt, Artificial Sequence
  Description of Artificial Sequence: Synthetic oligonucleotide
  Sense strand starting at position 3551 of SEQ ID NO: 1564394
aaaugugagugguuuaccu

SEQ ID NO: 1875700 - RNA, 19 nt, Artificial Sequence
  Description of Artificial Sequence: Synthetic oligonucleotide
  Antisense strand to SEQ ID NO: 1875699
agguaaaccacucacauuu

SEQ ID NO: 1875701 - RNA, 19 nt, Artificial Sequence
  Description of Artificial Sequence: Synthetic oligonucleotide
  Sense strand starting at position 3579 of SEQ ID NO: 1564394
cugugcuuuacgguuucua

SEQ ID NO: 1875702 - RNA, 19 nt, Artificial Sequence
  Description of Artificial Sequence: Synthetic oligonucleotide
  Antisense strand to SEQ ID NO: 1875701
uagaaaccguaaagcacag

SEQ ID NO: 1875703 - RNA, 19 nt, Artificial Sequence
  Description of Artificial Sequence: Synthetic oligonucleotide
  Sense strand starting at position 3587 of SEQ ID NO: 1564394
uacgguuucuaagggcaga

SEQ ID NO: 1875704 - RNA, 19 nt, Artificial Sequence
  Description of Artificial Sequence: Synthetic oligonucleotide
  Antisense strand to SEQ ID NO: 1875703
ucugcccuuagaaaccgua

SEQ ID NO: 1875705 - RNA, 19 nt, Artificial Sequence
  Description of Artificial Sequence: Synthetic oligonucleotide
  Sense strand starting at position 3611 of SEQ ID NO: 1564394
aaagaaaugugcuuagugu

SEQ ID NO: 1875706 - RNA, 19 nt, Artificial Sequence
  Description of Artificial Sequence: Synthetic oligonucleotide
  Antisense strand to SEQ ID NO: 1875705
acacuaagcacauuucuuu

SEQ ID NO: 1875707 - RNA, 19 nt, Artificial Sequence
  Description of Artificial Sequence: Synthetic oligonucleotide
  Sense strand starting at position 3612 of SEQ ID NO: 1564394
aagaaaugugcuuaguguu

SEQ ID NO: 1875708 - RNA, 19 nt, Artificial Sequence
  Description of Artificial Sequence: Synthetic oligonucleotide
  Antisense strand to SEQ ID NO: 1875707
aacacuaagcacauuucuu

SEQ ID NO: 1875709 - RNA, 19 nt, Artificial Sequence
  Description of Artificial Sequence: Synthetic oligonucleotide
  Sense strand starting at position 3615 of SEQ ID NO: 1564394
aaaugugcuuaguguucuu

SEQ ID NO: 1875710 - RNA, 19 nt, Artificial Sequence
  Description of Artificial Sequence: Synthetic oligonucleotide
  Antisense strand to SEQ ID NO: 1875709
aagaacacuaagcacauuu

SEQ ID NO: 1875711 - RNA, 19 nt, Artificial Sequence
  Description of Artificial Sequence: Synthetic oligonucleotide
  Sense strand starting at position 3618 of SEQ ID NO: 1564394
ugugcuuaguguucuugga

SEQ ID NO: 1875712 - RNA, 19 nt, Artificial Sequence
  Description of Artificial Sequence: Synthetic oligonucleotide
  Antisense strand to SEQ ID NO: 1875711
uccaagaacacuaagcaca

SEQ ID NO: 1875713 - RNA, 19 nt, Artificial Sequence
  Description of Artificial Sequence: Synthetic oligonucleotide
  Sense strand starting at position 3622 of SEQ ID NO: 1564394
cuuaguguucuuggaguag

SEQ ID NO: 1875714 - RNA, 19 nt, Artificial Sequence
  Description of Artificial Sequence: Synthetic oligonucleotide
  Antisense strand to SEQ ID NO: 1875713
cuacuccaagaacacuaag

SEQ ID NO: 1875715 - RNA, 19 nt, Artificial Sequence
  Description of Artificial Sequence: Synthetic oligonucleotide
  Sense strand starting at position 2234 of SEQ ID NO: 1564395
uuaaguuguguggagaaca

SEQ ID NO: 1875716 - RNA, 19 nt, Artificial Sequence
  Description of Artificial Sequence: Synthetic oligonucleotide
  Antisense strand to SEQ ID NO: 1875715
uguucuccacacaacuuaa

SEQ ID NO: 1875717 - RNA, 19 nt, Artificial Sequence
  Description of Artificial Sequence: Synthetic oligonucleotide
  Sense strand starting at position 2750 of SEQ ID NO: 1564395
ccaguuuguauaugggaau

SEQ ID NO: 1875718 - RNA, 19 nt, Artificial Sequence
  Description of Artificial Sequence: Synthetic oligonucleotide
  Antisense strand to SEQ ID NO: 1875717
auucccauauacaaacugg

SEQ ID NO: 1875719 - RNA, 19 nt, Artificial Sequence
  Description of Artificial Sequence: Synthetic oligonucleotide
  Sense strand starting at position 2756 of SEQ ID NO: 1564395
uguauaugggaaugucaua

SEQ ID NO: 1875720 - RNA, 19 nt, Artificial Sequence
  Description of Artificial Sequence: Synthetic oligonucleotide
  Antisense strand to SEQ ID NO: 1875719
uaugacauucccauauaca

SEQ ID NO: 1875721 - RNA, 19 nt, Artificial Sequence
  Description of Artificial Sequence: Synthetic oligonucleotide
  Sense strand starting at position 3147 of SEQ ID NO: 1564395
guuaaauaguauccaugau

SEQ ID NO: 1875722 - RNA, 19 nt, Artificial Sequence
  Description of Artificial Sequence: Synthetic oligonucleotide
  Antisense strand to SEQ ID NO: 1875721
aucauggauacuauuuaac

SEQ ID NO: 1875723 - RNA, 19 nt, Artificial Sequence
  Description of Artificial Sequence: Synthetic oligonucleotide
  Sense strand starting at position 3399 of SEQ ID NO: 1564395
ucauuagugcacuacgauc

SEQ ID NO: 1875724 - RNA, 19 nt, Artificial Sequence
  Description of Artificial Sequence: Synthetic oligonucleotide
  Antisense strand to SEQ ID NO: 1875723
gaucguagugcacuaauga

SEQ ID NO: 1875725 - RNA, 19 nt, Artificial Sequence
  Description of Artificial Sequence: Synthetic oligonucleotide
  Sense strand starting at position 3419 of SEQ ID NO: 1564395
agaaaucucuaauugugag

SEQ ID NO: 1875726 - RNA, 19 nt, Artificial Sequence
  Description of Artificial Sequence: Synthetic oligonucleotide
  Antisense strand to SEQ ID NO: 1875725
cucacaauuagagauuucu

SEQ ID NO: 1875727 - RNA, 19 nt, Artificial Sequence
  Description of Artificial Sequence: Synthetic oligonucleotide
  Sense strand starting at position 3422 of SEQ ID NO: 1564395
aaucucuaauugugaggua

SEQ ID NO: 1875728 - RNA, 19 nt, Artificial Sequence
  Description of Artificial Sequence: Synthetic oligonucleotide
  Antisense strand to SEQ ID NO: 1875727
uaccucacaauuagagauu

SEQ ID NO: 1875729 - RNA, 19 nt, Artificial Sequence
  Description of Artificial Sequence: Synthetic oligonucleotide
  Sense strand starting at position 3423 of SEQ ID NO: 1564395
aucucuaauugugagguau

SEQ ID NO: 1875730 - RNA, 19 nt, Artificial Sequence
  Description of Artificial Sequence: Synthetic oligonucleotide
  Antisense strand to SEQ ID NO: 1875729
auaccucacaauuagagau

SEQ ID NO: 1875731 - RNA, 19 nt, Artificial Sequence
  Description of Artificial Sequence: Synthetic oligonucleotide
  Sense strand starting at position 3548 of SEQ ID NO: 1564395
ggugaaaugugagugguuu

SEQ ID NO: 1875732 - RNA, 19 nt, Artificial Sequence
  Description of Artificial Sequence: Synthetic oligonucleotide
  Antisense strand to SEQ ID NO: 1875731
aaaccacucacauuucacc

SEQ ID NO: 1875733 - RNA, 19 nt, Artificial Sequence
  Description of Artificial Sequence: Synthetic oligonucleotide
  Sense strand starting at position 3549 of SEQ ID NO: 1564395
gugaaaugugagugguuua

SEQ ID NO: 1875734 - RNA, 19 nt, Artificial Sequence
  Description of Artificial Sequence: Synthetic oligonucleotide
  Antisense strand to SEQ ID NO: 1875733
uaaaccacucacauuucac

SEQ ID NO: 1875735 - RNA, 19 nt, Artificial Sequence
  Description of Artificial Sequence: Synthetic oligonucleotide
  Sense strand starting at position 3550 of SEQ ID NO: 1564395
ugaaaugugagugguuuac

SEQ ID NO: 1875736 - RNA, 19 nt, Artificial Sequence
  Description of Artificial Sequence: Synthetic oligonucleotide
  Antisense strand to SEQ ID NO: 1875735
guaaaccacucacauuuca

SEQ ID NO: 1875737 - RNA, 19 nt, Artificial Sequence
  Description of Artificial Sequence: Synthetic oligonucleotide
  Sense strand starting at position 3552 of SEQ ID NO: 1564395
aaaugugagugguuuaccu

SEQ ID NO: 1875738 - RNA, 19 nt, Artificial Sequence
  Description of Artificial Sequence: Synthetic oligonucleotide
  Antisense strand to SEQ ID NO: 1875737
agguaaaccacucacauuu

SEQ ID NO: 1875739 - RNA, 19 nt, Artificial Sequence
  Description of Artificial Sequence: Synthetic oligonucleotide
  Sense strand starting at position 3580 of SEQ ID NO: 1564395
cugugcuuuacgguuucua

SEQ ID NO: 1875740 - RNA, 19 nt, Artificial Sequence
  Description of Artificial Sequence: Synthetic oligonucleotide
  Antisense strand to SEQ ID NO: 1875739
uagaaaccguaaagcacag

SEQ ID NO: 1875741 - RNA, 19 nt, Artificial Sequence
  Description of Artificial Sequence: Synthetic oligonucleotide
  Sense strand starting at position 3588 of SEQ ID NO: 1564395
uacgguuucuaagggcaga

SEQ ID NO: 1875742 - RNA, 19 nt, Artificial Sequence
  Description of Artificial Sequence: Synthetic oligonucleotide
  Antisense strand to SEQ ID NO: 1875741
ucugcccuuagaaaccgua

SEQ ID NO: 1875743 - RNA, 19 nt, Artificial Sequence
  Description of Artificial Sequence: Synthetic oligonucleotide
  Sense strand starting at position 3612 of SEQ ID NO: 1564395
aaagaaaugugcuuagugu

SEQ ID NO: 1875744 - RNA, 19 nt, Artificial Sequence
  Description of Artificial Sequence: Synthetic oligonucleotide
  Antisense strand to SEQ ID NO: 1875743
acacuaagcacauuucuuu

SEQ ID NO: 1875745 - RNA, 19 nt, Artificial Sequence
  Description of Artificial Sequence: Synthetic oligonucleotide
  Sense strand starting at position 3613 of SEQ ID NO: 1564395
aagaaaugugcuuaguguu

SEQ ID NO: 1875746 - RNA, 19 nt, Artificial Sequence
  Description of Artificial Sequence: Synthetic oligonucleotide
  Antisense strand to SEQ ID NO: 1875745
aacacuaagcacauuucuu

SEQ ID NO: 1875747 - RNA, 19 nt, Artificial Sequence
  Description of Artificial Sequence: Synthetic oligonucleotide
  Sense strand starting at position 3616 of SEQ ID NO: 1564395
aaaugugcuuaguguucuu

SEQ ID NO: 1875748 - RNA, 19 nt, Artificial Sequence
  Description of Artificial Sequence: Synthetic oligonucleotide
  Antisense strand to SEQ ID NO: 1875747
aagaacacuaagcacauuu

SEQ ID NO: 1875749 - RNA, 19 nt, Artificial Sequence
  Description of Artificial Sequence: Synthetic oligonucleotide
  Sense strand starting at position 3619 of SEQ ID NO: 1564395
ugugcuuaguguucuugga

SEQ ID NO: 1875750 - RNA, 19 nt, Artificial Sequence
  Description of Artificial Sequence: Synthetic oligonucleotide
  Antisense strand to SEQ ID NO: 1875749
uccaagaacacuaagcaca

SEQ ID NO: 1875751 - RNA, 19 nt, Artificial Sequence
  Description of Artificial Sequence: Synthetic oligonucleotide
  Sense strand starting at position 3621 of SEQ ID NO: 1564395
ugcuuaguguucuuggagu

SEQ ID NO: 1875752 - RNA, 19 nt, Artificial Sequence
  Description of Artificial Sequence: Synthetic oligonucleotide
  Antisense strand to SEQ ID NO: 1875751
acuccaagaacacuaagca

SEQ ID NO: 1875753 - RNA, 19 nt, Artificial Sequence
  Description of Artificial Sequence: Synthetic oligonucleotide
  Sense strand starting at position 3623 of SEQ ID NO: 1564395
cuuaguguucuuggaguag

SEQ ID NO: 1875754 - RNA, 19 nt, Artificial Sequence
  Description of Artificial Sequence: Synthetic oligonucleotide
  Antisense strand to SEQ ID NO: 1875753
cuacuccaagaacacuaag

SEQ ID NO: 1875755 - RNA, 19 nt, Artificial Sequence
  Description of Artificial Sequence: Synthetic oligonucleotide
  Sense strand starting at position 200 of SEQ ID NO: 1564396
ccaguacaauugcauugua

SEQ ID NO: 1875756 - RNA, 19 nt, Artificial Sequence
  Description of Artificial Sequence: Synthetic oligonucleotide
  Antisense strand to SEQ ID NO: 1875755
uacaaugcaauuguacugg

SEQ ID NO: 1875757 - RNA, 19 nt, Artificial Sequence
  Description of Artificial Sequence: Synthetic oligonucleotide
  Sense strand starting at position 203 of SEQ ID NO: 1564396
guacaauugcauuguauga

SEQ ID NO: 1875758 - RNA, 19 nt, Artificial Sequence
  Description of Artificial Sequence: Synthetic oligonucleotide
  Antisense strand to SEQ ID NO: 1875757
ucauacaaugcaauuguac

SEQ ID NO: 1875759 - RNA, 19 nt, Artificial Sequence
  Description of Artificial Sequence: Synthetic oligonucleotide
  Sense strand starting at position 208 of SEQ ID NO: 1564396
auugcauuguaugaggcaa

SEQ ID NO: 1875760 - RNA, 19 nt, Artificial Sequence
  Description of Artificial Sequence: Synthetic oligonucleotide
  Antisense strand to SEQ ID NO: 1875759
uugccucauacaaugcaau

SEQ ID NO: 1875761 - RNA, 19 nt, Artificial Sequence
  Description of Artificial Sequence: Synthetic oligonucleotide
  Sense strand starting at position 590 of SEQ ID NO: 1564396
cuguguuucugucauuccu

SEQ ID NO: 1875762 - RNA, 19 nt, Artificial Sequence
  Description of Artificial Sequence: Synthetic oligonucleotide
  Antisense strand to SEQ ID NO: 1875761
aggaaugacagaaacacag

SEQ ID NO: 1875763 - RNA, 19 nt, Artificial Sequence
  Description of Artificial Sequence: Synthetic oligonucleotide
  Sense strand starting at position 592 of SEQ ID NO: 1564396
guguuucugucauuccuua

SEQ ID NO: 1875764 - RNA, 19 nt, Artificial Sequence
  Description of Artificial Sequence: Synthetic oligonucleotide
  Antisense strand to SEQ ID NO: 1875763
uaaggaaugacagaaacac

SEQ ID NO: 1875765 - RNA, 19 nt, Artificial Sequence
  Description of Artificial Sequence: Synthetic oligonucleotide
  Sense strand starting at position 596 of SEQ ID NO: 1564396
uucugucauuccuuaagug

SEQ ID NO: 1875766 - RNA, 19 nt, Artificial Sequence
  Description of Artificial Sequence: Synthetic oligonucleotide
  Antisense strand to SEQ ID NO: 1875765
cacuuaaggaaugacagaa

SEQ ID NO: 1875767 - RNA, 19 nt, Artificial Sequence
  Description of Artificial Sequence: Synthetic oligonucleotide
  Sense strand starting at position 608 of SEQ ID NO: 1564396
uuaagugccucacaaagua

SEQ ID NO: 1875768 - RNA, 19 nt, Artificial Sequence
  Description of Artificial Sequence: Synthetic oligonucleotide
  Antisense strand to SEQ ID NO: 1875767
uacuuugugaggcacuuaa

SEQ ID NO: 1875769 - RNA, 19 nt, Artificial Sequence
  Description of Artificial Sequence: Synthetic oligonucleotide
  Sense strand starting at position 1046 of SEQ ID NO: 1564396
gcgacauuagugggugcau

SEQ ID NO: 1875770 - RNA, 19 nt, Artificial Sequence
  Description of Artificial Sequence: Synthetic oligonucleotide
  Antisense strand to SEQ ID NO: 1875769
augcacccacuaaugucgc

SEQ ID NO: 1875771 - RNA, 19 nt, Artificial Sequence
  Description of Artificial Sequence: Synthetic oligonucleotide
  Sense strand starting at position 1282 of SEQ ID NO: 1564396
uucuuugugucggagagag

SEQ ID NO: 1875772 - RNA, 19 nt, Artificial Sequence
  Description of Artificial Sequence: Synthetic oligonucleotide
  Antisense strand to SEQ ID NO: 1875771
cucucuccgacacaaagaa

SEQ ID NO: 1875773 - RNA, 19 nt, Artificial Sequence
  Description of Artificial Sequence: Synthetic oligonucleotide
  Sense strand starting at position 1284 of SEQ ID NO: 1564396
cuuugugucggagagaguu

SEQ ID NO: 1875774 - RNA, 19 nt, Artificial Sequence
  Description of Artificial Sequence: Synthetic oligonucleotide
  Antisense strand to SEQ ID NO: 1875773
aacucucuccgacacaaag

SEQ ID NO: 1875775 - RNA, 19 nt, Artificial Sequence
  Description of Artificial Sequence: Synthetic oligonucleotide
  Sense strand starting at position 1365 of SEQ ID NO: 1564396
guguuuaucagucacugga

SEQ ID NO: 1875776 - RNA, 19 nt, Artificial Sequence
  Description of Artificial Sequence: Synthetic oligonucleotide
  Antisense strand to SEQ ID NO: 1875775
uccagugacugauaaacac

SEQ ID NO: 1875777 - RNA, 19 nt, Artificial Sequence
  Description of Artificial Sequence: Synthetic oligonucleotide
  Sense strand starting at position 1367 of SEQ ID NO: 1564396
guuuaucagucacuggagu

SEQ ID NO: 1875778 - RNA, 19 nt, Artificial Sequence
  Description of Artificial Sequence: Synthetic oligonucleotide
  Antisense strand to SEQ ID NO: 1875777
acuccagugacugauaaac

SEQ ID NO: 1875779 - RNA, 19 nt, Artificial Sequence
  Description of Artificial Sequence: Synthetic oligonucleotide
  Sense strand starting at position 1368 of SEQ ID NO: 1564396
uuuaucagucacuggaguu

SEQ ID NO: 1875780 - RNA, 19 nt, Artificial Sequence
  Description of Artificial Sequence: Synthetic oligonucleotide
  Antisense strand to SEQ ID NO: 1875779
aacuccagugacugauaaa

SEQ ID NO: 1875781 - RNA, 19 nt, Artificial Sequence
  Description of Artificial Sequence: Synthetic oligonucleotide
  Sense strand starting at position 1890 of SEQ ID NO: 1564396
ggcuuugucucguggugca

SEQ ID NO: 1875782 - RNA, 19 nt, Artificial Sequence
  Description of Artificial Sequence: Synthetic oligonucleotide
  Antisense strand to SEQ ID NO: 1875781
ugcaccacgagacaaagcc

SEQ ID NO: 1875783 - RNA, 19 nt, Artificial Sequence
  Description of Artificial Sequence: Synthetic oligonucleotide
  Sense strand starting at position 1907 of SEQ ID NO: 1564396
caugacagcuugcucagua

SEQ ID NO: 1875784 - RNA, 19 nt, Artificial Sequence
  Description of Artificial Sequence: Synthetic oligonucleotide
  Antisense strand to SEQ ID NO: 1875783
uacugagcaagcugucaug

SEQ ID NO: 1875785 - RNA, 19 nt, Artificial Sequence
  Description of Artificial Sequence: Synthetic oligonucleotide
  Sense strand starting at position 2234 of SEQ ID NO: 1564396
uuaaguuguguggagaaca

SEQ ID NO: 1875786 - RNA, 19 nt, Artificial Sequence
  Description of Artificial Sequence: Synthetic oligonucleotide
  Antisense strand to SEQ ID NO: 1875785
uguucuccacacaacuuaa

SEQ ID NO: 1875787 - RNA, 19 nt, Artificial Sequence
  Description of Artificial Sequence: Synthetic oligonucleotide
  Sense strand starting at position 2750 of SEQ ID NO: 1564396
ccaguuuguauaugggaau

SEQ ID NO: 1875788 - RNA, 19 nt, Artificial Sequence
  Description of Artificial Sequence: Synthetic oligonucleotide
  Antisense strand to SEQ ID NO: 1875787
auucccauauacaaacugg

SEQ ID NO: 1875789 - RNA, 19 nt, Artificial Sequence
  Description of Artificial Sequence: Synthetic oligonucleotide
  Sense strand starting at position 2756 of SEQ ID NO: 1564396
uguauaugggaaugucaua

SEQ ID NO: 1875790 - RNA, 19 nt, Artificial Sequence
  Description of Artificial Sequence: Synthetic oligonucleotide
  Antisense strand to SEQ ID NO: 1875789
uaugacauucccauauaca

SEQ ID NO: 1875791 - RNA, 19 nt, Artificial Sequence
  Description of Artificial Sequence: Synthetic oligonucleotide
  Sense strand starting at position 3399 of SEQ ID NO: 1564396
ucauuagugcacuacgauc

SEQ ID NO: 1875792 - RNA, 19 nt, Artificial Sequence
  Description of Artificial Sequence: Synthetic oligonucleotide
  Antisense strand to SEQ ID NO: 1875791
gaucguagugcacuaauga

SEQ ID NO: 1875793 - RNA, 19 nt, Artificial Sequence
  Description of Artificial Sequence: Synthetic oligonucleotide
  Sense strand starting at position 3419 of SEQ ID NO: 1564396
agaaaucucuaauugugag

SEQ ID NO: 1875794 - RNA, 19 nt, Artificial Sequence
  Description of Artificial Sequence: Synthetic oligonucleotide
  Antisense strand to SEQ ID NO: 1875793
cucacaauuagagauuucu

SEQ ID NO: 1875795 - RNA, 19 nt, Artificial Sequence
  Description of Artificial Sequence: Synthetic oligonucleotide
  Sense strand starting at position 3422 of SEQ ID NO: 1564396
aaucucuaauugugaggua

SEQ ID NO: 1875796 - RNA, 19 nt, Artificial Sequence
  Description of Artificial Sequence: Synthetic oligonucleotide
  Antisense strand to SEQ ID NO: 1875795
uaccucacaauuagagauu

SEQ ID NO: 1875797 - RNA, 19 nt, Artificial Sequence
  Description of Artificial Sequence: Synthetic oligonucleotide
  Sense strand starting at position 3423 of SEQ ID NO: 1564396
aucucuaauugugagguau

SEQ ID NO: 1875798 - RNA, 19 nt, Artificial Sequence
  Description of Artificial Sequence: Synthetic oligonucleotide
  Antisense strand to SEQ ID NO: 1875797
auaccucacaauuagagau

SEQ ID NO: 1875799 - RNA, 19 nt, Artificial Sequence
  Description of Artificial Sequence: Synthetic oligonucleotide
  Sense strand starting at position 3548 of SEQ ID NO: 1564396
ggugaaaugugagugguuu

SEQ ID NO: 1875800 - RNA, 19 nt, Artificial Sequence
  Description of Artificial Sequence: Synthetic oligonucleotide
  Antisense strand to SEQ ID NO: 1875799
aaaccacucacauuucacc

SEQ ID NO: 1875801 - RNA, 19 nt, Artificial Sequence
  Description of Artificial Sequence: Synthetic oligonucleotide
  Sense strand starting at position 3549 of SEQ ID NO: 1564396
gugaaaugugagugguuua

SEQ ID NO: 1875802 - RNA, 19 nt, Artificial Sequence
  Description of Artificial Sequence: Synthetic oligonucleotide
  Antisense strand to SEQ ID NO: 1875801
uaaaccacucacauuucac

SEQ ID NO: 1875803 - RNA, 19 nt, Artificial Sequence
  Description of Artificial Sequence: Synthetic oligonucleotide
  Sense strand starting at position 3550 of SEQ ID NO: 1564396
ugaaaugugagugguuuac

SEQ ID NO: 1875804 - RNA, 19 nt, Artificial Sequence
  Description of Artificial Sequence: Synthetic oligonucleotide
  Antisense strand to SEQ ID NO: 1875803
guaaaccacucacauuuca

SEQ ID NO: 1875805 - RNA, 19 nt, Artificial Sequence
  Description of Artificial Sequence: Synthetic oligonucleotide
  Sense strand starting at position 3552 of SEQ ID NO: 1564396
aaaugugagugguuuaccu

SEQ ID NO: 1875806 - RNA, 19 nt, Artificial Sequence
  Description of Artificial Sequence: Synthetic oligonucleotide
  Antisense strand to SEQ ID NO: 1875805
agguaaaccacucacauuu

SEQ ID NO: 1875807 - RNA, 19 nt, Artificial Sequence
  Description of Artificial Sequence: Synthetic oligonucleotide
  Sense strand starting at position 3580 of SEQ ID NO: 1564396
cugugcuuuacgguuucua

SEQ ID NO: 1875808 - RNA, 19 nt, Artificial Sequence
  Description of Artificial Sequence: Synthetic oligonucleotide
  Antisense strand to SEQ ID NO: 1875807
uagaaaccguaaagcacag

SEQ ID NO: 1875809 - RNA, 19 nt, Artificial Sequence
  Description of Artificial Sequence: Synthetic oligonucleotide
  Sense strand starting at position 3588 of SEQ ID NO: 1564396
uacgguuucuaagggcaga

SEQ ID NO: 1875810 - RNA, 19 nt, Artificial Sequence
  Description of Artificial Sequence: Synthetic oligonucleotide
  Antisense strand to SEQ ID NO: 1875809
ucugcccuuagaaaccgua

SEQ ID NO: 1875811 - RNA, 19 nt, Artificial Sequence
  Description of Artificial Sequence: Synthetic oligonucleotide
  Sense strand starting at position 3612 of SEQ ID NO: 1564396
aaagaaaugugcuuagugu

SEQ ID NO: 1875812 - RNA, 19 nt, Artificial Sequence
  Description of Artificial Sequence: Synthetic oligonucleotide
  Antisense strand to SEQ ID NO: 1875811
acacuaagcacauuucuuu

SEQ ID NO: 1875813 - RNA, 19 nt, Artificial Sequence
  Description of Artificial Sequence: Synthetic oligonucleotide
  Sense strand starting at position 3613 of SEQ ID NO: 1564396
aagaaaugugcuuaguguu

SEQ ID NO: 1875814 - RNA, 19 nt, Artificial Sequence
  Description of Artificial Sequence: Synthetic oligonucleotide
  Antisense strand to SEQ ID NO: 1875813
aacacuaagcacauuucuu

SEQ ID NO: 1875815 - RNA, 19 nt, Artificial Sequence
  Description of Artificial Sequence: Synthetic oligonucleotide
  Sense strand starting at position 3616 of SEQ ID NO: 1564396
aaaugugcuuaguguucuu

SEQ ID NO: 1875816 - RNA, 19 nt, Artificial Sequence
  Description of Artificial Sequence: Synthetic oligonucleotide
  Antisense strand to SEQ ID NO: 1875815
aagaacacuaagcacauuu

SEQ ID NO: 1875817 - RNA, 19 nt, Artificial Sequence
  Description of Artificial Sequence: Synthetic oligonucleotide
  Sense strand starting at position 3619 of SEQ ID NO: 1564396
ugugcuuaguguucuugga

SEQ ID NO: 1875818 - RNA, 19 nt, Artificial Sequence
  Description of Artificial Sequence: Synthetic oligonucleotide
  Antisense strand to SEQ ID NO: 1875817
uccaagaacacuaagcaca

SEQ ID NO: 1875819 - RNA, 19 nt, Artificial Sequence
  Description of Artificial Sequence: Synthetic oligonucleotide
  Sense strand starting at position 3623 of SEQ ID NO: 1564396
cuuaguguucuuggaguag

SEQ ID NO: 1875820 - RNA, 19 nt, Artificial Sequence
  Description of Artificial Sequence: Synthetic oligonucleotide
  Antisense strand to SEQ ID NO: 1875819
cuacuccaagaacacuaag

SEQ ID NO: 1875821 - RNA, 19 nt, Artificial Sequence
  Description of Artificial Sequence: Synthetic oligonucleotide
  Sense strand starting at position 2235 of SEQ ID NO: 1564397
uuaaguuguguggagaaca

SEQ ID NO: 1875822 - RNA, 19 nt, Artificial Sequence
  Description of Artificial Sequence: Synthetic oligonucleotide
  Antisense strand to SEQ ID NO: 1875821
uguucuccacacaacuuaa

SEQ ID NO: 1875823 - RNA, 19 nt, Artificial Sequence
  Description of Artificial Sequence: Synthetic oligonucleotide
  Sense strand starting at position 2751 of SEQ ID NO: 1564397
ccaguuuguauaugggaau

SEQ ID NO: 1875824 - RNA, 19 nt, Artificial Sequence
  Description of Artificial Sequence: Synthetic oligonucleotide
  Antisense strand to SEQ ID NO: 1875823
auucccauauacaaacugg

SEQ ID NO: 1875825 - RNA, 19 nt, Artificial Sequence
  Description of Artificial Sequence: Synthetic oligonucleotide
  Sense strand starting at position 2757 of SEQ ID NO: 1564397
uguauaugggaaugucaua

SEQ ID NO: 1875826 - RNA, 19 nt, Artificial Sequence
  Description of Artificial Sequence: Synthetic oligonucleotide
  Antisense strand to SEQ ID NO: 1875825
uaugacauucccauauaca

SEQ ID NO: 1875827 - RNA, 19 nt, Artificial Sequence
  Description of Artificial Sequence: Synthetic oligonucleotide
  Sense strand starting at position 3148 of SEQ ID NO: 1564397
guuaaauaguauccaugau

SEQ ID NO: 1875828 - RNA, 19 nt, Artificial Sequence
  Description of Artificial Sequence: Synthetic oligonucleotide
  Antisense strand to SEQ ID NO: 1875827
aucauggauacuauuuaac

SEQ ID NO: 1875829 - RNA, 19 nt, Artificial Sequence
  Description of Artificial Sequence: Synthetic oligonucleotide
  Sense strand starting at position 3400 of SEQ ID NO: 1564397
ucauuagugcacuacgauc

SEQ ID NO: 1875830 - RNA, 19 nt, Artificial Sequence
  Description of Artificial Sequence: Synthetic oligonucleotide
  Antisense strand to SEQ ID NO: 1875829
gaucguagugcacuaauga

SEQ ID NO: 1875831 - RNA, 19 nt, Artificial Sequence
  Description of Artificial Sequence: Synthetic oligonucleotide
  Sense strand starting at position 3420 of SEQ ID NO: 1564397
agaaaucucuaauugugag

SEQ ID NO: 1875832 - RNA, 19 nt, Artificial Sequence
  Description of Artificial Sequence: Synthetic oligonucleotide
  Antisense strand to SEQ ID NO: 1875831
cucacaauuagagauuucu

SEQ ID NO: 1875833 - RNA, 19 nt, Artificial Sequence
  Description of Artificial Sequence: Synthetic oligonucleotide
  Sense strand starting at position 3423 of SEQ ID NO: 1564397
aaucucuaauugugaggua

SEQ ID NO: 1875834 - RNA, 19 nt, Artificial Sequence
  Description of Artificial Sequence: Synthetic oligonucleotide
  Antisense strand to SEQ ID NO: 1875833
uaccucacaauuagagauu

SEQ ID NO: 1875835 - RNA, 19 nt, Artificial Sequence
  Description of Artificial Sequence: Synthetic oligonucleotide
  Sense strand starting at position 3424 of SEQ ID NO: 1564397
aucucuaauugugagguau

SEQ ID NO: 1875836 - RNA, 19 nt, Artificial Sequence
  Description of Artificial Sequence: Synthetic oligonucleotide
  Antisense strand to SEQ ID NO: 1875835
auaccucacaauuagagau

SEQ ID NO: 1875837 - RNA, 19 nt, Artificial Sequence
  Description of Artificial Sequence: Synthetic oligonucleotide
  Sense strand starting at position 3549 of SEQ ID NO: 1564397
ggugaaaugugagugguuu

SEQ ID NO: 1875838 - RNA, 19 nt, Artificial Sequence
  Description of Artificial Sequence: Synthetic oligonucleotide
  Antisense strand to SEQ ID NO: 1875837
aaaccacucacauuucacc

SEQ ID NO: 1875839 - RNA, 19 nt, Artificial Sequence
  Description of Artificial Sequence: Synthetic oligonucleotide
  Sense strand starting at position 3550 of SEQ ID NO: 1564397
gugaaaugugagugguuua

SEQ ID NO: 1875840 - RNA, 19 nt, Artificial Sequence
  Description of Artificial Sequence: Synthetic oligonucleotide
  Antisense strand to SEQ ID NO: 1875839
uaaaccacucacauuucac

SEQ ID NO: 1875841 - RNA, 19 nt, Artificial Sequence
  Description of Artificial Sequence: Synthetic oligonucleotide
  Sense strand starting at position 3551 of SEQ ID NO: 1564397
ugaaaugugagugguuuac

SEQ ID NO: 1875842 - RNA, 19 nt, Artificial Sequence
  Description of Artificial Sequence: Synthetic oligonucleotide
  Antisense strand to SEQ ID NO: 1875841
guaaaccacucacauuuca

SEQ ID NO: 1875843 - RNA, 19 nt, Artificial Sequence
  Description of Artificial Sequence: Synthetic oligonucleotide
  Sense strand starting at position 3553 of SEQ ID NO: 1564397
aaaugugagugguuuaccu

SEQ ID NO: 1875844 - RNA, 19 nt, Artificial Sequence
  Description of Artificial Sequence: Synthetic oligonucleotide
  Antisense strand to SEQ ID NO: 1875843
agguaaaccacucacauuu

SEQ ID NO: 1875845 - RNA, 19 nt, Artificial Sequence
  Description of Artificial Sequence: Synthetic oligonucleotide
  Sense strand starting at position 3581 of SEQ ID NO: 1564397
cugugcuuuacgguuucua

SEQ ID NO: 1875846 - RNA, 19 nt, Artificial Sequence
  Description of Artificial Sequence: Synthetic oligonucleotide
  Antisense strand to SEQ ID NO: 1875845
uagaaaccguaaagcacag

SEQ ID NO: 1875847 - RNA, 19 nt, Artificial Sequence
  Description of Artificial Sequence: Synthetic oligonucleotide
  Sense strand starting at position 3589 of SEQ ID NO: 1564397
uacgguuucuaagggcaga

SEQ ID NO: 1875848 - RNA, 19 nt, Artificial Sequence
  Description of Artificial Sequence: Synthetic oligonucleotide
  Antisense strand to SEQ ID NO: 1875847
ucugcccuuagaaaccgua

SEQ ID NO: 1875849 - RNA, 19 nt, Artificial Sequence
  Description of Artificial Sequence: Synthetic oligonucleotide
  Sense strand starting at position 3613 of SEQ ID NO: 1564397
aaagaaaugugcuuagugu

SEQ ID NO: 1875850 - RNA, 19 nt, Artificial Sequence
  Description of Artificial Sequence: Synthetic oligonucleotide
  Antisense strand to SEQ ID NO: 1875849
acacuaagcacauuucuuu

SEQ ID NO: 1875851 - RNA, 19 nt, Artificial Sequence
  Description of Artificial Sequence: Synthetic oligonucleotide
  Sense strand starting at position 3614 of SEQ ID NO: 1564397
aagaaaugugcuuaguguu

SEQ ID NO: 1875852 - RNA, 19 nt, Artificial Sequence
  Description of Artificial Sequence: Synthetic oligonucleotide
  Antisense strand to SEQ ID NO: 1875851
aacacuaagcacauuucuu

SEQ ID NO: 1875853 - RNA, 19 nt, Artificial Sequence
  Description of Artificial Sequence: Synthetic oligonucleotide
  Sense strand starting at position 3617 of SEQ ID NO: 1564397
aaaugugcuuaguguucuu

SEQ ID NO: 1875854 - RNA, 19 nt, Artificial Sequence
  Description of Artificial Sequence: Synthetic oligonucleotide
  Antisense strand to SEQ ID NO: 1875853
aagaacacuaagcacauuu

SEQ ID NO: 1875855 - RNA, 19 nt, Artificial Sequence
  Description of Artificial Sequence: Synthetic oligonucleotide
  Sense strand starting at position 3620 of SEQ ID NO: 1564397
ugugcuuaguguucuugga

SEQ ID NO: 1875856 - RNA, 19 nt, Artificial Sequence
  Description of Artificial Sequence: Synthetic oligonucleotide
  Antisense strand to SEQ ID NO: 1875855
uccaagaacacuaagcaca

SEQ ID NO: 1875857 - RNA, 19 nt, Artificial Sequence
  Description of Artificial Sequence: Synthetic oligonucleotide
  Sense strand starting at position 3622 of SEQ ID NO: 1564397
ugcuuaguguucuuggagu

SEQ ID NO: 1875858 - RNA, 19 nt, Artificial Sequence
  Description of Artificial Sequence: Synthetic oligonucleotide
  Antisense strand to SEQ ID NO: 1875857
acuccaagaacacuaagca

SEQ ID NO: 1875859 - RNA, 19 nt, Artificial Sequence
  Description of Artificial Sequence: Synthetic oligonucleotide
  Sense strand starting at position 3624 of SEQ ID NO: 1564397
cuuaguguucuuggaguag

SEQ ID NO: 1875860 - RNA, 19 nt, Artificial Sequence
  Description of Artificial Sequence: Synthetic oligonucleotide
  Antisense strand to SEQ ID NO: 1875859
cuacuccaagaacacuaag

SEQ ID NO: 1875861 - RNA, 19 nt, Artificial Sequence
  Description of Artificial Sequence: Synthetic oligonucleotide
  Sense strand starting at position 88 of SEQ ID NO: 1564411
caauccuucggcgauaaca

SEQ ID NO: 1875862 - RNA, 19 nt, Artificial Sequence
  Description of Artificial Sequence: Synthetic oligonucleotide
  Antisense strand to SEQ ID NO: 1875861
uguuaucgccgaaggauug

SEQ ID NO: 1875863 - RNA, 19 nt, Artificial Sequence
  Description of Artificial Sequence: Synthetic oligonucleotide
  Sense strand starting at position 96 of SEQ ID NO: 1564411
cggcgauaacaagaaagua

SEQ ID NO: 1875864 - RNA, 19 nt, Artificial Sequence
  Description of Artificial Sequence: Synthetic oligonucleotide
  Antisense strand to SEQ ID NO: 1875863
uacuuucuuguuaucgccg

SEQ ID NO: 1875865 - RNA, 19 nt, Artificial Sequence
  Description of Artificial Sequence: Synthetic oligonucleotide
  Sense strand starting at position 139 of SEQ ID NO: 1564411
aucaacauucgagguuagu

SEQ ID NO: 1875866 - RNA, 19 nt, Artificial Sequence
  Description of Artificial Sequence: Synthetic oligonucleotide
  Antisense strand to SEQ ID NO: 1875865
acuaaccucgaauguugau

SEQ ID NO: 1875867 - RNA, 19 nt, Artificial Sequence
  Description of Artificial Sequence: Synthetic oligonucleotide
  Sense strand starting at position 166 of SEQ ID NO: 1564411
ggacgacuucugcauguau

SEQ ID NO: 1875868 - RNA, 19 nt, Artificial Sequence
  Description of Artificial Sequence: Synthetic oligonucleotide
  Antisense strand to SEQ ID NO: 1875867
auacaugcagaagucgucc

SEQ ID NO: 1875869 - RNA, 19 nt, Artificial Sequence
  Description of Artificial Sequence: Synthetic oligonucleotide
  Sense strand starting at position 241 of SEQ ID NO: 1564411
cuguccagugacugaauua

SEQ ID NO: 1875870 - RNA, 19 nt, Artificial Sequence
  Description of Artificial Sequence: Synthetic oligonucleotide
  Antisense strand to SEQ ID NO: 1875869
uaauucagucacuggacag

SEQ ID NO: 1875871 - RNA, 19 nt, Artificial Sequence
  Description of Artificial Sequence: Synthetic oligonucleotide
  Sense strand starting at position 511 of SEQ ID NO: 1564411
acuuguuacguugugcuau

SEQ ID NO: 1875872 - RNA, 19 nt, Artificial Sequence
  Description of Artificial Sequence: Synthetic oligonucleotide
  Antisense strand to SEQ ID NO: 1875871
auagcacaacguaacaagu

SEQ ID NO: 1875873 - RNA, 19 nt, Artificial Sequence
  Description of Artificial Sequence: Synthetic oligonucleotide
  Sense strand starting at position 514 of SEQ ID NO: 1564411
uguuacguugugcuauauu

SEQ ID NO: 1875874 - RNA, 19 nt, Artificial Sequence
  Description of Artificial Sequence: Synthetic oligonucleotide
  Antisense strand to SEQ ID NO: 1875873
aauauagcacaacguaaca

SEQ ID NO: 1875875 - RNA, 19 nt, Artificial Sequence
  Description of Artificial Sequence: Synthetic oligonucleotide
  Sense strand starting at position 519 of SEQ ID NO: 1564411
cguugugcuauauuauagu

SEQ ID NO: 1875876 - RNA, 19 nt, Artificial Sequence
  Description of Artificial Sequence: Synthetic oligonucleotide
  Antisense strand to SEQ ID NO: 1875875
acuauaauauagcacaacg

SEQ ID NO: 1875877 - RNA, 19 nt, Artificial Sequence
  Description of Artificial Sequence: Synthetic oligonucleotide
  Sense strand starting at position 547 of SEQ ID NO: 1564411
ucaagaauuccacaggccu

SEQ ID NO: 1875878 - RNA, 19 nt, Artificial Sequence
  Description of Artificial Sequence: Synthetic oligonucleotide
  Antisense strand to SEQ ID NO: 1875877
aggccuguggaauucuuga

SEQ ID NO: 1875879 - RNA, 19 nt, Artificial Sequence
  Description of Artificial Sequence: Synthetic oligonucleotide
  Sense strand starting at position 626 of SEQ ID NO: 1564411
uggccauuugcccgagcaa

SEQ ID NO: 1875880 - RNA, 19 nt, Artificial Sequence
  Description of Artificial Sequence: Synthetic oligonucleotide
  Antisense strand to SEQ ID NO: 1875879
uugcucgggcaaauggcca

SEQ ID NO: 1875881 - RNA, 19 nt, Artificial Sequence
  Description of Artificial Sequence: Synthetic oligonucleotide
  Sense strand starting at position 627 of SEQ ID NO: 1564411
ggccauuugcccgagcaaa

SEQ ID NO: 1875882 - RNA, 19 nt, Artificial Sequence
  Description of Artificial Sequence: Synthetic oligonucleotide
  Antisense strand to SEQ ID NO: 1875881
uuugcucgggcaaauggcc

SEQ ID NO: 1875883 - RNA, 19 nt, Artificial Sequence
  Description of Artificial Sequence: Synthetic oligonucleotide
  Sense strand starting at position 747 of SEQ ID NO: 1564411
gagccucacccuggacaua

SEQ ID NO: 1875884 - RNA, 19 nt, Artificial Sequence
  Description of Artificial Sequence: Synthetic oligonucleotide
  Antisense strand to SEQ ID NO: 1875883
uauguccagggugaggcuc

SEQ ID NO: 1875885 - RNA, 19 nt, Artificial Sequence
  Description of Artificial Sequence: Synthetic oligonucleotide
  Sense strand starting at position 880 of SEQ ID NO: 1564411
ggcccaguacuauaccaga

SEQ ID NO: 1875886 - RNA, 19 nt, Artificial Sequence
  Description of Artificial Sequence: Synthetic oligonucleotide
  Antisense strand to SEQ ID NO: 1875885
ucugguauaguacugggcc

SEQ ID NO: 1875887 - RNA, 19 nt, Artificial Sequence
  Description of Artificial Sequence: Synthetic oligonucleotide
  Sense strand starting at position 1389 of SEQ ID NO: 1564411
cccuaaaucgcguucguuu

SEQ ID NO: 1875888 - RNA, 19 nt, Artificial Sequence
  Description of Artificial Sequence: Synthetic oligonucleotide
  Antisense strand to SEQ ID NO: 1875887
aaacgaacgcgauuuaggg

SEQ ID NO: 1875889 - RNA, 19 nt, Artificial Sequence
  Description of Artificial Sequence: Synthetic oligonucleotide
  Sense strand starting at position 1390 of SEQ ID NO: 1564411
ccuaaaucgcguucguuua

SEQ ID NO: 1875890 - RNA, 19 nt, Artificial Sequence
  Description of Artificial Sequence: Synthetic oligonucleotide
  Antisense strand to SEQ ID NO: 1875889
uaaacgaacgcgauuuagg

SEQ ID NO: 1875891 - RNA, 19 nt, Artificial Sequence
  Description of Artificial Sequence: Synthetic oligonucleotide
  Sense strand starting at position 1394 of SEQ ID NO: 1564411
aaucgcguucguuuaguca

SEQ ID NO: 1875892 - RNA, 19 nt, Artificial Sequence
  Description of Artificial Sequence: Synthetic oligonucleotide
  Antisense strand to SEQ ID NO: 1875891
ugacuaaacgaacgcgauu

SEQ ID NO: 1875893 - RNA, 19 nt, Artificial Sequence
  Description of Artificial Sequence: Synthetic oligonucleotide
  Sense strand starting at position 1410 of SEQ ID NO: 1564411
ucauaagaucgcgggauua

SEQ ID NO: 1875894 - RNA, 19 nt, Artificial Sequence
  Description of Artificial Sequence: Synthetic oligonucleotide
  Antisense strand to SEQ ID NO: 1875893
uaaucccgcgaucuuauga

SEQ ID NO: 1875895 - RNA, 19 nt, Artificial Sequence
  Description of Artificial Sequence: Synthetic oligonucleotide
  Sense strand starting at position 1420 of SEQ ID NO: 1564411
gcgggauuacguaguccca

SEQ ID NO: 1875896 - RNA, 19 nt, Artificial Sequence
  Description of Artificial Sequence: Synthetic oligonucleotide
  Antisense strand to SEQ ID NO: 1875895
ugggacuacguaaucccgc

SEQ ID NO: 1875897 - RNA, 19 nt, Artificial Sequence
  Description of Artificial Sequence: Synthetic oligonucleotide
  Sense strand starting at position 1490 of SEQ ID NO: 1564411
cuucgaauucuagggaucu

SEQ ID NO: 1875898 - RNA, 19 nt, Artificial Sequence
  Description of Artificial Sequence: Synthetic oligonucleotide
  Antisense strand to SEQ ID NO: 1875897
agaucccuagaauucgaag

SEQ ID NO: 1875899 - RNA, 19 nt, Artificial Sequence
  Description of Artificial Sequence: Synthetic oligonucleotide
  Sense strand starting at position 2015 of SEQ ID NO: 1564411
gugugccugcgcuuuauga

SEQ ID NO: 1875900 - RNA, 19 nt, Artificial Sequence
  Description of Artificial Sequence: Synthetic oligonucleotide
  Antisense strand to SEQ ID NO: 1875899
ucauaaagcgcaggcacac

SEQ ID NO: 1875901 - RNA, 19 nt, Artificial Sequence
  Description of Artificial Sequence: Synthetic oligonucleotide
  Sense strand starting at position 2083 of SEQ ID NO: 1564411
acugaaugacguugaugau

SEQ ID NO: 1875902 - RNA, 19 nt, Artificial Sequence
  Description of Artificial Sequence: Synthetic oligonucleotide
  Antisense strand to SEQ ID NO: 1875901
aucaucaacgucauucagu

SEQ ID NO: 1875903 - RNA, 19 nt, Artificial Sequence
  Description of Artificial Sequence: Synthetic oligonucleotide
  Sense strand starting at position 2281 of SEQ ID NO: 1564411
acugaaugacguugauuau

SEQ ID NO: 1875904 - RNA, 19 nt, Artificial Sequence
  Description of Artificial Sequence: Synthetic oligonucleotide
  Antisense strand to SEQ ID NO: 1875903
auaaucaacgucauucagu

SEQ ID NO: 1875905 - RNA, 19 nt, Artificial Sequence
  Description of Artificial Sequence: Synthetic oligonucleotide
  Sense strand starting at position 2282 of SEQ ID NO: 1564411
cugaaugacguugauuaua

SEQ ID NO: 1875906 - RNA, 19 nt, Artificial Sequence
  Description of Artificial Sequence: Synthetic oligonucleotide
  Antisense strand to SEQ ID NO: 1875905
uauaaucaacgucauucag

SEQ ID NO: 1875907 - RNA, 19 nt, Artificial Sequence
  Description of Artificial Sequence: Synthetic oligonucleotide
  Sense strand starting at position 2284 of SEQ ID NO: 1564411
gaaugacguugauuauaac

SEQ ID NO: 1875908 - RNA, 19 nt, Artificial Sequence
  Description of Artificial Sequence: Synthetic oligonucleotide
  Antisense strand to SEQ ID NO: 1875907
guuauaaucaacgucauuc

SEQ ID NO: 1875909 - RNA, 19 nt, Artificial Sequence
  Description of Artificial Sequence: Synthetic oligonucleotide
  Sense strand starting at position 2388 of SEQ ID NO: 1564411
acugaaugacccuggugau

SEQ ID NO: 1875910 - RNA, 19 nt, Artificial Sequence
  Description of Artificial Sequence: Synthetic oligonucleotide
  Antisense strand to SEQ ID NO: 1875909
aucaccagggucauucagu

SEQ ID NO: 1875911 - RNA, 19 nt, Artificial Sequence
  Description of Artificial Sequence: Synthetic oligonucleotide
  Sense strand starting at position 2389 of SEQ ID NO: 1564411
cugaaugacccuggugaua

SEQ ID NO: 1875912 - RNA, 19 nt, Artificial Sequence
  Description of Artificial Sequence: Synthetic oligonucleotide
  Antisense strand to SEQ ID NO: 1875911
uaucaccagggucauucag

SEQ ID NO: 1875913 - RNA, 19 nt, Artificial Sequence
  Description of Artificial Sequence: Synthetic oligonucleotide
  Sense strand starting at position 2522 of SEQ ID NO: 1564411
uagccaugggauugugaaa

SEQ ID NO: 1875914 - RNA, 19 nt, Artificial Sequence
  Description of Artificial Sequence: Synthetic oligonucleotide
  Antisense strand to SEQ ID NO: 1875913
uuucacaaucccauggcua

SEQ ID NO: 1875915 - RNA, 19 nt, Artificial Sequence
  Description of Artificial Sequence: Synthetic oligonucleotide
  Sense strand starting at position 2610 of SEQ ID NO: 1564411
aguuguccuacguucguaa

SEQ ID NO: 1875916 - RNA, 19 nt, Artificial Sequence
  Description of Artificial Sequence: Synthetic oligonucleotide
  Antisense strand to SEQ ID NO: 1875915
uuacgaacguaggacaacu

SEQ ID NO: 1875917 - RNA, 19 nt, Artificial Sequence
  Description of Artificial Sequence: Synthetic oligonucleotide
  Sense strand starting at position 2774 of SEQ ID NO: 1564411
cuagauuccuggcuuuaac

SEQ ID NO: 1875918 - RNA, 19 nt, Artificial Sequence
  Description of Artificial Sequence: Synthetic oligonucleotide
  Antisense strand to SEQ ID NO: 1875917
guuaaagccaggaaucuag

SEQ ID NO: 1875919 - RNA, 19 nt, Artificial Sequence
  Description of Artificial Sequence: Synthetic oligonucleotide
  Sense strand starting at position 2831 of SEQ ID NO: 1564411
ucugaacucucagcgaaac

SEQ ID NO: 1875920 - RNA, 19 nt, Artificial Sequence
  Description of Artificial Sequence: Synthetic oligonucleotide
  Antisense strand to SEQ ID NO: 1875919
guuucgcugagaguucaga

SEQ ID NO: 1875921 - RNA, 19 nt, Artificial Sequence
  Description of Artificial Sequence: Synthetic oligonucleotide
  Sense strand starting at position 3015 of SEQ ID NO: 1564411
gagugaaguugguuuacug

SEQ ID NO: 1875922 - RNA, 19 nt, Artificial Sequence
  Description of Artificial Sequence: Synthetic oligonucleotide
  Antisense strand to SEQ ID NO: 1875921
caguaaaccaacuucacuc

SEQ ID NO: 1875923 - RNA, 19 nt, Artificial Sequence
  Description of Artificial Sequence: Synthetic oligonucleotide
  Sense strand starting at position 3086 of SEQ ID NO: 1564411
ugucgacaccuuuaccauu

SEQ ID NO: 1875924 - RNA, 19 nt, Artificial Sequence
  Description of Artificial Sequence: Synthetic oligonucleotide
  Antisense strand to SEQ ID NO: 1875923
aaugguaaaggugucgaca

SEQ ID NO: 1875925 - RNA, 19 nt, Artificial Sequence
  Description of Artificial Sequence: Synthetic oligonucleotide
  Sense strand starting at position 3328 of SEQ ID NO: 1564411
acaagugguugccuaauuu

SEQ ID NO: 1875926 - RNA, 19 nt, Artificial Sequence
  Description of Artificial Sequence: Synthetic oligonucleotide
  Antisense strand to SEQ ID NO: 1875925
aaauuaggcaaccacuugu

SEQ ID NO: 1875927 - RNA, 19 nt, Artificial Sequence
  Description of Artificial Sequence: Synthetic oligonucleotide
  Sense strand starting at position 3337 of SEQ ID NO: 1564411
ugccuaauuuagcugcaaa

SEQ ID NO: 1875928 - RNA, 19 nt, Artificial Sequence
  Description of Artificial Sequence: Synthetic oligonucleotide
  Antisense strand to SEQ ID NO: 1875927
uuugcagcuaaauuaggca

SEQ ID NO: 1875929 - RNA, 19 nt, Artificial Sequence
  Description of Artificial Sequence: Synthetic oligonucleotide
  Sense strand starting at position 3811 of SEQ ID NO: 1564411
cugcaaccagccuaagaau

SEQ ID NO: 1875930 - RNA, 19 nt, Artificial Sequence
  Description of Artificial Sequence: Synthetic oligonucleotide
  Antisense strand to SEQ ID NO: 1875929
auucuuaggcugguugcag

SEQ ID NO: 1875931 - RNA, 19 nt, Artificial Sequence
  Description of Artificial Sequence: Synthetic oligonucleotide
  Sense strand starting at position 3835 of SEQ ID NO: 1564411
ugaguuuauguuuaaagca

SEQ ID NO: 1875932 - RNA, 19 nt, Artificial Sequence
  Description of Artificial Sequence: Synthetic oligonucleotide
  Antisense strand to SEQ ID NO: 1875931
ugcuuuaaacauaaacuca

SEQ ID NO: 1875933 - RNA, 19 nt, Artificial Sequence
  Description of Artificial Sequence: Synthetic oligonucleotide
  Sense strand starting at position 3889 of SEQ ID NO: 1564411
uacugugaaugucccugaa

SEQ ID NO: 1875934 - RNA, 19 nt, Artificial Sequence
  Description of Artificial Sequence: Synthetic oligonucleotide
  Antisense strand to SEQ ID NO: 1875933
uucagggacauucacagua

SEQ ID NO: 1875935 - RNA, 19 nt, Artificial Sequence
  Description of Artificial Sequence: Synthetic oligonucleotide
  Sense strand starting at position 3891 of SEQ ID NO: 1564411
cugugaaugucccugaauu

SEQ ID NO: 1875936 - RNA, 19 nt, Artificial Sequence
  Description of Artificial Sequence: Synthetic oligonucleotide
  Antisense strand to SEQ ID NO: 1875935
aauucagggacauucacag

SEQ ID NO: 1875937 - RNA, 19 nt, Artificial Sequence
  Description of Artificial Sequence: Synthetic oligonucleotide
  Sense strand starting at position 3892 of SEQ ID NO: 1564411
ugugaaugucccugaauua

SEQ ID NO: 1875938 - RNA, 19 nt, Artificial Sequence
  Description of Artificial Sequence: Synthetic oligonucleotide
  Antisense strand to SEQ ID NO: 1875937
uaauucagggacauucaca

SEQ ID NO: 1875939 - RNA, 19 nt, Artificial Sequence
  Description of Artificial Sequence: Synthetic oligonucleotide
  Sense strand starting at position 3893 of SEQ ID NO: 1564411
gugaaugucccugaauuac

SEQ ID NO: 1875940 - RNA, 19 nt, Artificial Sequence
  Description of Artificial Sequence: Synthetic oligonucleotide
  Antisense strand to SEQ ID NO: 1875939
guaauucagggacauucac

SEQ ID NO: 1875941 - RNA, 19 nt, Artificial Sequence
  Description of Artificial Sequence: Synthetic oligonucleotide
  Sense strand starting at position 309 of SEQ ID NO: 1564412
uaaagauguccaggucuac

SEQ ID NO: 1875942 - RNA, 19 nt, Artificial Sequence
  Description of Artificial Sequence: Synthetic oligonucleotide
  Antisense strand to SEQ ID NO: 1875941
guagaccuggacaucuuua

SEQ ID NO: 1875943 - RNA, 19 nt, Artificial Sequence
  Description of Artificial Sequence: Synthetic oligonucleotide
  Sense strand starting at position 501 of SEQ ID NO: 1564412
agucaugauagugaaaugu

SEQ ID NO: 1875944 - RNA, 19 nt, Artificial Sequence
  Description of Artificial Sequence: Synthetic oligonucleotide
  Antisense strand to SEQ ID NO: 1875943
acauuucacuaucaugacu

SEQ ID NO: 1875945 - RNA, 19 nt, Artificial Sequence
  Description of Artificial Sequence: Synthetic oligonucleotide
  Sense strand starting at position 510 of SEQ ID NO: 1564412
agugaaauguucccaauga

SEQ ID NO: 1875946 - RNA, 19 nt, Artificial Sequence
  Description of Artificial Sequence: Synthetic oligonucleotide
  Antisense strand to SEQ ID NO: 1875945
ucauugggaacauuucacu

SEQ ID NO: 1875947 - RNA, 19 nt, Artificial Sequence
  Description of Artificial Sequence: Synthetic oligonucleotide
  Sense strand starting at position 597 of SEQ ID NO: 1564412
uuaucuuugcccugaagac

SEQ ID NO: 1875948 - RNA, 19 nt, Artificial Sequence
  Description of Artificial Sequence: Synthetic oligonucleotide
  Antisense strand to SEQ ID NO: 1875947
gucuucagggcaaagauaa

SEQ ID NO: 1875949 - RNA, 19 nt, Artificial Sequence
  Description of Artificial Sequence: Synthetic oligonucleotide
  Sense strand starting at position 721 of SEQ ID NO: 1564412
cuuaauguucgauacuuua

SEQ ID NO: 1875950 - RNA, 19 nt, Artificial Sequence
  Description of Artificial Sequence: Synthetic oligonucleotide
  Antisense strand to SEQ ID NO: 1875949
uaaaguaucgaacauuaag

SEQ ID NO: 1875951 - RNA, 19 nt, Artificial Sequence
  Description of Artificial Sequence: Synthetic oligonucleotide
  Sense strand starting at position 775 of SEQ ID NO: 1564412
aucaaauucggaggucuuu

SEQ ID NO: 1875952 - RNA, 19 nt, Artificial Sequence
  Description of Artificial Sequence: Synthetic oligonucleotide
  Antisense strand to SEQ ID NO: 1875951
aaagaccuccgaauuugau

SEQ ID NO: 1875953 - RNA, 19 nt, Artificial Sequence
  Description of Artificial Sequence: Synthetic oligonucleotide
  Sense strand starting at position 900 of SEQ ID NO: 1564412
aagguuauuucgcuuuaag

SEQ ID NO: 1875954 - RNA, 19 nt, Artificial Sequence
  Description of Artificial Sequence: Synthetic oligonucleotide
  Antisense strand to SEQ ID NO: 1875953
cuuaaagcgaaauaaccuu

SEQ ID NO: 1875955 - RNA, 19 nt, Artificial Sequence
  Description of Artificial Sequence: Synthetic oligonucleotide
  Sense strand starting at position 1063 of SEQ ID NO: 1564412
cuuucuaugccguagaaag

SEQ ID NO: 1875956 - RNA, 19 nt, Artificial Sequence
  Description of Artificial Sequence: Synthetic oligonucleotide
  Antisense strand to SEQ ID NO: 1875955
cuuucuacggcauagaaag

SEQ ID NO: 1875957 - RNA, 19 nt, Artificial Sequence
  Description of Artificial Sequence: Synthetic oligonucleotide
  Sense strand starting at position 1198 of SEQ ID NO: 1564412
acgguuuaucaagaguuaa

SEQ ID NO: 1875958 - RNA, 19 nt, Artificial Sequence
  Description of Artificial Sequence: Synthetic oligonucleotide
  Antisense strand to SEQ ID NO: 1875957
uuaacucuugauaaaccgu

SEQ ID NO: 1875959 - RNA, 19 nt, Artificial Sequence
  Description of Artificial Sequence: Synthetic oligonucleotide
  Sense strand starting at position 1210 of SEQ ID NO: 1564412
gaguuaaagggaugccaau

SEQ ID NO: 1875960 - RNA, 19 nt, Artificial Sequence
  Description of Artificial Sequence: Synthetic oligonucleotide
  Antisense strand to SEQ ID NO: 1875959
auuggcaucccuuuaacuc

SEQ ID NO: 1875961 - RNA, 19 nt, Artificial Sequence
  Description of Artificial Sequence: Synthetic oligonucleotide
  Sense strand starting at position 1269 of SEQ ID NO: 1564412
uuucuauuucuguggucua

SEQ ID NO: 1875962 - RNA, 19 nt, Artificial Sequence
  Description of Artificial Sequence: Synthetic oligonucleotide
  Antisense strand to SEQ ID NO: 1875961
uagaccacagaaauagaaa

SEQ ID NO: 1875963 - RNA, 19 nt, Artificial Sequence
  Description of Artificial Sequence: Synthetic oligonucleotide
  Sense strand starting at position 1317 of SEQ ID NO: 1564412
ggcguuaauacgucgucag

SEQ ID NO: 1875964 - RNA, 19 nt, Artificial Sequence
  Description of Artificial Sequence: Synthetic oligonucleotide
  Antisense strand to SEQ ID NO: 1875963
cugacgacguauuaacgcc

SEQ ID NO: 1875965 - RNA, 19 nt, Artificial Sequence
  Description of Artificial Sequence: Synthetic oligonucleotide
  Sense strand starting at position 1319 of SEQ ID NO: 1564412
cguuaauacgucgucagug

SEQ ID NO: 1875966 - RNA, 19 nt, Artificial Sequence
  Description of Artificial Sequence: Synthetic oligonucleotide
  Antisense strand to SEQ ID NO: 1875965
cacugacgacguauuaacg

SEQ ID NO: 1875967 - RNA, 19 nt, Artificial Sequence
  Description of Artificial Sequence: Synthetic oligonucleotide
  Sense strand starting at position 1436 of SEQ ID NO: 1564412
agaaguuccgacgguauuu

SEQ ID NO: 1875968 - RNA, 19 nt, Artificial Sequence
  Description of Artificial Sequence: Synthetic oligonucleotide
  Antisense strand to SEQ ID NO: 1875967
aaauaccgucggaacuucu

SEQ ID NO: 1875969 - RNA, 19 nt, Artificial Sequence
  Description of Artificial Sequence: Synthetic oligonucleotide
  Sense strand starting at position 1510 of SEQ ID NO: 1564412
ggcagaaaugcagggauaa

SEQ ID NO: 1875970 - RNA, 19 nt, Artificial Sequence
  Description of Artificial Sequence: Synthetic oligonucleotide
  Antisense strand to SEQ ID NO: 1875969
uuaucccugcauuucugcc

SEQ ID NO: 1875971 - RNA, 19 nt, Artificial Sequence
  Description of Artificial Sequence: Synthetic oligonucleotide
  Sense strand starting at position 1511 of SEQ ID NO: 1564412
gcagaaaugcagggauaag

SEQ ID NO: 1875972 - RNA, 19 nt, Artificial Sequence
  Description of Artificial Sequence: Synthetic oligonucleotide
  Antisense strand to SEQ ID NO: 1875971
cuuaucccugcauuucugc

SEQ ID NO: 1875973 - RNA, 19 nt, Artificial Sequence
  Description of Artificial Sequence: Synthetic oligonucleotide
  Sense strand starting at position 1520 of SEQ ID NO: 1564412
cagggauaagcuugcaaac

SEQ ID NO: 1875974 - RNA, 19 nt, Artificial Sequence
  Description of Artificial Sequence: Synthetic oligonucleotide
  Antisense strand to SEQ ID NO: 1875973
guuugcaagcuuaucccug

SEQ ID NO: 1875975 - RNA, 19 nt, Artificial Sequence
  Description of Artificial Sequence: Synthetic oligonucleotide
  Sense strand starting at position 1561 of SEQ ID NO: 1564412
gcgcgguagguuccugaca

SEQ ID NO: 1875976 - RNA, 19 nt, Artificial Sequence
  Description of Artificial Sequence: Synthetic oligonucleotide
  Antisense strand to SEQ ID NO: 1875975
ugucaggaaccuaccgcgc

SEQ ID NO: 1875977 - RNA, 19 nt, Artificial Sequence
  Description of Artificial Sequence: Synthetic oligonucleotide
  Sense strand starting at position 1685 of SEQ ID NO: 1564412
caauccuucggcgauaaca

SEQ ID NO: 1875978 - RNA, 19 nt, Artificial Sequence
  Description of Artificial Sequence: Synthetic oligonucleotide
  Antisense strand to SEQ ID NO: 1875977
uguuaucgccgaaggauug

SEQ ID NO: 1875979 - RNA, 19 nt, Artificial Sequence
  Description of Artificial Sequence: Synthetic oligonucleotide
  Sense strand starting at position 1693 of SEQ ID NO: 1564412
cggcgauaacaagaaagua

SEQ ID NO: 1875980 - RNA, 19 nt, Artificial Sequence
  Description of Artificial Sequence: Synthetic oligonucleotide
  Antisense strand to SEQ ID NO: 1875979
uacuuucuuguuaucgccg

SEQ ID NO: 1875981 - RNA, 19 nt, Artificial Sequence
  Description of Artificial Sequence: Synthetic oligonucleotide
  Sense strand starting at position 1763 of SEQ ID NO: 1564412
ggacgacuucugcauguau

SEQ ID NO: 1875982 - RNA, 19 nt, Artificial Sequence
  Description of Artificial Sequence: Synthetic oligonucleotide
  Antisense strand to SEQ ID NO: 1875981
auacaugcagaagucgucc

SEQ ID NO: 1875983 - RNA, 19 nt, Artificial Sequence
  Description of Artificial Sequence: Synthetic oligonucleotide
  Sense strand starting at position 1838 of SEQ ID NO: 1564412
cuguccagugacugaauua

SEQ ID NO: 1875984 - RNA, 19 nt, Artificial Sequence
  Description of Artificial Sequence: Synthetic oligonucleotide
  Antisense strand to SEQ ID NO: 1875983
uaauucagucacuggacag

SEQ ID NO: 1875985 - RNA, 19 nt, Artificial Sequence
  Description of Artificial Sequence: Synthetic oligonucleotide
  Sense strand starting at position 2108 of SEQ ID NO: 1564412
acuuguuacguugugcuau

SEQ ID NO: 1875986 - RNA, 19 nt, Artificial Sequence
  Description of Artificial Sequence: Synthetic oligonucleotide
  Antisense strand to SEQ ID NO: 1875985
auagcacaacguaacaagu

SEQ ID NO: 1875987 - RNA, 19 nt, Artificial Sequence
  Description of Artificial Sequence: Synthetic oligonucleotide
  Sense strand starting at position 2111 of SEQ ID NO: 1564412
uguuacguugugcuauauu

SEQ ID NO: 1875988 - RNA, 19 nt, Artificial Sequence
  Description of Artificial Sequence: Synthetic oligonucleotide
  Antisense strand to SEQ ID NO: 1875987
aauauagcacaacguaaca

SEQ ID NO: 1875989 - RNA, 19 nt, Artificial Sequence
  Description of Artificial Sequence: Synthetic oligonucleotide
  Sense strand starting at position 2116 of SEQ ID NO: 1564412
cguugugcuauauuauagu

SEQ ID NO: 1875990 - RNA, 19 nt, Artificial Sequence
  Description of Artificial Sequence: Synthetic oligonucleotide
  Antisense strand to SEQ ID NO: 1875989
acuauaauauagcacaacg

SEQ ID NO: 1875991 - RNA, 19 nt, Artificial Sequence
  Description of Artificial Sequence: Synthetic oligonucleotide
  Sense strand starting at position 2144 of SEQ ID NO: 1564412
ucaagaauuccacaggccu

SEQ ID NO: 1875992 - RNA, 19 nt, Artificial Sequence
  Description of Artificial Sequence: Synthetic oligonucleotide
  Antisense strand to SEQ ID NO: 1875991
aggccuguggaauucuuga

SEQ ID NO: 1875993 - RNA, 19 nt, Artificial Sequence
  Description of Artificial Sequence: Synthetic oligonucleotide
  Sense strand starting at position 2223 of SEQ ID NO: 1564412
uggccauuugcccgagcaa

SEQ ID NO: 1875994 - RNA, 19 nt, Artificial Sequence
  Description of Artificial Sequence: Synthetic oligonucleotide
  Antisense strand to SEQ ID NO: 1875993
uugcucgggcaaauggcca

SEQ ID NO: 1875995 - RNA, 19 nt, Artificial Sequence
  Description of Artificial Sequence: Synthetic oligonucleotide
  Sense strand starting at position 2224 of SEQ ID NO: 1564412
ggccauuugcccgagcaaa

SEQ ID NO: 1875996 - RNA, 19 nt, Artificial Sequence
  Description of Artificial Sequence: Synthetic oligonucleotide
  Antisense strand to SEQ ID NO: 1875995
uuugcucgggcaaauggcc

SEQ ID NO: 1875997 - RNA, 19 nt, Artificial Sequence
  Description of Artificial Sequence: Synthetic oligonucleotide
  Sense strand starting at position 2344 of SEQ ID NO: 1564412
gagccucacccuggacaua

SEQ ID NO: 1875998 - RNA, 19 nt, Artificial Sequence
  Description of Artificial Sequence: Synthetic oligonucleotide
  Antisense strand to SEQ ID NO: 1875997
uauguccagggugaggcuc

SEQ ID NO: 1875999 - RNA, 19 nt, Artificial Sequence
  Description of Artificial Sequence: Synthetic oligonucleotide
  Sense strand starting at position 2477 of SEQ ID NO: 1564412
ggcccaguacuauaccaga

SEQ ID NO: 1876000 - RNA, 19 nt, Artificial Sequence
  Description of Artificial Sequence: Synthetic oligonucleotide
  Antisense strand to SEQ ID NO: 1875999
ucugguauaguacugggcc

SEQ ID NO: 1876001 - RNA, 19 nt, Artificial Sequence
  Description of Artificial Sequence: Synthetic oligonucleotide
  Sense strand starting at position 2986 of SEQ ID NO: 1564412
cccuaaaucgcguucguuu

SEQ ID NO: 1876002 - RNA, 19 nt, Artificial Sequence
  Description of Artificial Sequence: Synthetic oligonucleotide
  Antisense strand to SEQ ID NO: 1876001
aaacgaacgcgauuuaggg

SEQ ID NO: 1876003 - RNA, 19 nt, Artificial Sequence
  Description of Artificial Sequence: Synthetic oligonucleotide
  Sense strand starting at position 2987 of SEQ ID NO: 1564412
ccuaaaucgcguucguuua

SEQ ID NO: 1876004 - RNA, 19 nt, Artificial Sequence
  Description of Artificial Sequence: Synthetic oligonucleotide
  Antisense strand to SEQ ID NO: 1876003
uaaacgaacgcgauuuagg

SEQ ID NO: 1876005 - RNA, 19 nt, Artificial Sequence
  Description of Artificial Sequence: Synthetic oligonucleotide
  Sense strand starting at position 2991 of SEQ ID NO: 1564412
aaucgcguucguuuaguca

SEQ ID NO: 1876006 - RNA, 19 nt, Artificial Sequence
  Description of Artificial Sequence: Synthetic oligonucleotide
  Antisense strand to SEQ ID NO: 1876005
ugacuaaacgaacgcgauu

SEQ ID NO: 1876007 - RNA, 19 nt, Artificial Sequence
  Description of Artificial Sequence: Synthetic oligonucleotide
  Sense strand starting at position 3017 of SEQ ID NO: 1564412
gcgggauuacguaguccca

SEQ ID NO: 1876008 - RNA, 19 nt, Artificial Sequence
  Description of Artificial Sequence: Synthetic oligonucleotide
  Antisense strand to SEQ ID NO: 1876007
ugggacuacguaaucccgc

SEQ ID NO: 1876009 - RNA, 19 nt, Artificial Sequence
  Description of Artificial Sequence: Synthetic oligonucleotide
  Sense strand starting at position 3087 of SEQ ID NO: 1564412
cuucgaauucuagggaucu

SEQ ID NO: 1876010 - RNA, 19 nt, Artificial Sequence
  Description of Artificial Sequence: Synthetic oligonucleotide
  Antisense strand to SEQ ID NO: 1876009
agaucccuagaauucgaag

SEQ ID NO: 1876011 - RNA, 19 nt, Artificial Sequence
  Description of Artificial Sequence: Synthetic oligonucleotide
  Sense strand starting at position 3612 of SEQ ID NO: 1564412
gugugccugcgcuuuauga

SEQ ID NO: 1876012 - RNA, 19 nt, Artificial Sequence
  Description of Artificial Sequence: Synthetic oligonucleotide
  Antisense strand to SEQ ID NO: 1876011
ucauaaagcgcaggcacac

SEQ ID NO: 1876013 - RNA, 19 nt, Artificial Sequence
  Description of Artificial Sequence: Synthetic oligonucleotide
  Sense strand starting at position 3680 of SEQ ID NO: 1564412
acugaaugacguugaugau

SEQ ID NO: 1876014 - RNA, 19 nt, Artificial Sequence
  Description of Artificial Sequence: Synthetic oligonucleotide
  Antisense strand to SEQ ID NO: 1876013
aucaucaacgucauucagu

SEQ ID NO: 1876015 - RNA, 19 nt, Artificial Sequence
  Description of Artificial Sequence: Synthetic oligonucleotide
  Sense strand starting at position 3878 of SEQ ID NO: 1564412
acugaaugacguugauuau

SEQ ID NO: 1876016 - RNA, 19 nt, Artificial Sequence
  Description of Artificial Sequence: Synthetic oligonucleotide
  Antisense strand to SEQ ID NO: 1876015
auaaucaacgucauucagu

SEQ ID NO: 1876017 - RNA, 19 nt, Artificial Sequence
  Description of Artificial Sequence: Synthetic oligonucleotide
  Sense strand starting at position 3879 of SEQ ID NO: 1564412
cugaaugacguugauuaua

SEQ ID NO: 1876018 - RNA, 19 nt, Artificial Sequence
  Description of Artificial Sequence: Synthetic oligonucleotide
  Antisense strand to SEQ ID NO: 1876017
uauaaucaacgucauucag

SEQ ID NO: 1876019 - RNA, 19 nt, Artificial Sequence
  Description of Artificial Sequence: Synthetic oligonucleotide
  Sense strand starting at position 3881 of SEQ ID NO: 1564412
gaaugacguugauuauaac

SEQ ID NO: 1876020 - RNA, 19 nt, Artificial Sequence
  Description of Artificial Sequence: Synthetic oligonucleotide
  Antisense strand to SEQ ID NO: 1876019
guuauaaucaacgucauuc

SEQ ID NO: 1876021 - RNA, 19 nt, Artificial Sequence
  Description of Artificial Sequence: Synthetic oligonucleotide
  Sense strand starting at position 144 of SEQ ID NO: 1564413
cuuucuaugccguagaaag

SEQ ID NO: 1876022 - RNA, 19 nt, Artificial Sequence
  Description of Artificial Sequence: Synthetic oligonucleotide
  Antisense strand to SEQ ID NO: 1876021
cuuucuacggcauagaaag

SEQ ID NO: 1876023 - RNA, 19 nt, Artificial Sequence
  Description of Artificial Sequence: Synthetic oligonucleotide
  Sense strand starting at position 279 of SEQ ID NO: 1564413
acgguuuaucaagaguuaa

SEQ ID NO: 1876024 - RNA, 19 nt, Artificial Sequence
  Description of Artificial Sequence: Synthetic oligonucleotide
  Antisense strand to SEQ ID NO: 1876023
uuaacucuugauaaaccgu

SEQ ID NO: 1876025 - RNA, 19 nt, Artificial Sequence
  Description of Artificial Sequence: Synthetic oligonucleotide
  Sense strand starting at position 291 of SEQ ID NO: 1564413
gaguuaaagggaugccaau

SEQ ID NO: 1876026 - RNA, 19 nt, Artificial Sequence
  Description of Artificial Sequence: Synthetic oligonucleotide
  Antisense strand to SEQ ID NO: 1876025
auuggcaucccuuuaacuc

SEQ ID NO: 1876027 - RNA, 19 nt, Artificial Sequence
  Description of Artificial Sequence: Synthetic oligonucleotide
  Sense strand starting at position 350 of SEQ ID NO: 1564413
uuucuauuucuguggucua

SEQ ID NO: 1876028 - RNA, 19 nt, Artificial Sequence
  Description of Artificial Sequence: Synthetic oligonucleotide
  Antisense strand to SEQ ID NO: 1876027
uagaccacagaaauagaaa

SEQ ID NO: 1876029 - RNA, 19 nt, Artificial Sequence
  Description of Artificial Sequence: Synthetic oligonucleotide
  Sense strand starting at position 398 of SEQ ID NO: 1564413
ggcguuaauacgucgucag

SEQ ID NO: 1876030 - RNA, 19 nt, Artificial Sequence
  Description of Artificial Sequence: Synthetic oligonucleotide
  Antisense strand to SEQ ID NO: 1876029
cugacgacguauuaacgcc

SEQ ID NO: 1876031 - RNA, 19 nt, Artificial Sequence
  Description of Artificial Sequence: Synthetic oligonucleotide
  Sense strand starting at position 400 of SEQ ID NO: 1564413
cguuaauacgucgucagug

SEQ ID NO: 1876032 - RNA, 19 nt, Artificial Sequence
  Description of Artificial Sequence: Synthetic oligonucleotide
  Antisense strand to SEQ ID NO: 1876031
cacugacgacguauuaacg

SEQ ID NO: 1876033 - RNA, 19 nt, Artificial Sequence
  Description of Artificial Sequence: Synthetic oligonucleotide
  Sense strand starting at position 517 of SEQ ID NO: 1564413
agaaguuccgacgguauuu

SEQ ID NO: 1876034 - RNA, 19 nt, Artificial Sequence
  Description of Artificial Sequence: Synthetic oligonucleotide
  Antisense strand to SEQ ID NO: 1876033
aaauaccgucggaacuucu

SEQ ID NO: 1876035 - RNA, 19 nt, Artificial Sequence
  Description of Artificial Sequence: Synthetic oligonucleotide
  Sense strand starting at position 591 of SEQ ID NO: 1564413
ggcagaaaugcagggauaa

SEQ ID NO: 1876036 - RNA, 19 nt, Artificial Sequence
  Description of Artificial Sequence: Synthetic oligonucleotide
  Antisense strand to SEQ ID NO: 1876035
uuaucccugcauuucugcc

SEQ ID NO: 1876037 - RNA, 19 nt, Artificial Sequence
  Description of Artificial Sequence: Synthetic oligonucleotide
  Sense strand starting at position 592 of SEQ ID NO: 1564413
gcagaaaugcagggauaag

SEQ ID NO: 1876038 - RNA, 19 nt, Artificial Sequence
  Description of Artificial Sequence: Synthetic oligonucleotide
  Antisense strand to SEQ ID NO: 1876037
cuuaucccugcauuucugc

SEQ ID NO: 1876039 - RNA, 19 nt, Artificial Sequence
  Description of Artificial Sequence: Synthetic oligonucleotide
  Sense strand starting at position 601 of SEQ ID NO: 1564413
cagggauaagcuugcaaac

SEQ ID NO: 1876040 - RNA, 19 nt, Artificial Sequence
  Description of Artificial Sequence: Synthetic oligonucleotide
  Antisense strand to SEQ ID NO: 1876039
guuugcaagcuuaucccug

SEQ ID NO: 1876041 - RNA, 19 nt, Artificial Sequence
  Description of Artificial Sequence: Synthetic oligonucleotide
  Sense strand starting at position 642 of SEQ ID NO: 1564413
gcgcgguagguuccugaca

SEQ ID NO: 1876042 - RNA, 19 nt, Artificial Sequence
  Description of Artificial Sequence: Synthetic oligonucleotide
  Antisense strand to SEQ ID NO: 1876041
ugucaggaaccuaccgcgc

SEQ ID NO: 1876043 - RNA, 19 nt, Artificial Sequence
  Description of Artificial Sequence: Synthetic oligonucleotide
  Sense strand starting at position 766 of SEQ ID NO: 1564413
caauccuucggcgauaaca

SEQ ID NO: 1876044 - RNA, 19 nt, Artificial Sequence
  Description of Artificial Sequence: Synthetic oligonucleotide
  Antisense strand to SEQ ID NO: 1876043
uguuaucgccgaaggauug

SEQ ID NO: 1876045 - RNA, 19 nt, Artificial Sequence
  Description of Artificial Sequence: Synthetic oligonucleotide
  Sense strand starting at position 774 of SEQ ID NO: 1564413
cggcgauaacaagaaagua

SEQ ID NO: 1876046 - RNA, 19 nt, Artificial Sequence
  Description of Artificial Sequence: Synthetic oligonucleotide
  Antisense strand to SEQ ID NO: 1876045
uacuuucuuguuaucgccg

SEQ ID NO: 1876047 - RNA, 19 nt, Artificial Sequence
  Description of Artificial Sequence: Synthetic oligonucleotide
  Sense strand starting at position 844 of SEQ ID NO: 1564413
ggacgacuucugcauguau

SEQ ID NO: 1876048 - RNA, 19 nt, Artificial Sequence
  Description of Artificial Sequence: Synthetic oligonucleotide
  Antisense strand to SEQ ID NO: 1876047
auacaugcagaagucgucc

SEQ ID NO: 1876049 - RNA, 19 nt, Artificial Sequence
  Description of Artificial Sequence: Synthetic oligonucleotide
  Sense strand starting at position 919 of SEQ ID NO: 1564413
cuguccagugacugaauua

SEQ ID NO: 1876050 - RNA, 19 nt, Artificial Sequence
  Description of Artificial Sequence: Synthetic oligonucleotide
  Antisense strand to SEQ ID NO: 1876049
uaauucagucacuggacag

SEQ ID NO: 1876051 - RNA, 19 nt, Artificial Sequence
  Description of Artificial Sequence: Synthetic oligonucleotide
  Sense strand starting at position 1189 of SEQ ID NO: 1564413
acuuguuacguugugcuau

SEQ ID NO: 1876052 - RNA, 19 nt, Artificial Sequence
  Description of Artificial Sequence: Synthetic oligonucleotide
  Antisense strand to SEQ ID NO: 1876051
auagcacaacguaacaagu

SEQ ID NO: 1876053 - RNA, 19 nt, Artificial Sequence
  Description of Artificial Sequence: Synthetic oligonucleotide
  Sense strand starting at position 1192 of SEQ ID NO: 1564413
uguuacguugugcuauauu

SEQ ID NO: 1876054 - RNA, 19 nt, Artificial Sequence
  Description of Artificial Sequence: Synthetic oligonucleotide
  Antisense strand to SEQ ID NO: 1876053
aauauagcacaacguaaca

SEQ ID NO: 1876055 - RNA, 19 nt, Artificial Sequence
  Description of Artificial Sequence: Synthetic oligonucleotide
  Sense strand starting at position 1197 of SEQ ID NO: 1564413
cguugugcuauauuauagu

SEQ ID NO: 1876056 - RNA, 19 nt, Artificial Sequence
  Description of Artificial Sequence: Synthetic oligonucleotide
  Antisense strand to SEQ ID NO: 1876055
acuauaauauagcacaacg

SEQ ID NO: 1876057 - RNA, 19 nt, Artificial Sequence
  Description of Artificial Sequence: Synthetic oligonucleotide
  Sense strand starting at position 1225 of SEQ ID NO: 1564413
ucaagaauuccacaggccu

SEQ ID NO: 1876058 - RNA, 19 nt, Artificial Sequence
  Description of Artificial Sequence: Synthetic oligonucleotide
  Antisense strand to SEQ ID NO: 1876057
aggccuguggaauucuuga

SEQ ID NO: 1876059 - RNA, 19 nt, Artificial Sequence
  Description of Artificial Sequence: Synthetic oligonucleotide
  Sense strand starting at position 1304 of SEQ ID NO: 1564413
uggccauuugcccgagcaa

SEQ ID NO: 1876060 - RNA, 19 nt, Artificial Sequence
  Description of Artificial Sequence: Synthetic oligonucleotide
  Antisense strand to SEQ ID NO: 1876059
uugcucgggcaaauggcca

SEQ ID NO: 1876061 - RNA, 19 nt, Artificial Sequence
  Description of Artificial Sequence: Synthetic oligonucleotide
  Sense strand starting at position 1305 of SEQ ID NO: 1564413
ggccauuugcccgagcaaa

SEQ ID NO: 1876062 - RNA, 19 nt, Artificial Sequence
  Description of Artificial Sequence: Synthetic oligonucleotide
  Antisense strand to SEQ ID NO: 1876061
uuugcucgggcaaauggcc

SEQ ID NO: 1876063 - RNA, 19 nt, Artificial Sequence
  Description of Artificial Sequence: Synthetic oligonucleotide
  Sense strand starting at position 1425 of SEQ ID NO: 1564413
gagccucacccuggacaua

SEQ ID NO: 1876064 - RNA, 19 nt, Artificial Sequence
  Description of Artificial Sequence: Synthetic oligonucleotide
  Antisense strand to SEQ ID NO: 1876063
uauguccagggugaggcuc

SEQ ID NO: 1876065 - RNA, 19 nt, Artificial Sequence
  Description of Artificial Sequence: Synthetic oligonucleotide
  Sense strand starting at position 1558 of SEQ ID NO: 1564413
ggcccaguacuauaccaga

SEQ ID NO: 1876066 - RNA, 19 nt, Artificial Sequence
  Description of Artificial Sequence: Synthetic oligonucleotide
  Antisense strand to SEQ ID NO: 1876065
ucugguauaguacugggcc

SEQ ID NO: 1876067 - RNA, 19 nt, Artificial Sequence
  Description of Artificial Sequence: Synthetic oligonucleotide
  Sense strand starting at position 2067 of SEQ ID NO: 1564413
cccuaaaucgcguucguuu

SEQ ID NO: 1876068 - RNA, 19 nt, Artificial Sequence
  Description of Artificial Sequence: Synthetic oligonucleotide
  Antisense strand to SEQ ID NO: 1876067
aaacgaacgcgauuuaggg

SEQ ID NO: 1876069 - RNA, 19 nt, Artificial Sequence
  Description of Artificial Sequence: Synthetic oligonucleotide
  Sense strand starting at position 2068 of SEQ ID NO: 1564413
ccuaaaucgcguucguuua

SEQ ID NO: 1876070 - RNA, 19 nt, Artificial Sequence
  Description of Artificial Sequence: Synthetic oligonucleotide
  Antisense strand to SEQ ID NO: 1876069
uaaacgaacgcgauuuagg

SEQ ID NO: 1876071 - RNA, 19 nt, Artificial Sequence
  Description of Artificial Sequence: Synthetic oligonucleotide
  Sense strand starting at position 2072 of SEQ ID NO: 1564413
aaucgcguucguuuaguca

SEQ ID NO: 1876072 - RNA, 19 nt, Artificial Sequence
  Description of Artificial Sequence: Synthetic oligonucleotide
  Antisense strand to SEQ ID NO: 1876071
ugacuaaacgaacgcgauu

SEQ ID NO: 1876073 - RNA, 19 nt, Artificial Sequence
  Description of Artificial Sequence: Synthetic oligonucleotide
  Sense strand starting at position 2098 of SEQ ID NO: 1564413
gcgggauuacguaguccca

SEQ ID NO: 1876074 - RNA, 19 nt, Artificial Sequence
  Description of Artificial Sequence: Synthetic oligonucleotide
  Antisense strand to SEQ ID NO: 1876073
ugggacuacguaaucccgc

SEQ ID NO: 1876075 - RNA, 19 nt, Artificial Sequence
  Description of Artificial Sequence: Synthetic oligonucleotide
  Sense strand starting at position 2168 of SEQ ID NO: 1564413
cuucgaauucuagggaucu

SEQ ID NO: 1876076 - RNA, 19 nt, Artificial Sequence
  Description of Artificial Sequence: Synthetic oligonucleotide
  Antisense strand to SEQ ID NO: 1876075
agaucccuagaauucgaag

SEQ ID NO: 1876077 - RNA, 19 nt, Artificial Sequence
  Description of Artificial Sequence: Synthetic oligonucleotide
  Sense strand starting at position 2693 of SEQ ID NO: 1564413
gugugccugcgcuuuauga

SEQ ID NO: 1876078 - RNA, 19 nt, Artificial Sequence
  Description of Artificial Sequence: Synthetic oligonucleotide
  Antisense strand to SEQ ID NO: 1876077
ucauaaagcgcaggcacac

SEQ ID NO: 1876079 - RNA, 19 nt, Artificial Sequence
  Description of Artificial Sequence: Synthetic oligonucleotide
  Sense strand starting at position 2761 of SEQ ID NO: 1564413
acugaaugacguugaugau

SEQ ID NO: 1876080 - RNA, 19 nt, Artificial Sequence
  Description of Artificial Sequence: Synthetic oligonucleotide
  Antisense strand to SEQ ID NO: 1876079
aucaucaacgucauucagu

SEQ ID NO: 1876081 - RNA, 19 nt, Artificial Sequence
  Description of Artificial Sequence: Synthetic oligonucleotide
  Sense strand starting at position 2959 of SEQ ID NO: 1564413
acugaaugacguugauuau

SEQ ID NO: 1876082 - RNA, 19 nt, Artificial Sequence
  Description of Artificial Sequence: Synthetic oligonucleotide
  Antisense strand to SEQ ID NO: 1876081
auaaucaacgucauucagu

SEQ ID NO: 1876083 - RNA, 19 nt, Artificial Sequence
  Description of Artificial Sequence: Synthetic oligonucleotide
  Sense strand starting at position 2960 of SEQ ID NO: 1564413
cugaaugacguugauuaua

SEQ ID NO: 1876084 - RNA, 19 nt, Artificial Sequence
  Description of Artificial Sequence: Synthetic oligonucleotide
  Antisense strand to SEQ ID NO: 1876083
uauaaucaacgucauucag

SEQ ID NO: 1876085 - RNA, 19 nt, Artificial Sequence
  Description of Artificial Sequence: Synthetic oligonucleotide
  Sense strand starting at position 2962 of SEQ ID NO: 1564413
gaaugacguugauuauaac

SEQ ID NO: 1876086 - RNA, 19 nt, Artificial Sequence
  Description of Artificial Sequence: Synthetic oligonucleotide
  Antisense strand to SEQ ID NO: 1876085
guuauaaucaacgucauuc

SEQ ID NO: 1876087 - RNA, 19 nt, Artificial Sequence
  Description of Artificial Sequence: Synthetic oligonucleotide
  Sense strand starting at position 3066 of SEQ ID NO: 1564413
acugaaugacccuggugau

SEQ ID NO: 1876088 - RNA, 19 nt, Artificial Sequence
  Description of Artificial Sequence: Synthetic oligonucleotide
  Antisense strand to SEQ ID NO: 1876087
aucaccagggucauucagu

SEQ ID NO: 1876089 - RNA, 19 nt, Artificial Sequence
  Description of Artificial Sequence: Synthetic oligonucleotide
  Sense strand starting at position 3067 of SEQ ID NO: 1564413
cugaaugacccuggugaua

SEQ ID NO: 1876090 - RNA, 19 nt, Artificial Sequence
  Description of Artificial Sequence: Synthetic oligonucleotide
  Antisense strand to SEQ ID NO: 1876089
uaucaccagggucauucag

SEQ ID NO: 1876091 - RNA, 19 nt, Artificial Sequence
  Description of Artificial Sequence: Synthetic oligonucleotide
  Sense strand starting at position 3200 of SEQ ID NO: 1564413
uagccaugggauugugaaa

SEQ ID NO: 1876092 - RNA, 19 nt, Artificial Sequence
  Description of Artificial Sequence: Synthetic oligonucleotide
  Antisense strand to SEQ ID NO: 1876091
uuucacaaucccauggcua

SEQ ID NO: 1876093 - RNA, 19 nt, Artificial Sequence
  Description of Artificial Sequence: Synthetic oligonucleotide
  Sense strand starting at position 3288 of SEQ ID NO: 1564413
aguuguccuacguucguaa

SEQ ID NO: 1876094 - RNA, 19 nt, Artificial Sequence
  Description of Artificial Sequence: Synthetic oligonucleotide
  Antisense strand to SEQ ID NO: 1876093
uuacgaacguaggacaacu

SEQ ID NO: 1876095 - RNA, 19 nt, Artificial Sequence
  Description of Artificial Sequence: Synthetic oligonucleotide
  Sense strand starting at position 3452 of SEQ ID NO: 1564413
cuagauuccuggcuuuaac

SEQ ID NO: 1876096 - RNA, 19 nt, Artificial Sequence
  Description of Artificial Sequence: Synthetic oligonucleotide
  Antisense strand to SEQ ID NO: 1876095
guuaaagccaggaaucuag

SEQ ID NO: 1876097 - RNA, 19 nt, Artificial Sequence
  Description of Artificial Sequence: Synthetic oligonucleotide
  Sense strand starting at position 3509 of SEQ ID NO: 1564413
ucugaacucucagcgaaac

SEQ ID NO: 1876098 - RNA, 19 nt, Artificial Sequence
  Description of Artificial Sequence: Synthetic oligonucleotide
  Antisense strand to SEQ ID NO: 1876097
guuucgcugagaguucaga

SEQ ID NO: 1876099 - RNA, 19 nt, Artificial Sequence
  Description of Artificial Sequence: Synthetic oligonucleotide
  Sense strand starting at position 3764 of SEQ ID NO: 1564413
ugucgacaccuuuaccauu

SEQ ID NO: 1876100 - RNA, 19 nt, Artificial Sequence
  Description of Artificial Sequence: Synthetic oligonucleotide
  Antisense strand to SEQ ID NO: 1876099
aaugguaaaggugucgaca

SEQ ID NO: 1876101 - RNA, 19 nt, Artificial Sequence
  Description of Artificial Sequence: Synthetic oligonucleotide
  Sense strand starting at position 307 of SEQ ID NO: 1564415
gaaugaggcuaggcaugau

SEQ ID NO: 1876102 - RNA, 19 nt, Artificial Sequence
  Description of Artificial Sequence: Synthetic oligonucleotide
  Antisense strand to SEQ ID NO: 1876101
aucaugccuagccucauuc

SEQ ID NO: 1876103 - RNA, 19 nt, Artificial Sequence
  Description of Artificial Sequence: Synthetic oligonucleotide
  Sense strand starting at position 311 of SEQ ID NO: 1564415
gaggcuaggcaugaucaua

SEQ ID NO: 1876104 - RNA, 19 nt, Artificial Sequence
  Description of Artificial Sequence: Synthetic oligonucleotide
  Antisense strand to SEQ ID NO: 1876103
uaugaucaugccuagccuc

SEQ ID NO: 1876105 - RNA, 19 nt, Artificial Sequence
  Description of Artificial Sequence: Synthetic oligonucleotide
  Sense strand starting at position 419 of SEQ ID NO: 1564415
uggagauacucucuuuauu

SEQ ID NO: 1876106 - RNA, 19 nt, Artificial Sequence
  Description of Artificial Sequence: Synthetic oligonucleotide
  Antisense strand to SEQ ID NO: 1876105
aauaaagagaguaucucca

SEQ ID NO: 1876107 - RNA, 19 nt, Artificial Sequence
  Description of Artificial Sequence: Synthetic oligonucleotide
  Sense strand starting at position 514 of SEQ ID NO: 1564415
gagucagguacagggauaa

SEQ ID NO: 1876108 - RNA, 19 nt, Artificial Sequence
  Description of Artificial Sequence: Synthetic oligonucleotide
  Antisense strand to SEQ ID NO: 1876107
uuaucccuguaccugacuc

SEQ ID NO: 1876109 - RNA, 19 nt, Artificial Sequence
  Description of Artificial Sequence: Synthetic oligonucleotide
  Sense strand starting at position 570 of SEQ ID NO: 1564415
gagauacucugaucuuuag

SEQ ID NO: 1876110 - RNA, 19 nt, Artificial Sequence
  Description of Artificial Sequence: Synthetic oligonucleotide
  Antisense strand to SEQ ID NO: 1876109
cuaaagaucagaguaucuc

SEQ ID NO: 1876111 - RNA, 19 nt, Artificial Sequence
  Description of Artificial Sequence: Synthetic oligonucleotide
  Sense strand starting at position 596 of SEQ ID NO: 1564415
ggcuuagagaacugggaau

SEQ ID NO: 1876112 - RNA, 19 nt, Artificial Sequence
  Description of Artificial Sequence: Synthetic oligonucleotide
  Antisense strand to SEQ ID NO: 1876111
auucccaguucucuaagcc

SEQ ID NO: 1876113 - RNA, 19 nt, Artificial Sequence
  Description of Artificial Sequence: Synthetic oligonucleotide
  Sense strand starting at position 607 of SEQ ID NO: 1564415
cugggaaucucaucacuag

SEQ ID NO: 1876114 - RNA, 19 nt, Artificial Sequence
  Description of Artificial Sequence: Synthetic oligonucleotide
  Antisense strand to SEQ ID NO: 1876113
cuagugaugagauucccag

SEQ ID NO: 1876115 - RNA, 19 nt, Artificial Sequence
  Description of Artificial Sequence: Synthetic oligonucleotide
  Sense strand starting at position 838 of SEQ ID NO: 1564415
gaguaaugcccaggaaaga

SEQ ID NO: 1876116 - RNA, 19 nt, Artificial Sequence
  Description of Artificial Sequence: Synthetic oligonucleotide
  Antisense strand to SEQ ID NO: 1876115
ucuuuccugggcauuacuc

SEQ ID NO: 1876117 - RNA, 19 nt, Artificial Sequence
  Description of Artificial Sequence: Synthetic oligonucleotide
  Sense strand starting at position 957 of SEQ ID NO: 1564415
aagacaaauuggucugggu

SEQ ID NO: 1876118 - RNA, 19 nt, Artificial Sequence
  Description of Artificial Sequence: Synthetic oligonucleotide
  Antisense strand to SEQ ID NO: 1876117
acccagaccaauuugucuu

SEQ ID NO: 1876119 - RNA, 19 nt, Artificial Sequence
  Description of Artificial Sequence: Synthetic oligonucleotide
  Sense strand starting at position 1096 of SEQ ID NO: 1564415
gugagagauuaccucaggu

SEQ ID NO: 1876120 - RNA, 19 nt, Artificial Sequence
  Description of Artificial Sequence: Synthetic oligonucleotide
  Antisense strand to SEQ ID NO: 1876119
accugagguaaucucucac

SEQ ID NO: 1876121 - RNA, 19 nt, Artificial Sequence
  Description of Artificial Sequence: Synthetic oligonucleotide
  Sense strand starting at position 1098 of SEQ ID NO: 1564415
gagagauuaccucaggugu

SEQ ID NO: 1876122 - RNA, 19 nt, Artificial Sequence
  Description of Artificial Sequence: Synthetic oligonucleotide
  Antisense strand to SEQ ID NO: 1876121
acaccugagguaaucucuc

SEQ ID NO: 1876123 - RNA, 19 nt, Artificial Sequence
  Description of Artificial Sequence: Synthetic oligonucleotide
  Sense strand starting at position 1152 of SEQ ID NO: 1564415
aaggguucuaccgagguua

SEQ ID NO: 1876124 - RNA, 19 nt, Artificial Sequence
  Description of Artificial Sequence: Synthetic oligonucleotide
  Antisense strand to SEQ ID NO: 1876123
uaaccucgguagaacccuu

SEQ ID NO: 1876125 - RNA, 19 nt, Artificial Sequence
  Description of Artificial Sequence: Synthetic oligonucleotide
  Sense strand starting at position 1184 of SEQ ID NO: 1564415
agaagcugugaguaaacuu

SEQ ID NO: 1876126 - RNA, 19 nt, Artificial Sequence
  Description of Artificial Sequence: Synthetic oligonucleotide
  Antisense strand to SEQ ID NO: 1876125
aaguuuacucacagcuucu

SEQ ID NO: 1876127 - RNA, 19 nt, Artificial Sequence
  Description of Artificial Sequence: Synthetic oligonucleotide
  Sense strand starting at position 1227 of SEQ ID NO: 1564415
aaaguuuagccucagaaug

SEQ ID NO: 1876128 - RNA, 19 nt, Artificial Sequence
  Description of Artificial Sequence: Synthetic oligonucleotide
  Antisense strand to SEQ ID NO: 1876127
cauucugaggcuaaacuuu

SEQ ID NO: 1876129 - RNA, 19 nt, Artificial Sequence
  Description of Artificial Sequence: Synthetic oligonucleotide
  Sense strand starting at position 1241 of SEQ ID NO: 1564415
gaaugaagggaacguugau

SEQ ID NO: 1876130 - RNA, 19 nt, Artificial Sequence
  Description of Artificial Sequence: Synthetic oligonucleotide
  Antisense strand to SEQ ID NO: 1876129
aucaacguucccuucauuc

SEQ ID NO: 1876131 - RNA, 19 nt, Artificial Sequence
  Description of Artificial Sequence: Synthetic oligonucleotide
  Sense strand starting at position 1314 of SEQ ID NO: 1564415
gguaacaaaucuucugcaa

SEQ ID NO: 1876132 - RNA, 19 nt, Artificial Sequence
  Description of Artificial Sequence: Synthetic oligonucleotide
  Antisense strand to SEQ ID NO: 1876131
uugcagaagauuuguuacc

SEQ ID NO: 1876133 - RNA, 19 nt, Artificial Sequence
  Description of Artificial Sequence: Synthetic oligonucleotide
  Sense strand starting at position 1427 of SEQ ID NO: 1564415
aagggaguauccuuagcaa

SEQ ID NO: 1876134 - RNA, 19 nt, Artificial Sequence
  Description of Artificial Sequence: Synthetic oligonucleotide
  Antisense strand to SEQ ID NO: 1876133
uugcuaaggauacucccuu

SEQ ID NO: 1876135 - RNA, 19 nt, Artificial Sequence
  Description of Artificial Sequence: Synthetic oligonucleotide
  Sense strand starting at position 1450 of SEQ ID NO: 1564415
uuuaacuguccagauaggu

SEQ ID NO: 1876136 - RNA, 19 nt, Artificial Sequence
  Description of Artificial Sequence: Synthetic oligonucleotide
  Antisense strand to SEQ ID NO: 1876135
accuaucuggacaguuaaa

SEQ ID NO: 1876137 - RNA, 19 nt, Artificial Sequence
  Description of Artificial Sequence: Synthetic oligonucleotide
  Sense strand starting at position 1486 of SEQ ID NO: 1564415
aaccgcuuccaggaaagua

SEQ ID NO: 1876138 - RNA, 19 nt, Artificial Sequence
  Description of Artificial Sequence: Synthetic oligonucleotide
  Antisense strand to SEQ ID NO: 1876137
uacuuuccuggaagcgguu

SEQ ID NO: 1876139 - RNA, 19 nt, Artificial Sequence
  Description of Artificial Sequence: Synthetic oligonucleotide
  Sense strand starting at position 1511 of SEQ ID NO: 1564415
aaguguuugcaugugccua

SEQ ID NO: 1876140 - RNA, 19 nt, Artificial Sequence
  Description of Artificial Sequence: Synthetic oligonucleotide
  Antisense strand to SEQ ID NO: 1876139
uaggcacaugcaaacacuu

SEQ ID NO: 1876141 - RNA, 19 nt, Artificial Sequence
  Description of Artificial Sequence: Synthetic oligonucleotide
  Sense strand starting at position 1726 of SEQ ID NO: 1564415
gccaguaccgccguuagaa

SEQ ID NO: 1876142 - RNA, 19 nt, Artificial Sequence
  Description of Artificial Sequence: Synthetic oligonucleotide
  Antisense strand to SEQ ID NO: 1876141
uucuaacggcgguacuggc

SEQ ID NO: 1876143 - RNA, 19 nt, Artificial Sequence
  Description of Artificial Sequence: Synthetic oligonucleotide
  Sense strand starting at position 2094 of SEQ ID NO: 1564415
gagaguuugcugcaggaug

SEQ ID NO: 1876144 - RNA, 19 nt, Artificial Sequence
  Description of Artificial Sequence: Synthetic oligonucleotide
  Antisense strand to SEQ ID NO: 1876143
cauccugcagcaaacucuc

SEQ ID NO: 1876145 - RNA, 19 nt, Artificial Sequence
  Description of Artificial Sequence: Synthetic oligonucleotide
  Sense strand starting at position 2221 of SEQ ID NO: 1564415
agaaguucgugggucauuu

SEQ ID NO: 1876146 - RNA, 19 nt, Artificial Sequence
  Description of Artificial Sequence: Synthetic oligonucleotide
  Antisense strand to SEQ ID NO: 1876145
aaaugacccacgaacuucu

SEQ ID NO: 1876147 - RNA, 19 nt, Artificial Sequence
  Description of Artificial Sequence: Synthetic oligonucleotide
  Sense strand starting at position 2225 of SEQ ID NO: 1564415
guucgugggucauuuaacu

SEQ ID NO: 1876148 - RNA, 19 nt, Artificial Sequence
  Description of Artificial Sequence: Synthetic oligonucleotide
  Antisense strand to SEQ ID NO: 1876147
aguuaaaugacccacgaac

SEQ ID NO: 1876149 - RNA, 19 nt, Artificial Sequence
  Description of Artificial Sequence: Synthetic oligonucleotide
  Sense strand starting at position 2412 of SEQ ID NO: 1564415
gcgaucugcccgucuaauu

SEQ ID NO: 1876150 - RNA, 19 nt, Artificial Sequence
  Description of Artificial Sequence: Synthetic oligonucleotide
  Antisense strand to SEQ ID NO: 1876149
aauuagacgggcagaucgc

SEQ ID NO: 1876151 - RNA, 19 nt, Artificial Sequence
  Description of Artificial Sequence: Synthetic oligonucleotide
  Sense strand starting at position 2513 of SEQ ID NO: 1564415
gcccaaauuccugggauug

SEQ ID NO: 1876152 - RNA, 19 nt, Artificial Sequence
  Description of Artificial Sequence: Synthetic oligonucleotide
  Antisense strand to SEQ ID NO: 1876151
caaucccaggaauuugggc

SEQ ID NO: 1876153 - RNA, 19 nt, Artificial Sequence
  Description of Artificial Sequence: Synthetic oligonucleotide
  Sense strand starting at position 2619 of SEQ ID NO: 1564415
gccgcaucuguugcuuaca

SEQ ID NO: 1876154 - RNA, 19 nt, Artificial Sequence
  Description of Artificial Sequence: Synthetic oligonucleotide
  Antisense strand to SEQ ID NO: 1876153
uguaagcaacagaugcggc

SEQ ID NO: 1876155 - RNA, 19 nt, Artificial Sequence
  Description of Artificial Sequence: Synthetic oligonucleotide
  Sense strand starting at position 2783 of SEQ ID NO: 1564415
ggcuguggaggucaaauua

SEQ ID NO: 1876156 - RNA, 19 nt, Artificial Sequence
  Description of Artificial Sequence: Synthetic oligonucleotide
  Antisense strand to SEQ ID NO: 1876155
uaauuugaccuccacagcc

SEQ ID NO: 1876157 - RNA, 19 nt, Artificial Sequence
  Description of Artificial Sequence: Synthetic oligonucleotide
  Sense strand starting at position 2908 of SEQ ID NO: 1564415
uuggcuuguaucgugugau

SEQ ID NO: 1876158 - RNA, 19 nt, Artificial Sequence
  Description of Artificial Sequence: Synthetic oligonucleotide
  Antisense strand to SEQ ID NO: 1876157
aucacacgauacaagccaa

SEQ ID NO: 1876159 - RNA, 19 nt, Artificial Sequence
  Description of Artificial Sequence: Synthetic oligonucleotide
  Sense strand starting at position 3001 of SEQ ID NO: 1564415
uuuggacacauucgaggau

SEQ ID NO: 1876160 - RNA, 19 nt, Artificial Sequence
  Description of Artificial Sequence: Synthetic oligonucleotide
  Antisense strand to SEQ ID NO: 1876159
auccucgaauguguccaaa

SEQ ID NO: 1876161 - RNA, 19 nt, Artificial Sequence
  Description of Artificial Sequence: Synthetic oligonucleotide
  Sense strand starting at position 3008 of SEQ ID NO: 1564415
acauucgaggauugaugua

SEQ ID NO: 1876162 - RNA, 19 nt, Artificial Sequence
  Description of Artificial Sequence: Synthetic oligonucleotide
  Antisense strand to SEQ ID NO: 1876161
uacaucaauccucgaaugu

SEQ ID NO: 1876163 - RNA, 19 nt, Artificial Sequence
  Description of Artificial Sequence: Synthetic oligonucleotide
  Sense strand starting at position 3064 of SEQ ID NO: 1564415
gaauucgugcuguauuuau

SEQ ID NO: 1876164 - RNA, 19 nt, Artificial Sequence
  Description of Artificial Sequence: Synthetic oligonucleotide
  Antisense strand to SEQ ID NO: 1876163
auaaauacagcacgaauuc

SEQ ID NO: 1876165 - RNA, 19 nt, Artificial Sequence
  Description of Artificial Sequence: Synthetic oligonucleotide
  Sense strand starting at position 3271 of SEQ ID NO: 1564415
uuacuuguugggcauauaa

SEQ ID NO: 1876166 - RNA, 19 nt, Artificial Sequence
  Description of Artificial Sequence: Synthetic oligonucleotide
  Antisense strand to SEQ ID NO: 1876165
uuauaugcccaacaaguaa

SEQ ID NO: 1876167 - RNA, 19 nt, Artificial Sequence
  Description of Artificial Sequence: Synthetic oligonucleotide
  Sense strand starting at position 3654 of SEQ ID NO: 1564415
agaaauuacugguugauca

SEQ ID NO: 1876168 - RNA, 19 nt, Artificial Sequence
  Description of Artificial Sequence: Synthetic oligonucleotide
  Antisense strand to SEQ ID NO: 1876167
ugaucaaccaguaauuucu

SEQ ID NO: 1876169 - RNA, 19 nt, Artificial Sequence
  Description of Artificial Sequence: Synthetic oligonucleotide
  Sense strand starting at position 3655 of SEQ ID NO: 1564415
gaaauuacugguugaucag

SEQ ID NO: 1876170 - RNA, 19 nt, Artificial Sequence
  Description of Artificial Sequence: Synthetic oligonucleotide
  Antisense strand to SEQ ID NO: 1876169
cugaucaaccaguaauuuc

SEQ ID NO: 1876171 - RNA, 19 nt, Artificial Sequence
  Description of Artificial Sequence: Synthetic oligonucleotide
  Sense strand starting at position 3656 of SEQ ID NO: 1564415
aaauuacugguugaucagu

SEQ ID NO: 1876172 - RNA, 19 nt, Artificial Sequence
  Description of Artificial Sequence: Synthetic oligonucleotide
  Antisense strand to SEQ ID NO: 1876171
acugaucaaccaguaauuu

SEQ ID NO: 1876173 - RNA, 19 nt, Artificial Sequence
  Description of Artificial Sequence: Synthetic oligonucleotide
  Sense strand starting at position 3709 of SEQ ID NO: 1564415
gucacauacccuuaguuua

SEQ ID NO: 1876174 - RNA, 19 nt, Artificial Sequence
  Description of Artificial Sequence: Synthetic oligonucleotide
  Antisense strand to SEQ ID NO: 1876173
uaaacuaaggguaugugac

SEQ ID NO: 1876175 - RNA, 19 nt, Artificial Sequence
  Description of Artificial Sequence: Synthetic oligonucleotide
  Sense strand starting at position 3758 of SEQ ID NO: 1564415
gcuaauugucuuuaaucag

SEQ ID NO: 1876176 - RNA, 19 nt, Artificial Sequence
  Description of Artificial Sequence: Synthetic oligonucleotide
  Antisense strand to SEQ ID NO: 1876175
cugauuaaagacaauuagc

SEQ ID NO: 1876177 - RNA, 19 nt, Artificial Sequence
  Description of Artificial Sequence: Synthetic oligonucleotide
  Sense strand starting at position 3917 of SEQ ID NO: 1564415
aagagauaguuccuagguc

SEQ ID NO: 1876178 - RNA, 19 nt, Artificial Sequence
  Description of Artificial Sequence: Synthetic oligonucleotide
  Antisense strand to SEQ ID NO: 1876177
gaccuaggaacuaucucuu

SEQ ID NO: 1876179 - RNA, 19 nt, Artificial Sequence
  Description of Artificial Sequence: Synthetic oligonucleotide
  Sense strand starting at position 3924 of SEQ ID NO: 1564415
aguuccuagguccauuaga

SEQ ID NO: 1876180 - RNA, 19 nt, Artificial Sequence
  Description of Artificial Sequence: Synthetic oligonucleotide
  Antisense strand to SEQ ID NO: 1876179
ucuaauggaccuaggaacu

SEQ ID NO: 1876181 - RNA, 19 nt, Artificial Sequence
  Description of Artificial Sequence: Synthetic oligonucleotide
  Sense strand starting at position 1058 of SEQ ID NO: 1564417
uaagaaugugcuuauugug

SEQ ID NO: 1876182 - RNA, 19 nt, Artificial Sequence
  Description of Artificial Sequence: Synthetic oligonucleotide
  Antisense strand to SEQ ID NO: 1876181
cacaauaagcacauucuua

SEQ ID NO: 1876183 - RNA, 19 nt, Artificial Sequence
  Description of Artificial Sequence: Synthetic oligonucleotide
  Sense strand starting at position 1091 of SEQ ID NO: 1564417
uuguuaagcccucaaguga

SEQ ID NO: 1876184 - RNA, 19 nt, Artificial Sequence
  Description of Artificial Sequence: Synthetic oligonucleotide
  Antisense strand to SEQ ID NO: 1876183
ucacuugagggcuuaacaa

SEQ ID NO: 1876185 - RNA, 19 nt, Artificial Sequence
  Description of Artificial Sequence: Synthetic oligonucleotide
  Sense strand starting at position 1320 of SEQ ID NO: 1564417
uuuacugauguacaaagua

SEQ ID NO: 1876186 - RNA, 19 nt, Artificial Sequence
  Description of Artificial Sequence: Synthetic oligonucleotide
  Antisense strand to SEQ ID NO: 1876185
uacuuuguacaucaguaaa

SEQ ID NO: 1876187 - RNA, 19 nt, Artificial Sequence
  Description of Artificial Sequence: Synthetic oligonucleotide
  Sense strand starting at position 2107 of SEQ ID NO: 1564417
ugagaaauguauccaguga

SEQ ID NO: 1876188 - RNA, 19 nt, Artificial Sequence
  Description of Artificial Sequence: Synthetic oligonucleotide
  Antisense strand to SEQ ID NO: 1876187
ucacuggauacauuucuca

SEQ ID NO: 1876189 - RNA, 19 nt, Artificial Sequence
  Description of Artificial Sequence: Synthetic oligonucleotide
  Sense strand starting at position 2263 of SEQ ID NO: 1564417
acuagauuggugugaggag

SEQ ID NO: 1876190 - RNA, 19 nt, Artificial Sequence
  Description of Artificial Sequence: Synthetic oligonucleotide
  Antisense strand to SEQ ID NO: 1876189
cuccucacaccaaucuagu

SEQ ID NO: 1876191 - RNA, 19 nt, Artificial Sequence
  Description of Artificial Sequence: Synthetic oligonucleotide
  Sense strand starting at position 2279 of SEQ ID NO: 1564417
gagcacaaggccuaguaau

SEQ ID NO: 1876192 - RNA, 19 nt, Artificial Sequence
  Description of Artificial Sequence: Synthetic oligonucleotide
  Antisense strand to SEQ ID NO: 1876191
auuacuaggccuugugcuc

SEQ ID NO: 1876193 - RNA, 19 nt, Artificial Sequence
  Description of Artificial Sequence: Synthetic oligonucleotide
  Sense strand starting at position 2480 of SEQ ID NO: 1564417
guauaauagauauggaguu

SEQ ID NO: 1876194 - RNA, 19 nt, Artificial Sequence
  Description of Artificial Sequence: Synthetic oligonucleotide
  Antisense strand to SEQ ID NO: 1876193
aacuccauaucuauuauac

SEQ ID NO: 1876195 - RNA, 19 nt, Artificial Sequence
  Description of Artificial Sequence: Synthetic oligonucleotide
  Sense strand starting at position 2523 of SEQ ID NO: 1564417
aggaacuauugauagauga

SEQ ID NO: 1876196 - RNA, 19 nt, Artificial Sequence
  Description of Artificial Sequence: Synthetic oligonucleotide
  Antisense strand to SEQ ID NO: 1876195
ucaucuaucaauaguuccu

SEQ ID NO: 1876197 - RNA, 19 nt, Artificial Sequence
  Description of Artificial Sequence: Synthetic oligonucleotide
  Sense strand starting at position 2533 of SEQ ID NO: 1564417
gauagaugaugaucguaug

SEQ ID NO: 1876198 - RNA, 19 nt, Artificial Sequence
  Description of Artificial Sequence: Synthetic oligonucleotide
  Antisense strand to SEQ ID NO: 1876197
cauacgaucaucaucuauc

SEQ ID NO: 1876199 - RNA, 19 nt, Artificial Sequence
  Description of Artificial Sequence: Synthetic oligonucleotide
  Sense strand starting at position 2534 of SEQ ID NO: 1564417
auagaugaugaucguauga

SEQ ID NO: 1876200 - RNA, 19 nt, Artificial Sequence
  Description of Artificial Sequence: Synthetic oligonucleotide
  Antisense strand to SEQ ID NO: 1876199
ucauacgaucaucaucuau

SEQ ID NO: 1876201 - RNA, 19 nt, Artificial Sequence
  Description of Artificial Sequence: Synthetic oligonucleotide
  Sense strand starting at position 2683 of SEQ ID NO: 1564417
cguuauauuuaugcauauc

SEQ ID NO: 1876202 - RNA, 19 nt, Artificial Sequence
  Description of Artificial Sequence: Synthetic oligonucleotide
  Antisense strand to SEQ ID NO: 1876201
gauaugcauaaauauaacg

SEQ ID NO: 1876203 - RNA, 19 nt, Artificial Sequence
  Description of Artificial Sequence: Synthetic oligonucleotide
  Sense strand starting at position 2743 of SEQ ID NO: 1564417
gauuuaauuugguaugucu

SEQ ID NO: 1876204 - RNA, 19 nt, Artificial Sequence
  Description of Artificial Sequence: Synthetic oligonucleotide
  Antisense strand to SEQ ID NO: 1876203
agacauaccaaauuaaauc

SEQ ID NO: 1876205 - RNA, 19 nt, Artificial Sequence
  Description of Artificial Sequence: Synthetic oligonucleotide
  Sense strand starting at position 2750 of SEQ ID NO: 1564417
uuugguaugucucuaaaua

SEQ ID NO: 1876206 - RNA, 19 nt, Artificial Sequence
  Description of Artificial Sequence: Synthetic oligonucleotide
  Antisense strand to SEQ ID NO: 1876205
uauuuagagacauaccaaa

SEQ ID NO: 1876207 - RNA, 19 nt, Artificial Sequence
  Description of Artificial Sequence: Synthetic oligonucleotide
  Sense strand starting at position 2751 of SEQ ID NO: 1564417
uugguaugucucuaaauau

SEQ ID NO: 1876208 - RNA, 19 nt, Artificial Sequence
  Description of Artificial Sequence: Synthetic oligonucleotide
  Antisense strand to SEQ ID NO: 1876207
auauuuagagacauaccaa

SEQ ID NO: 1876209 - RNA, 19 nt, Artificial Sequence
  Description of Artificial Sequence: Synthetic oligonucleotide
  Sense strand starting at position 2806 of SEQ ID NO: 1564417
gggugacuuacuuguaagg

SEQ ID NO: 1876210 - RNA, 19 nt, Artificial Sequence
  Description of Artificial Sequence: Synthetic oligonucleotide
  Antisense strand to SEQ ID NO: 1876209
ccuuacaaguaagucaccc

SEQ ID NO: 1876211 - RNA, 19 nt, Artificial Sequence
  Description of Artificial Sequence: Synthetic oligonucleotide
  Sense strand starting at position 2907 of SEQ ID NO: 1564417
gugucuaagcagcauauuu

SEQ ID NO: 1876212 - RNA, 19 nt, Artificial Sequence
  Description of Artificial Sequence: Synthetic oligonucleotide
  Antisense strand to SEQ ID NO: 1876211
aaauaugcugcuuagacac

SEQ ID NO: 1876213 - RNA, 19 nt, Artificial Sequence
  Description of Artificial Sequence: Synthetic oligonucleotide
  Sense strand starting at position 2978 of SEQ ID NO: 1564417
aggaauaaucuuugugcca

SEQ ID NO: 1876214 - RNA, 19 nt, Artificial Sequence
  Description of Artificial Sequence: Synthetic oligonucleotide
  Antisense strand to SEQ ID NO: 1876213
uggcacaaagauuauuccu

SEQ ID NO: 1876215 - RNA, 19 nt, Artificial Sequence
  Description of Artificial Sequence: Synthetic oligonucleotide
  Sense strand starting at position 2979 of SEQ ID NO: 1564417
ggaauaaucuuugugccau

SEQ ID NO: 1876216 - RNA, 19 nt, Artificial Sequence
  Description of Artificial Sequence: Synthetic oligonucleotide
  Antisense strand to SEQ ID NO: 1876215
auggcacaaagauuauucc

SEQ ID NO: 1876217 - RNA, 19 nt, Artificial Sequence
  Description of Artificial Sequence: Synthetic oligonucleotide
  Sense strand starting at position 3102 of SEQ ID NO: 1564417
augguugacaguugguaua

SEQ ID NO: 1876218 - RNA, 19 nt, Artificial Sequence
  Description of Artificial Sequence: Synthetic oligonucleotide
  Antisense strand to SEQ ID NO: 1876217
uauaccaacugucaaccau

SEQ ID NO: 1876219 - RNA, 19 nt, Artificial Sequence
  Description of Artificial Sequence: Synthetic oligonucleotide
  Sense strand starting at position 3104 of SEQ ID NO: 1564417
gguugacaguugguauauu

SEQ ID NO: 1876220 - RNA, 19 nt, Artificial Sequence
  Description of Artificial Sequence: Synthetic oligonucleotide
  Antisense strand to SEQ ID NO: 1876219
aauauaccaacugucaacc

SEQ ID NO: 1876221 - RNA, 19 nt, Artificial Sequence
  Description of Artificial Sequence: Synthetic oligonucleotide
  Sense strand starting at position 3126 of SEQ ID NO: 1564417
auucgaacuccuuagcauu

SEQ ID NO: 1876222 - RNA, 19 nt, Artificial Sequence
  Description of Artificial Sequence: Synthetic oligonucleotide
  Antisense strand to SEQ ID NO: 1876221
aaugcuaaggaguucgaau

SEQ ID NO: 1876223 - RNA, 19 nt, Artificial Sequence
  Description of Artificial Sequence: Synthetic oligonucleotide
  Sense strand starting at position 3143 of SEQ ID NO: 1564417
uugguaaguguugaauaug

SEQ ID NO: 1876224 - RNA, 19 nt, Artificial Sequence
  Description of Artificial Sequence: Synthetic oligonucleotide
  Antisense strand to SEQ ID NO: 1876223
cauauucaacacuuaccaa

SEQ ID NO: 1876225 - RNA, 19 nt, Artificial Sequence
  Description of Artificial Sequence: Synthetic oligonucleotide
  Sense strand starting at position 3146 of SEQ ID NO: 1564417
guaaguguugaauaugugu

SEQ ID NO: 1876226 - RNA, 19 nt, Artificial Sequence
  Description of Artificial Sequence: Synthetic oligonucleotide
  Antisense strand to SEQ ID NO: 1876225
acacauauucaacacuuac

SEQ ID NO: 1876227 - RNA, 19 nt, Artificial Sequence
  Description of Artificial Sequence: Synthetic oligonucleotide
  Sense strand starting at position 3151 of SEQ ID NO: 1564417
uguugaauauguguggaag

SEQ ID NO: 1876228 - RNA, 19 nt, Artificial Sequence
  Description of Artificial Sequence: Synthetic oligonucleotide
  Antisense strand to SEQ ID NO: 1876227
cuuccacacauauucaaca

SEQ ID NO: 1876229 - RNA, 19 nt, Artificial Sequence
  Description of Artificial Sequence: Synthetic oligonucleotide
  Sense strand starting at position 3152 of SEQ ID NO: 1564417
guugaauauguguggaaga

SEQ ID NO: 1876230 - RNA, 19 nt, Artificial Sequence
  Description of Artificial Sequence: Synthetic oligonucleotide
  Antisense strand to SEQ ID NO: 1876229
ucuuccacacauauucaac

SEQ ID NO: 1876231 - RNA, 19 nt, Artificial Sequence
  Description of Artificial Sequence: Synthetic oligonucleotide
  Sense strand starting at position 3185 of SEQ ID NO: 1564417
ugauauuucucauacugua

SEQ ID NO: 1876232 - RNA, 19 nt, Artificial Sequence
  Description of Artificial Sequence: Synthetic oligonucleotide
  Antisense strand to SEQ ID NO: 1876231
uacaguaugagaaauauca

SEQ ID NO: 1876233 - RNA, 19 nt, Artificial Sequence
  Description of Artificial Sequence: Synthetic oligonucleotide
  Sense strand starting at position 3248 of SEQ ID NO: 1564417
auugccuugguuuaauaua

SEQ ID NO: 1876234 - RNA, 19 nt, Artificial Sequence
  Description of Artificial Sequence: Synthetic oligonucleotide
  Antisense strand to SEQ ID NO: 1876233
uauauuaaaccaaggcaau

SEQ ID NO: 1876235 - RNA, 19 nt, Artificial Sequence
  Description of Artificial Sequence: Synthetic oligonucleotide
  Sense strand starting at position 3256 of SEQ ID NO: 1564417
gguuuaauauaguuuaggu

SEQ ID NO: 1876236 - RNA, 19 nt, Artificial Sequence
  Description of Artificial Sequence: Synthetic oligonucleotide
  Antisense strand to SEQ ID NO: 1876235
accuaaacuauauuaaacc

SEQ ID NO: 1876237 - RNA, 19 nt, Artificial Sequence
  Description of Artificial Sequence: Synthetic oligonucleotide
  Sense strand starting at position 3347 of SEQ ID NO: 1564417
aucaguaaacucugugaag

SEQ ID NO: 1876238 - RNA, 19 nt, Artificial Sequence
  Description of Artificial Sequence: Synthetic oligonucleotide
  Antisense strand to SEQ ID NO: 1876237
cuucacagaguuuacugau

SEQ ID NO: 1876239 - RNA, 19 nt, Artificial Sequence
  Description of Artificial Sequence: Synthetic oligonucleotide
  Sense strand starting at position 3348 of SEQ ID NO: 1564417
ucaguaaacucugugaaga

SEQ ID NO: 1876240 - RNA, 19 nt, Artificial Sequence
  Description of Artificial Sequence: Synthetic oligonucleotide
  Antisense strand to SEQ ID NO: 1876239
ucuucacagaguuuacuga

SEQ ID NO: 1876241 - RNA, 19 nt, Artificial Sequence
  Description of Artificial Sequence: Synthetic oligonucleotide
  Sense strand starting at position 3349 of SEQ ID NO: 1564417
caguaaacucugugaagau

SEQ ID NO: 1876242 - RNA, 19 nt, Artificial Sequence
  Description of Artificial Sequence: Synthetic oligonucleotide
  Antisense strand to SEQ ID NO: 1876241
aucuucacagaguuuacug

SEQ ID NO: 1876243 - RNA, 19 nt, Artificial Sequence
  Description of Artificial Sequence: Synthetic oligonucleotide
  Sense strand starting at position 3589 of SEQ ID NO: 1564417
auaggagaaucagaagaca

SEQ ID NO: 1876244 - RNA, 19 nt, Artificial Sequence
  Description of Artificial Sequence: Synthetic oligonucleotide
  Antisense strand to SEQ ID NO: 1876243
ugucuucugauucuccuau

SEQ ID NO: 1876245 - RNA, 19 nt, Artificial Sequence
  Description of Artificial Sequence: Synthetic oligonucleotide
  Sense strand starting at position 3624 of SEQ ID NO: 1564417
aggauaaucuaagacaaau

SEQ ID NO: 1876246 - RNA, 19 nt, Artificial Sequence
  Description of Artificial Sequence: Synthetic oligonucleotide
  Antisense strand to SEQ ID NO: 1876245
auuugucuuagauuauccu

SEQ ID NO: 1876247 - RNA, 19 nt, Artificial Sequence
  Description of Artificial Sequence: Synthetic oligonucleotide
  Sense strand starting at position 3636 of SEQ ID NO: 1564417
gacaaauuguggcugagca

SEQ ID NO: 1876248 - RNA, 19 nt, Artificial Sequence
  Description of Artificial Sequence: Synthetic oligonucleotide
  Antisense strand to SEQ ID NO: 1876247
ugcucagccacaauuuguc

SEQ ID NO: 1876249 - RNA, 19 nt, Artificial Sequence
  Description of Artificial Sequence: Synthetic oligonucleotide
  Sense strand starting at position 3638 of SEQ ID NO: 1564417
caaauuguggcugagcauu

SEQ ID NO: 1876250 - RNA, 19 nt, Artificial Sequence
  Description of Artificial Sequence: Synthetic oligonucleotide
  Antisense strand to SEQ ID NO: 1876249
aaugcucagccacaauuug

SEQ ID NO: 1876251 - RNA, 19 nt, Artificial Sequence
  Description of Artificial Sequence: Synthetic oligonucleotide
  Sense strand starting at position 3663 of SEQ ID NO: 1564417
agcuaagauaggugacagu

SEQ ID NO: 1876252 - RNA, 19 nt, Artificial Sequence
  Description of Artificial Sequence: Synthetic oligonucleotide
  Antisense strand to SEQ ID NO: 1876251
acugucaccuaucuuagcu

SEQ ID NO: 1876253 - RNA, 19 nt, Artificial Sequence
  Description of Artificial Sequence: Synthetic oligonucleotide
  Sense strand starting at position 3689 of SEQ ID NO: 1564417
ggaagaaugccuuggugug

SEQ ID NO: 1876254 - RNA, 19 nt, Artificial Sequence
  Description of Artificial Sequence: Synthetic oligonucleotide
  Antisense strand to SEQ ID NO: 1876253
cacaccaaggcauucuucc

SEQ ID NO: 1876255 - RNA, 19 nt, Artificial Sequence
  Description of Artificial Sequence: Synthetic oligonucleotide
  Sense strand starting at position 3715 of SEQ ID NO: 1564417
ggagauggcucagcuaaag

SEQ ID NO: 1876256 - RNA, 19 nt, Artificial Sequence
  Description of Artificial Sequence: Synthetic oligonucleotide
  Antisense strand to SEQ ID NO: 1876255
cuuuagcugagccaucucc

SEQ ID NO: 1876257 - RNA, 19 nt, Artificial Sequence
  Description of Artificial Sequence: Synthetic oligonucleotide
  Sense strand starting at position 3851 of SEQ ID NO: 1564417
gaauaagaugucugucuga

SEQ ID NO: 1876258 - RNA, 19 nt, Artificial Sequence
  Description of Artificial Sequence: Synthetic oligonucleotide
  Antisense strand to SEQ ID NO: 1876257
ucagacagacaucuuauuc

SEQ ID NO: 1876259 - RNA, 19 nt, Artificial Sequence
  Description of Artificial Sequence: Synthetic oligonucleotide
  Sense strand starting at position 3854 of SEQ ID NO: 1564417
uaagaugucugucugaucu

SEQ ID NO: 1876260 - RNA, 19 nt, Artificial Sequence
  Description of Artificial Sequence: Synthetic oligonucleotide
  Antisense strand to SEQ ID NO: 1876259
agaucagacagacaucuua

SEQ ID NO: 1876261 - RNA, 19 nt, Artificial Sequence
  Description of Artificial Sequence: Synthetic oligonucleotide
  Sense strand starting at position 235 of SEQ ID NO: 1564418
auauuuguccaguggugau

SEQ ID NO: 1876262 - RNA, 19 nt, Artificial Sequence
  Description of Artificial Sequence: Synthetic oligonucleotide
  Antisense strand to SEQ ID NO: 1876261
aucaccacuggacaaauau

SEQ ID NO: 1876263 - RNA, 19 nt, Artificial Sequence
  Description of Artificial Sequence: Synthetic oligonucleotide
  Sense strand starting at position 259 of SEQ ID NO: 1564418
aagagcuagccuggaauga

SEQ ID NO: 1876264 - RNA, 19 nt, Artificial Sequence
  Description of Artificial Sequence: Synthetic oligonucleotide
  Antisense strand to SEQ ID NO: 1876263
ucauuccaggcuagcucuu

SEQ ID NO: 1876265 - RNA, 19 nt, Artificial Sequence
  Description of Artificial Sequence: Synthetic oligonucleotide
  Sense strand starting at position 434 of SEQ ID NO: 1564418
ggagauaugaugugguauu

SEQ ID NO: 1876266 - RNA, 19 nt, Artificial Sequence
  Description of Artificial Sequence: Synthetic oligonucleotide
  Antisense strand to SEQ ID NO: 1876265
aauaccacaucauaucucc

SEQ ID NO: 1876267 - RNA, 19 nt, Artificial Sequence
  Description of Artificial Sequence: Synthetic oligonucleotide
  Sense strand starting at position 522 of SEQ ID NO: 1564418
uaugaauaguggucaacug

SEQ ID NO: 1876268 - RNA, 19 nt, Artificial Sequence
  Description of Artificial Sequence: Synthetic oligonucleotide
  Antisense strand to SEQ ID NO: 1876267
caguugaccacuauucaua

SEQ ID NO: 1876269 - RNA, 19 nt, Artificial Sequence
  Description of Artificial Sequence: Synthetic oligonucleotide
  Sense strand starting at position 562 of SEQ ID NO: 1564418
uguugcaauuuguucugau

SEQ ID NO: 1876270 - RNA, 19 nt, Artificial Sequence
  Description of Artificial Sequence: Synthetic oligonucleotide
  Antisense strand to SEQ ID NO: 1876269
aucagaacaaauugcaaca

SEQ ID NO: 1876271 - RNA, 19 nt, Artificial Sequence
  Description of Artificial Sequence: Synthetic oligonucleotide
  Sense strand starting at position 563 of SEQ ID NO: 1564418
guugcaauuuguucugaug

SEQ ID NO: 1876272 - RNA, 19 nt, Artificial Sequence
  Description of Artificial Sequence: Synthetic oligonucleotide
  Antisense strand to SEQ ID NO: 1876271
caucagaacaaauugcaac

SEQ ID NO: 1876273 - RNA, 19 nt, Artificial Sequence
  Description of Artificial Sequence: Synthetic oligonucleotide
  Sense strand starting at position 658 of SEQ ID NO: 1564418
gacagaagauucccuuguu

SEQ ID NO: 1876274 - RNA, 19 nt, Artificial Sequence
  Description of Artificial Sequence: Synthetic oligonucleotide
  Antisense strand to SEQ ID NO: 1876273
aacaagggaaucuucuguc

SEQ ID NO: 1876275 - RNA, 19 nt, Artificial Sequence
  Description of Artificial Sequence: Synthetic oligonucleotide
  Sense strand starting at position 659 of SEQ ID NO: 1564418
acagaagauucccuuguua

SEQ ID NO: 1876276 - RNA, 19 nt, Artificial Sequence
  Description of Artificial Sequence: Synthetic oligonucleotide
  Antisense strand to SEQ ID NO: 1876275
uaacaagggaaucuucugu

SEQ ID NO: 1876277 - RNA, 19 nt, Artificial Sequence
  Description of Artificial Sequence: Synthetic oligonucleotide
  Sense strand starting at position 661 of SEQ ID NO: 1564418
agaagauucccuuguuaga

SEQ ID NO: 1876278 - RNA, 19 nt, Artificial Sequence
  Description of Artificial Sequence: Synthetic oligonucleotide
  Antisense strand to SEQ ID NO: 1876277
ucuaacaagggaaucuucu

SEQ ID NO: 1876279 - RNA, 19 nt, Artificial Sequence
  Description of Artificial Sequence: Synthetic oligonucleotide
  Sense strand starting at position 740 of SEQ ID NO: 1564418
gcagaauuaugauucucca

SEQ ID NO: 1876280 - RNA, 19 nt, Artificial Sequence
  Description of Artificial Sequence: Synthetic oligonucleotide
  Antisense strand to SEQ ID NO: 1876279
uggagaaucauaauucugc

SEQ ID NO: 1876281 - RNA, 19 nt, Artificial Sequence
  Description of Artificial Sequence: Synthetic oligonucleotide
  Sense strand starting at position 789 of SEQ ID NO: 1564418
ugaaaucuucguugaauaa

SEQ ID NO: 1876282 - RNA, 19 nt, Artificial Sequence
  Description of Artificial Sequence: Synthetic oligonucleotide
  Antisense strand to SEQ ID NO: 1876281
uuauucaacgaagauuuca

SEQ ID NO: 1876283 - RNA, 19 nt, Artificial Sequence
  Description of Artificial Sequence: Synthetic oligonucleotide
  Sense strand starting at position 793 of SEQ ID NO: 1564418
aucuucguugaauaaagua

SEQ ID NO: 1876284 - RNA, 19 nt, Artificial Sequence
  Description of Artificial Sequence: Synthetic oligonucleotide
  Antisense strand to SEQ ID NO: 1876283
uacuuuauucaacgaagau

SEQ ID NO: 1876285 - RNA, 19 nt, Artificial Sequence
  Description of Artificial Sequence: Synthetic oligonucleotide
  Sense strand starting at position 798 of SEQ ID NO: 1564418
cguugaauaaaguagauau

SEQ ID NO: 1876286 - RNA, 19 nt, Artificial Sequence
  Description of Artificial Sequence: Synthetic oligonucleotide
  Antisense strand to SEQ ID NO: 1876285
auaucuacuuuauucaacg

SEQ ID NO: 1876287 - RNA, 19 nt, Artificial Sequence
  Description of Artificial Sequence: Synthetic oligonucleotide
  Sense strand starting at position 808 of SEQ ID NO: 1564418
aguagauauaggugaagca

SEQ ID NO: 1876288 - RNA, 19 nt, Artificial Sequence
  Description of Artificial Sequence: Synthetic oligonucleotide
  Antisense strand to SEQ ID NO: 1876287
ugcuucaccuauaucuacu

SEQ ID NO: 1876289 - RNA, 19 nt, Artificial Sequence
  Description of Artificial Sequence: Synthetic oligonucleotide
  Sense strand starting at position 809 of SEQ ID NO: 1564418
guagauauaggugaagcau

SEQ ID NO: 1876290 - RNA, 19 nt, Artificial Sequence
  Description of Artificial Sequence: Synthetic oligonucleotide
  Antisense strand to SEQ ID NO: 1876289
augcuucaccuauaucuac

SEQ ID NO: 1876291 - RNA, 19 nt, Artificial Sequence
  Description of Artificial Sequence: Synthetic oligonucleotide
  Sense strand starting at position 1153 of SEQ ID NO: 1564418
guacauuuauuuggaauuc

SEQ ID NO: 1876292 - RNA, 19 nt, Artificial Sequence
  Description of Artificial Sequence: Synthetic oligonucleotide
  Antisense strand to SEQ ID NO: 1876291
gaauuccaaauaaauguac

SEQ ID NO: 1876293 - RNA, 19 nt, Artificial Sequence
  Description of Artificial Sequence: Synthetic oligonucleotide
  Sense strand starting at position 1319 of SEQ ID NO: 1564418
uuuacugauguacaaagua

SEQ ID NO: 1876294 - RNA, 19 nt, Artificial Sequence
  Description of Artificial Sequence: Synthetic oligonucleotide
  Antisense strand to SEQ ID NO: 1876293
uacuuuguacaucaguaaa

SEQ ID NO: 1876295 - RNA, 19 nt, Artificial Sequence
  Description of Artificial Sequence: Synthetic oligonucleotide
  Sense strand starting at position 1389 of SEQ ID NO: 1564418
uugcuuaagacagacgauu

SEQ ID NO: 1876296 - RNA, 19 nt, Artificial Sequence
  Description of Artificial Sequence: Synthetic oligonucleotide
  Antisense strand to SEQ ID NO: 1876295
aaucgucugucuuaagcaa

SEQ ID NO: 1876297 - RNA, 19 nt, Artificial Sequence
  Description of Artificial Sequence: Synthetic oligonucleotide
  Sense strand starting at position 1509 of SEQ ID NO: 1564418
auagcaucaguuugaaaua

SEQ ID NO: 1876298 - RNA, 19 nt, Artificial Sequence
  Description of Artificial Sequence: Synthetic oligonucleotide
  Antisense strand to SEQ ID NO: 1876297
uauuucaaacugaugcuau

SEQ ID NO: 1876299 - RNA, 19 nt, Artificial Sequence
  Description of Artificial Sequence: Synthetic oligonucleotide
  Sense strand starting at position 1647 of SEQ ID NO: 1564418
caaaguuuccugggaaagu

SEQ ID NO: 1876300 - RNA, 19 nt, Artificial Sequence
  Description of Artificial Sequence: Synthetic oligonucleotide
  Antisense strand to SEQ ID NO: 1876299
acuuucccaggaaacuuug

SEQ ID NO: 1876301 - RNA, 19 nt, Artificial Sequence
  Description of Artificial Sequence: Synthetic oligonucleotide
  Sense strand starting at position 1772 of SEQ ID NO: 1564418
aaucauugaccguaagucu

SEQ ID NO: 1876302 - RNA, 19 nt, Artificial Sequence
  Description of Artificial Sequence: Synthetic oligonucleotide
  Antisense strand to SEQ ID NO: 1876301
agacuuacggucaaugauu

SEQ ID NO: 1876303 - RNA, 19 nt, Artificial Sequence
  Description of Artificial Sequence: Synthetic oligonucleotide
  Sense strand starting at position 2106 of SEQ ID NO: 1564418
ugagaaauguauccaguga

SEQ ID NO: 1876304 - RNA, 19 nt, Artificial Sequence
  Description of Artificial Sequence: Synthetic oligonucleotide
  Antisense strand to SEQ ID NO: 1876303
ucacuggauacauuucuca

SEQ ID NO: 1876305 - RNA, 19 nt, Artificial Sequence
  Description of Artificial Sequence: Synthetic oligonucleotide
  Sense strand starting at position 2262 of SEQ ID NO: 1564418
acuagauuggugugaggag

SEQ ID NO: 1876306 - RNA, 19 nt, Artificial Sequence
  Description of Artificial Sequence: Synthetic oligonucleotide
  Antisense strand to SEQ ID NO: 1876305
cuccucacaccaaucuagu

SEQ ID NO: 1876307 - RNA, 19 nt, Artificial Sequence
  Description of Artificial Sequence: Synthetic oligonucleotide
  Sense strand starting at position 2278 of SEQ ID NO: 1564418
gagcacaaggccuaguaau

SEQ ID NO: 1876308 - RNA, 19 nt, Artificial Sequence
  Description of Artificial Sequence: Synthetic oligonucleotide
  Antisense strand to SEQ ID NO: 1876307
auuacuaggccuugugcuc

SEQ ID NO: 1876309 - RNA, 19 nt, Artificial Sequence
  Description of Artificial Sequence: Synthetic oligonucleotide
  Sense strand starting at position 2479 of SEQ ID NO: 1564418
guauaauagauauggaguu

SEQ ID NO: 1876310 - RNA, 19 nt, Artificial Sequence
  Description of Artificial Sequence: Synthetic oligonucleotide
  Antisense strand to SEQ ID NO: 1876309
aacuccauaucuauuauac

SEQ ID NO: 1876311 - RNA, 19 nt, Artificial Sequence
  Description of Artificial Sequence: Synthetic oligonucleotide
  Sense strand starting at position 2532 of SEQ ID NO: 1564418
gauagaugaugaucguaug

SEQ ID NO: 1876312 - RNA, 19 nt, Artificial Sequence
  Description of Artificial Sequence: Synthetic oligonucleotide
  Antisense strand to SEQ ID NO: 1876311
cauacgaucaucaucuauc

SEQ ID NO: 1876313 - RNA, 19 nt, Artificial Sequence
  Description of Artificial Sequence: Synthetic oligonucleotide
  Sense strand starting at position 2533 of SEQ ID NO: 1564418
auagaugaugaucguauga

SEQ ID NO: 1876314 - RNA, 19 nt, Artificial Sequence
  Description of Artificial Sequence: Synthetic oligonucleotide
  Antisense strand to SEQ ID NO: 1876313
ucauacgaucaucaucuau

SEQ ID NO: 1876315 - RNA, 19 nt, Artificial Sequence
  Description of Artificial Sequence: Synthetic oligonucleotide
  Sense strand starting at position 2682 of SEQ ID NO: 1564418
cguuauauuuaugcauauc

SEQ ID NO: 1876316 - RNA, 19 nt, Artificial Sequence
  Description of Artificial Sequence: Synthetic oligonucleotide
  Antisense strand to SEQ ID NO: 1876315
gauaugcauaaauauaacg

SEQ ID NO: 1876317 - RNA, 19 nt, Artificial Sequence
  Description of Artificial Sequence: Synthetic oligonucleotide
  Sense strand starting at position 2742 of SEQ ID NO: 1564418
gauuuaauuugguaugucu

SEQ ID NO: 1876318 - RNA, 19 nt, Artificial Sequence
  Description of Artificial Sequence: Synthetic oligonucleotide
  Antisense strand to SEQ ID NO: 1876317
agacauaccaaauuaaauc

SEQ ID NO: 1876319 - RNA, 19 nt, Artificial Sequence
  Description of Artificial Sequence: Synthetic oligonucleotide
  Sense strand starting at position 2750 of SEQ ID NO: 1564418
uugguaugucucuaaauau

SEQ ID NO: 1876320 - RNA, 19 nt, Artificial Sequence
  Description of Artificial Sequence: Synthetic oligonucleotide
  Antisense strand to SEQ ID NO: 1876319
auauuuagagacauaccaa

SEQ ID NO: 1876321 - RNA, 19 nt, Artificial Sequence
  Description of Artificial Sequence: Synthetic oligonucleotide
  Sense strand starting at position 2906 of SEQ ID NO: 1564418
gugucuaagcagcauauuu

SEQ ID NO: 1876322 - RNA, 19 nt, Artificial Sequence
  Description of Artificial Sequence: Synthetic oligonucleotide
  Antisense strand to SEQ ID NO: 1876321
aaauaugcugcuuagacac

SEQ ID NO: 1876323 - RNA, 19 nt, Artificial Sequence
  Description of Artificial Sequence: Synthetic oligonucleotide
  Sense strand starting at position 3143 of SEQ ID NO: 1564418
uugguaaguguugaauaug

SEQ ID NO: 1876324 - RNA, 19 nt, Artificial Sequence
  Description of Artificial Sequence: Synthetic oligonucleotide
  Antisense strand to SEQ ID NO: 1876323
cauauucaacacuuaccaa

SEQ ID NO: 1876325 - RNA, 19 nt, Artificial Sequence
  Description of Artificial Sequence: Synthetic oligonucleotide
  Sense strand starting at position 3152 of SEQ ID NO: 1564418
guugaauauguguggaaga

SEQ ID NO: 1876326 - RNA, 19 nt, Artificial Sequence
  Description of Artificial Sequence: Synthetic oligonucleotide
  Antisense strand to SEQ ID NO: 1876325
ucuuccacacauauucaac

SEQ ID NO: 1876327 - RNA, 19 nt, Artificial Sequence
  Description of Artificial Sequence: Synthetic oligonucleotide
  Sense strand starting at position 3248 of SEQ ID NO: 1564418
auugccuugguuuaauaua

SEQ ID NO: 1876328 - RNA, 19 nt, Artificial Sequence
  Description of Artificial Sequence: Synthetic oligonucleotide
  Antisense strand to SEQ ID NO: 1876327
uauauuaaaccaaggcaau

SEQ ID NO: 1876329 - RNA, 19 nt, Artificial Sequence
  Description of Artificial Sequence: Synthetic oligonucleotide
  Sense strand starting at position 3347 of SEQ ID NO: 1564418
aucaguaaacucugugaag

SEQ ID NO: 1876330 - RNA, 19 nt, Artificial Sequence
  Description of Artificial Sequence: Synthetic oligonucleotide
  Antisense strand to SEQ ID NO: 1876329
cuucacagaguuuacugau

SEQ ID NO: 1876331 - RNA, 19 nt, Artificial Sequence
  Description of Artificial Sequence: Synthetic oligonucleotide
  Sense strand starting at position 3348 of SEQ ID NO: 1564418
ucaguaaacucugugaaga

SEQ ID NO: 1876332 - RNA, 19 nt, Artificial Sequence
  Description of Artificial Sequence: Synthetic oligonucleotide
  Antisense strand to SEQ ID NO: 1876331
ucuucacagaguuuacuga

SEQ ID NO: 1876333 - RNA, 19 nt, Artificial Sequence
  Description of Artificial Sequence: Synthetic oligonucleotide
  Sense strand starting at position 3349 of SEQ ID NO: 1564418
caguaaacucugugaagau

SEQ ID NO: 1876334 - RNA, 19 nt, Artificial Sequence
  Description of Artificial Sequence: Synthetic oligonucleotide
  Antisense strand to SEQ ID NO: 1876333
aucuucacagaguuuacug

SEQ ID NO: 1876335 - RNA, 19 nt, Artificial Sequence
  Description of Artificial Sequence: Synthetic oligonucleotide
  Sense strand starting at position 3390 of SEQ ID NO: 1564418
gcaugugguuucucaauuu

SEQ ID NO: 1876336 - RNA, 19 nt, Artificial Sequence
  Description of Artificial Sequence: Synthetic oligonucleotide
  Antisense strand to SEQ ID NO: 1876335
aaauugagaaaccacaugc

SEQ ID NO: 1876337 - RNA, 19 nt, Artificial Sequence
  Description of Artificial Sequence: Synthetic oligonucleotide
  Sense strand starting at position 3715 of SEQ ID NO: 1564418
ggagauggcucagcuaaag

SEQ ID NO: 1876338 - RNA, 19 nt, Artificial Sequence
  Description of Artificial Sequence: Synthetic oligonucleotide
  Antisense strand to SEQ ID NO: 1876337
cuuuagcugagccaucucc

SEQ ID NO: 1876339 - RNA, 19 nt, Artificial Sequence
  Description of Artificial Sequence: Synthetic oligonucleotide
  Sense strand starting at position 3851 of SEQ ID NO: 1564418
gaauaagaugucugucuga

SEQ ID NO: 1876340 - RNA, 19 nt, Artificial Sequence
  Description of Artificial Sequence: Synthetic oligonucleotide
  Antisense strand to SEQ ID NO: 1876339
ucagacagacaucuuauuc

SEQ ID NO: 1876341 - RNA, 19 nt, Artificial Sequence
  Description of Artificial Sequence: Synthetic oligonucleotide
  Sense strand starting at position 1061 of SEQ ID NO: 1564419
uaagaaugugcuuauugug

SEQ ID NO: 1876342 - RNA, 19 nt, Artificial Sequence
  Description of Artificial Sequence: Synthetic oligonucleotide
  Antisense strand to SEQ ID NO: 1876341
cacaauaagcacauucuua

SEQ ID NO: 1876343 - RNA, 19 nt, Artificial Sequence
  Description of Artificial Sequence: Synthetic oligonucleotide
  Sense strand starting at position 1094 of SEQ ID NO: 1564419
uuguuaagcccucaaguga

SEQ ID NO: 1876344 - RNA, 19 nt, Artificial Sequence
  Description of Artificial Sequence: Synthetic oligonucleotide
  Antisense strand to SEQ ID NO: 1876343
ucacuugagggcuuaacaa

SEQ ID NO: 1876345 - RNA, 19 nt, Artificial Sequence
  Description of Artificial Sequence: Synthetic oligonucleotide
  Sense strand starting at position 1323 of SEQ ID NO: 1564419
uuuacugauguacaaagua

SEQ ID NO: 1876346 - RNA, 19 nt, Artificial Sequence
  Description of Artificial Sequence: Synthetic oligonucleotide
  Antisense strand to SEQ ID NO: 1876345
uacuuuguacaucaguaaa

SEQ ID NO: 1876347 - RNA, 19 nt, Artificial Sequence
  Description of Artificial Sequence: Synthetic oligonucleotide
  Sense strand starting at position 2110 of SEQ ID NO: 1564419
ugagaaauguauccaguga

SEQ ID NO: 1876348 - RNA, 19 nt, Artificial Sequence
  Description of Artificial Sequence: Synthetic oligonucleotide
  Antisense strand to SEQ ID NO: 1876347
ucacuggauacauuucuca

SEQ ID NO: 1876349 - RNA, 19 nt, Artificial Sequence
  Description of Artificial Sequence: Synthetic oligonucleotide
  Sense strand starting at position 2266 of SEQ ID NO: 1564419
acuagauuggugugaggag

SEQ ID NO: 1876350 - RNA, 19 nt, Artificial Sequence
  Description of Artificial Sequence: Synthetic oligonucleotide
  Antisense strand to SEQ ID NO: 1876349
cuccucacaccaaucuagu

SEQ ID NO: 1876351 - RNA, 19 nt, Artificial Sequence
  Description of Artificial Sequence: Synthetic oligonucleotide
  Sense strand starting at position 2282 of SEQ ID NO: 1564419
gagcacaaggccuaguaau

SEQ ID NO: 1876352 - RNA, 19 nt, Artificial Sequence
  Description of Artificial Sequence: Synthetic oligonucleotide
  Antisense strand to SEQ ID NO: 1876351
auuacuaggccuugugcuc

SEQ ID NO: 1876353 - RNA, 19 nt, Artificial Sequence
  Description of Artificial Sequence: Synthetic oligonucleotide
  Sense strand starting at position 2483 of SEQ ID NO: 1564419
guauaauagauauggaguu

SEQ ID NO: 1876354 - RNA, 19 nt, Artificial Sequence
  Description of Artificial Sequence: Synthetic oligonucleotide
  Antisense strand to SEQ ID NO: 1876353
aacuccauaucuauuauac

SEQ ID NO: 1876355 - RNA, 19 nt, Artificial Sequence
  Description of Artificial Sequence: Synthetic oligonucleotide
  Sense strand starting at position 2526 of SEQ ID NO: 1564419
aggaacuauugauagauga

SEQ ID NO: 1876356 - RNA, 19 nt, Artificial Sequence
  Description of Artificial Sequence: Synthetic oligonucleotide
  Antisense strand to SEQ ID NO: 1876355
ucaucuaucaauaguuccu

SEQ ID NO: 1876357 - RNA, 19 nt, Artificial Sequence
  Description of Artificial Sequence: Synthetic oligonucleotide
  Sense strand starting at position 2536 of SEQ ID NO: 1564419
gauagaugaugaucguaug

SEQ ID NO: 1876358 - RNA, 19 nt, Artificial Sequence
  Description of Artificial Sequence: Synthetic oligonucleotide
  Antisense strand to SEQ ID NO: 1876357
cauacgaucaucaucuauc

SEQ ID NO: 1876359 - RNA, 19 nt, Artificial Sequence
  Description of Artificial Sequence: Synthetic oligonucleotide
  Sense strand starting at position 2537 of SEQ ID NO: 1564419
auagaugaugaucguauga

SEQ ID NO: 1876360 - RNA, 19 nt, Artificial Sequence
  Description of Artificial Sequence: Synthetic oligonucleotide
  Antisense strand to SEQ ID NO: 1876359
ucauacgaucaucaucuau

SEQ ID NO: 1876361 - RNA, 19 nt, Artificial Sequence
  Description of Artificial Sequence: Synthetic oligonucleotide
  Sense strand starting at position 2686 of SEQ ID NO: 1564419
cguuauauuuaugcauauc

SEQ ID NO: 1876362 - RNA, 19 nt, Artificial Sequence
  Description of Artificial Sequence: Synthetic oligonucleotide
  Antisense strand to SEQ ID NO: 1876361
gauaugcauaaauauaacg

SEQ ID NO: 1876363 - RNA, 19 nt, Artificial Sequence
  Description of Artificial Sequence: Synthetic oligonucleotide
  Sense strand starting at position 2746 of SEQ ID NO: 1564419
gauuuaauuugguaugucu

SEQ ID NO: 1876364 - RNA, 19 nt, Artificial Sequence
  Description of Artificial Sequence: Synthetic oligonucleotide
  Antisense strand to SEQ ID NO: 1876363
agacauaccaaauuaaauc

SEQ ID NO: 1876365 - RNA, 19 nt, Artificial Sequence
  Description of Artificial Sequence: Synthetic oligonucleotide
  Sense strand starting at position 2753 of SEQ ID NO: 1564419
uuugguaugucucuaaaua

SEQ ID NO: 1876366 - RNA, 19 nt, Artificial Sequence
  Description of Artificial Sequence: Synthetic oligonucleotide
  Antisense strand to SEQ ID NO: 1876365
uauuuagagacauaccaaa

SEQ ID NO: 1876367 - RNA, 19 nt, Artificial Sequence
  Description of Artificial Sequence: Synthetic oligonucleotide
  Sense strand starting at position 2754 of SEQ ID NO: 1564419
uugguaugucucuaaauau

SEQ ID NO: 1876368 - RNA, 19 nt, Artificial Sequence
  Description of Artificial Sequence: Synthetic oligonucleotide
  Antisense strand to SEQ ID NO: 1876367
auauuuagagacauaccaa

SEQ ID NO: 1876369 - RNA, 19 nt, Artificial Sequence
  Description of Artificial Sequence: Synthetic oligonucleotide
  Sense strand starting at position 2809 of SEQ ID NO: 1564419
gggugacuuacuuguaagg

SEQ ID NO: 1876370 - RNA, 19 nt, Artificial Sequence
  Description of Artificial Sequence: Synthetic oligonucleotide
  Antisense strand to SEQ ID NO: 1876369
ccuuacaaguaagucaccc

SEQ ID NO: 1876371 - RNA, 19 nt, Artificial Sequence
  Description of Artificial Sequence: Synthetic oligonucleotide
  Sense strand starting at position 2910 of SEQ ID NO: 1564419
gugucuaagcagcauauuu

SEQ ID NO: 1876372 - RNA, 19 nt, Artificial Sequence
  Description of Artificial Sequence: Synthetic oligonucleotide
  Antisense strand to SEQ ID NO: 1876371
aaauaugcugcuuagacac

SEQ ID NO: 1876373 - RNA, 19 nt, Artificial Sequence
  Description of Artificial Sequence: Synthetic oligonucleotide
  Sense strand starting at position 2981 of SEQ ID NO: 1564419
aggaauaaucuuugugcca

SEQ ID NO: 1876374 - RNA, 19 nt, Artificial Sequence
  Description of Artificial Sequence: Synthetic oligonucleotide
  Antisense strand to SEQ ID NO: 1876373
uggcacaaagauuauuccu

SEQ ID NO: 1876375 - RNA, 19 nt, Artificial Sequence
  Description of Artificial Sequence: Synthetic oligonucleotide
  Sense strand starting at position 2982 of SEQ ID NO: 1564419
ggaauaaucuuugugccau

SEQ ID NO: 1876376 - RNA, 19 nt, Artificial Sequence
  Description of Artificial Sequence: Synthetic oligonucleotide
  Antisense strand to SEQ ID NO: 1876375
auggcacaaagauuauucc

SEQ ID NO: 1876377 - RNA, 19 nt, Artificial Sequence
  Description of Artificial Sequence: Synthetic oligonucleotide
  Sense strand starting at position 3105 of SEQ ID NO: 1564419
augguugacaguugguaua

SEQ ID NO: 1876378 - RNA, 19 nt, Artificial Sequence
  Description of Artificial Sequence: Synthetic oligonucleotide
  Antisense strand to SEQ ID NO: 1876377
uauaccaacugucaaccau

SEQ ID NO: 1876379 - RNA, 19 nt, Artificial Sequence
  Description of Artificial Sequence: Synthetic oligonucleotide
  Sense strand starting at position 3107 of SEQ ID NO: 1564419
gguugacaguugguauauu

SEQ ID NO: 1876380 - RNA, 19 nt, Artificial Sequence
  Description of Artificial Sequence: Synthetic oligonucleotide
  Antisense strand to SEQ ID NO: 1876379
aauauaccaacugucaacc

SEQ ID NO: 1876381 - RNA, 19 nt, Artificial Sequence
  Description of Artificial Sequence: Synthetic oligonucleotide
  Sense strand starting at position 3129 of SEQ ID NO: 1564419
auucgaacuccuuagcauu

SEQ ID NO: 1876382 - RNA, 19 nt, Artificial Sequence
  Description of Artificial Sequence: Synthetic oligonucleotide
  Antisense strand to SEQ ID NO: 1876381
aaugcuaaggaguucgaau

SEQ ID NO: 1876383 - RNA, 19 nt, Artificial Sequence
  Description of Artificial Sequence: Synthetic oligonucleotide
  Sense strand starting at position 3146 of SEQ ID NO: 1564419
uugguaaguguugaauaug

SEQ ID NO: 1876384 - RNA, 19 nt, Artificial Sequence
  Description of Artificial Sequence: Synthetic oligonucleotide
  Antisense strand to SEQ ID NO: 1876383
cauauucaacacuuaccaa

SEQ ID NO: 1876385 - RNA, 19 nt, Artificial Sequence
  Description of Artificial Sequence: Synthetic oligonucleotide
  Sense strand starting at position 3149 of SEQ ID NO: 1564419
guaaguguugaauaugugu

SEQ ID NO: 1876386 - RNA, 19 nt, Artificial Sequence
  Description of Artificial Sequence: Synthetic oligonucleotide
  Antisense strand to SEQ ID NO: 1876385
acacauauucaacacuuac

SEQ ID NO: 1876387 - RNA, 19 nt, Artificial Sequence
  Description of Artificial Sequence: Synthetic oligonucleotide
  Sense strand starting at position 3154 of SEQ ID NO: 1564419
uguugaauauguguggaag

SEQ ID NO: 1876388 - RNA, 19 nt, Artificial Sequence
  Description of Artificial Sequence: Synthetic oligonucleotide
  Antisense strand to SEQ ID NO: 1876387
cuuccacacauauucaaca

SEQ ID NO: 1876389 - RNA, 19 nt, Artificial Sequence
  Description of Artificial Sequence: Synthetic oligonucleotide
  Sense strand starting at position 3155 of SEQ ID NO: 1564419
guugaauauguguggaaga

SEQ ID NO: 1876390 - RNA, 19 nt, Artificial Sequence
  Description of Artificial Sequence: Synthetic oligonucleotide
  Antisense strand to SEQ ID NO: 1876389
ucuuccacacauauucaac

SEQ ID NO: 1876391 - RNA, 19 nt, Artificial Sequence
  Description of Artificial Sequence: Synthetic oligonucleotide
  Sense strand starting at position 3188 of SEQ ID NO: 1564419
ugauauuucucauacugua

SEQ ID NO: 1876392 - RNA, 19 nt, Artificial Sequence
  Description of Artificial Sequence: Synthetic oligonucleotide
  Antisense strand to SEQ ID NO: 1876391
uacaguaugagaaauauca

SEQ ID NO: 1876393 - RNA, 19 nt, Artificial Sequence
  Description of Artificial Sequence: Synthetic oligonucleotide
  Sense strand starting at position 3251 of SEQ ID NO: 1564419
auugccuugguuuaauaua

SEQ ID NO: 1876394 - RNA, 19 nt, Artificial Sequence
  Description of Artificial Sequence: Synthetic oligonucleotide
  Antisense strand to SEQ ID NO: 1876393
uauauuaaaccaaggcaau

SEQ ID NO: 1876395 - RNA, 19 nt, Artificial Sequence
  Description of Artificial Sequence: Synthetic oligonucleotide
  Sense strand starting at position 3259 of SEQ ID NO: 1564419
gguuuaauauaguuuaggu

SEQ ID NO: 1876396 - RNA, 19 nt, Artificial Sequence
  Description of Artificial Sequence: Synthetic oligonucleotide
  Antisense strand to SEQ ID NO: 1876395
accuaaacuauauuaaacc

SEQ ID NO: 1876397 - RNA, 19 nt, Artificial Sequence
  Description of Artificial Sequence: Synthetic oligonucleotide
  Sense strand starting at position 3350 of SEQ ID NO: 1564419
aucaguaaacucugugaag

SEQ ID NO: 1876398 - RNA, 19 nt, Artificial Sequence
  Description of Artificial Sequence: Synthetic oligonucleotide
  Antisense strand to SEQ ID NO: 1876397
cuucacagaguuuacugau

SEQ ID NO: 1876399 - RNA, 19 nt, Artificial Sequence
  Description of Artificial Sequence: Synthetic oligonucleotide
  Sense strand starting at position 3351 of SEQ ID NO: 1564419
ucaguaaacucugugaaga

SEQ ID NO: 1876400 - RNA, 19 nt, Artificial Sequence
  Description of Artificial Sequence: Synthetic oligonucleotide
  Antisense strand to SEQ ID NO: 1876399
ucuucacagaguuuacuga

SEQ ID NO: 1876401 - RNA, 19 nt, Artificial Sequence
  Description of Artificial Sequence: Synthetic oligonucleotide
  Sense strand starting at position 3352 of SEQ ID NO: 1564419
caguaaacucugugaagau

SEQ ID NO: 1876402 - RNA, 19 nt, Artificial Sequence
  Description of Artificial Sequence: Synthetic oligonucleotide
  Antisense strand to SEQ ID NO: 1876401
aucuucacagaguuuacug

SEQ ID NO: 1876403 - RNA, 19 nt, Artificial Sequence
  Description of Artificial Sequence: Synthetic oligonucleotide
  Sense strand starting at position 3592 of SEQ ID NO: 1564419
auaggagaaucagaagaca

SEQ ID NO: 1876404 - RNA, 19 nt, Artificial Sequence
  Description of Artificial Sequence: Synthetic oligonucleotide
  Antisense strand to SEQ ID NO: 1876403
ugucuucugauucuccuau

SEQ ID NO: 1876405 - RNA, 19 nt, Artificial Sequence
  Description of Artificial Sequence: Synthetic oligonucleotide
  Sense strand starting at position 3627 of SEQ ID NO: 1564419
aggauaaucuaagacaaau

SEQ ID NO: 1876406 - RNA, 19 nt, Artificial Sequence
  Description of Artificial Sequence: Synthetic oligonucleotide
  Antisense strand to SEQ ID NO: 1876405
auuugucuuagauuauccu

SEQ ID NO: 1876407 - RNA, 19 nt, Artificial Sequence
  Description of Artificial Sequence: Synthetic oligonucleotide
  Sense strand starting at position 3639 of SEQ ID NO: 1564419
gacaaauuguggcugagca

SEQ ID NO: 1876408 - RNA, 19 nt, Artificial Sequence
  Description of Artificial Sequence: Synthetic oligonucleotide
  Antisense strand to SEQ ID NO: 1876407
ugcucagccacaauuuguc

SEQ ID NO: 1876409 - RNA, 19 nt, Artificial Sequence
  Description of Artificial Sequence: Synthetic oligonucleotide
  Sense strand starting at position 3641 of SEQ ID NO: 1564419
caaauuguggcugagcauu

SEQ ID NO: 1876410 - RNA, 19 nt, Artificial Sequence
  Description of Artificial Sequence: Synthetic oligonucleotide
  Antisense strand to SEQ ID NO: 1876409
aaugcucagccacaauuug

SEQ ID NO: 1876411 - RNA, 19 nt, Artificial Sequence
  Description of Artificial Sequence: Synthetic oligonucleotide
  Sense strand starting at position 3666 of SEQ ID NO: 1564419
agcuaagauaggugacagu

SEQ ID NO: 1876412 - RNA, 19 nt, Artificial Sequence
  Description of Artificial Sequence: Synthetic oligonucleotide
  Antisense strand to SEQ ID NO: 1876411
acugucaccuaucuuagcu

SEQ ID NO: 1876413 - RNA, 19 nt, Artificial Sequence
  Description of Artificial Sequence: Synthetic oligonucleotide
  Sense strand starting at position 3692 of SEQ ID NO: 1564419
ggaagaaugccuuggugug

SEQ ID NO: 1876414 - RNA, 19 nt, Artificial Sequence
  Description of Artificial Sequence: Synthetic oligonucleotide
  Antisense strand to SEQ ID NO: 1876413
cacaccaaggcauucuucc

SEQ ID NO: 1876415 - RNA, 19 nt, Artificial Sequence
  Description of Artificial Sequence: Synthetic oligonucleotide
  Sense strand starting at position 3718 of SEQ ID NO: 1564419
ggagauggcucagcuaaag

SEQ ID NO: 1876416 - RNA, 19 nt, Artificial Sequence
  Description of Artificial Sequence: Synthetic oligonucleotide
  Antisense strand to SEQ ID NO: 1876415
cuuuagcugagccaucucc

SEQ ID NO: 1876417 - RNA, 19 nt, Artificial Sequence
  Description of Artificial Sequence: Synthetic oligonucleotide
  Sense strand starting at position 3854 of SEQ ID NO: 1564419
gaauaagaugucugucuga

SEQ ID NO: 1876418 - RNA, 19 nt, Artificial Sequence
  Description of Artificial Sequence: Synthetic oligonucleotide
  Antisense strand to SEQ ID NO: 1876417
ucagacagacaucuuauuc

SEQ ID NO: 1876419 - RNA, 19 nt, Artificial Sequence
  Description of Artificial Sequence: Synthetic oligonucleotide
  Sense strand starting at position 3857 of SEQ ID NO: 1564419
uaagaugucugucugaucu

SEQ ID NO: 1876420 - RNA, 19 nt, Artificial Sequence
  Description of Artificial Sequence: Synthetic oligonucleotide
  Antisense strand to SEQ ID NO: 1876419
agaucagacagacaucuua

SEQ ID NO: 1876421 - RNA, 19 nt, Artificial Sequence
  Description of Artificial Sequence: Synthetic oligonucleotide
  Sense strand starting at position 238 of SEQ ID NO: 1564420
auauuuguccaguggugau

SEQ ID NO: 1876422 - RNA, 19 nt, Artificial Sequence
  Description of Artificial Sequence: Synthetic oligonucleotide
  Antisense strand to SEQ ID NO: 1876421
aucaccacuggacaaauau

SEQ ID NO: 1876423 - RNA, 19 nt, Artificial Sequence
  Description of Artificial Sequence: Synthetic oligonucleotide
  Sense strand starting at position 262 of SEQ ID NO: 1564420
aagagcuagccuggaauga

SEQ ID NO: 1876424 - RNA, 19 nt, Artificial Sequence
  Description of Artificial Sequence: Synthetic oligonucleotide
  Antisense strand to SEQ ID NO: 1876423
ucauuccaggcuagcucuu

SEQ ID NO: 1876425 - RNA, 19 nt, Artificial Sequence
  Description of Artificial Sequence: Synthetic oligonucleotide
  Sense strand starting at position 437 of SEQ ID NO: 1564420
ggagauaugaugugguauu

SEQ ID NO: 1876426 - RNA, 19 nt, Artificial Sequence
  Description of Artificial Sequence: Synthetic oligonucleotide
  Antisense strand to SEQ ID NO: 1876425
aauaccacaucauaucucc

SEQ ID NO: 1876427 - RNA, 19 nt, Artificial Sequence
  Description of Artificial Sequence: Synthetic oligonucleotide
  Sense strand starting at position 525 of SEQ ID NO: 1564420
uaugaauaguggucaacug

SEQ ID NO: 1876428 - RNA, 19 nt, Artificial Sequence
  Description of Artificial Sequence: Synthetic oligonucleotide
  Antisense strand to SEQ ID NO: 1876427
caguugaccacuauucaua

SEQ ID NO: 1876429 - RNA, 19 nt, Artificial Sequence
  Description of Artificial Sequence: Synthetic oligonucleotide
  Sense strand starting at position 565 of SEQ ID NO: 1564420
uguugcaauuuguucugau

SEQ ID NO: 1876430 - RNA, 19 nt, Artificial Sequence
  Description of Artificial Sequence: Synthetic oligonucleotide
  Antisense strand to SEQ ID NO: 1876429
aucagaacaaauugcaaca

SEQ ID NO: 1876431 - RNA, 19 nt, Artificial Sequence
  Description of Artificial Sequence: Synthetic oligonucleotide
  Sense strand starting at position 566 of SEQ ID NO: 1564420
guugcaauuuguucugaug

SEQ ID NO: 1876432 - RNA, 19 nt, Artificial Sequence
  Description of Artificial Sequence: Synthetic oligonucleotide
  Antisense strand to SEQ ID NO: 1876431
caucagaacaaauugcaac

SEQ ID NO: 1876433 - RNA, 19 nt, Artificial Sequence
  Description of Artificial Sequence: Synthetic oligonucleotide
  Sense strand starting at position 661 of SEQ ID NO: 1564420
gacagaagauucccuuguu

SEQ ID NO: 1876434 - RNA, 19 nt, Artificial Sequence
  Description of Artificial Sequence: Synthetic oligonucleotide
  Antisense strand to SEQ ID NO: 1876433
aacaagggaaucuucuguc

SEQ ID NO: 1876435 - RNA, 19 nt, Artificial Sequence
  Description of Artificial Sequence: Synthetic oligonucleotide
  Sense strand starting at position 662 of SEQ ID NO: 1564420
acagaagauucccuuguua

SEQ ID NO: 1876436 - RNA, 19 nt, Artificial Sequence
  Description of Artificial Sequence: Synthetic oligonucleotide
  Antisense strand to SEQ ID NO: 1876435
uaacaagggaaucuucugu

SEQ ID NO: 1876437 - RNA, 19 nt, Artificial Sequence
  Description of Artificial Sequence: Synthetic oligonucleotide
  Sense strand starting at position 664 of SEQ ID NO: 1564420
agaagauucccuuguuaga

SEQ ID NO: 1876438 - RNA, 19 nt, Artificial Sequence
  Description of Artificial Sequence: Synthetic oligonucleotide
  Antisense strand to SEQ ID NO: 1876437
ucuaacaagggaaucuucu

SEQ ID NO: 1876439 - RNA, 19 nt, Artificial Sequence
  Description of Artificial Sequence: Synthetic oligonucleotide
  Sense strand starting at position 743 of SEQ ID NO: 1564420
gcagaauuaugauucucca

SEQ ID NO: 1876440 - RNA, 19 nt, Artificial Sequence
  Description of Artificial Sequence: Synthetic oligonucleotide
  Antisense strand to SEQ ID NO: 1876439
uggagaaucauaauucugc

SEQ ID NO: 1876441 - RNA, 19 nt, Artificial Sequence
  Description of Artificial Sequence: Synthetic oligonucleotide
  Sense strand starting at position 792 of SEQ ID NO: 1564420
ugaaaucuucguugaauaa

SEQ ID NO: 1876442 - RNA, 19 nt, Artificial Sequence
  Description of Artificial Sequence: Synthetic oligonucleotide
  Antisense strand to SEQ ID NO: 1876441
uuauucaacgaagauuuca

SEQ ID NO: 1876443 - RNA, 19 nt, Artificial Sequence
  Description of Artificial Sequence: Synthetic oligonucleotide
  Sense strand starting at position 796 of SEQ ID NO: 1564420
aucuucguugaauaaagua

SEQ ID NO: 1876444 - RNA, 19 nt, Artificial Sequence
  Description of Artificial Sequence: Synthetic oligonucleotide
  Antisense strand to SEQ ID NO: 1876443
uacuuuauucaacgaagau

SEQ ID NO: 1876445 - RNA, 19 nt, Artificial Sequence
  Description of Artificial Sequence: Synthetic oligonucleotide
  Sense strand starting at position 801 of SEQ ID NO: 1564420
cguugaauaaaguagauau

SEQ ID NO: 1876446 - RNA, 19 nt, Artificial Sequence
  Description of Artificial Sequence: Synthetic oligonucleotide
  Antisense strand to SEQ ID NO: 1876445
auaucuacuuuauucaacg

SEQ ID NO: 1876447 - RNA, 19 nt, Artificial Sequence
  Description of Artificial Sequence: Synthetic oligonucleotide
  Sense strand starting at position 811 of SEQ ID NO: 1564420
aguagauauaggugaagca

SEQ ID NO: 1876448 - RNA, 19 nt, Artificial Sequence
  Description of Artificial Sequence: Synthetic oligonucleotide
  Antisense strand to SEQ ID NO: 1876447
ugcuucaccuauaucuacu

SEQ ID NO: 1876449 - RNA, 19 nt, Artificial Sequence
  Description of Artificial Sequence: Synthetic oligonucleotide
  Sense strand starting at position 812 of SEQ ID NO: 1564420
guagauauaggugaagcau

SEQ ID NO: 1876450 - RNA, 19 nt, Artificial Sequence
  Description of Artificial Sequence: Synthetic oligonucleotide
  Antisense strand to SEQ ID NO: 1876449
augcuucaccuauaucuac

SEQ ID NO: 1876451 - RNA, 19 nt, Artificial Sequence
  Description of Artificial Sequence: Synthetic oligonucleotide
  Sense strand starting at position 1156 of SEQ ID NO: 1564420
guacauuuauuuggaauuc

SEQ ID NO: 1876452 - RNA, 19 nt, Artificial Sequence
  Description of Artificial Sequence: Synthetic oligonucleotide
  Antisense strand to SEQ ID NO: 1876451
gaauuccaaauaaauguac

SEQ ID NO: 1876453 - RNA, 19 nt, Artificial Sequence
  Description of Artificial Sequence: Synthetic oligonucleotide
  Sense strand starting at position 1322 of SEQ ID NO: 1564420
uuuacugauguacaaagua

SEQ ID NO: 1876454 - RNA, 19 nt, Artificial Sequence
  Description of Artificial Sequence: Synthetic oligonucleotide
  Antisense strand to SEQ ID NO: 1876453
uacuuuguacaucaguaaa

SEQ ID NO: 1876455 - RNA, 19 nt, Artificial Sequence
  Description of Artificial Sequence: Synthetic oligonucleotide
  Sense strand starting at position 1392 of SEQ ID NO: 1564420
uugcuuaagacagacgauu

SEQ ID NO: 1876456 - RNA, 19 nt, Artificial Sequence
  Description of Artificial Sequence: Synthetic oligonucleotide
  Antisense strand to SEQ ID NO: 1876455
aaucgucugucuuaagcaa

SEQ ID NO: 1876457 - RNA, 19 nt, Artificial Sequence
  Description of Artificial Sequence: Synthetic oligonucleotide
  Sense strand starting at position 1512 of SEQ ID NO: 1564420
auagcaucaguuugaaaua

SEQ ID NO: 1876458 - RNA, 19 nt, Artificial Sequence
  Description of Artificial Sequence: Synthetic oligonucleotide
  Antisense strand to SEQ ID NO: 1876457
uauuucaaacugaugcuau

SEQ ID NO: 1876459 - RNA, 19 nt, Artificial Sequence
  Description of Artificial Sequence: Synthetic oligonucleotide
  Sense strand starting at position 1650 of SEQ ID NO: 1564420
caaaguuuccugggaaagu

SEQ ID NO: 1876460 - RNA, 19 nt, Artificial Sequence
  Description of Artificial Sequence: Synthetic oligonucleotide
  Antisense strand to SEQ ID NO: 1876459
acuuucccaggaaacuuug

SEQ ID NO: 1876461 - RNA, 19 nt, Artificial Sequence
  Description of Artificial Sequence: Synthetic oligonucleotide
  Sense strand starting at position 1775 of SEQ ID NO: 1564420
aaucauugaccguaagucu

SEQ ID NO: 1876462 - RNA, 19 nt, Artificial Sequence
  Description of Artificial Sequence: Synthetic oligonucleotide
  Antisense strand to SEQ ID NO: 1876461
agacuuacggucaaugauu

SEQ ID NO: 1876463 - RNA, 19 nt, Artificial Sequence
  Description of Artificial Sequence: Synthetic oligonucleotide
  Sense strand starting at position 2109 of SEQ ID NO: 1564420
ugagaaauguauccaguga

SEQ ID NO: 1876464 - RNA, 19 nt, Artificial Sequence
  Description of Artificial Sequence: Synthetic oligonucleotide
  Antisense strand to SEQ ID NO: 1876463
ucacuggauacauuucuca

SEQ ID NO: 1876465 - RNA, 19 nt, Artificial Sequence
  Description of Artificial Sequence: Synthetic oligonucleotide
  Sense strand starting at position 2265 of SEQ ID NO: 1564420
acuagauuggugugaggag

SEQ ID NO: 1876466 - RNA, 19 nt, Artificial Sequence
  Description of Artificial Sequence: Synthetic oligonucleotide
  Antisense strand to SEQ ID NO: 1876465
cuccucacaccaaucuagu

SEQ ID NO: 1876467 - RNA, 19 nt, Artificial Sequence
  Description of Artificial Sequence: Synthetic oligonucleotide
  Sense strand starting at position 2281 of SEQ ID NO: 1564420
gagcacaaggccuaguaau

SEQ ID NO: 1876468 - RNA, 19 nt, Artificial Sequence
  Description of Artificial Sequence: Synthetic oligonucleotide
  Antisense strand to SEQ ID NO: 1876467
auuacuaggccuugugcuc

SEQ ID NO: 1876469 - RNA, 19 nt, Artificial Sequence
  Description of Artificial Sequence: Synthetic oligonucleotide
  Sense strand starting at position 2482 of SEQ ID NO: 1564420
guauaauagauauggaguu

SEQ ID NO: 1876470 - RNA, 19 nt, Artificial Sequence
  Description of Artificial Sequence: Synthetic oligonucleotide
  Antisense strand to SEQ ID NO: 1876469
aacuccauaucuauuauac

SEQ ID NO: 1876471 - RNA, 19 nt, Artificial Sequence
  Description of Artificial Sequence: Synthetic oligonucleotide
  Sense strand starting at position 2535 of SEQ ID NO: 1564420
gauagaugaugaucguaug

SEQ ID NO: 1876472 - RNA, 19 nt, Artificial Sequence
  Description of Artificial Sequence: Synthetic oligonucleotide
  Antisense strand to SEQ ID NO: 1876471
cauacgaucaucaucuauc

SEQ ID NO: 1876473 - RNA, 19 nt, Artificial Sequence
  Description of Artificial Sequence: Synthetic oligonucleotide
  Sense strand starting at position 2536 of SEQ ID NO: 1564420
auagaugaugaucguauga

SEQ ID NO: 1876474 - RNA, 19 nt, Artificial Sequence
  Description of Artificial Sequence: Synthetic oligonucleotide
  Antisense strand to SEQ ID NO: 1876473
ucauacgaucaucaucuau

SEQ ID NO: 1876475 - RNA, 19 nt, Artificial Sequence
  Description of Artificial Sequence: Synthetic oligonucleotide
  Sense strand starting at position 2685 of SEQ ID NO: 1564420
cguuauauuuaugcauauc

SEQ ID NO: 1876476 - RNA, 19 nt, Artificial Sequence
  Description of Artificial Sequence: Synthetic oligonucleotide
  Antisense strand to SEQ ID NO: 1876475
gauaugcauaaauauaacg

SEQ ID NO: 1876477 - RNA, 19 nt, Artificial Sequence
  Description of Artificial Sequence: Synthetic oligonucleotide
  Sense strand starting at position 2745 of SEQ ID NO: 1564420
gauuuaauuugguaugucu

SEQ ID NO: 1876478 - RNA, 19 nt, Artificial Sequence
  Description of Artificial Sequence: Synthetic oligonucleotide
  Antisense strand to SEQ ID NO: 1876477
agacauaccaaauuaaauc

SEQ ID NO: 1876479 - RNA, 19 nt, Artificial Sequence
  Description of Artificial Sequence: Synthetic oligonucleotide
  Sense strand starting at position 2753 of SEQ ID NO: 1564420
uugguaugucucuaaauau

SEQ ID NO: 1876480 - RNA, 19 nt, Artificial Sequence
  Description of Artificial Sequence: Synthetic oligonucleotide
  Antisense strand to SEQ ID NO: 1876479
auauuuagagacauaccaa

SEQ ID NO: 1876481 - RNA, 19 nt, Artificial Sequence
  Description of Artificial Sequence: Synthetic oligonucleotide
  Sense strand starting at position 2909 of SEQ ID NO: 1564420
gugucuaagcagcauauuu

SEQ ID NO: 1876482 - RNA, 19 nt, Artificial Sequence
  Description of Artificial Sequence: Synthetic oligonucleotide
  Antisense strand to SEQ ID NO: 1876481
aaauaugcugcuuagacac

SEQ ID NO: 1876483 - RNA, 19 nt, Artificial Sequence
  Description of Artificial Sequence: Synthetic oligonucleotide
  Sense strand starting at position 3146 of SEQ ID NO: 1564420
uugguaaguguugaauaug

SEQ ID NO: 1876484 - RNA, 19 nt, Artificial Sequence
  Description of Artificial Sequence: Synthetic oligonucleotide
  Antisense strand to SEQ ID NO: 1876483
cauauucaacacuuaccaa

SEQ ID NO: 1876485 - RNA, 19 nt, Artificial Sequence
  Description of Artificial Sequence: Synthetic oligonucleotide
  Sense strand starting at position 3155 of SEQ ID NO: 1564420
guugaauauguguggaaga

SEQ ID NO: 1876486 - RNA, 19 nt, Artificial Sequence
  Description of Artificial Sequence: Synthetic oligonucleotide
  Antisense strand to SEQ ID NO: 1876485
ucuuccacacauauucaac

SEQ ID NO: 1876487 - RNA, 19 nt, Artificial Sequence
  Description of Artificial Sequence: Synthetic oligonucleotide
  Sense strand starting at position 3251 of SEQ ID NO: 1564420
auugccuugguuuaauaua

SEQ ID NO: 1876488 - RNA, 19 nt, Artificial Sequence
  Description of Artificial Sequence: Synthetic oligonucleotide
  Antisense strand to SEQ ID NO: 1876487
uauauuaaaccaaggcaau

SEQ ID NO: 1876489 - RNA, 19 nt, Artificial Sequence
  Description of Artificial Sequence: Synthetic oligonucleotide
  Sense strand starting at position 3350 of SEQ ID NO: 1564420
aucaguaaacucugugaag

SEQ ID NO: 1876490 - RNA, 19 nt, Artificial Sequence
  Description of Artificial Sequence: Synthetic oligonucleotide
  Antisense strand to SEQ ID NO: 1876489
cuucacagaguuuacugau

SEQ ID NO: 1876491 - RNA, 19 nt, Artificial Sequence
  Description of Artificial Sequence: Synthetic oligonucleotide
  Sense strand starting at position 3351 of SEQ ID NO: 1564420
ucaguaaacucugugaaga

SEQ ID NO: 1876492 - RNA, 19 nt, Artificial Sequence
  Description of Artificial Sequence: Synthetic oligonucleotide
  Antisense strand to SEQ ID NO: 1876491
ucuucacagaguuuacuga

SEQ ID NO: 1876493 - RNA, 19 nt, Artificial Sequence
  Description of Artificial Sequence: Synthetic oligonucleotide
  Sense strand starting at position 3352 of SEQ ID NO: 1564420
caguaaacucugugaagau

SEQ ID NO: 1876494 - RNA, 19 nt, Artificial Sequence
  Description of Artificial Sequence: Synthetic oligonucleotide
  Antisense strand to SEQ ID NO: 1876493
aucuucacagaguuuacug

SEQ ID NO: 1876495 - RNA, 19 nt, Artificial Sequence
  Description of Artificial Sequence: Synthetic oligonucleotide
  Sense strand starting at position 3393 of SEQ ID NO: 1564420
gcaugugguuucucaauuu

SEQ ID NO: 1876496 - RNA, 19 nt, Artificial Sequence
  Description of Artificial Sequence: Synthetic oligonucleotide
  Antisense strand to SEQ ID NO: 1876495
aaauugagaaaccacaugc

SEQ ID NO: 1876497 - RNA, 19 nt, Artificial Sequence
  Description of Artificial Sequence: Synthetic oligonucleotide
  Sense strand starting at position 3718 of SEQ ID NO: 1564420
ggagauggcucagcuaaag

SEQ ID NO: 1876498 - RNA, 19 nt, Artificial Sequence
  Description of Artificial Sequence: Synthetic oligonucleotide
  Antisense strand to SEQ ID NO: 1876497
cuuuagcugagccaucucc

SEQ ID NO: 1876499 - RNA, 19 nt, Artificial Sequence
  Description of Artificial Sequence: Synthetic oligonucleotide
  Sense strand starting at position 3854 of SEQ ID NO: 1564420
gaauaagaugucugucuga

SEQ ID NO: 1876500 - RNA, 19 nt, Artificial Sequence
  Description of Artificial Sequence: Synthetic oligonucleotide
  Antisense strand to SEQ ID NO: 1876499
ucagacagacaucuuauuc

SEQ ID NO: 1876501 - RNA, 19 nt, Artificial Sequence
  Description of Artificial Sequence: Synthetic oligonucleotide
  Sense strand starting at position 1061 of SEQ ID NO: 1564421
uaagaaugugcuuauugug

SEQ ID NO: 1876502 - RNA, 19 nt, Artificial Sequence
  Description of Artificial Sequence: Synthetic oligonucleotide
  Antisense strand to SEQ ID NO: 1876501
cacaauaagcacauucuua

SEQ ID NO: 1876503 - RNA, 19 nt, Artificial Sequence
  Description of Artificial Sequence: Synthetic oligonucleotide
  Sense strand starting at position 1094 of SEQ ID NO: 1564421
uuguuaagcccucaaguga

SEQ ID NO: 1876504 - RNA, 19 nt, Artificial Sequence
  Description of Artificial Sequence: Synthetic oligonucleotide
  Antisense strand to SEQ ID NO: 1876503
ucacuugagggcuuaacaa

SEQ ID NO: 1876505 - RNA, 19 nt, Artificial Sequence
  Description of Artificial Sequence: Synthetic oligonucleotide
  Sense strand starting at position 1323 of SEQ ID NO: 1564421
uuuacugauguacaaagua

SEQ ID NO: 1876506 - RNA, 19 nt, Artificial Sequence
  Description of Artificial Sequence: Synthetic oligonucleotide
  Antisense strand to SEQ ID NO: 1876505
uacuuuguacaucaguaaa

SEQ ID NO: 1876507 - RNA, 19 nt, Artificial Sequence
  Description of Artificial Sequence: Synthetic oligonucleotide
  Sense strand starting at position 2110 of SEQ ID NO: 1564421
ugagaaauguauccaguga

SEQ ID NO: 1876508 - RNA, 19 nt, Artificial Sequence
  Description of Artificial Sequence: Synthetic oligonucleotide
  Antisense strand to SEQ ID NO: 1876507
ucacuggauacauuucuca

SEQ ID NO: 1876509 - RNA, 19 nt, Artificial Sequence
  Description of Artificial Sequence: Synthetic oligonucleotide
  Sense strand starting at position 2266 of SEQ ID NO: 1564421
acuagauuggugugaggag

SEQ ID NO: 1876510 - RNA, 19 nt, Artificial Sequence
  Description of Artificial Sequence: Synthetic oligonucleotide
  Antisense strand to SEQ ID NO: 1876509
cuccucacaccaaucuagu

SEQ ID NO: 1876511 - RNA, 19 nt, Artificial Sequence
  Description of Artificial Sequence: Synthetic oligonucleotide
  Sense strand starting at position 2282 of SEQ ID NO: 1564421
gagcacaaggccuaguaau

SEQ ID NO: 1876512 - RNA, 19 nt, Artificial Sequence
  Description of Artificial Sequence: Synthetic oligonucleotide
  Antisense strand to SEQ ID NO: 1876511
auuacuaggccuugugcuc

SEQ ID NO: 1876513 - RNA, 19 nt, Artificial Sequence
  Description of Artificial Sequence: Synthetic oligonucleotide
  Sense strand starting at position 2483 of SEQ ID NO: 1564421
guauaauagauauggaguu

SEQ ID NO: 1876514 - RNA, 19 nt, Artificial Sequence
  Description of Artificial Sequence: Synthetic oligonucleotide
  Antisense strand to SEQ ID NO: 1876513
aacuccauaucuauuauac

SEQ ID NO: 1876515 - RNA, 19 nt, Artificial Sequence
  Description of Artificial Sequence: Synthetic oligonucleotide
  Sense strand starting at position 2526 of SEQ ID NO: 1564421
aggaacuauugauagauga

SEQ ID NO: 1876516 - RNA, 19 nt, Artificial Sequence
  Description of Artificial Sequence: Synthetic oligonucleotide
  Antisense strand to SEQ ID NO: 1876515
ucaucuaucaauaguuccu

SEQ ID NO: 1876517 - RNA, 19 nt, Artificial Sequence
  Description of Artificial Sequence: Synthetic oligonucleotide
  Sense strand starting at position 2536 of SEQ ID NO: 1564421
gauagaugaugaucguaug

SEQ ID NO: 1876518 - RNA, 19 nt, Artificial Sequence
  Description of Artificial Sequence: Synthetic oligonucleotide
  Antisense strand to SEQ ID NO: 1876517
cauacgaucaucaucuauc

SEQ ID NO: 1876519 - RNA, 19 nt, Artificial Sequence
  Description of Artificial Sequence: Synthetic oligonucleotide
  Sense strand starting at position 2537 of SEQ ID NO: 1564421
auagaugaugaucguauga

SEQ ID NO: 1876520 - RNA, 19 nt, Artificial Sequence
  Description of Artificial Sequence: Synthetic oligonucleotide
  Antisense strand to SEQ ID NO: 1876519
ucauacgaucaucaucuau

SEQ ID NO: 1876521 - RNA, 19 nt, Artificial Sequence
  Description of Artificial Sequence: Synthetic oligonucleotide
  Sense strand starting at position 2686 of SEQ ID NO: 1564421
cguuauauuuaugcauauc

SEQ ID NO: 1876522 - RNA, 19 nt, Artificial Sequence
  Description of Artificial Sequence: Synthetic oligonucleotide
  Antisense strand to SEQ ID NO: 1876521
gauaugcauaaauauaacg

SEQ ID NO: 1876523 - RNA, 19 nt, Artificial Sequence
  Description of Artificial Sequence: Synthetic oligonucleotide
  Sense strand starting at position 2746 of SEQ ID NO: 1564421
gauuuaauuugguaugucu

SEQ ID NO: 1876524 - RNA, 19 nt, Artificial Sequence
  Description of Artificial Sequence: Synthetic oligonucleotide
  Antisense strand to SEQ ID NO: 1876523
agacauaccaaauuaaauc

SEQ ID NO: 1876525 - RNA, 19 nt, Artificial Sequence
  Description of Artificial Sequence: Synthetic oligonucleotide
  Sense strand starting at position 2753 of SEQ ID NO: 1564421
uuugguaugucucuaaaua

SEQ ID NO: 1876526 - RNA, 19 nt, Artificial Sequence
  Description of Artificial Sequence: Synthetic oligonucleotide
  Antisense strand to SEQ ID NO: 1876525
uauuuagagacauaccaaa

SEQ ID NO: 1876527 - RNA, 19 nt, Artificial Sequence
  Description of Artificial Sequence: Synthetic oligonucleotide
  Sense strand starting at position 2754 of SEQ ID NO: 1564421
uugguaugucucuaaauau

SEQ ID NO: 1876528 - RNA, 19 nt, Artificial Sequence
  Description of Artificial Sequence: Synthetic oligonucleotide
  Antisense strand to SEQ ID NO: 1876527
auauuuagagacauaccaa

SEQ ID NO: 1876529 - RNA, 19 nt, Artificial Sequence
  Description of Artificial Sequence: Synthetic oligonucleotide
  Sense strand starting at position 2809 of SEQ ID NO: 1564421
gggugacuuacuuguaagg

SEQ ID NO: 1876530 - RNA, 19 nt, Artificial Sequence
  Description of Artificial Sequence: Synthetic oligonucleotide
  Antisense strand to SEQ ID NO: 1876529
ccuuacaaguaagucaccc

SEQ ID NO: 1876531 - RNA, 19 nt, Artificial Sequence
  Description of Artificial Sequence: Synthetic oligonucleotide
  Sense strand starting at position 2910 of SEQ ID NO: 1564421
gugucuaagcagcauauuu

SEQ ID NO: 1876532 - RNA, 19 nt, Artificial Sequence
  Description of Artificial Sequence: Synthetic oligonucleotide
  Antisense strand to SEQ ID NO: 1876531
aaauaugcugcuuagacac

SEQ ID NO: 1876533 - RNA, 19 nt, Artificial Sequence
  Description of Artificial Sequence: Synthetic oligonucleotide
  Sense strand starting at position 2981 of SEQ ID NO: 1564421
aggaauaaucuuugugcca

SEQ ID NO: 1876534 - RNA, 19 nt, Artificial Sequence
  Description of Artificial Sequence: Synthetic oligonucleotide
  Antisense strand to SEQ ID NO: 1876533
uggcacaaagauuauuccu

SEQ ID NO: 1876535 - RNA, 19 nt, Artificial Sequence
  Description of Artificial Sequence: Synthetic oligonucleotide
  Sense strand starting at position 2982 of SEQ ID NO: 1564421
ggaauaaucuuugugccau

SEQ ID NO: 1876536 - RNA, 19 nt, Artificial Sequence
  Description of Artificial Sequence: Synthetic oligonucleotide
  Antisense strand to SEQ ID NO: 1876535
auggcacaaagauuauucc

SEQ ID NO: 1876537 - RNA, 19 nt, Artificial Sequence
  Description of Artificial Sequence: Synthetic oligonucleotide
  Sense strand starting at position 3105 of SEQ ID NO: 1564421
augguugacaguugguaua

SEQ ID NO: 1876538 - RNA, 19 nt, Artificial Sequence
  Description of Artificial Sequence: Synthetic oligonucleotide
  Antisense strand to SEQ ID NO: 1876537
uauaccaacugucaaccau

SEQ ID NO: 1876539 - RNA, 19 nt, Artificial Sequence
  Description of Artificial Sequence: Synthetic oligonucleotide
  Sense strand starting at position 3107 of SEQ ID NO: 1564421
gguugacaguugguauauu

SEQ ID NO: 1876540 - RNA, 19 nt, Artificial Sequence
  Description of Artificial Sequence: Synthetic oligonucleotide
  Antisense strand to SEQ ID NO: 1876539
aauauaccaacugucaacc

SEQ ID NO: 1876541 - RNA, 19 nt, Artificial Sequence
  Description of Artificial Sequence: Synthetic oligonucleotide
  Sense strand starting at position 3129 of SEQ ID NO: 1564421
auucgaacuccuuagcauu

SEQ ID NO: 1876542 - RNA, 19 nt, Artificial Sequence
  Description of Artificial Sequence: Synthetic oligonucleotide
  Antisense strand to SEQ ID NO: 1876541
aaugcuaaggaguucgaau

SEQ ID NO: 1876543 - RNA, 19 nt, Artificial Sequence
  Description of Artificial Sequence: Synthetic oligonucleotide
  Sense strand starting at position 3146 of SEQ ID NO: 1564421
uugguaaguguugaauaug

SEQ ID NO: 1876544 - RNA, 19 nt, Artificial Sequence
  Description of Artificial Sequence: Synthetic oligonucleotide
  Antisense strand to SEQ ID NO: 1876543
cauauucaacacuuaccaa

SEQ ID NO: 1876545 - RNA, 19 nt, Artificial Sequence
  Description of Artificial Sequence: Synthetic oligonucleotide
  Sense strand starting at position 3149 of SEQ ID NO: 1564421
guaaguguugaauaugugu

SEQ ID NO: 1876546 - RNA, 19 nt, Artificial Sequence
  Description of Artificial Sequence: Synthetic oligonucleotide
  Antisense strand to SEQ ID NO: 1876545
acacauauucaacacuuac

SEQ ID NO: 1876547 - RNA, 19 nt, Artificial Sequence
  Description of Artificial Sequence: Synthetic oligonucleotide
  Sense strand starting at position 3154 of SEQ ID NO: 1564421
uguugaauauguguggaag

SEQ ID NO: 1876548 - RNA, 19 nt, Artificial Sequence
  Description of Artificial Sequence: Synthetic oligonucleotide
  Antisense strand to SEQ ID NO: 1876547
cuuccacacauauucaaca

SEQ ID NO: 1876549 - RNA, 19 nt, Artificial Sequence
  Description of Artificial Sequence: Synthetic oligonucleotide
  Sense strand starting at position 3155 of SEQ ID NO: 1564421
guugaauauguguggaaga

SEQ ID NO: 1876550 - RNA, 19 nt, Artificial Sequence
  Description of Artificial Sequence: Synthetic oligonucleotide
  Antisense strand to SEQ ID NO: 1876549
ucuuccacacauauucaac

SEQ ID NO: 1876551 - RNA, 19 nt, Artificial Sequence
  Description of Artificial Sequence: Synthetic oligonucleotide
  Sense strand starting at position 3188 of SEQ ID NO: 1564421
ugauauuucucauacugua

SEQ ID NO: 1876552 - RNA, 19 nt, Artificial Sequence
  Description of Artificial Sequence: Synthetic oligonucleotide
  Antisense strand to SEQ ID NO: 1876551
uacaguaugagaaauauca

SEQ ID NO: 1876553 - RNA, 19 nt, Artificial Sequence
  Description of Artificial Sequence: Synthetic oligonucleotide
  Sense strand starting at position 3251 of SEQ ID NO: 1564421
auugccuugguuuaauaua

SEQ ID NO: 1876554 - RNA, 19 nt, Artificial Sequence
  Description of Artificial Sequence: Synthetic oligonucleotide
  Antisense strand to SEQ ID NO: 1876553
uauauuaaaccaaggcaau

SEQ ID NO: 1876555 - RNA, 19 nt, Artificial Sequence
  Description of Artificial Sequence: Synthetic oligonucleotide
  Sense strand starting at position 3259 of SEQ ID NO: 1564421
gguuuaauauaguuuaggu

SEQ ID NO: 1876556 - RNA, 19 nt, Artificial Sequence
  Description of Artificial Sequence: Synthetic oligonucleotide
  Antisense strand to SEQ ID NO: 1876555
accuaaacuauauuaaacc

SEQ ID NO: 1876557 - RNA, 19 nt, Artificial Sequence
  Description of Artificial Sequence: Synthetic oligonucleotide
  Sense strand starting at position 3350 of SEQ ID NO: 1564421
aucaguaaacucugugaag

SEQ ID NO: 1876558 - RNA, 19 nt, Artificial Sequence
  Description of Artificial Sequence: Synthetic oligonucleotide
  Antisense strand to SEQ ID NO: 1876557
cuucacagaguuuacugau

SEQ ID NO: 1876559 - RNA, 19 nt, Artificial Sequence
  Description of Artificial Sequence: Synthetic oligonucleotide
  Sense strand starting at position 3351 of SEQ ID NO: 1564421
ucaguaaacucugugaaga

SEQ ID NO: 1876560 - RNA, 19 nt, Artificial Sequence
  Description of Artificial Sequence: Synthetic oligonucleotide
  Antisense strand to SEQ ID NO: 1876559
ucuucacagaguuuacuga

SEQ ID NO: 1876561 - RNA, 19 nt, Artificial Sequence
  Description of Artificial Sequence: Synthetic oligonucleotide
  Sense strand starting at position 3352 of SEQ ID NO: 1564421
caguaaacucugugaagau

SEQ ID NO: 1876562 - RNA, 19 nt, Artificial Sequence
  Description of Artificial Sequence: Synthetic oligonucleotide
  Antisense strand to SEQ ID NO: 1876561
aucuucacagaguuuacug

SEQ ID NO: 1876563 - RNA, 19 nt, Artificial Sequence
  Description of Artificial Sequence: Synthetic oligonucleotide
  Sense strand starting at position 3592 of SEQ ID NO: 1564421
auaggagaaucagaagaca

SEQ ID NO: 1876564 - RNA, 19 nt, Artificial Sequence
  Description of Artificial Sequence: Synthetic oligonucleotide
  Antisense strand to SEQ ID NO: 1876563
ugucuucugauucuccuau

SEQ ID NO: 1876565 - RNA, 19 nt, Artificial Sequence
  Description of Artificial Sequence: Synthetic oligonucleotide
  Sense strand starting at position 3627 of SEQ ID NO: 1564421
aggauaaucuaagacaaau

SEQ ID NO: 1876566 - RNA, 19 nt, Artificial Sequence
  Description of Artificial Sequence: Synthetic oligonucleotide
  Antisense strand to SEQ ID NO: 1876565
auuugucuuagauuauccu

SEQ ID NO: 1876567 - RNA, 19 nt, Artificial Sequence
  Description of Artificial Sequence: Synthetic oligonucleotide
  Sense strand starting at position 3639 of SEQ ID NO: 1564421
gacaaauuguggcugagca

SEQ ID NO: 1876568 - RNA, 19 nt, Artificial Sequence
  Description of Artificial Sequence: Synthetic oligonucleotide
  Antisense strand to SEQ ID NO: 1876567
ugcucagccacaauuuguc

SEQ ID NO: 1876569 - RNA, 19 nt, Artificial Sequence
  Description of Artificial Sequence: Synthetic oligonucleotide
  Sense strand starting at position 3641 of SEQ ID NO: 1564421
caaauuguggcugagcauu

SEQ ID NO: 1876570 - RNA, 19 nt, Artificial Sequence
  Description of Artificial Sequence: Synthetic oligonucleotide
  Antisense strand to SEQ ID NO: 1876569
aaugcucagccacaauuug

SEQ ID NO: 1876571 - RNA, 19 nt, Artificial Sequence
  Description of Artificial Sequence: Synthetic oligonucleotide
  Sense strand starting at position 3666 of SEQ ID NO: 1564421
agcuaagauaggugacagu

SEQ ID NO: 1876572 - RNA, 19 nt, Artificial Sequence
  Description of Artificial Sequence: Synthetic oligonucleotide
  Antisense strand to SEQ ID NO: 1876571
acugucaccuaucuuagcu

SEQ ID NO: 1876573 - RNA, 19 nt, Artificial Sequence
  Description of Artificial Sequence: Synthetic oligonucleotide
  Sense strand starting at position 3692 of SEQ ID NO: 1564421
ggaagaaugccuuggugug

SEQ ID NO: 1876574 - RNA, 19 nt, Artificial Sequence
  Description of Artificial Sequence: Synthetic oligonucleotide
  Antisense strand to SEQ ID NO: 1876573
cacaccaaggcauucuucc

SEQ ID NO: 1876575 - RNA, 19 nt, Artificial Sequence
  Description of Artificial Sequence: Synthetic oligonucleotide
  Sense strand starting at position 3718 of SEQ ID NO: 1564421
ggagauggcucagcuaaag

SEQ ID NO: 1876576 - RNA, 19 nt, Artificial Sequence
  Description of Artificial Sequence: Synthetic oligonucleotide
  Antisense strand to SEQ ID NO: 1876575
cuuuagcugagccaucucc

SEQ ID NO: 1876577 - RNA, 19 nt, Artificial Sequence
  Description of Artificial Sequence: Synthetic oligonucleotide
  Sense strand starting at position 3854 of SEQ ID NO: 1564421
gaauaagaugucugucuga

SEQ ID NO: 1876578 - RNA, 19 nt, Artificial Sequence
  Description of Artificial Sequence: Synthetic oligonucleotide
  Antisense strand to SEQ ID NO: 1876577
ucagacagacaucuuauuc

SEQ ID NO: 1876579 - RNA, 19 nt, Artificial Sequence
  Description of Artificial Sequence: Synthetic oligonucleotide
  Sense strand starting at position 3857 of SEQ ID NO: 1564421
uaagaugucugucugaucu

SEQ ID NO: 1876580 - RNA, 19 nt, Artificial Sequence
  Description of Artificial Sequence: Synthetic oligonucleotide
  Antisense strand to SEQ ID NO: 1876579
agaucagacagacaucuua

SEQ ID NO: 1876581 - RNA, 19 nt, Artificial Sequence
  Description of Artificial Sequence: Synthetic oligonucleotide
  Sense strand starting at position 238 of SEQ ID NO: 1564422
auauuuguccaguggugau

SEQ ID NO: 1876582 - RNA, 19 nt, Artificial Sequence
  Description of Artificial Sequence: Synthetic oligonucleotide
  Antisense strand to SEQ ID NO: 1876581
aucaccacuggacaaauau

SEQ ID NO: 1876583 - RNA, 19 nt, Artificial Sequence
  Description of Artificial Sequence: Synthetic oligonucleotide
  Sense strand starting at position 262 of SEQ ID NO: 1564422
aagagcuagccuggaauga

SEQ ID NO: 1876584 - RNA, 19 nt, Artificial Sequence
  Description of Artificial Sequence: Synthetic oligonucleotide
  Antisense strand to SEQ ID NO: 1876583
ucauuccaggcuagcucuu

SEQ ID NO: 1876585 - RNA, 19 nt, Artificial Sequence
  Description of Artificial Sequence: Synthetic oligonucleotide
  Sense strand starting at position 437 of SEQ ID NO: 1564422
ggagauaugaugugguauu

SEQ ID NO: 1876586 - RNA, 19 nt, Artificial Sequence
  Description of Artificial Sequence: Synthetic oligonucleotide
  Antisense strand to SEQ ID NO: 1876585
aauaccacaucauaucucc

SEQ ID NO: 1876587 - RNA, 19 nt, Artificial Sequence
  Description of Artificial Sequence: Synthetic oligonucleotide
  Sense strand starting at position 525 of SEQ ID NO: 1564422
uaugaauaguggucaacug

SEQ ID NO: 1876588 - RNA, 19 nt, Artificial Sequence
  Description of Artificial Sequence: Synthetic oligonucleotide
  Antisense strand to SEQ ID NO: 1876587
caguugaccacuauucaua

SEQ ID NO: 1876589 - RNA, 19 nt, Artificial Sequence
  Description of Artificial Sequence: Synthetic oligonucleotide
  Sense strand starting at position 565 of SEQ ID NO: 1564422
uguugcaauuuguucugau

SEQ ID NO: 1876590 - RNA, 19 nt, Artificial Sequence
  Description of Artificial Sequence: Synthetic oligonucleotide
  Antisense strand to SEQ ID NO: 1876589
aucagaacaaauugcaaca

SEQ ID NO: 1876591 - RNA, 19 nt, Artificial Sequence
  Description of Artificial Sequence: Synthetic oligonucleotide
  Sense strand starting at position 566 of SEQ ID NO: 1564422
guugcaauuuguucugaug

SEQ ID NO: 1876592 - RNA, 19 nt, Artificial Sequence
  Description of Artificial Sequence: Synthetic oligonucleotide
  Antisense strand to SEQ ID NO: 1876591
caucagaacaaauugcaac

SEQ ID NO: 1876593 - RNA, 19 nt, Artificial Sequence
  Description of Artificial Sequence: Synthetic oligonucleotide
  Sense strand starting at position 661 of SEQ ID NO: 1564422
gacagaagauucccuuguu

SEQ ID NO: 1876594 - RNA, 19 nt, Artificial Sequence
  Description of Artificial Sequence: Synthetic oligonucleotide
  Antisense strand to SEQ ID NO: 1876593
aacaagggaaucuucuguc

SEQ ID NO: 1876595 - RNA, 19 nt, Artificial Sequence
  Description of Artificial Sequence: Synthetic oligonucleotide
  Sense strand starting at position 662 of SEQ ID NO: 1564422
acagaagauucccuuguua

SEQ ID NO: 1876596 - RNA, 19 nt, Artificial Sequence
  Description of Artificial Sequence: Synthetic oligonucleotide
  Antisense strand to SEQ ID NO: 1876595
uaacaagggaaucuucugu

SEQ ID NO: 1876597 - RNA, 19 nt, Artificial Sequence
  Description of Artificial Sequence: Synthetic oligonucleotide
  Sense strand starting at position 664 of SEQ ID NO: 1564422
agaagauucccuuguuaga

SEQ ID NO: 1876598 - RNA, 19 nt, Artificial Sequence
  Description of Artificial Sequence: Synthetic oligonucleotide
  Antisense strand to SEQ ID NO: 1876597
ucuaacaagggaaucuucu

SEQ ID NO: 1876599 - RNA, 19 nt, Artificial Sequence
  Description of Artificial Sequence: Synthetic oligonucleotide
  Sense strand starting at position 743 of SEQ ID NO: 1564422
gcagaauuaugauucucca

SEQ ID NO: 1876600 - RNA, 19 nt, Artificial Sequence
  Description of Artificial Sequence: Synthetic oligonucleotide
  Antisense strand to SEQ ID NO: 1876599
uggagaaucauaauucugc

SEQ ID NO: 1876601 - RNA, 19 nt, Artificial Sequence
  Description of Artificial Sequence: Synthetic oligonucleotide
  Sense strand starting at position 792 of SEQ ID NO: 1564422
ugaaaucuucguugaauaa

SEQ ID NO: 1876602 - RNA, 19 nt, Artificial Sequence
  Description of Artificial Sequence: Synthetic oligonucleotide
  Antisense strand to SEQ ID NO: 1876601
uuauucaacgaagauuuca

SEQ ID NO: 1876603 - RNA, 19 nt, Artificial Sequence
  Description of Artificial Sequence: Synthetic oligonucleotide
  Sense strand starting at position 796 of SEQ ID NO: 1564422
aucuucguugaauaaagua

SEQ ID NO: 1876604 - RNA, 19 nt, Artificial Sequence
  Description of Artificial Sequence: Synthetic oligonucleotide
  Antisense strand to SEQ ID NO: 1876603
uacuuuauucaacgaagau

SEQ ID NO: 1876605 - RNA, 19 nt, Artificial Sequence
  Description of Artificial Sequence: Synthetic oligonucleotide
  Sense strand starting at position 801 of SEQ ID NO: 1564422
cguugaauaaaguagauau

SEQ ID NO: 1876606 - RNA, 19 nt, Artificial Sequence
  Description of Artificial Sequence: Synthetic oligonucleotide
  Antisense strand to SEQ ID NO: 1876605
auaucuacuuuauucaacg

SEQ ID NO: 1876607 - RNA, 19 nt, Artificial Sequence
  Description of Artificial Sequence: Synthetic oligonucleotide
  Sense strand starting at position 811 of SEQ ID NO: 1564422
aguagauauaggugaagca

SEQ ID NO: 1876608 - RNA, 19 nt, Artificial Sequence
  Description of Artificial Sequence: Synthetic oligonucleotide
  Antisense strand to SEQ ID NO: 1876607
ugcuucaccuauaucuacu

SEQ ID NO: 1876609 - RNA, 19 nt, Artificial Sequence
  Description of Artificial Sequence: Synthetic oligonucleotide
  Sense strand starting at position 812 of SEQ ID NO: 1564422
guagauauaggugaagcau

SEQ ID NO: 1876610 - RNA, 19 nt, Artificial Sequence
  Description of Artificial Sequence: Synthetic oligonucleotide
  Antisense strand to SEQ ID NO: 1876609
augcuucaccuauaucuac

SEQ ID NO: 1876611 - RNA, 19 nt, Artificial Sequence
  Description of Artificial Sequence: Synthetic oligonucleotide
  Sense strand starting at position 1156 of SEQ ID NO: 1564422
guacauuuauuuggaauuc

SEQ ID NO: 1876612 - RNA, 19 nt, Artificial Sequence
  Description of Artificial Sequence: Synthetic oligonucleotide
  Antisense strand to SEQ ID NO: 1876611
gaauuccaaauaaauguac

SEQ ID NO: 1876613 - RNA, 19 nt, Artificial Sequence
  Description of Artificial Sequence: Synthetic oligonucleotide
  Sense strand starting at position 1322 of SEQ ID NO: 1564422
uuuacugauguacaaagua

SEQ ID NO: 1876614 - RNA, 19 nt, Artificial Sequence
  Description of Artificial Sequence: Synthetic oligonucleotide
  Antisense strand to SEQ ID NO: 1876613
uacuuuguacaucaguaaa

SEQ ID NO: 1876615 - RNA, 19 nt, Artificial Sequence
  Description of Artificial Sequence: Synthetic oligonucleotide
  Sense strand starting at position 1392 of SEQ ID NO: 1564422
uugcuuaagacagacgauu

SEQ ID NO: 1876616 - RNA, 19 nt, Artificial Sequence
  Description of Artificial Sequence: Synthetic oligonucleotide
  Antisense strand to SEQ ID NO: 1876615
aaucgucugucuuaagcaa

SEQ ID NO: 1876617 - RNA, 19 nt, Artificial Sequence
  Description of Artificial Sequence: Synthetic oligonucleotide
  Sense strand starting at position 1512 of SEQ ID NO: 1564422
auagcaucaguuugaaaua

SEQ ID NO: 1876618 - RNA, 19 nt, Artificial Sequence
  Description of Artificial Sequence: Synthetic oligonucleotide
  Antisense strand to SEQ ID NO: 1876617
uauuucaaacugaugcuau

SEQ ID NO: 1876619 - RNA, 19 nt, Artificial Sequence
  Description of Artificial Sequence: Synthetic oligonucleotide
  Sense strand starting at position 1650 of SEQ ID NO: 1564422
caaaguuuccugggaaagu

SEQ ID NO: 1876620 - RNA, 19 nt, Artificial Sequence
  Description of Artificial Sequence: Synthetic oligonucleotide
  Antisense strand to SEQ ID NO: 1876619
acuuucccaggaaacuuug

SEQ ID NO: 1876621 - RNA, 19 nt, Artificial Sequence
  Description of Artificial Sequence: Synthetic oligonucleotide
  Sense strand starting at position 1775 of SEQ ID NO: 1564422
aaucauugaccguaagucu

SEQ ID NO: 1876622 - RNA, 19 nt, Artificial Sequence
  Description of Artificial Sequence: Synthetic oligonucleotide
  Antisense strand to SEQ ID NO: 1876621
agacuuacggucaaugauu

SEQ ID NO: 1876623 - RNA, 19 nt, Artificial Sequence
  Description of Artificial Sequence: Synthetic oligonucleotide
  Sense strand starting at position 2109 of SEQ ID NO: 1564422
ugagaaauguauccaguga

SEQ ID NO: 1876624 - RNA, 19 nt, Artificial Sequence
  Description of Artificial Sequence: Synthetic oligonucleotide
  Antisense strand to SEQ ID NO: 1876623
ucacuggauacauuucuca

SEQ ID NO: 1876625 - RNA, 19 nt, Artificial Sequence
  Description of Artificial Sequence: Synthetic oligonucleotide
  Sense strand starting at position 2265 of SEQ ID NO: 1564422
acuagauuggugugaggag

SEQ ID NO: 1876626 - RNA, 19 nt, Artificial Sequence
  Description of Artificial Sequence: Synthetic oligonucleotide
  Antisense strand to SEQ ID NO: 1876625
cuccucacaccaaucuagu

SEQ ID NO: 1876627 - RNA, 19 nt, Artificial Sequence
  Description of Artificial Sequence: Synthetic oligonucleotide
  Sense strand starting at position 2281 of SEQ ID NO: 1564422
gagcacaaggccuaguaau

SEQ ID NO: 1876628 - RNA, 19 nt, Artificial Sequence
  Description of Artificial Sequence: Synthetic oligonucleotide
  Antisense strand to SEQ ID NO: 1876627
auuacuaggccuugugcuc

SEQ ID NO: 1876629 - RNA, 19 nt, Artificial Sequence
  Description of Artificial Sequence: Synthetic oligonucleotide
  Sense strand starting at position 2482 of SEQ ID NO: 1564422
guauaauagauauggaguu

SEQ ID NO: 1876630 - RNA, 19 nt, Artificial Sequence
  Description of Artificial Sequence: Synthetic oligonucleotide
  Antisense strand to SEQ ID NO: 1876629
aacuccauaucuauuauac

SEQ ID NO: 1876631 - RNA, 19 nt, Artificial Sequence
  Description of Artificial Sequence: Synthetic oligonucleotide
  Sense strand starting at position 2535 of SEQ ID NO: 1564422
gauagaugaugaucguaug

SEQ ID NO: 1876632 - RNA, 19 nt, Artificial Sequence
  Description of Artificial Sequence: Synthetic oligonucleotide
  Antisense strand to SEQ ID NO: 1876631
cauacgaucaucaucuauc

SEQ ID NO: 1876633 - RNA, 19 nt, Artificial Sequence
  Description of Artificial Sequence: Synthetic oligonucleotide
  Sense strand starting at position 2536 of SEQ ID NO: 1564422
auagaugaugaucguauga

SEQ ID NO: 1876634 - RNA, 19 nt, Artificial Sequence
  Description of Artificial Sequence: Synthetic oligonucleotide
  Antisense strand to SEQ ID NO: 1876633
ucauacgaucaucaucuau

SEQ ID NO: 1876635 - RNA, 19 nt, Artificial Sequence
  Description of Artificial Sequence: Synthetic oligonucleotide
  Sense strand starting at position 2685 of SEQ ID NO: 1564422
cguuauauuuaugcauauc

SEQ ID NO: 1876636 - RNA, 19 nt, Artificial Sequence
  Description of Artificial Sequence: Synthetic oligonucleotide
  Antisense strand to SEQ ID NO: 1876635
gauaugcauaaauauaacg

SEQ ID NO: 1876637 - RNA, 19 nt, Artificial Sequence
  Description of Artificial Sequence: Synthetic oligonucleotide
  Sense strand starting at position 2745 of SEQ ID NO: 1564422
gauuuaauuugguaugucu

SEQ ID NO: 1876638 - RNA, 19 nt, Artificial Sequence
  Description of Artificial Sequence: Synthetic oligonucleotide
  Antisense strand to SEQ ID NO: 1876637
agacauaccaaauuaaauc

SEQ ID NO: 1876639 - RNA, 19 nt, Artificial Sequence
  Description of Artificial Sequence: Synthetic oligonucleotide
  Sense strand starting at position 2753 of SEQ ID NO: 1564422
uugguaugucucuaaauau

SEQ ID NO: 1876640 - RNA, 19 nt, Artificial Sequence
  Description of Artificial Sequence: Synthetic oligonucleotide
  Antisense strand to SEQ ID NO: 1876639
auauuuagagacauaccaa

SEQ ID NO: 1876641 - RNA, 19 nt, Artificial Sequence
  Description of Artificial Sequence: Synthetic oligonucleotide
  Sense strand starting at position 2909 of SEQ ID NO: 1564422
gugucuaagcagcauauuu

SEQ ID NO: 1876642 - RNA, 19 nt, Artificial Sequence
  Description of Artificial Sequence: Synthetic oligonucleotide
  Antisense strand to SEQ ID NO: 1876641
aaauaugcugcuuagacac

SEQ ID NO: 1876643 - RNA, 19 nt, Artificial Sequence
  Description of Artificial Sequence: Synthetic oligonucleotide
  Sense strand starting at position 3146 of SEQ ID NO: 1564422
uugguaaguguugaauaug

SEQ ID NO: 1876644 - RNA, 19 nt, Artificial Sequence
  Description of Artificial Sequence: Synthetic oligonucleotide
  Antisense strand to SEQ ID NO: 1876643
cauauucaacacuuaccaa

SEQ ID NO: 1876645 - RNA, 19 nt, Artificial Sequence
  Description of Artificial Sequence: Synthetic oligonucleotide
  Sense strand starting at position 3155 of SEQ ID NO: 1564422
guugaauauguguggaaga

SEQ ID NO: 1876646 - RNA, 19 nt, Artificial Sequence
  Description of Artificial Sequence: Synthetic oligonucleotide
  Antisense strand to SEQ ID NO: 1876645
ucuuccacacauauucaac

SEQ ID NO: 1876647 - RNA, 19 nt, Artificial Sequence
  Description of Artificial Sequence: Synthetic oligonucleotide
  Sense strand starting at position 3251 of SEQ ID NO: 1564422
auugccuugguuuaauaua

SEQ ID NO: 1876648 - RNA, 19 nt, Artificial Sequence
  Description of Artificial Sequence: Synthetic oligonucleotide
  Antisense strand to SEQ ID NO: 1876647
uauauuaaaccaaggcaau

SEQ ID NO: 1876649 - RNA, 19 nt, Artificial Sequence
  Description of Artificial Sequence: Synthetic oligonucleotide
  Sense strand starting at position 3350 of SEQ ID NO: 1564422
aucaguaaacucugugaag

SEQ ID NO: 1876650 - RNA, 19 nt, Artificial Sequence
  Description of Artificial Sequence: Synthetic oligonucleotide
  Antisense strand to SEQ ID NO: 1876649
cuucacagaguuuacugau

SEQ ID NO: 1876651 - RNA, 19 nt, Artificial Sequence
  Description of Artificial Sequence: Synthetic oligonucleotide
  Sense strand starting at position 3351 of SEQ ID NO: 1564422
ucaguaaacucugugaaga

SEQ ID NO: 1876652 - RNA, 19 nt, Artificial Sequence
  Description of Artificial Sequence: Synthetic oligonucleotide
  Antisense strand to SEQ ID NO: 1876651
ucuucacagaguuuacuga

SEQ ID NO: 1876653 - RNA, 19 nt, Artificial Sequence
  Description of Artificial Sequence: Synthetic oligonucleotide
  Sense strand starting at position 3352 of SEQ ID NO: 1564422
caguaaacucugugaagau

SEQ ID NO: 1876654 - RNA, 19 nt, Artificial Sequence
  Description of Artificial Sequence: Synthetic oligonucleotide
  Antisense strand to SEQ ID NO: 1876653
aucuucacagaguuuacug

SEQ ID NO: 1876655 - RNA, 19 nt, Artificial Sequence
  Description of Artificial Sequence: Synthetic oligonucleotide
  Sense strand starting at position 3393 of SEQ ID NO: 1564422
gcaugugguuucucaauuu

SEQ ID NO: 1876656 - RNA, 19 nt, Artificial Sequence
  Description of Artificial Sequence: Synthetic oligonucleotide
  Antisense strand to SEQ ID NO: 1876655
aaauugagaaaccacaugc

SEQ ID NO: 1876657 - RNA, 19 nt, Artificial Sequence
  Description of Artificial Sequence: Synthetic oligonucleotide
  Sense strand starting at position 3718 of SEQ ID NO: 1564422
ggagauggcucagcuaaag

SEQ ID NO: 1876658 - RNA, 19 nt, Artificial Sequence
  Description of Artificial Sequence: Synthetic oligonucleotide
  Antisense strand to SEQ ID NO: 1876657
cuuuagcugagccaucucc

SEQ ID NO: 1876659 - RNA, 19 nt, Artificial Sequence
  Description of Artificial Sequence: Synthetic oligonucleotide
  Sense strand starting at position 3854 of SEQ ID NO: 1564422
gaauaagaugucugucuga

SEQ ID NO: 1876660 - RNA, 19 nt, Artificial Sequence
  Description of Artificial Sequence: Synthetic oligonucleotide
  Antisense strand to SEQ ID NO: 1876659
ucagacagacaucuuauuc

SEQ ID NO: 1876661 - RNA, 19 nt, Artificial Sequence
  Description of Artificial Sequence: Synthetic oligonucleotide
  Sense strand starting at position 1041 of SEQ ID NO: 1564423
uaagaaugugcuuauugug

SEQ ID NO: 1876662 - RNA, 19 nt, Artificial Sequence
  Description of Artificial Sequence: Synthetic oligonucleotide
  Antisense strand to SEQ ID NO: 1876661
cacaauaagcacauucuua

SEQ ID NO: 1876663 - RNA, 19 nt, Artificial Sequence
  Description of Artificial Sequence: Synthetic oligonucleotide
  Sense strand starting at position 1074 of SEQ ID NO: 1564423
uuguuaagcccucaaguga

SEQ ID NO: 1876664 - RNA, 19 nt, Artificial Sequence
  Description of Artificial Sequence: Synthetic oligonucleotide
  Antisense strand to SEQ ID NO: 1876663
ucacuugagggcuuaacaa

SEQ ID NO: 1876665 - RNA, 19 nt, Artificial Sequence
  Description of Artificial Sequence: Synthetic oligonucleotide
  Sense strand starting at position 1303 of SEQ ID NO: 1564423
uuuacugauguacaaagua

SEQ ID NO: 1876666 - RNA, 19 nt, Artificial Sequence
  Description of Artificial Sequence: Synthetic oligonucleotide
  Antisense strand to SEQ ID NO: 1876665
uacuuuguacaucaguaaa

SEQ ID NO: 1876667 - RNA, 19 nt, Artificial Sequence
  Description of Artificial Sequence: Synthetic oligonucleotide
  Sense strand starting at position 2090 of SEQ ID NO: 1564423
ugagaaauguauccaguga

SEQ ID NO: 1876668 - RNA, 19 nt, Artificial Sequence
  Description of Artificial Sequence: Synthetic oligonucleotide
  Antisense strand to SEQ ID NO: 1876667
ucacuggauacauuucuca

SEQ ID NO: 1876669 - RNA, 19 nt, Artificial Sequence
  Description of Artificial Sequence: Synthetic oligonucleotide
  Sense strand starting at position 2246 of SEQ ID NO: 1564423
acuagauuggugugaggag

SEQ ID NO: 1876670 - RNA, 19 nt, Artificial Sequence
  Description of Artificial Sequence: Synthetic oligonucleotide
  Antisense strand to SEQ ID NO: 1876669
cuccucacaccaaucuagu

SEQ ID NO: 1876671 - RNA, 19 nt, Artificial Sequence
  Description of Artificial Sequence: Synthetic oligonucleotide
  Sense strand starting at position 2262 of SEQ ID NO: 1564423
gagcacaaggccuaguaau

SEQ ID NO: 1876672 - RNA, 19 nt, Artificial Sequence
  Description of Artificial Sequence: Synthetic oligonucleotide
  Antisense strand to SEQ ID NO: 1876671
auuacuaggccuugugcuc

SEQ ID NO: 1876673 - RNA, 19 nt, Artificial Sequence
  Description of Artificial Sequence: Synthetic oligonucleotide
  Sense strand starting at position 2463 of SEQ ID NO: 1564423
guauaauagauauggaguu

SEQ ID NO: 1876674 - RNA, 19 nt, Artificial Sequence
  Description of Artificial Sequence: Synthetic oligonucleotide
  Antisense strand to SEQ ID NO: 1876673
aacuccauaucuauuauac

SEQ ID NO: 1876675 - RNA, 19 nt, Artificial Sequence
  Description of Artificial Sequence: Synthetic oligonucleotide
  Sense strand starting at position 2506 of SEQ ID NO: 1564423
aggaacuauugauagauga

SEQ ID NO: 1876676 - RNA, 19 nt, Artificial Sequence
  Description of Artificial Sequence: Synthetic oligonucleotide
  Antisense strand to SEQ ID NO: 1876675
ucaucuaucaauaguuccu

SEQ ID NO: 1876677 - RNA, 19 nt, Artificial Sequence
  Description of Artificial Sequence: Synthetic oligonucleotide
  Sense strand starting at position 2516 of SEQ ID NO: 1564423
gauagaugaugaucguaug

SEQ ID NO: 1876678 - RNA, 19 nt, Artificial Sequence
  Description of Artificial Sequence: Synthetic oligonucleotide
  Antisense strand to SEQ ID NO: 1876677
cauacgaucaucaucuauc

SEQ ID NO: 1876679 - RNA, 19 nt, Artificial Sequence
  Description of Artificial Sequence: Synthetic oligonucleotide
  Sense strand starting at position 2517 of SEQ ID NO: 1564423
auagaugaugaucguauga

SEQ ID NO: 1876680 - RNA, 19 nt, Artificial Sequence
  Description of Artificial Sequence: Synthetic oligonucleotide
  Antisense strand to SEQ ID NO: 1876679
ucauacgaucaucaucuau

SEQ ID NO: 1876681 - RNA, 19 nt, Artificial Sequence
  Description of Artificial Sequence: Synthetic oligonucleotide
  Sense strand starting at position 2666 of SEQ ID NO: 1564423
cguuauauuuaugcauauc

SEQ ID NO: 1876682 - RNA, 19 nt, Artificial Sequence
  Description of Artificial Sequence: Synthetic oligonucleotide
  Antisense strand to SEQ ID NO: 1876681
gauaugcauaaauauaacg

SEQ ID NO: 1876683 - RNA, 19 nt, Artificial Sequence
  Description of Artificial Sequence: Synthetic oligonucleotide
  Sense strand starting at position 2726 of SEQ ID NO: 1564423
gauuuaauuugguaugucu

SEQ ID NO: 1876684 - RNA, 19 nt, Artificial Sequence
  Description of Artificial Sequence: Synthetic oligonucleotide
  Antisense strand to SEQ ID NO: 1876683
agacauaccaaauuaaauc

SEQ ID NO: 1876685 - RNA, 19 nt, Artificial Sequence
  Description of Artificial Sequence: Synthetic oligonucleotide
  Sense strand starting at position 2733 of SEQ ID NO: 1564423
uuugguaugucucuaaaua

SEQ ID NO: 1876686 - RNA, 19 nt, Artificial Sequence
  Description of Artificial Sequence: Synthetic oligonucleotide
  Antisense strand to SEQ ID NO: 1876685
uauuuagagacauaccaaa

SEQ ID NO: 1876687 - RNA, 19 nt, Artificial Sequence
  Description of Artificial Sequence: Synthetic oligonucleotide
  Sense strand starting at position 2734 of SEQ ID NO: 1564423
uugguaugucucuaaauau

SEQ ID NO: 1876688 - RNA, 19 nt, Artificial Sequence
  Description of Artificial Sequence: Synthetic oligonucleotide
  Antisense strand to SEQ ID NO: 1876687
auauuuagagacauaccaa

SEQ ID NO: 1876689 - RNA, 19 nt, Artificial Sequence
  Description of Artificial Sequence: Synthetic oligonucleotide
  Sense strand starting at position 2789 of SEQ ID NO: 1564423
gggugacuuacuuguaagg

SEQ ID NO: 1876690 - RNA, 19 nt, Artificial Sequence
  Description of Artificial Sequence: Synthetic oligonucleotide
  Antisense strand to SEQ ID NO: 1876689
ccuuacaaguaagucaccc

SEQ ID NO: 1876691 - RNA, 19 nt, Artificial Sequence
  Description of Artificial Sequence: Synthetic oligonucleotide
  Sense strand starting at position 2890 of SEQ ID NO: 1564423
gugucuaagcagcauauuu

SEQ ID NO: 1876692 - RNA, 19 nt, Artificial Sequence
  Description of Artificial Sequence: Synthetic oligonucleotide
  Antisense strand to SEQ ID NO: 1876691
aaauaugcugcuuagacac

SEQ ID NO: 1876693 - RNA, 19 nt, Artificial Sequence
  Description of Artificial Sequence: Synthetic oligonucleotide
  Sense strand starting at position 2961 of SEQ ID NO: 1564423
aggaauaaucuuugugcca

SEQ ID NO: 1876694 - RNA, 19 nt, Artificial Sequence
  Description of Artificial Sequence: Synthetic oligonucleotide
  Antisense strand to SEQ ID NO: 1876693
uggcacaaagauuauuccu

SEQ ID NO: 1876695 - RNA, 19 nt, Artificial Sequence
  Description of Artificial Sequence: Synthetic oligonucleotide
  Sense strand starting at position 2962 of SEQ ID NO: 1564423
ggaauaaucuuugugccau

SEQ ID NO: 1876696 - RNA, 19 nt, Artificial Sequence
  Description of Artificial Sequence: Synthetic oligonucleotide
  Antisense strand to SEQ ID NO: 1876695
auggcacaaagauuauucc

SEQ ID NO: 1876697 - RNA, 19 nt, Artificial Sequence
  Description of Artificial Sequence: Synthetic oligonucleotide
  Sense strand starting at position 3085 of SEQ ID NO: 1564423
augguugacaguugguaua

SEQ ID NO: 1876698 - RNA, 19 nt, Artificial Sequence
  Description of Artificial Sequence: Synthetic oligonucleotide
  Antisense strand to SEQ ID NO: 1876697
uauaccaacugucaaccau

SEQ ID NO: 1876699 - RNA, 19 nt, Artificial Sequence
  Description of Artificial Sequence: Synthetic oligonucleotide
  Sense strand starting at position 3087 of SEQ ID NO: 1564423
gguugacaguugguauauu

SEQ ID NO: 1876700 - RNA, 19 nt, Artificial Sequence
  Description of Artificial Sequence: Synthetic oligonucleotide
  Antisense strand to SEQ ID NO: 1876699
aauauaccaacugucaacc

SEQ ID NO: 1876701 - RNA, 19 nt, Artificial Sequence
  Description of Artificial Sequence: Synthetic oligonucleotide
  Sense strand starting at position 3109 of SEQ ID NO: 1564423
auucgaacuccuuagcauu

SEQ ID NO: 1876702 - RNA, 19 nt, Artificial Sequence
  Description of Artificial Sequence: Synthetic oligonucleotide
  Antisense strand to SEQ ID NO: 1876701
aaugcuaaggaguucgaau

SEQ ID NO: 1876703 - RNA, 19 nt, Artificial Sequence
  Description of Artificial Sequence: Synthetic oligonucleotide
  Sense strand starting at position 3126 of SEQ ID NO: 1564423
uugguaaguguugaauaug

SEQ ID NO: 1876704 - RNA, 19 nt, Artificial Sequence
  Description of Artificial Sequence: Synthetic oligonucleotide
  Antisense strand to SEQ ID NO: 1876703
cauauucaacacuuaccaa

SEQ ID NO: 1876705 - RNA, 19 nt, Artificial Sequence
  Description of Artificial Sequence: Synthetic oligonucleotide
  Sense strand starting at position 3129 of SEQ ID NO: 1564423
guaaguguugaauaugugu

SEQ ID NO: 1876706 - RNA, 19 nt, Artificial Sequence
  Description of Artificial Sequence: Synthetic oligonucleotide
  Antisense strand to SEQ ID NO: 1876705
acacauauucaacacuuac

SEQ ID NO: 1876707 - RNA, 19 nt, Artificial Sequence
  Description of Artificial Sequence: Synthetic oligonucleotide
  Sense strand starting at position 3134 of SEQ ID NO: 1564423
uguugaauauguguggaag

SEQ ID NO: 1876708 - RNA, 19 nt, Artificial Sequence
  Description of Artificial Sequence: Synthetic oligonucleotide
  Antisense strand to SEQ ID NO: 1876707
cuuccacacauauucaaca

SEQ ID NO: 1876709 - RNA, 19 nt, Artificial Sequence
  Description of Artificial Sequence: Synthetic oligonucleotide
  Sense strand starting at position 3135 of SEQ ID NO: 1564423
guugaauauguguggaaga

SEQ ID NO: 1876710 - RNA, 19 nt, Artificial Sequence
  Description of Artificial Sequence: Synthetic oligonucleotide
  Antisense strand to SEQ ID NO: 1876709
ucuuccacacauauucaac

SEQ ID NO: 1876711 - RNA, 19 nt, Artificial Sequence
  Description of Artificial Sequence: Synthetic oligonucleotide
  Sense strand starting at position 3168 of SEQ ID NO: 1564423
ugauauuucucauacugua

SEQ ID NO: 1876712 - RNA, 19 nt, Artificial Sequence
  Description of Artificial Sequence: Synthetic oligonucleotide
  Antisense strand to SEQ ID NO: 1876711
uacaguaugagaaauauca

SEQ ID NO: 1876713 - RNA, 19 nt, Artificial Sequence
  Description of Artificial Sequence: Synthetic oligonucleotide
  Sense strand starting at position 3231 of SEQ ID NO: 1564423
auugccuugguuuaauaua

SEQ ID NO: 1876714 - RNA, 19 nt, Artificial Sequence
  Description of Artificial Sequence: Synthetic oligonucleotide
  Antisense strand to SEQ ID NO: 1876713
uauauuaaaccaaggcaau

SEQ ID NO: 1876715 - RNA, 19 nt, Artificial Sequence
  Description of Artificial Sequence: Synthetic oligonucleotide
  Sense strand starting at position 3239 of SEQ ID NO: 1564423
gguuuaauauaguuuaggu

SEQ ID NO: 1876716 - RNA, 19 nt, Artificial Sequence
  Description of Artificial Sequence: Synthetic oligonucleotide
  Antisense strand to SEQ ID NO: 1876715
accuaaacuauauuaaacc

SEQ ID NO: 1876717 - RNA, 19 nt, Artificial Sequence
  Description of Artificial Sequence: Synthetic oligonucleotide
  Sense strand starting at position 3330 of SEQ ID NO: 1564423
aucaguaaacucugugaag

SEQ ID NO: 1876718 - RNA, 19 nt, Artificial Sequence
  Description of Artificial Sequence: Synthetic oligonucleotide
  Antisense strand to SEQ ID NO: 1876717
cuucacagaguuuacugau

SEQ ID NO: 1876719 - RNA, 19 nt, Artificial Sequence
  Description of Artificial Sequence: Synthetic oligonucleotide
  Sense strand starting at position 3331 of SEQ ID NO: 1564423
ucaguaaacucugugaaga

SEQ ID NO: 1876720 - RNA, 19 nt, Artificial Sequence
  Description of Artificial Sequence: Synthetic oligonucleotide
  Antisense strand to SEQ ID NO: 1876719
ucuucacagaguuuacuga

SEQ ID NO: 1876721 - RNA, 19 nt, Artificial Sequence
  Description of Artificial Sequence: Synthetic oligonucleotide
  Sense strand starting at position 3332 of SEQ ID NO: 1564423
caguaaacucugugaagau

SEQ ID NO: 1876722 - RNA, 19 nt, Artificial Sequence
  Description of Artificial Sequence: Synthetic oligonucleotide
  Antisense strand to SEQ ID NO: 1876721
aucuucacagaguuuacug

SEQ ID NO: 1876723 - RNA, 19 nt, Artificial Sequence
  Description of Artificial Sequence: Synthetic oligonucleotide
  Sense strand starting at position 3572 of SEQ ID NO: 1564423
auaggagaaucagaagaca

SEQ ID NO: 1876724 - RNA, 19 nt, Artificial Sequence
  Description of Artificial Sequence: Synthetic oligonucleotide
  Antisense strand to SEQ ID NO: 1876723
ugucuucugauucuccuau

SEQ ID NO: 1876725 - RNA, 19 nt, Artificial Sequence
  Description of Artificial Sequence: Synthetic oligonucleotide
  Sense strand starting at position 3607 of SEQ ID NO: 1564423
aggauaaucuaagacaaau

SEQ ID NO: 1876726 - RNA, 19 nt, Artificial Sequence
  Description of Artificial Sequence: Synthetic oligonucleotide
  Antisense strand to SEQ ID NO: 1876725
auuugucuuagauuauccu

SEQ ID NO: 1876727 - RNA, 19 nt, Artificial Sequence
  Description of Artificial Sequence: Synthetic oligonucleotide
  Sense strand starting at position 3619 of SEQ ID NO: 1564423
gacaaauuguggcugagca

SEQ ID NO: 1876728 - RNA, 19 nt, Artificial Sequence
  Description of Artificial Sequence: Synthetic oligonucleotide
  Antisense strand to SEQ ID NO: 1876727
ugcucagccacaauuuguc

SEQ ID NO: 1876729 - RNA, 19 nt, Artificial Sequence
  Description of Artificial Sequence: Synthetic oligonucleotide
  Sense strand starting at position 3621 of SEQ ID NO: 1564423
caaauuguggcugagcauu

SEQ ID NO: 1876730 - RNA, 19 nt, Artificial Sequence
  Description of Artificial Sequence: Synthetic oligonucleotide
  Antisense strand to SEQ ID NO: 1876729
aaugcucagccacaauuug

SEQ ID NO: 1876731 - RNA, 19 nt, Artificial Sequence
  Description of Artificial Sequence: Synthetic oligonucleotide
  Sense strand starting at position 3646 of SEQ ID NO: 1564423
agcuaagauaggugacagu

SEQ ID NO: 1876732 - RNA, 19 nt, Artificial Sequence
  Description of Artificial Sequence: Synthetic oligonucleotide
  Antisense strand to SEQ ID NO: 1876731
acugucaccuaucuuagcu

SEQ ID NO: 1876733 - RNA, 19 nt, Artificial Sequence
  Description of Artificial Sequence: Synthetic oligonucleotide
  Sense strand starting at position 3672 of SEQ ID NO: 1564423
ggaagaaugccuuggugug

SEQ ID NO: 1876734 - RNA, 19 nt, Artificial Sequence
  Description of Artificial Sequence: Synthetic oligonucleotide
  Antisense strand to SEQ ID NO: 1876733
cacaccaaggcauucuucc

SEQ ID NO: 1876735 - RNA, 19 nt, Artificial Sequence
  Description of Artificial Sequence: Synthetic oligonucleotide
  Sense strand starting at position 3698 of SEQ ID NO: 1564423
ggagauggcucagcuaaag

SEQ ID NO: 1876736 - RNA, 19 nt, Artificial Sequence
  Description of Artificial Sequence: Synthetic oligonucleotide
  Antisense strand to SEQ ID NO: 1876735
cuuuagcugagccaucucc

SEQ ID NO: 1876737 - RNA, 19 nt, Artificial Sequence
  Description of Artificial Sequence: Synthetic oligonucleotide
  Sense strand starting at position 3834 of SEQ ID NO: 1564423
gaauaagaugucugucuga

SEQ ID NO: 1876738 - RNA, 19 nt, Artificial Sequence
  Description of Artificial Sequence: Synthetic oligonucleotide
  Antisense strand to SEQ ID NO: 1876737
ucagacagacaucuuauuc

SEQ ID NO: 1876739 - RNA, 19 nt, Artificial Sequence
  Description of Artificial Sequence: Synthetic oligonucleotide
  Sense strand starting at position 3837 of SEQ ID NO: 1564423
uaagaugucugucugaucu

SEQ ID NO: 1876740 - RNA, 19 nt, Artificial Sequence
  Description of Artificial Sequence: Synthetic oligonucleotide
  Antisense strand to SEQ ID NO: 1876739
agaucagacagacaucuua

SEQ ID NO: 1876741 - RNA, 19 nt, Artificial Sequence
  Description of Artificial Sequence: Synthetic oligonucleotide
  Sense strand starting at position 218 of SEQ ID NO: 1564424
auauuuguccaguggugau

SEQ ID NO: 1876742 - RNA, 19 nt, Artificial Sequence
  Description of Artificial Sequence: Synthetic oligonucleotide
  Antisense strand to SEQ ID NO: 1876741
aucaccacuggacaaauau

SEQ ID NO: 1876743 - RNA, 19 nt, Artificial Sequence
  Description of Artificial Sequence: Synthetic oligonucleotide
  Sense strand starting at position 242 of SEQ ID NO: 1564424
aagagcuagccuggaauga

SEQ ID NO: 1876744 - RNA, 19 nt, Artificial Sequence
  Description of Artificial Sequence: Synthetic oligonucleotide
  Antisense strand to SEQ ID NO: 1876743
ucauuccaggcuagcucuu

SEQ ID NO: 1876745 - RNA, 19 nt, Artificial Sequence
  Description of Artificial Sequence: Synthetic oligonucleotide
  Sense strand starting at position 417 of SEQ ID NO: 1564424
ggagauaugaugugguauu

SEQ ID NO: 1876746 - RNA, 19 nt, Artificial Sequence
  Description of Artificial Sequence: Synthetic oligonucleotide
  Antisense strand to SEQ ID NO: 1876745
aauaccacaucauaucucc

SEQ ID NO: 1876747 - RNA, 19 nt, Artificial Sequence
  Description of Artificial Sequence: Synthetic oligonucleotide
  Sense strand starting at position 505 of SEQ ID NO: 1564424
uaugaauaguggucaacug

SEQ ID NO: 1876748 - RNA, 19 nt, Artificial Sequence
  Description of Artificial Sequence: Synthetic oligonucleotide
  Antisense strand to SEQ ID NO: 1876747
caguugaccacuauucaua

SEQ ID NO: 1876749 - RNA, 19 nt, Artificial Sequence
  Description of Artificial Sequence: Synthetic oligonucleotide
  Sense strand starting at position 545 of SEQ ID NO: 1564424
uguugcaauuuguucugau

SEQ ID NO: 1876750 - RNA, 19 nt, Artificial Sequence
  Description of Artificial Sequence: Synthetic oligonucleotide
  Antisense strand to SEQ ID NO: 1876749
aucagaacaaauugcaaca

SEQ ID NO: 1876751 - RNA, 19 nt, Artificial Sequence
  Description of Artificial Sequence: Synthetic oligonucleotide
  Sense strand starting at position 546 of SEQ ID NO: 1564424
guugcaauuuguucugaug

SEQ ID NO: 1876752 - RNA, 19 nt, Artificial Sequence
  Description of Artificial Sequence: Synthetic oligonucleotide
  Antisense strand to SEQ ID NO: 1876751
caucagaacaaauugcaac

SEQ ID NO: 1876753 - RNA, 19 nt, Artificial Sequence
  Description of Artificial Sequence: Synthetic oligonucleotide
  Sense strand starting at position 641 of SEQ ID NO: 1564424
gacagaagauucccuuguu

SEQ ID NO: 1876754 - RNA, 19 nt, Artificial Sequence
  Description of Artificial Sequence: Synthetic oligonucleotide
  Antisense strand to SEQ ID NO: 1876753
aacaagggaaucuucuguc

SEQ ID NO: 1876755 - RNA, 19 nt, Artificial Sequence
  Description of Artificial Sequence: Synthetic oligonucleotide
  Sense strand starting at position 642 of SEQ ID NO: 1564424
acagaagauucccuuguua

SEQ ID NO: 1876756 - RNA, 19 nt, Artificial Sequence
  Description of Artificial Sequence: Synthetic oligonucleotide
  Antisense strand to SEQ ID NO: 1876755
uaacaagggaaucuucugu

SEQ ID NO: 1876757 - RNA, 19 nt, Artificial Sequence
  Description of Artificial Sequence: Synthetic oligonucleotide
  Sense strand starting at position 644 of SEQ ID NO: 1564424
agaagauucccuuguuaga

SEQ ID NO: 1876758 - RNA, 19 nt, Artificial Sequence
  Description of Artificial Sequence: Synthetic oligonucleotide
  Antisense strand to SEQ ID NO: 1876757
ucuaacaagggaaucuucu

SEQ ID NO: 1876759 - RNA, 19 nt, Artificial Sequence
  Description of Artificial Sequence: Synthetic oligonucleotide
  Sense strand starting at position 723 of SEQ ID NO: 1564424
gcagaauuaugauucucca

SEQ ID NO: 1876760 - RNA, 19 nt, Artificial Sequence
  Description of Artificial Sequence: Synthetic oligonucleotide
  Antisense strand to SEQ ID NO: 1876759
uggagaaucauaauucugc

SEQ ID NO: 1876761 - RNA, 19 nt, Artificial Sequence
  Description of Artificial Sequence: Synthetic oligonucleotide
  Sense strand starting at position 772 of SEQ ID NO: 1564424
ugaaaucuucguugaauaa

SEQ ID NO: 1876762 - RNA, 19 nt, Artificial Sequence
  Description of Artificial Sequence: Synthetic oligonucleotide
  Antisense strand to SEQ ID NO: 1876761
uuauucaacgaagauuuca

SEQ ID NO: 1876763 - RNA, 19 nt, Artificial Sequence
  Description of Artificial Sequence: Synthetic oligonucleotide
  Sense strand starting at position 776 of SEQ ID NO: 1564424
aucuucguugaauaaagua

SEQ ID NO: 1876764 - RNA, 19 nt, Artificial Sequence
  Description of Artificial Sequence: Synthetic oligonucleotide
  Antisense strand to SEQ ID NO: 1876763
uacuuuauucaacgaagau

SEQ ID NO: 1876765 - RNA, 19 nt, Artificial Sequence
  Description of Artificial Sequence: Synthetic oligonucleotide
  Sense strand starting at position 781 of SEQ ID NO: 1564424
cguugaauaaaguagauau

SEQ ID NO: 1876766 - RNA, 19 nt, Artificial Sequence
  Description of Artificial Sequence: Synthetic oligonucleotide
  Antisense strand to SEQ ID NO: 1876765
auaucuacuuuauucaacg

SEQ ID NO: 1876767 - RNA, 19 nt, Artificial Sequence
  Description of Artificial Sequence: Synthetic oligonucleotide
  Sense strand starting at position 791 of SEQ ID NO: 1564424
aguagauauaggugaagca

SEQ ID NO: 1876768 - RNA, 19 nt, Artificial Sequence
  Description of Artificial Sequence: Synthetic oligonucleotide
  Antisense strand to SEQ ID NO: 1876767
ugcuucaccuauaucuacu

SEQ ID NO: 1876769 - RNA, 19 nt, Artificial Sequence
  Description of Artificial Sequence: Synthetic oligonucleotide
  Sense strand starting at position 792 of SEQ ID NO: 1564424
guagauauaggugaagcau

SEQ ID NO: 1876770 - RNA, 19 nt, Artificial Sequence
  Description of Artificial Sequence: Synthetic oligonucleotide
  Antisense strand to SEQ ID NO: 1876769
augcuucaccuauaucuac

SEQ ID NO: 1876771 - RNA, 19 nt, Artificial Sequence
  Description of Artificial Sequence: Synthetic oligonucleotide
  Sense strand starting at position 1136 of SEQ ID NO: 1564424
guacauuuauuuggaauuc

SEQ ID NO: 1876772 - RNA, 19 nt, Artificial Sequence
  Description of Artificial Sequence: Synthetic oligonucleotide
  Antisense strand to SEQ ID NO: 1876771
gaauuccaaauaaauguac

SEQ ID NO: 1876773 - RNA, 19 nt, Artificial Sequence
  Description of Artificial Sequence: Synthetic oligonucleotide
  Sense strand starting at position 1302 of SEQ ID NO: 1564424
uuuacugauguacaaagua

SEQ ID NO: 1876774 - RNA, 19 nt, Artificial Sequence
  Description of Artificial Sequence: Synthetic oligonucleotide
  Antisense strand to SEQ ID NO: 1876773
uacuuuguacaucaguaaa

SEQ ID NO: 1876775 - RNA, 19 nt, Artificial Sequence
  Description of Artificial Sequence: Synthetic oligonucleotide
  Sense strand starting at position 1372 of SEQ ID NO: 1564424
uugcuuaagacagacgauu

SEQ ID NO: 1876776 - RNA, 19 nt, Artificial Sequence
  Description of Artificial Sequence: Synthetic oligonucleotide
  Antisense strand to SEQ ID NO: 1876775
aaucgucugucuuaagcaa

SEQ ID NO: 1876777 - RNA, 19 nt, Artificial Sequence
  Description of Artificial Sequence: Synthetic oligonucleotide
  Sense strand starting at position 1492 of SEQ ID NO: 1564424
auagcaucaguuugaaaua

SEQ ID NO: 1876778 - RNA, 19 nt, Artificial Sequence
  Description of Artificial Sequence: Synthetic oligonucleotide
  Antisense strand to SEQ ID NO: 1876777
uauuucaaacugaugcuau

SEQ ID NO: 1876779 - RNA, 19 nt, Artificial Sequence
  Description of Artificial Sequence: Synthetic oligonucleotide
  Sense strand starting at position 1630 of SEQ ID NO: 1564424
caaaguuuccugggaaagu

SEQ ID NO: 1876780 - RNA, 19 nt, Artificial Sequence
  Description of Artificial Sequence: Synthetic oligonucleotide
  Antisense strand to SEQ ID NO: 1876779
acuuucccaggaaacuuug

SEQ ID NO: 1876781 - RNA, 19 nt, Artificial Sequence
  Description of Artificial Sequence: Synthetic oligonucleotide
  Sense strand starting at position 1755 of SEQ ID NO: 1564424
aaucauugaccguaagucu

SEQ ID NO: 1876782 - RNA, 19 nt, Artificial Sequence
  Description of Artificial Sequence: Synthetic oligonucleotide
  Antisense strand to SEQ ID NO: 1876781
agacuuacggucaaugauu

SEQ ID NO: 1876783 - RNA, 19 nt, Artificial Sequence
  Description of Artificial Sequence: Synthetic oligonucleotide
  Sense strand starting at position 2089 of SEQ ID NO: 1564424
ugagaaauguauccaguga

SEQ ID NO: 1876784 - RNA, 19 nt, Artificial Sequence
  Description of Artificial Sequence: Synthetic oligonucleotide
  Antisense strand to SEQ ID NO: 1876783
ucacuggauacauuucuca

SEQ ID NO: 1876785 - RNA, 19 nt, Artificial Sequence
  Description of Artificial Sequence: Synthetic oligonucleotide
  Sense strand starting at position 2245 of SEQ ID NO: 1564424
acuagauuggugugaggag

SEQ ID NO: 1876786 - RNA, 19 nt, Artificial Sequence
  Description of Artificial Sequence: Synthetic oligonucleotide
  Antisense strand to SEQ ID NO: 1876785
cuccucacaccaaucuagu

SEQ ID NO: 1876787 - RNA, 19 nt, Artificial Sequence
  Description of Artificial Sequence: Synthetic oligonucleotide
  Sense strand starting at position 2261 of SEQ ID NO: 1564424
gagcacaaggccuaguaau

SEQ ID NO: 1876788 - RNA, 19 nt, Artificial Sequence
  Description of Artificial Sequence: Synthetic oligonucleotide
  Antisense strand to SEQ ID NO: 1876787
auuacuaggccuugugcuc

SEQ ID NO: 1876789 - RNA, 19 nt, Artificial Sequence
  Description of Artificial Sequence: Synthetic oligonucleotide
  Sense strand starting at position 2462 of SEQ ID NO: 1564424
guauaauagauauggaguu

SEQ ID NO: 1876790 - RNA, 19 nt, Artificial Sequence
  Description of Artificial Sequence: Synthetic oligonucleotide
  Antisense strand to SEQ ID NO: 1876789
aacuccauaucuauuauac

SEQ ID NO: 1876791 - RNA, 19 nt, Artificial Sequence
  Description of Artificial Sequence: Synthetic oligonucleotide
  Sense strand starting at position 2515 of SEQ ID NO: 1564424
gauagaugaugaucguaug

SEQ ID NO: 1876792 - RNA, 19 nt, Artificial Sequence
  Description of Artificial Sequence: Synthetic oligonucleotide
  Antisense strand to SEQ ID NO: 1876791
cauacgaucaucaucuauc

SEQ ID NO: 1876793 - RNA, 19 nt, Artificial Sequence
  Description of Artificial Sequence: Synthetic oligonucleotide
  Sense strand starting at position 2516 of SEQ ID NO: 1564424
auagaugaugaucguauga

SEQ ID NO: 1876794 - RNA, 19 nt, Artificial Sequence
  Description of Artificial Sequence: Synthetic oligonucleotide
  Antisense strand to SEQ ID NO: 1876793
ucauacgaucaucaucuau

SEQ ID NO: 1876795 - RNA, 19 nt, Artificial Sequence
  Description of Artificial Sequence: Synthetic oligonucleotide
  Sense strand starting at position 2665 of SEQ ID NO: 1564424
cguuauauuuaugcauauc

SEQ ID NO: 1876796 - RNA, 19 nt, Artificial Sequence
  Description of Artificial Sequence: Synthetic oligonucleotide
  Antisense strand to SEQ ID NO: 1876795
gauaugcauaaauauaacg

SEQ ID NO: 1876797 - RNA, 19 nt, Artificial Sequence
  Description of Artificial Sequence: Synthetic oligonucleotide
  Sense strand starting at position 2725 of SEQ ID NO: 1564424
gauuuaauuugguaugucu

SEQ ID NO: 1876798 - RNA, 19 nt, Artificial Sequence
  Description of Artificial Sequence: Synthetic oligonucleotide
  Antisense strand to SEQ ID NO: 1876797
agacauaccaaauuaaauc

SEQ ID NO: 1876799 - RNA, 19 nt, Artificial Sequence
  Description of Artificial Sequence: Synthetic oligonucleotide
  Sense strand starting at position 2733 of SEQ ID NO: 1564424
uugguaugucucuaaauau

SEQ ID NO: 1876800 - RNA, 19 nt, Artificial Sequence
  Description of Artificial Sequence: Synthetic oligonucleotide
  Antisense strand to SEQ ID NO: 1876799
auauuuagagacauaccaa

SEQ ID NO: 1876801 - RNA, 19 nt, Artificial Sequence
  Description of Artificial Sequence: Synthetic oligonucleotide
  Sense strand starting at position 2889 of SEQ ID NO: 1564424
gugucuaagcagcauauuu

SEQ ID NO: 1876802 - RNA, 19 nt, Artificial Sequence
  Description of Artificial Sequence: Synthetic oligonucleotide
  Antisense strand to SEQ ID NO: 1876801
aaauaugcugcuuagacac

SEQ ID NO: 1876803 - RNA, 19 nt, Artificial Sequence
  Description of Artificial Sequence: Synthetic oligonucleotide
  Sense strand starting at position 3126 of SEQ ID NO: 1564424
uugguaaguguugaauaug

SEQ ID NO: 1876804 - RNA, 19 nt, Artificial Sequence
  Description of Artificial Sequence: Synthetic oligonucleotide
  Antisense strand to SEQ ID NO: 1876803
cauauucaacacuuaccaa

SEQ ID NO: 1876805 - RNA, 19 nt, Artificial Sequence
  Description of Artificial Sequence: Synthetic oligonucleotide
  Sense strand starting at position 3135 of SEQ ID NO: 1564424
guugaauauguguggaaga

SEQ ID NO: 1876806 - RNA, 19 nt, Artificial Sequence
  Description of Artificial Sequence: Synthetic oligonucleotide
  Antisense strand to SEQ ID NO: 1876805
ucuuccacacauauucaac

SEQ ID NO: 1876807 - RNA, 19 nt, Artificial Sequence
  Description of Artificial Sequence: Synthetic oligonucleotide
  Sense strand starting at position 3231 of SEQ ID NO: 1564424
auugccuugguuuaauaua

SEQ ID NO: 1876808 - RNA, 19 nt, Artificial Sequence
  Description of Artificial Sequence: Synthetic oligonucleotide
  Antisense strand to SEQ ID NO: 1876807
uauauuaaaccaaggcaau

SEQ ID NO: 1876809 - RNA, 19 nt, Artificial Sequence
  Description of Artificial Sequence: Synthetic oligonucleotide
  Sense strand starting at position 3330 of SEQ ID NO: 1564424
aucaguaaacucugugaag

SEQ ID NO: 1876810 - RNA, 19 nt, Artificial Sequence
  Description of Artificial Sequence: Synthetic oligonucleotide
  Antisense strand to SEQ ID NO: 1876809
cuucacagaguuuacugau

SEQ ID NO: 1876811 - RNA, 19 nt, Artificial Sequence
  Description of Artificial Sequence: Synthetic oligonucleotide
  Sense strand starting at position 3331 of SEQ ID NO: 1564424
ucaguaaacucugugaaga

SEQ ID NO: 1876812 - RNA, 19 nt, Artificial Sequence
  Description of Artificial Sequence: Synthetic oligonucleotide
  Antisense strand to SEQ ID NO: 1876811
ucuucacagaguuuacuga

SEQ ID NO: 1876813 - RNA, 19 nt, Artificial Sequence
  Description of Artificial Sequence: Synthetic oligonucleotide
  Sense strand starting at position 3332 of SEQ ID NO: 1564424
caguaaacucugugaagau

SEQ ID NO: 1876814 - RNA, 19 nt, Artificial Sequence
  Description of Artificial Sequence: Synthetic oligonucleotide
  Antisense strand to SEQ ID NO: 1876813
aucuucacagaguuuacug

SEQ ID NO: 1876815 - RNA, 19 nt, Artificial Sequence
  Description of Artificial Sequence: Synthetic oligonucleotide
  Sense strand starting at position 3373 of SEQ ID NO: 1564424
gcaugugguuucucaauuu

SEQ ID NO: 1876816 - RNA, 19 nt, Artificial Sequence
  Description of Artificial Sequence: Synthetic oligonucleotide
  Antisense strand to SEQ ID NO: 1876815
aaauugagaaaccacaugc

SEQ ID NO: 1876817 - RNA, 19 nt, Artificial Sequence
  Description of Artificial Sequence: Synthetic oligonucleotide
  Sense strand starting at position 3698 of SEQ ID NO: 1564424
ggagauggcucagcuaaag

SEQ ID NO: 1876818 - RNA, 19 nt, Artificial Sequence
  Description of Artificial Sequence: Synthetic oligonucleotide
  Antisense strand to SEQ ID NO: 1876817
cuuuagcugagccaucucc

SEQ ID NO: 1876819 - RNA, 19 nt, Artificial Sequence
  Description of Artificial Sequence: Synthetic oligonucleotide
  Sense strand starting at position 3834 of SEQ ID NO: 1564424
gaauaagaugucugucuga

SEQ ID NO: 1876820 - RNA, 19 nt, Artificial Sequence
  Description of Artificial Sequence: Synthetic oligonucleotide
  Antisense strand to SEQ ID NO: 1876819
ucagacagacaucuuauuc

SEQ ID NO: 1876821 - RNA, 19 nt, Artificial Sequence
  Description of Artificial Sequence: Synthetic oligonucleotide
  Sense strand starting at position 11 of SEQ ID NO: 1564427
auuuaaagccuuuguguuc

SEQ ID NO: 1876822 - RNA, 19 nt, Artificial Sequence
  Description of Artificial Sequence: Synthetic oligonucleotide
  Antisense strand to SEQ ID NO: 1876821
gaacacaaaggcuuuaaau

SEQ ID NO: 1876823 - RNA, 19 nt, Artificial Sequence
  Description of Artificial Sequence: Synthetic oligonucleotide
  Sense strand starting at position 324 of SEQ ID NO: 1564427
guaacuauggcacaguaaa

SEQ ID NO: 1876824 - RNA, 19 nt, Artificial Sequence
  Description of Artificial Sequence: Synthetic oligonucleotide
  Antisense strand to SEQ ID NO: 1876823
uuuacugugccauaguuac

SEQ ID NO: 1876825 - RNA, 19 nt, Artificial Sequence
  Description of Artificial Sequence: Synthetic oligonucleotide
  Sense strand starting at position 549 of SEQ ID NO: 1564427
cuauaaucccaaggcuaga

SEQ ID NO: 1876826 - RNA, 19 nt, Artificial Sequence
  Description of Artificial Sequence: Synthetic oligonucleotide
  Antisense strand to SEQ ID NO: 1876825
ucuagccuugggauuauag

SEQ ID NO: 1876827 - RNA, 19 nt, Artificial Sequence
  Description of Artificial Sequence: Synthetic oligonucleotide
  Sense strand starting at position 574 of SEQ ID NO: 1564427
cucgacuuccaaggaauga

SEQ ID NO: 1876828 - RNA, 19 nt, Artificial Sequence
  Description of Artificial Sequence: Synthetic oligonucleotide
  Antisense strand to SEQ ID NO: 1876827
ucauuccuuggaagucgag

SEQ ID NO: 1876829 - RNA, 19 nt, Artificial Sequence
  Description of Artificial Sequence: Synthetic oligonucleotide
  Sense strand starting at position 623 of SEQ ID NO: 1564427
gguuaugaguccuuacuaa

SEQ ID NO: 1876830 - RNA, 19 nt, Artificial Sequence
  Description of Artificial Sequence: Synthetic oligonucleotide
  Antisense strand to SEQ ID NO: 1876829
uuaguaaggacucauaacc

SEQ ID NO: 1876831 - RNA, 19 nt, Artificial Sequence
  Description of Artificial Sequence: Synthetic oligonucleotide
  Sense strand starting at position 736 of SEQ ID NO: 1564427
auugcaaaugcugagaagu

SEQ ID NO: 1876832 - RNA, 19 nt, Artificial Sequence
  Description of Artificial Sequence: Synthetic oligonucleotide
  Antisense strand to SEQ ID NO: 1876831
acuucucagcauuugcaau

SEQ ID NO: 1876833 - RNA, 19 nt, Artificial Sequence
  Description of Artificial Sequence: Synthetic oligonucleotide
  Sense strand starting at position 777 of SEQ ID NO: 1564427
cguugcagccugguucaau

SEQ ID NO: 1876834 - RNA, 19 nt, Artificial Sequence
  Description of Artificial Sequence: Synthetic oligonucleotide
  Antisense strand to SEQ ID NO: 1876833
auugaaccaggcugcaacg

SEQ ID NO: 1876835 - RNA, 19 nt, Artificial Sequence
  Description of Artificial Sequence: Synthetic oligonucleotide
  Sense strand starting at position 956 of SEQ ID NO: 1564427
auggucuacguuuaauaau

SEQ ID NO: 1876836 - RNA, 19 nt, Artificial Sequence
  Description of Artificial Sequence: Synthetic oligonucleotide
  Antisense strand to SEQ ID NO: 1876835
auuauuaaacguagaccau

SEQ ID NO: 1876837 - RNA, 19 nt, Artificial Sequence
  Description of Artificial Sequence: Synthetic oligonucleotide
  Sense strand starting at position 1068 of SEQ ID NO: 1564427
aguccaagugguuaacaca

SEQ ID NO: 1876838 - RNA, 19 nt, Artificial Sequence
  Description of Artificial Sequence: Synthetic oligonucleotide
  Antisense strand to SEQ ID NO: 1876837
uguguuaaccacuuggacu

SEQ ID NO: 1876839 - RNA, 19 nt, Artificial Sequence
  Description of Artificial Sequence: Synthetic oligonucleotide
  Sense strand starting at position 1120 of SEQ ID NO: 1564427
aguacuucugaguaagcua

SEQ ID NO: 1876840 - RNA, 19 nt, Artificial Sequence
  Description of Artificial Sequence: Synthetic oligonucleotide
  Antisense strand to SEQ ID NO: 1876839
uagcuuacucagaaguacu

SEQ ID NO: 1876841 - RNA, 19 nt, Artificial Sequence
  Description of Artificial Sequence: Synthetic oligonucleotide
  Sense strand starting at position 1145 of SEQ ID NO: 1564427
ugcgguuaaauguaauaaa

SEQ ID NO: 1876842 - RNA, 19 nt, Artificial Sequence
  Description of Artificial Sequence: Synthetic oligonucleotide
  Antisense strand to SEQ ID NO: 1876841
uuuauuacauuuaaccgca

SEQ ID NO: 1876843 - RNA, 19 nt, Artificial Sequence
  Description of Artificial Sequence: Synthetic oligonucleotide
  Sense strand starting at position 1262 of SEQ ID NO: 1564427
guggaauguggcgaucuga

SEQ ID NO: 1876844 - RNA, 19 nt, Artificial Sequence
  Description of Artificial Sequence: Synthetic oligonucleotide
  Antisense strand to SEQ ID NO: 1876843
ucagaucgccacauuccac

SEQ ID NO: 1876845 - RNA, 19 nt, Artificial Sequence
  Description of Artificial Sequence: Synthetic oligonucleotide
  Sense strand starting at position 1341 of SEQ ID NO: 1564427
aaggguuucuggucaugag

SEQ ID NO: 1876846 - RNA, 19 nt, Artificial Sequence
  Description of Artificial Sequence: Synthetic oligonucleotide
  Antisense strand to SEQ ID NO: 1876845
cucaugaccagaaacccuu

SEQ ID NO: 1876847 - RNA, 19 nt, Artificial Sequence
  Description of Artificial Sequence: Synthetic oligonucleotide
  Sense strand starting at position 1342 of SEQ ID NO: 1564427
aggguuucuggucaugagu

SEQ ID NO: 1876848 - RNA, 19 nt, Artificial Sequence
  Description of Artificial Sequence: Synthetic oligonucleotide
  Antisense strand to SEQ ID NO: 1876847
acucaugaccagaaacccu

SEQ ID NO: 1876849 - RNA, 19 nt, Artificial Sequence
  Description of Artificial Sequence: Synthetic oligonucleotide
  Sense strand starting at position 1350 of SEQ ID NO: 1564427
uggucaugaguguaaauaa

SEQ ID NO: 1876850 - RNA, 19 nt, Artificial Sequence
  Description of Artificial Sequence: Synthetic oligonucleotide
  Antisense strand to SEQ ID NO: 1876849
uuauuuacacucaugacca

SEQ ID NO: 1876851 - RNA, 19 nt, Artificial Sequence
  Description of Artificial Sequence: Synthetic oligonucleotide
  Sense strand starting at position 1731 of SEQ ID NO: 1564427
ccaaucgucagggauccua

SEQ ID NO: 1876852 - RNA, 19 nt, Artificial Sequence
  Description of Artificial Sequence: Synthetic oligonucleotide
  Antisense strand to SEQ ID NO: 1876851
uaggaucccugacgauugg

SEQ ID NO: 1876853 - RNA, 19 nt, Artificial Sequence
  Description of Artificial Sequence: Synthetic oligonucleotide
  Sense strand starting at position 2012 of SEQ ID NO: 1564427
caaguuacgccugcguauu

SEQ ID NO: 1876854 - RNA, 19 nt, Artificial Sequence
  Description of Artificial Sequence: Synthetic oligonucleotide
  Antisense strand to SEQ ID NO: 1876853
aauacgcaggcguaacuug

SEQ ID NO: 1876855 - RNA, 19 nt, Artificial Sequence
  Description of Artificial Sequence: Synthetic oligonucleotide
  Sense strand starting at position 2100 of SEQ ID NO: 1564427
cggaaauguccguagaaac

SEQ ID NO: 1876856 - RNA, 19 nt, Artificial Sequence
  Description of Artificial Sequence: Synthetic oligonucleotide
  Antisense strand to SEQ ID NO: 1876855
guuucuacggacauuuccg

SEQ ID NO: 1876857 - RNA, 19 nt, Artificial Sequence
  Description of Artificial Sequence: Synthetic oligonucleotide
  Sense strand starting at position 2152 of SEQ ID NO: 1564427
cggcgauauccguucaugu

SEQ ID NO: 1876858 - RNA, 19 nt, Artificial Sequence
  Description of Artificial Sequence: Synthetic oligonucleotide
  Antisense strand to SEQ ID NO: 1876857
acaugaacggauaucgccg

SEQ ID NO: 1876859 - RNA, 19 nt, Artificial Sequence
  Description of Artificial Sequence: Synthetic oligonucleotide
  Sense strand starting at position 2167 of SEQ ID NO: 1564427
augugaaaguguuuacuaa

SEQ ID NO: 1876860 - RNA, 19 nt, Artificial Sequence
  Description of Artificial Sequence: Synthetic oligonucleotide
  Antisense strand to SEQ ID NO: 1876859
uuaguaaacacuuucacau

SEQ ID NO: 1876861 - RNA, 19 nt, Artificial Sequence
  Description of Artificial Sequence: Synthetic oligonucleotide
  Sense strand starting at position 2168 of SEQ ID NO: 1564427
ugugaaaguguuuacuaac

SEQ ID NO: 1876862 - RNA, 19 nt, Artificial Sequence
  Description of Artificial Sequence: Synthetic oligonucleotide
  Antisense strand to SEQ ID NO: 1876861
guuaguaaacacuuucaca

SEQ ID NO: 1876863 - RNA, 19 nt, Artificial Sequence
  Description of Artificial Sequence: Synthetic oligonucleotide
  Sense strand starting at position 2191 of SEQ ID NO: 1564427
ucugaagacucacuggguu

SEQ ID NO: 1876864 - RNA, 19 nt, Artificial Sequence
  Description of Artificial Sequence: Synthetic oligonucleotide
  Antisense strand to SEQ ID NO: 1876863
aacccagugagucuucaga

SEQ ID NO: 1876865 - RNA, 19 nt, Artificial Sequence
  Description of Artificial Sequence: Synthetic oligonucleotide
  Sense strand starting at position 2315 of SEQ ID NO: 1564427
gcacauuugucguuggauu

SEQ ID NO: 1876866 - RNA, 19 nt, Artificial Sequence
  Description of Artificial Sequence: Synthetic oligonucleotide
  Antisense strand to SEQ ID NO: 1876865
aauccaacgacaaaugugc

SEQ ID NO: 1876867 - RNA, 19 nt, Artificial Sequence
  Description of Artificial Sequence: Synthetic oligonucleotide
  Sense strand starting at position 2821 of SEQ ID NO: 1564427
ccagaagugccuuaaaguu

SEQ ID NO: 1876868 - RNA, 19 nt, Artificial Sequence
  Description of Artificial Sequence: Synthetic oligonucleotide
  Antisense strand to SEQ ID NO: 1876867
aacuuuaaggcacuucugg

SEQ ID NO: 1876869 - RNA, 19 nt, Artificial Sequence
  Description of Artificial Sequence: Synthetic oligonucleotide
  Sense strand starting at position 2834 of SEQ ID NO: 1564427
aaaguuugauaguuugaca

SEQ ID NO: 1876870 - RNA, 19 nt, Artificial Sequence
  Description of Artificial Sequence: Synthetic oligonucleotide
  Antisense strand to SEQ ID NO: 1876869
ugucaaacuaucaaacuuu

SEQ ID NO: 1876871 - RNA, 19 nt, Artificial Sequence
  Description of Artificial Sequence: Synthetic oligonucleotide
  Sense strand starting at position 2866 of SEQ ID NO: 1564427
guacgauucuuggcauuuc

SEQ ID NO: 1876872 - RNA, 19 nt, Artificial Sequence
  Description of Artificial Sequence: Synthetic oligonucleotide
  Antisense strand to SEQ ID NO: 1876871
gaaaugccaagaaucguac

SEQ ID NO: 1876873 - RNA, 19 nt, Artificial Sequence
  Description of Artificial Sequence: Synthetic oligonucleotide
  Sense strand starting at position 3042 of SEQ ID NO: 1564427
guuagaguuauagaguucu

SEQ ID NO: 1876874 - RNA, 19 nt, Artificial Sequence
  Description of Artificial Sequence: Synthetic oligonucleotide
  Antisense strand to SEQ ID NO: 1876873
agaacucuauaacucuaac

SEQ ID NO: 1876875 - RNA, 19 nt, Artificial Sequence
  Description of Artificial Sequence: Synthetic oligonucleotide
  Sense strand starting at position 3255 of SEQ ID NO: 1564427
ucauuucucguguguauac

SEQ ID NO: 1876876 - RNA, 19 nt, Artificial Sequence
  Description of Artificial Sequence: Synthetic oligonucleotide
  Antisense strand to SEQ ID NO: 1876875
guauacacacgagaaauga

SEQ ID NO: 1876877 - RNA, 19 nt, Artificial Sequence
  Description of Artificial Sequence: Synthetic oligonucleotide
  Sense strand starting at position 3256 of SEQ ID NO: 1564427
cauuucucguguguauaca

SEQ ID NO: 1876878 - RNA, 19 nt, Artificial Sequence
  Description of Artificial Sequence: Synthetic oligonucleotide
  Antisense strand to SEQ ID NO: 1876877
uguauacacacgagaaaug

SEQ ID NO: 1876879 - RNA, 19 nt, Artificial Sequence
  Description of Artificial Sequence: Synthetic oligonucleotide
  Sense strand starting at position 3281 of SEQ ID NO: 1564427
aguagaauuaguggguuau

SEQ ID NO: 1876880 - RNA, 19 nt, Artificial Sequence
  Description of Artificial Sequence: Synthetic oligonucleotide
  Antisense strand to SEQ ID NO: 1876879
auaacccacuaauucuacu

SEQ ID NO: 1876881 - RNA, 19 nt, Artificial Sequence
  Description of Artificial Sequence: Synthetic oligonucleotide
  Sense strand starting at position 3291 of SEQ ID NO: 1564427
guggguuauaugggaacuu

SEQ ID NO: 1876882 - RNA, 19 nt, Artificial Sequence
  Description of Artificial Sequence: Synthetic oligonucleotide
  Antisense strand to SEQ ID NO: 1876881
aaguucccauauaacccac

SEQ ID NO: 1876883 - RNA, 19 nt, Artificial Sequence
  Description of Artificial Sequence: Synthetic oligonucleotide
  Sense strand starting at position 3301 of SEQ ID NO: 1564427
ugggaacuuuagguuuaaa

SEQ ID NO: 1876884 - RNA, 19 nt, Artificial Sequence
  Description of Artificial Sequence: Synthetic oligonucleotide
  Antisense strand to SEQ ID NO: 1876883
uuuaaaccuaaaguuccca

SEQ ID NO: 1876885 - RNA, 19 nt, Artificial Sequence
  Description of Artificial Sequence: Synthetic oligonucleotide
  Sense strand starting at position 3427 of SEQ ID NO: 1564427
ugaccauuacaauguguau

SEQ ID NO: 1876886 - RNA, 19 nt, Artificial Sequence
  Description of Artificial Sequence: Synthetic oligonucleotide
  Antisense strand to SEQ ID NO: 1876885
auacacauuguaaugguca

SEQ ID NO: 1876887 - RNA, 19 nt, Artificial Sequence
  Description of Artificial Sequence: Synthetic oligonucleotide
  Sense strand starting at position 3433 of SEQ ID NO: 1564427
uuacaauguguaugagauc

SEQ ID NO: 1876888 - RNA, 19 nt, Artificial Sequence
  Description of Artificial Sequence: Synthetic oligonucleotide
  Antisense strand to SEQ ID NO: 1876887
gaucucauacacauuguaa

SEQ ID NO: 1876889 - RNA, 19 nt, Artificial Sequence
  Description of Artificial Sequence: Synthetic oligonucleotide
  Sense strand starting at position 3466 of SEQ ID NO: 1564427
guuggacuucuugaauuac

SEQ ID NO: 1876890 - RNA, 19 nt, Artificial Sequence
  Description of Artificial Sequence: Synthetic oligonucleotide
  Antisense strand to SEQ ID NO: 1876889
guaauucaagaaguccaac

SEQ ID NO: 1876891 - RNA, 19 nt, Artificial Sequence
  Description of Artificial Sequence: Synthetic oligonucleotide
  Sense strand starting at position 3544 of SEQ ID NO: 1564427
auauaccuucucuggagaa

SEQ ID NO: 1876892 - RNA, 19 nt, Artificial Sequence
  Description of Artificial Sequence: Synthetic oligonucleotide
  Antisense strand to SEQ ID NO: 1876891
uucuccagagaagguauau

SEQ ID NO: 1876893 - RNA, 19 nt, Artificial Sequence
  Description of Artificial Sequence: Synthetic oligonucleotide
  Sense strand starting at position 3890 of SEQ ID NO: 1564427
aguuaacuuguguaaacac

SEQ ID NO: 1876894 - RNA, 19 nt, Artificial Sequence
  Description of Artificial Sequence: Synthetic oligonucleotide
  Antisense strand to SEQ ID NO: 1876893
guguuuacacaaguuaacu

SEQ ID NO: 1876895 - RNA, 19 nt, Artificial Sequence
  Description of Artificial Sequence: Synthetic oligonucleotide
  Sense strand starting at position 3897 of SEQ ID NO: 1564427
uuguguaaacacugugaag

SEQ ID NO: 1876896 - RNA, 19 nt, Artificial Sequence
  Description of Artificial Sequence: Synthetic oligonucleotide
  Antisense strand to SEQ ID NO: 1876895
cuucacaguguuuacacaa

SEQ ID NO: 1876897 - RNA, 19 nt, Artificial Sequence
  Description of Artificial Sequence: Synthetic oligonucleotide
  Sense strand starting at position 3939 of SEQ ID NO: 1564427
gcguguugccaucuaguug

SEQ ID NO: 1876898 - RNA, 19 nt, Artificial Sequence
  Description of Artificial Sequence: Synthetic oligonucleotide
  Antisense strand to SEQ ID NO: 1876897
caacuagauggcaacacgc

SEQ ID NO: 1876899 - RNA, 19 nt, Artificial Sequence
  Description of Artificial Sequence: Synthetic oligonucleotide
  Sense strand starting at position 3961 of SEQ ID NO: 1564427
cagaauuuguuggaaacau

SEQ ID NO: 1876900 - RNA, 19 nt, Artificial Sequence
  Description of Artificial Sequence: Synthetic oligonucleotide
  Antisense strand to SEQ ID NO: 1876899
auguuuccaacaaauucug

SEQ ID NO: 1876901 - RNA, 19 nt, Artificial Sequence
  Description of Artificial Sequence: Synthetic oligonucleotide
  Sense strand starting at position 110 of SEQ ID NO: 1564428
ggagaucugucacccuaau

SEQ ID NO: 1876902 - RNA, 19 nt, Artificial Sequence
  Description of Artificial Sequence: Synthetic oligonucleotide
  Antisense strand to SEQ ID NO: 1876901
auuagggugacagaucucc

SEQ ID NO: 1876903 - RNA, 19 nt, Artificial Sequence
  Description of Artificial Sequence: Synthetic oligonucleotide
  Sense strand starting at position 164 of SEQ ID NO: 1564428
gaagcaggguccuuuacuu

SEQ ID NO: 1876904 - RNA, 19 nt, Artificial Sequence
  Description of Artificial Sequence: Synthetic oligonucleotide
  Antisense strand to SEQ ID NO: 1876903
aaguaaaggacccugcuuc

SEQ ID NO: 1876905 - RNA, 19 nt, Artificial Sequence
  Description of Artificial Sequence: Synthetic oligonucleotide
  Sense strand starting at position 202 of SEQ ID NO: 1564428
uuguaaucucaauggcaau

SEQ ID NO: 1876906 - RNA, 19 nt, Artificial Sequence
  Description of Artificial Sequence: Synthetic oligonucleotide
  Antisense strand to SEQ ID NO: 1876905
auugccauugagauuacaa

SEQ ID NO: 1876907 - RNA, 19 nt, Artificial Sequence
  Description of Artificial Sequence: Synthetic oligonucleotide
  Sense strand starting at position 221 of SEQ ID NO: 1564428
uuguaaucucaauggcaca

SEQ ID NO: 1876908 - RNA, 19 nt, Artificial Sequence
  Description of Artificial Sequence: Synthetic oligonucleotide
  Antisense strand to SEQ ID NO: 1876907
ugugccauugagauuacaa

SEQ ID NO: 1876909 - RNA, 19 nt, Artificial Sequence
  Description of Artificial Sequence: Synthetic oligonucleotide
  Sense strand starting at position 281 of SEQ ID NO: 1564428
cuagcaauuaccuggagag

SEQ ID NO: 1876910 - RNA, 19 nt, Artificial Sequence
  Description of Artificial Sequence: Synthetic oligonucleotide
  Antisense strand to SEQ ID NO: 1876909
cucuccagguaauugcuag

SEQ ID NO: 1876911 - RNA, 19 nt, Artificial Sequence
  Description of Artificial Sequence: Synthetic oligonucleotide
  Sense strand starting at position 282 of SEQ ID NO: 1564428
uagcaauuaccuggagaga

SEQ ID NO: 1876912 - RNA, 19 nt, Artificial Sequence
  Description of Artificial Sequence: Synthetic oligonucleotide
  Antisense strand to SEQ ID NO: 1876911
ucucuccagguaauugcua

SEQ ID NO: 1876913 - RNA, 19 nt, Artificial Sequence
  Description of Artificial Sequence: Synthetic oligonucleotide
  Sense strand starting at position 466 of SEQ ID NO: 1564428
cacgaagagcuuuaugcaa

SEQ ID NO: 1876914 - RNA, 19 nt, Artificial Sequence
  Description of Artificial Sequence: Synthetic oligonucleotide
  Antisense strand to SEQ ID NO: 1876913
uugcauaaagcucuucgug

SEQ ID NO: 1876915 - RNA, 19 nt, Artificial Sequence
  Description of Artificial Sequence: Synthetic oligonucleotide
  Sense strand starting at position 601 of SEQ ID NO: 1564428
ggaaaugcuaaccgggaaa

SEQ ID NO: 1876916 - RNA, 19 nt, Artificial Sequence
  Description of Artificial Sequence: Synthetic oligonucleotide
  Antisense strand to SEQ ID NO: 1876915
uuucccgguuagcauuucc

SEQ ID NO: 1876917 - RNA, 19 nt, Artificial Sequence
  Description of Artificial Sequence: Synthetic oligonucleotide
  Sense strand starting at position 603 of SEQ ID NO: 1564428
aaaugcuaaccgggaaaua

SEQ ID NO: 1876918 - RNA, 19 nt, Artificial Sequence
  Description of Artificial Sequence: Synthetic oligonucleotide
  Antisense strand to SEQ ID NO: 1876917
uauuucccgguuagcauuu

SEQ ID NO: 1876919 - RNA, 19 nt, Artificial Sequence
  Description of Artificial Sequence: Synthetic oligonucleotide
  Sense strand starting at position 619 of SEQ ID NO: 1564428
auaugauaccacuguggca

SEQ ID NO: 1876920 - RNA, 19 nt, Artificial Sequence
  Description of Artificial Sequence: Synthetic oligonucleotide
  Antisense strand to SEQ ID NO: 1876919
ugccacagugguaucauau

SEQ ID NO: 1876921 - RNA, 19 nt, Artificial Sequence
  Description of Artificial Sequence: Synthetic oligonucleotide
  Sense strand starting at position 621 of SEQ ID NO: 1564428
augauaccacuguggcaua

SEQ ID NO: 1876922 - RNA, 19 nt, Artificial Sequence
  Description of Artificial Sequence: Synthetic oligonucleotide
  Antisense strand to SEQ ID NO: 1876921
uaugccacagugguaucau

SEQ ID NO: 1876923 - RNA, 19 nt, Artificial Sequence
  Description of Artificial Sequence: Synthetic oligonucleotide
  Sense strand starting at position 642 of SEQ ID NO: 1564428
uuugguuauucuucgagga

SEQ ID NO: 1876924 - RNA, 19 nt, Artificial Sequence
  Description of Artificial Sequence: Synthetic oligonucleotide
  Antisense strand to SEQ ID NO: 1876923
uccucgaagaauaaccaaa

SEQ ID NO: 1876925 - RNA, 19 nt, Artificial Sequence
  Description of Artificial Sequence: Synthetic oligonucleotide
  Sense strand starting at position 643 of SEQ ID NO: 1564428
uugguuauucuucgaggaa

SEQ ID NO: 1876926 - RNA, 19 nt, Artificial Sequence
  Description of Artificial Sequence: Synthetic oligonucleotide
  Antisense strand to SEQ ID NO: 1876925
uuccucgaagaauaaccaa

SEQ ID NO: 1876927 - RNA, 19 nt, Artificial Sequence
  Description of Artificial Sequence: Synthetic oligonucleotide
  Sense strand starting at position 646 of SEQ ID NO: 1564428
guuauucuucgaggaaauc

SEQ ID NO: 1876928 - RNA, 19 nt, Artificial Sequence
  Description of Artificial Sequence: Synthetic oligonucleotide
  Antisense strand to SEQ ID NO: 1876927
gauuuccucgaagaauaac

SEQ ID NO: 1876929 - RNA, 19 nt, Artificial Sequence
  Description of Artificial Sequence: Synthetic oligonucleotide
  Sense strand starting at position 647 of SEQ ID NO: 1564428
uuauucuucgaggaaaucu

SEQ ID NO: 1876930 - RNA, 19 nt, Artificial Sequence
  Description of Artificial Sequence: Synthetic oligonucleotide
  Antisense strand to SEQ ID NO: 1876929
agauuuccucgaagaauaa

SEQ ID NO: 1876931 - RNA, 19 nt, Artificial Sequence
  Description of Artificial Sequence: Synthetic oligonucleotide
  Sense strand starting at position 797 of SEQ ID NO: 1564428
acacaucacgucuaaugua

SEQ ID NO: 1876932 - RNA, 19 nt, Artificial Sequence
  Description of Artificial Sequence: Synthetic oligonucleotide
  Antisense strand to SEQ ID NO: 1876931
uacauuagacgugaugugu

SEQ ID NO: 1876933 - RNA, 19 nt, Artificial Sequence
  Description of Artificial Sequence: Synthetic oligonucleotide
  Sense strand starting at position 837 of SEQ ID NO: 1564428
uuugucauuugaucguagu

SEQ ID NO: 1876934 - RNA, 19 nt, Artificial Sequence
  Description of Artificial Sequence: Synthetic oligonucleotide
  Antisense strand to SEQ ID NO: 1876933
acuacgaucaaaugacaaa

SEQ ID NO: 1876935 - RNA, 19 nt, Artificial Sequence
  Description of Artificial Sequence: Synthetic oligonucleotide
  Sense strand starting at position 999 of SEQ ID NO: 1564428
aucucaagucauuauggca

SEQ ID NO: 1876936 - RNA, 19 nt, Artificial Sequence
  Description of Artificial Sequence: Synthetic oligonucleotide
  Antisense strand to SEQ ID NO: 1876935
ugccauaaugacuugagau

SEQ ID NO: 1876937 - RNA, 19 nt, Artificial Sequence
  Description of Artificial Sequence: Synthetic oligonucleotide
  Sense strand starting at position 1133 of SEQ ID NO: 1564428
acacuauaugcucauguua

SEQ ID NO: 1876938 - RNA, 19 nt, Artificial Sequence
  Description of Artificial Sequence: Synthetic oligonucleotide
  Antisense strand to SEQ ID NO: 1876937
uaacaugagcauauagugu

SEQ ID NO: 1876939 - RNA, 19 nt, Artificial Sequence
  Description of Artificial Sequence: Synthetic oligonucleotide
  Sense strand starting at position 1231 of SEQ ID NO: 1564428
uccaguagaugucccaaua

SEQ ID NO: 1876940 - RNA, 19 nt, Artificial Sequence
  Description of Artificial Sequence: Synthetic oligonucleotide
  Antisense strand to SEQ ID NO: 1876939
uauugggacaucuacugga

SEQ ID NO: 1876941 - RNA, 19 nt, Artificial Sequence
  Description of Artificial Sequence: Synthetic oligonucleotide
  Sense strand starting at position 2076 of SEQ ID NO: 1564428
cuggcucuuccaugaaauc

SEQ ID NO: 1876942 - RNA, 19 nt, Artificial Sequence
  Description of Artificial Sequence: Synthetic oligonucleotide
  Antisense strand to SEQ ID NO: 1876941
gauuucauggaagagccag

SEQ ID NO: 1876943 - RNA, 19 nt, Artificial Sequence
  Description of Artificial Sequence: Synthetic oligonucleotide
  Sense strand starting at position 2127 of SEQ ID NO: 1564428
uguauaugaauguguauag

SEQ ID NO: 1876944 - RNA, 19 nt, Artificial Sequence
  Description of Artificial Sequence: Synthetic oligonucleotide
  Antisense strand to SEQ ID NO: 1876943
cuauacacauucauauaca

SEQ ID NO: 1876945 - RNA, 19 nt, Artificial Sequence
  Description of Artificial Sequence: Synthetic oligonucleotide
  Sense strand starting at position 2152 of SEQ ID NO: 1564428
cuccacauagucgacaaua

SEQ ID NO: 1876946 - RNA, 19 nt, Artificial Sequence
  Description of Artificial Sequence: Synthetic oligonucleotide
  Antisense strand to SEQ ID NO: 1876945
uauugucgacuauguggag

SEQ ID NO: 1876947 - RNA, 19 nt, Artificial Sequence
  Description of Artificial Sequence: Synthetic oligonucleotide
  Sense strand starting at position 2520 of SEQ ID NO: 1564428
agaaacaaugccugacauu

SEQ ID NO: 1876948 - RNA, 19 nt, Artificial Sequence
  Description of Artificial Sequence: Synthetic oligonucleotide
  Antisense strand to SEQ ID NO: 1876947
aaugucaggcauuguuucu

SEQ ID NO: 1876949 - RNA, 19 nt, Artificial Sequence
  Description of Artificial Sequence: Synthetic oligonucleotide
  Sense strand starting at position 2596 of SEQ ID NO: 1564428
agguuaugcaagugauaau

SEQ ID NO: 1876950 - RNA, 19 nt, Artificial Sequence
  Description of Artificial Sequence: Synthetic oligonucleotide
  Antisense strand to SEQ ID NO: 1876949
auuaucacuugcauaaccu

SEQ ID NO: 1876951 - RNA, 19 nt, Artificial Sequence
  Description of Artificial Sequence: Synthetic oligonucleotide
  Sense strand starting at position 2597 of SEQ ID NO: 1564428
gguuaugcaagugauaaua

SEQ ID NO: 1876952 - RNA, 19 nt, Artificial Sequence
  Description of Artificial Sequence: Synthetic oligonucleotide
  Antisense strand to SEQ ID NO: 1876951
uauuaucacuugcauaacc

SEQ ID NO: 1876953 - RNA, 19 nt, Artificial Sequence
  Description of Artificial Sequence: Synthetic oligonucleotide
  Sense strand starting at position 2670 of SEQ ID NO: 1564428
uucucaaauguuuaaggca

SEQ ID NO: 1876954 - RNA, 19 nt, Artificial Sequence
  Description of Artificial Sequence: Synthetic oligonucleotide
  Antisense strand to SEQ ID NO: 1876953
ugccuuaaacauuugagaa

SEQ ID NO: 1876955 - RNA, 19 nt, Artificial Sequence
  Description of Artificial Sequence: Synthetic oligonucleotide
  Sense strand starting at position 2708 of SEQ ID NO: 1564428
gggauaugcaugcagaucu

SEQ ID NO: 1876956 - RNA, 19 nt, Artificial Sequence
  Description of Artificial Sequence: Synthetic oligonucleotide
  Antisense strand to SEQ ID NO: 1876955
agaucugcaugcauauccc

SEQ ID NO: 1876957 - RNA, 19 nt, Artificial Sequence
  Description of Artificial Sequence: Synthetic oligonucleotide
  Sense strand starting at position 3019 of SEQ ID NO: 1564428
ugcaauuauccugacuuug

SEQ ID NO: 1876958 - RNA, 19 nt, Artificial Sequence
  Description of Artificial Sequence: Synthetic oligonucleotide
  Antisense strand to SEQ ID NO: 1876957
caaagucaggauaauugca

SEQ ID NO: 1876959 - RNA, 19 nt, Artificial Sequence
  Description of Artificial Sequence: Synthetic oligonucleotide
  Sense strand starting at position 3109 of SEQ ID NO: 1564428
uugaguuacuuucccauua

SEQ ID NO: 1876960 - RNA, 19 nt, Artificial Sequence
  Description of Artificial Sequence: Synthetic oligonucleotide
  Antisense strand to SEQ ID NO: 1876959
uaaugggaaaguaacucaa

SEQ ID NO: 1876961 - RNA, 19 nt, Artificial Sequence
  Description of Artificial Sequence: Synthetic oligonucleotide
  Sense strand starting at position 3159 of SEQ ID NO: 1564428
cucaauuggucccuacaag

SEQ ID NO: 1876962 - RNA, 19 nt, Artificial Sequence
  Description of Artificial Sequence: Synthetic oligonucleotide
  Antisense strand to SEQ ID NO: 1876961
cuuguagggaccaauugag

SEQ ID NO: 1876963 - RNA, 19 nt, Artificial Sequence
  Description of Artificial Sequence: Synthetic oligonucleotide
  Sense strand starting at position 3224 of SEQ ID NO: 1564428
aagaauguugugcagcaau

SEQ ID NO: 1876964 - RNA, 19 nt, Artificial Sequence
  Description of Artificial Sequence: Synthetic oligonucleotide
  Antisense strand to SEQ ID NO: 1876963
auugcugcacaacauucuu

SEQ ID NO: 1876965 - RNA, 19 nt, Artificial Sequence
  Description of Artificial Sequence: Synthetic oligonucleotide
  Sense strand starting at position 3240 of SEQ ID NO: 1564428
aauggacaguaugucaaau

SEQ ID NO: 1876966 - RNA, 19 nt, Artificial Sequence
  Description of Artificial Sequence: Synthetic oligonucleotide
  Antisense strand to SEQ ID NO: 1876965
auuugacauacuguccauu

SEQ ID NO: 1876967 - RNA, 19 nt, Artificial Sequence
  Description of Artificial Sequence: Synthetic oligonucleotide
  Sense strand starting at position 3304 of SEQ ID NO: 1564428
gugcauuuagaguguucuu

SEQ ID NO: 1876968 - RNA, 19 nt, Artificial Sequence
  Description of Artificial Sequence: Synthetic oligonucleotide
  Antisense strand to SEQ ID NO: 1876967
aagaacacucuaaaugcac

SEQ ID NO: 1876969 - RNA, 19 nt, Artificial Sequence
  Description of Artificial Sequence: Synthetic oligonucleotide
  Sense strand starting at position 3336 of SEQ ID NO: 1564428
gcaaauguguuucugagga

SEQ ID NO: 1876970 - RNA, 19 nt, Artificial Sequence
  Description of Artificial Sequence: Synthetic oligonucleotide
  Antisense strand to SEQ ID NO: 1876969
uccucagaaacacauuugc

SEQ ID NO: 1876971 - RNA, 19 nt, Artificial Sequence
  Description of Artificial Sequence: Synthetic oligonucleotide
  Sense strand starting at position 3570 of SEQ ID NO: 1564428
ucuggauuguaacuuugaa

SEQ ID NO: 1876972 - RNA, 19 nt, Artificial Sequence
  Description of Artificial Sequence: Synthetic oligonucleotide
  Antisense strand to SEQ ID NO: 1876971
uucaaaguuacaauccaga

SEQ ID NO: 1876973 - RNA, 19 nt, Artificial Sequence
  Description of Artificial Sequence: Synthetic oligonucleotide
  Sense strand starting at position 3618 of SEQ ID NO: 1564428
gauuuagguguuugcuacu

SEQ ID NO: 1876974 - RNA, 19 nt, Artificial Sequence
  Description of Artificial Sequence: Synthetic oligonucleotide
  Antisense strand to SEQ ID NO: 1876973
aguagcaaacaccuaaauc

SEQ ID NO: 1876975 - RNA, 19 nt, Artificial Sequence
  Description of Artificial Sequence: Synthetic oligonucleotide
  Sense strand starting at position 3627 of SEQ ID NO: 1564428
guuugcuacuaacucugaa

SEQ ID NO: 1876976 - RNA, 19 nt, Artificial Sequence
  Description of Artificial Sequence: Synthetic oligonucleotide
  Antisense strand to SEQ ID NO: 1876975
uucagaguuaguagcaaac

SEQ ID NO: 1876977 - RNA, 19 nt, Artificial Sequence
  Description of Artificial Sequence: Synthetic oligonucleotide
  Sense strand starting at position 3727 of SEQ ID NO: 1564428
gagugaugucguguuuggu

SEQ ID NO: 1876978 - RNA, 19 nt, Artificial Sequence
  Description of Artificial Sequence: Synthetic oligonucleotide
  Antisense strand to SEQ ID NO: 1876977
accaaacacgacaucacuc

SEQ ID NO: 1876979 - RNA, 19 nt, Artificial Sequence
  Description of Artificial Sequence: Synthetic oligonucleotide
  Sense strand starting at position 3728 of SEQ ID NO: 1564428
agugaugucguguuugguu

SEQ ID NO: 1876980 - RNA, 19 nt, Artificial Sequence
  Description of Artificial Sequence: Synthetic oligonucleotide
  Antisense strand to SEQ ID NO: 1876979
aaccaaacacgacaucacu

SEQ ID NO: 1876981 - RNA, 19 nt, Artificial Sequence
  Description of Artificial Sequence: Synthetic oligonucleotide
  Sense strand starting at position 203 of SEQ ID NO: 1564429
agcagagagccuugagaug

SEQ ID NO: 1876982 - RNA, 19 nt, Artificial Sequence
  Description of Artificial Sequence: Synthetic oligonucleotide
  Antisense strand to SEQ ID NO: 1876981
caucucaaggcucucugcu

SEQ ID NO: 1876983 - RNA, 19 nt, Artificial Sequence
  Description of Artificial Sequence: Synthetic oligonucleotide
  Sense strand starting at position 1375 of SEQ ID NO: 1564429
aaccaaauguuccugugga

SEQ ID NO: 1876984 - RNA, 19 nt, Artificial Sequence
  Description of Artificial Sequence: Synthetic oligonucleotide
  Antisense strand to SEQ ID NO: 1876983
uccacaggaacauuugguu

SEQ ID NO: 1876985 - RNA, 19 nt, Artificial Sequence
  Description of Artificial Sequence: Synthetic oligonucleotide
  Sense strand starting at position 1380 of SEQ ID NO: 1564429
aauguuccuguggagagau

SEQ ID NO: 1876986 - RNA, 19 nt, Artificial Sequence
  Description of Artificial Sequence: Synthetic oligonucleotide
  Antisense strand to SEQ ID NO: 1876985
aucucuccacaggaacauu

SEQ ID NO: 1876987 - RNA, 19 nt, Artificial Sequence
  Description of Artificial Sequence: Synthetic oligonucleotide
  Sense strand starting at position 1626 of SEQ ID NO: 1564429
ggauaauaauaugcgaaag

SEQ ID NO: 1876988 - RNA, 19 nt, Artificial Sequence
  Description of Artificial Sequence: Synthetic oligonucleotide
  Antisense strand to SEQ ID NO: 1876987
cuuucgcauauuauuaucc

SEQ ID NO: 1876989 - RNA, 19 nt, Artificial Sequence
  Description of Artificial Sequence: Synthetic oligonucleotide
  Sense strand starting at position 1664 of SEQ ID NO: 1564429
cuaccuuagcuguggaaga

SEQ ID NO: 1876990 - RNA, 19 nt, Artificial Sequence
  Description of Artificial Sequence: Synthetic oligonucleotide
  Antisense strand to SEQ ID NO: 1876989
ucuuccacagcuaagguag

SEQ ID NO: 1876991 - RNA, 19 nt, Artificial Sequence
  Description of Artificial Sequence: Synthetic oligonucleotide
  Sense strand starting at position 2087 of SEQ ID NO: 1564429
gccaauagaucuccagagu

SEQ ID NO: 1876992 - RNA, 19 nt, Artificial Sequence
  Description of Artificial Sequence: Synthetic oligonucleotide
  Antisense strand to SEQ ID NO: 1876991
acucuggagaucuauuggc

SEQ ID NO: 1876993 - RNA, 19 nt, Artificial Sequence
  Description of Artificial Sequence: Synthetic oligonucleotide
  Sense strand starting at position 2090 of SEQ ID NO: 1564429
aauagaucuccagagucgu

SEQ ID NO: 1876994 - RNA, 19 nt, Artificial Sequence
  Description of Artificial Sequence: Synthetic oligonucleotide
  Antisense strand to SEQ ID NO: 1876993
acgacucuggagaucuauu

SEQ ID NO: 1876995 - RNA, 19 nt, Artificial Sequence
  Description of Artificial Sequence: Synthetic oligonucleotide
  Sense strand starting at position 2309 of SEQ ID NO: 1564429
ugcagacaucuuuaacugu

SEQ ID NO: 1876996 - RNA, 19 nt, Artificial Sequence
  Description of Artificial Sequence: Synthetic oligonucleotide
  Antisense strand to SEQ ID NO: 1876995
acaguuaaagaugucugca

SEQ ID NO: 1876997 - RNA, 19 nt, Artificial Sequence
  Description of Artificial Sequence: Synthetic oligonucleotide
  Sense strand starting at position 2316 of SEQ ID NO: 1564429
aucuuuaacuguuuaaggu

SEQ ID NO: 1876998 - RNA, 19 nt, Artificial Sequence
  Description of Artificial Sequence: Synthetic oligonucleotide
  Antisense strand to SEQ ID NO: 1876997
accuuaaacaguuaaagau

SEQ ID NO: 1876999 - RNA, 19 nt, Artificial Sequence
  Description of Artificial Sequence: Synthetic oligonucleotide
  Sense strand starting at position 2367 of SEQ ID NO: 1564429
uugugagucaauugggaag

SEQ ID NO: 1877000 - RNA, 19 nt, Artificial Sequence
  Description of Artificial Sequence: Synthetic oligonucleotide
  Antisense strand to SEQ ID NO: 1876999
cuucccaauugacucacaa

SEQ ID NO: 1877001 - RNA, 19 nt, Artificial Sequence
  Description of Artificial Sequence: Synthetic oligonucleotide
  Sense strand starting at position 2424 of SEQ ID NO: 1564429
ggaauacagcucuguaaag

SEQ ID NO: 1877002 - RNA, 19 nt, Artificial Sequence
  Description of Artificial Sequence: Synthetic oligonucleotide
  Antisense strand to SEQ ID NO: 1877001
cuuuacagagcuguauucc

SEQ ID NO: 1877003 - RNA, 19 nt, Artificial Sequence
  Description of Artificial Sequence: Synthetic oligonucleotide
  Sense strand starting at position 2425 of SEQ ID NO: 1564429
gaauacagcucuguaaagu

SEQ ID NO: 1877004 - RNA, 19 nt, Artificial Sequence
  Description of Artificial Sequence: Synthetic oligonucleotide
  Antisense strand to SEQ ID NO: 1877003
acuuuacagagcuguauuc

SEQ ID NO: 1877005 - RNA, 19 nt, Artificial Sequence
  Description of Artificial Sequence: Synthetic oligonucleotide
  Sense strand starting at position 2461 of SEQ ID NO: 1564429
cgagguuaugguugaaaga

SEQ ID NO: 1877006 - RNA, 19 nt, Artificial Sequence
  Description of Artificial Sequence: Synthetic oligonucleotide
  Antisense strand to SEQ ID NO: 1877005
ucuuucaaccauaaccucg

SEQ ID NO: 1877007 - RNA, 19 nt, Artificial Sequence
  Description of Artificial Sequence: Synthetic oligonucleotide
  Sense strand starting at position 2464 of SEQ ID NO: 1564429
gguuaugguugaaagagga

SEQ ID NO: 1877008 - RNA, 19 nt, Artificial Sequence
  Description of Artificial Sequence: Synthetic oligonucleotide
  Antisense strand to SEQ ID NO: 1877007
uccucuuucaaccauaacc

SEQ ID NO: 1877009 - RNA, 19 nt, Artificial Sequence
  Description of Artificial Sequence: Synthetic oligonucleotide
  Sense strand starting at position 2593 of SEQ ID NO: 1564429
gguccaggagguuaucuuu

SEQ ID NO: 1877010 - RNA, 19 nt, Artificial Sequence
  Description of Artificial Sequence: Synthetic oligonucleotide
  Antisense strand to SEQ ID NO: 1877009
aaagauaaccuccuggacc

SEQ ID NO: 1877011 - RNA, 19 nt, Artificial Sequence
  Description of Artificial Sequence: Synthetic oligonucleotide
  Sense strand starting at position 2601 of SEQ ID NO: 1564429
agguuaucuuucccaggga

SEQ ID NO: 1877012 - RNA, 19 nt, Artificial Sequence
  Description of Artificial Sequence: Synthetic oligonucleotide
  Antisense strand to SEQ ID NO: 1877011
ucccugggaaagauaaccu

SEQ ID NO: 1877013 - RNA, 19 nt, Artificial Sequence
  Description of Artificial Sequence: Synthetic oligonucleotide
  Sense strand starting at position 2604 of SEQ ID NO: 1564429
uuaucuuucccagggaguu

SEQ ID NO: 1877014 - RNA, 19 nt, Artificial Sequence
  Description of Artificial Sequence: Synthetic oligonucleotide
  Antisense strand to SEQ ID NO: 1877013
aacucccugggaaagauaa

SEQ ID NO: 1877015 - RNA, 19 nt, Artificial Sequence
  Description of Artificial Sequence: Synthetic oligonucleotide
  Sense strand starting at position 2605 of SEQ ID NO: 1564429
uaucuuucccagggaguuu

SEQ ID NO: 1877016 - RNA, 19 nt, Artificial Sequence
  Description of Artificial Sequence: Synthetic oligonucleotide
  Antisense strand to SEQ ID NO: 1877015
aaacucccugggaaagaua

SEQ ID NO: 1877017 - RNA, 19 nt, Artificial Sequence
  Description of Artificial Sequence: Synthetic oligonucleotide
  Sense strand starting at position 2676 of SEQ ID NO: 1564429
uggagaaaguuggcuugaa

SEQ ID NO: 1877018 - RNA, 19 nt, Artificial Sequence
  Description of Artificial Sequence: Synthetic oligonucleotide
  Antisense strand to SEQ ID NO: 1877017
uucaagccaacuuucucca

SEQ ID NO: 1877019 - RNA, 19 nt, Artificial Sequence
  Description of Artificial Sequence: Synthetic oligonucleotide
  Sense strand starting at position 2677 of SEQ ID NO: 1564429
ggagaaaguuggcuugaaa

SEQ ID NO: 1877020 - RNA, 19 nt, Artificial Sequence
  Description of Artificial Sequence: Synthetic oligonucleotide
  Antisense strand to SEQ ID NO: 1877019
uuucaagccaacuuucucc

SEQ ID NO: 1877021 - RNA, 19 nt, Artificial Sequence
  Description of Artificial Sequence: Synthetic oligonucleotide
  Sense strand starting at position 2691 of SEQ ID NO: 1564429
ugaaauugacaaugcuuaa

SEQ ID NO: 1877022 - RNA, 19 nt, Artificial Sequence
  Description of Artificial Sequence: Synthetic oligonucleotide
  Antisense strand to SEQ ID NO: 1877021
uuaagcauugucaauuuca

SEQ ID NO: 1877023 - RNA, 19 nt, Artificial Sequence
  Description of Artificial Sequence: Synthetic oligonucleotide
  Sense strand starting at position 2695 of SEQ ID NO: 1564429
auugacaaugcuuaaaguu

SEQ ID NO: 1877024 - RNA, 19 nt, Artificial Sequence
  Description of Artificial Sequence: Synthetic oligonucleotide
  Antisense strand to SEQ ID NO: 1877023
aacuuuaagcauugucaau

SEQ ID NO: 1877025 - RNA, 19 nt, Artificial Sequence
  Description of Artificial Sequence: Synthetic oligonucleotide
  Sense strand starting at position 2734 of SEQ ID NO: 1564429
ucaagaaaguuggauuuaa

SEQ ID NO: 1877026 - RNA, 19 nt, Artificial Sequence
  Description of Artificial Sequence: Synthetic oligonucleotide
  Antisense strand to SEQ ID NO: 1877025
uuaaauccaacuuucuuga

SEQ ID NO: 1877027 - RNA, 19 nt, Artificial Sequence
  Description of Artificial Sequence: Synthetic oligonucleotide
  Sense strand starting at position 2813 of SEQ ID NO: 1564429
aaaugagauugcuuggguu

SEQ ID NO: 1877028 - RNA, 19 nt, Artificial Sequence
  Description of Artificial Sequence: Synthetic oligonucleotide
  Antisense strand to SEQ ID NO: 1877027
aacccaagcaaucucauuu

SEQ ID NO: 1877029 - RNA, 19 nt, Artificial Sequence
  Description of Artificial Sequence: Synthetic oligonucleotide
  Sense strand starting at position 2815 of SEQ ID NO: 1564429
augagauugcuuggguuua

SEQ ID NO: 1877030 - RNA, 19 nt, Artificial Sequence
  Description of Artificial Sequence: Synthetic oligonucleotide
  Antisense strand to SEQ ID NO: 1877029
uaaacccaagcaaucucau

SEQ ID NO: 1877031 - RNA, 19 nt, Artificial Sequence
  Description of Artificial Sequence: Synthetic oligonucleotide
  Sense strand starting at position 2817 of SEQ ID NO: 1564429
gagauugcuuggguuuaag

SEQ ID NO: 1877032 - RNA, 19 nt, Artificial Sequence
  Description of Artificial Sequence: Synthetic oligonucleotide
  Antisense strand to SEQ ID NO: 1877031
cuuaaacccaagcaaucuc

SEQ ID NO: 1877033 - RNA, 19 nt, Artificial Sequence
  Description of Artificial Sequence: Synthetic oligonucleotide
  Sense strand starting at position 2920 of SEQ ID NO: 1564429
ugucauauugauuagcuga

SEQ ID NO: 1877034 - RNA, 19 nt, Artificial Sequence
  Description of Artificial Sequence: Synthetic oligonucleotide
  Antisense strand to SEQ ID NO: 1877033
ucagcuaaucaauaugaca

SEQ ID NO: 1877035 - RNA, 19 nt, Artificial Sequence
  Description of Artificial Sequence: Synthetic oligonucleotide
  Sense strand starting at position 3279 of SEQ ID NO: 1564429
cucuguugagcugacauua

SEQ ID NO: 1877036 - RNA, 19 nt, Artificial Sequence
  Description of Artificial Sequence: Synthetic oligonucleotide
  Antisense strand to SEQ ID NO: 1877035
uaaugucagcucaacagag

SEQ ID NO: 1877037 - RNA, 19 nt, Artificial Sequence
  Description of Artificial Sequence: Synthetic oligonucleotide
  Sense strand starting at position 3284 of SEQ ID NO: 1564429
uugagcugacauuauuauu

SEQ ID NO: 1877038 - RNA, 19 nt, Artificial Sequence
  Description of Artificial Sequence: Synthetic oligonucleotide
  Antisense strand to SEQ ID NO: 1877037
aauaauaaugucagcucaa

SEQ ID NO: 1877039 - RNA, 19 nt, Artificial Sequence
  Description of Artificial Sequence: Synthetic oligonucleotide
  Sense strand starting at position 3332 of SEQ ID NO: 1564429
gggacuaaaugagauaaua

SEQ ID NO: 1877040 - RNA, 19 nt, Artificial Sequence
  Description of Artificial Sequence: Synthetic oligonucleotide
  Antisense strand to SEQ ID NO: 1877039
uauuaucucauuuaguccc

SEQ ID NO: 1877041 - RNA, 19 nt, Artificial Sequence
  Description of Artificial Sequence: Synthetic oligonucleotide
  Sense strand starting at position 3343 of SEQ ID NO: 1564429
agauaauaugcaugaaagc

SEQ ID NO: 1877042 - RNA, 19 nt, Artificial Sequence
  Description of Artificial Sequence: Synthetic oligonucleotide
  Antisense strand to SEQ ID NO: 1877041
gcuuucaugcauauuaucu

SEQ ID NO: 1877043 - RNA, 19 nt, Artificial Sequence
  Description of Artificial Sequence: Synthetic oligonucleotide
  Sense strand starting at position 3464 of SEQ ID NO: 1564429
guguguucccauuagauau

SEQ ID NO: 1877044 - RNA, 19 nt, Artificial Sequence
  Description of Artificial Sequence: Synthetic oligonucleotide
  Antisense strand to SEQ ID NO: 1877043
auaucuaaugggaacacac

SEQ ID NO: 1877045 - RNA, 19 nt, Artificial Sequence
  Description of Artificial Sequence: Synthetic oligonucleotide
  Sense strand starting at position 3505 of SEQ ID NO: 1564429
uuccauuauuguguagaua

SEQ ID NO: 1877046 - RNA, 19 nt, Artificial Sequence
  Description of Artificial Sequence: Synthetic oligonucleotide
  Antisense strand to SEQ ID NO: 1877045
uaucuacacaauaauggaa

SEQ ID NO: 1877047 - RNA, 19 nt, Artificial Sequence
  Description of Artificial Sequence: Synthetic oligonucleotide
  Sense strand starting at position 3506 of SEQ ID NO: 1564429
uccauuauuguguagauau

SEQ ID NO: 1877048 - RNA, 19 nt, Artificial Sequence
  Description of Artificial Sequence: Synthetic oligonucleotide
  Antisense strand to SEQ ID NO: 1877047
auaucuacacaauaaugga

SEQ ID NO: 1877049 - RNA, 19 nt, Artificial Sequence
  Description of Artificial Sequence: Synthetic oligonucleotide
  Sense strand starting at position 3508 of SEQ ID NO: 1564429
cauuauuguguagauauug

SEQ ID NO: 1877050 - RNA, 19 nt, Artificial Sequence
  Description of Artificial Sequence: Synthetic oligonucleotide
  Antisense strand to SEQ ID NO: 1877049
caauaucuacacaauaaug

SEQ ID NO: 1877051 - RNA, 19 nt, Artificial Sequence
  Description of Artificial Sequence: Synthetic oligonucleotide
  Sense strand starting at position 3580 of SEQ ID NO: 1564429
agugauauacauggaugua

SEQ ID NO: 1877052 - RNA, 19 nt, Artificial Sequence
  Description of Artificial Sequence: Synthetic oligonucleotide
  Antisense strand to SEQ ID NO: 1877051
uacauccauguauaucacu

SEQ ID NO: 1877053 - RNA, 19 nt, Artificial Sequence
  Description of Artificial Sequence: Synthetic oligonucleotide
  Sense strand starting at position 3691 of SEQ ID NO: 1564429
ccacaaagucauggacuuu

SEQ ID NO: 1877054 - RNA, 19 nt, Artificial Sequence
  Description of Artificial Sequence: Synthetic oligonucleotide
  Antisense strand to SEQ ID NO: 1877053
aaaguccaugacuuugugg

SEQ ID NO: 1877055 - RNA, 19 nt, Artificial Sequence
  Description of Artificial Sequence: Synthetic oligonucleotide
  Sense strand starting at position 3703 of SEQ ID NO: 1564429
ggacuuugccaagaaugua

SEQ ID NO: 1877056 - RNA, 19 nt, Artificial Sequence
  Description of Artificial Sequence: Synthetic oligonucleotide
  Antisense strand to SEQ ID NO: 1877055
uacauucuuggcaaagucc

SEQ ID NO: 1877057 - RNA, 19 nt, Artificial Sequence
  Description of Artificial Sequence: Synthetic oligonucleotide
  Sense strand starting at position 3794 of SEQ ID NO: 1564429
guaacugugagugagacuu

SEQ ID NO: 1877058 - RNA, 19 nt, Artificial Sequence
  Description of Artificial Sequence: Synthetic oligonucleotide
  Antisense strand to SEQ ID NO: 1877057
aagucucacucacaguuac

SEQ ID NO: 1877059 - RNA, 19 nt, Artificial Sequence
  Description of Artificial Sequence: Synthetic oligonucleotide
  Sense strand starting at position 3800 of SEQ ID NO: 1564429
gugagugagacuuauccau

SEQ ID NO: 1877060 - RNA, 19 nt, Artificial Sequence
  Description of Artificial Sequence: Synthetic oligonucleotide
  Antisense strand to SEQ ID NO: 1877059
auggauaagucucacucac

SEQ ID NO: 1877061 - RNA, 19 nt, Artificial Sequence
  Description of Artificial Sequence: Synthetic oligonucleotide
  Sense strand starting at position 11 of SEQ ID NO: 1564430
aaagcauaagauuggagua

SEQ ID NO: 1877062 - RNA, 19 nt, Artificial Sequence
  Description of Artificial Sequence: Synthetic oligonucleotide
  Antisense strand to SEQ ID NO: 1877061
uacuccaaucuuaugcuuu

SEQ ID NO: 1877063 - RNA, 19 nt, Artificial Sequence
  Description of Artificial Sequence: Synthetic oligonucleotide
  Sense strand starting at position 211 of SEQ ID NO: 1564430
uuggguccaaaugguaaau

SEQ ID NO: 1877064 - RNA, 19 nt, Artificial Sequence
  Description of Artificial Sequence: Synthetic oligonucleotide
  Antisense strand to SEQ ID NO: 1877063
auuuaccauuuggacccaa

SEQ ID NO: 1877065 - RNA, 19 nt, Artificial Sequence
  Description of Artificial Sequence: Synthetic oligonucleotide
  Sense strand starting at position 272 of SEQ ID NO: 1564430
ugggcugaauucgugacuu

SEQ ID NO: 1877066 - RNA, 19 nt, Artificial Sequence
  Description of Artificial Sequence: Synthetic oligonucleotide
  Antisense strand to SEQ ID NO: 1877065
aagucacgaauucagccca

SEQ ID NO: 1877067 - RNA, 19 nt, Artificial Sequence
  Description of Artificial Sequence: Synthetic oligonucleotide
  Sense strand starting at position 447 of SEQ ID NO: 1564430
ugcgguaagguguggaaga

SEQ ID NO: 1877068 - RNA, 19 nt, Artificial Sequence
  Description of Artificial Sequence: Synthetic oligonucleotide
  Antisense strand to SEQ ID NO: 1877067
ucuuccacaccuuaccgca

SEQ ID NO: 1877069 - RNA, 19 nt, Artificial Sequence
  Description of Artificial Sequence: Synthetic oligonucleotide
  Sense strand starting at position 530 of SEQ ID NO: 1564430
ggguaugaugcguaggaca

SEQ ID NO: 1877070 - RNA, 19 nt, Artificial Sequence
  Description of Artificial Sequence: Synthetic oligonucleotide
  Antisense strand to SEQ ID NO: 1877069
uguccuacgcaucauaccc

SEQ ID NO: 1877071 - RNA, 19 nt, Artificial Sequence
  Description of Artificial Sequence: Synthetic oligonucleotide
  Sense strand starting at position 532 of SEQ ID NO: 1564430
guaugaugcguaggacauc

SEQ ID NO: 1877072 - RNA, 19 nt, Artificial Sequence
  Description of Artificial Sequence: Synthetic oligonucleotide
  Antisense strand to SEQ ID NO: 1877071
gauguccuacgcaucauac

SEQ ID NO: 1877073 - RNA, 19 nt, Artificial Sequence
  Description of Artificial Sequence: Synthetic oligonucleotide
  Sense strand starting at position 1341 of SEQ ID NO: 1564430
agcagagagccuugagaug

SEQ ID NO: 1877074 - RNA, 19 nt, Artificial Sequence
  Description of Artificial Sequence: Synthetic oligonucleotide
  Antisense strand to SEQ ID NO: 1877073
caucucaaggcucucugcu

SEQ ID NO: 1877075 - RNA, 19 nt, Artificial Sequence
  Description of Artificial Sequence: Synthetic oligonucleotide
  Sense strand starting at position 1486 of SEQ ID NO: 1564430
gcuuaacacuccuccgaac

SEQ ID NO: 1877076 - RNA, 19 nt, Artificial Sequence
  Description of Artificial Sequence: Synthetic oligonucleotide
  Antisense strand to SEQ ID NO: 1877075
guucggaggaguguuaagc

SEQ ID NO: 1877077 - RNA, 19 nt, Artificial Sequence
  Description of Artificial Sequence: Synthetic oligonucleotide
  Sense strand starting at position 2472 of SEQ ID NO: 1564430
caacauugguggucugcau

SEQ ID NO: 1877078 - RNA, 19 nt, Artificial Sequence
  Description of Artificial Sequence: Synthetic oligonucleotide
  Antisense strand to SEQ ID NO: 1877077
augcagaccaccaauguug

SEQ ID NO: 1877079 - RNA, 19 nt, Artificial Sequence
  Description of Artificial Sequence: Synthetic oligonucleotide
  Sense strand starting at position 2513 of SEQ ID NO: 1564430
aaccaaauguuccugugga

SEQ ID NO: 1877080 - RNA, 19 nt, Artificial Sequence
  Description of Artificial Sequence: Synthetic oligonucleotide
  Antisense strand to SEQ ID NO: 1877079
uccacaggaacauuugguu

SEQ ID NO: 1877081 - RNA, 19 nt, Artificial Sequence
  Description of Artificial Sequence: Synthetic oligonucleotide
  Sense strand starting at position 2518 of SEQ ID NO: 1564430
aauguuccuguggagagau

SEQ ID NO: 1877082 - RNA, 19 nt, Artificial Sequence
  Description of Artificial Sequence: Synthetic oligonucleotide
  Antisense strand to SEQ ID NO: 1877081
aucucuccacaggaacauu

SEQ ID NO: 1877083 - RNA, 19 nt, Artificial Sequence
  Description of Artificial Sequence: Synthetic oligonucleotide
  Sense strand starting at position 2764 of SEQ ID NO: 1564430
ggauaauaauaugcgaaag

SEQ ID NO: 1877084 - RNA, 19 nt, Artificial Sequence
  Description of Artificial Sequence: Synthetic oligonucleotide
  Antisense strand to SEQ ID NO: 1877083
cuuucgcauauuauuaucc

SEQ ID NO: 1877085 - RNA, 19 nt, Artificial Sequence
  Description of Artificial Sequence: Synthetic oligonucleotide
  Sense strand starting at position 2774 of SEQ ID NO: 1564430
augcgaaagacacgucuua

SEQ ID NO: 1877086 - RNA, 19 nt, Artificial Sequence
  Description of Artificial Sequence: Synthetic oligonucleotide
  Antisense strand to SEQ ID NO: 1877085
uaagacgugucuuucgcau

SEQ ID NO: 1877087 - RNA, 19 nt, Artificial Sequence
  Description of Artificial Sequence: Synthetic oligonucleotide
  Sense strand starting at position 2802 of SEQ ID NO: 1564430
cuaccuuagcuguggaaga

SEQ ID NO: 1877088 - RNA, 19 nt, Artificial Sequence
  Description of Artificial Sequence: Synthetic oligonucleotide
  Antisense strand to SEQ ID NO: 1877087
ucuuccacagcuaagguag

SEQ ID NO: 1877089 - RNA, 19 nt, Artificial Sequence
  Description of Artificial Sequence: Synthetic oligonucleotide
  Sense strand starting at position 3225 of SEQ ID NO: 1564430
gccaauagaucuccagagu

SEQ ID NO: 1877090 - RNA, 19 nt, Artificial Sequence
  Description of Artificial Sequence: Synthetic oligonucleotide
  Antisense strand to SEQ ID NO: 1877089
acucuggagaucuauuggc

SEQ ID NO: 1877091 - RNA, 19 nt, Artificial Sequence
  Description of Artificial Sequence: Synthetic oligonucleotide
  Sense strand starting at position 3228 of SEQ ID NO: 1564430
aauagaucuccagagucgu

SEQ ID NO: 1877092 - RNA, 19 nt, Artificial Sequence
  Description of Artificial Sequence: Synthetic oligonucleotide
  Antisense strand to SEQ ID NO: 1877091
acgacucuggagaucuauu

SEQ ID NO: 1877093 - RNA, 19 nt, Artificial Sequence
  Description of Artificial Sequence: Synthetic oligonucleotide
  Sense strand starting at position 3234 of SEQ ID NO: 1564430
ucuccagagucgucccaau

SEQ ID NO: 1877094 - RNA, 19 nt, Artificial Sequence
  Description of Artificial Sequence: Synthetic oligonucleotide
  Antisense strand to SEQ ID NO: 1877093
auugggacgacucuggaga

SEQ ID NO: 1877095 - RNA, 19 nt, Artificial Sequence
  Description of Artificial Sequence: Synthetic oligonucleotide
  Sense strand starting at position 3327 of SEQ ID NO: 1564430
gagagauccugggaacccu

SEQ ID NO: 1877096 - RNA, 19 nt, Artificial Sequence
  Description of Artificial Sequence: Synthetic oligonucleotide
  Antisense strand to SEQ ID NO: 1877095
aggguucccaggaucucuc

SEQ ID NO: 1877097 - RNA, 19 nt, Artificial Sequence
  Description of Artificial Sequence: Synthetic oligonucleotide
  Sense strand starting at position 3439 of SEQ ID NO: 1564430
gucguauaugcagacaucu

SEQ ID NO: 1877098 - RNA, 19 nt, Artificial Sequence
  Description of Artificial Sequence: Synthetic oligonucleotide
  Antisense strand to SEQ ID NO: 1877097
agaugucugcauauacgac

SEQ ID NO: 1877099 - RNA, 19 nt, Artificial Sequence
  Description of Artificial Sequence: Synthetic oligonucleotide
  Sense strand starting at position 3447 of SEQ ID NO: 1564430
ugcagacaucuuuaacugu

SEQ ID NO: 1877100 - RNA, 19 nt, Artificial Sequence
  Description of Artificial Sequence: Synthetic oligonucleotide
  Antisense strand to SEQ ID NO: 1877099
acaguuaaagaugucugca

SEQ ID NO: 1877101 - RNA, 19 nt, Artificial Sequence
  Description of Artificial Sequence: Synthetic oligonucleotide
  Sense strand starting at position 3454 of SEQ ID NO: 1564430
aucuuuaacuguuuaaggu

SEQ ID NO: 1877102 - RNA, 19 nt, Artificial Sequence
  Description of Artificial Sequence: Synthetic oligonucleotide
  Antisense strand to SEQ ID NO: 1877101
accuuaaacaguuaaagau

SEQ ID NO: 1877103 - RNA, 19 nt, Artificial Sequence
  Description of Artificial Sequence: Synthetic oligonucleotide
  Sense strand starting at position 3505 of SEQ ID NO: 1564430
uugugagucaauugggaag

SEQ ID NO: 1877104 - RNA, 19 nt, Artificial Sequence
  Description of Artificial Sequence: Synthetic oligonucleotide
  Antisense strand to SEQ ID NO: 1877103
cuucccaauugacucacaa

SEQ ID NO: 1877105 - RNA, 19 nt, Artificial Sequence
  Description of Artificial Sequence: Synthetic oligonucleotide
  Sense strand starting at position 3562 of SEQ ID NO: 1564430
ggaauacagcucuguaaag

SEQ ID NO: 1877106 - RNA, 19 nt, Artificial Sequence
  Description of Artificial Sequence: Synthetic oligonucleotide
  Antisense strand to SEQ ID NO: 1877105
cuuuacagagcuguauucc

SEQ ID NO: 1877107 - RNA, 19 nt, Artificial Sequence
  Description of Artificial Sequence: Synthetic oligonucleotide
  Sense strand starting at position 3563 of SEQ ID NO: 1564430
gaauacagcucuguaaagu

SEQ ID NO: 1877108 - RNA, 19 nt, Artificial Sequence
  Description of Artificial Sequence: Synthetic oligonucleotide
  Antisense strand to SEQ ID NO: 1877107
acuuuacagagcuguauuc

SEQ ID NO: 1877109 - RNA, 19 nt, Artificial Sequence
  Description of Artificial Sequence: Synthetic oligonucleotide
  Sense strand starting at position 3599 of SEQ ID NO: 1564430
cgagguuaugguugaaaga

SEQ ID NO: 1877110 - RNA, 19 nt, Artificial Sequence
  Description of Artificial Sequence: Synthetic oligonucleotide
  Antisense strand to SEQ ID NO: 1877109
ucuuucaaccauaaccucg

SEQ ID NO: 1877111 - RNA, 19 nt, Artificial Sequence
  Description of Artificial Sequence: Synthetic oligonucleotide
  Sense strand starting at position 3602 of SEQ ID NO: 1564430
gguuaugguugaaagagga

SEQ ID NO: 1877112 - RNA, 19 nt, Artificial Sequence
  Description of Artificial Sequence: Synthetic oligonucleotide
  Antisense strand to SEQ ID NO: 1877111
uccucuuucaaccauaacc

SEQ ID NO: 1877113 - RNA, 19 nt, Artificial Sequence
  Description of Artificial Sequence: Synthetic oligonucleotide
  Sense strand starting at position 3696 of SEQ ID NO: 1564430
agaggcaguuguuucuaaa

SEQ ID NO: 1877114 - RNA, 19 nt, Artificial Sequence
  Description of Artificial Sequence: Synthetic oligonucleotide
  Antisense strand to SEQ ID NO: 1877113
uuuagaaacaacugccucu

SEQ ID NO: 1877115 - RNA, 19 nt, Artificial Sequence
  Description of Artificial Sequence: Synthetic oligonucleotide
  Sense strand starting at position 3731 of SEQ ID NO: 1564430
gguccaggagguuaucuuu

SEQ ID NO: 1877116 - RNA, 19 nt, Artificial Sequence
  Description of Artificial Sequence: Synthetic oligonucleotide
  Antisense strand to SEQ ID NO: 1877115
aaagauaaccuccuggacc

SEQ ID NO: 1877117 - RNA, 19 nt, Artificial Sequence
  Description of Artificial Sequence: Synthetic oligonucleotide
  Sense strand starting at position 3739 of SEQ ID NO: 1564430
agguuaucuuucccaggga

SEQ ID NO: 1877118 - RNA, 19 nt, Artificial Sequence
  Description of Artificial Sequence: Synthetic oligonucleotide
  Antisense strand to SEQ ID NO: 1877117
ucccugggaaagauaaccu

SEQ ID NO: 1877119 - RNA, 19 nt, Artificial Sequence
  Description of Artificial Sequence: Synthetic oligonucleotide
  Sense strand starting at position 3742 of SEQ ID NO: 1564430
uuaucuuucccagggaguu

SEQ ID NO: 1877120 - RNA, 19 nt, Artificial Sequence
  Description of Artificial Sequence: Synthetic oligonucleotide
  Antisense strand to SEQ ID NO: 1877119
aacucccugggaaagauaa

SEQ ID NO: 1877121 - RNA, 19 nt, Artificial Sequence
  Description of Artificial Sequence: Synthetic oligonucleotide
  Sense strand starting at position 3743 of SEQ ID NO: 1564430
uaucuuucccagggaguuu

SEQ ID NO: 1877122 - RNA, 19 nt, Artificial Sequence
  Description of Artificial Sequence: Synthetic oligonucleotide
  Antisense strand to SEQ ID NO: 1877121
aaacucccugggaaagaua

SEQ ID NO: 1877123 - RNA, 19 nt, Artificial Sequence
  Description of Artificial Sequence: Synthetic oligonucleotide
  Sense strand starting at position 3814 of SEQ ID NO: 1564430
uggagaaaguuggcuugaa

SEQ ID NO: 1877124 - RNA, 19 nt, Artificial Sequence
  Description of Artificial Sequence: Synthetic oligonucleotide
  Antisense strand to SEQ ID NO: 1877123
uucaagccaacuuucucca

SEQ ID NO: 1877125 - RNA, 19 nt, Artificial Sequence
  Description of Artificial Sequence: Synthetic oligonucleotide
  Sense strand starting at position 3815 of SEQ ID NO: 1564430
ggagaaaguuggcuugaaa

SEQ ID NO: 1877126 - RNA, 19 nt, Artificial Sequence
  Description of Artificial Sequence: Synthetic oligonucleotide
  Antisense strand to SEQ ID NO: 1877125
uuucaagccaacuuucucc

SEQ ID NO: 1877127 - RNA, 19 nt, Artificial Sequence
  Description of Artificial Sequence: Synthetic oligonucleotide
  Sense strand starting at position 3829 of SEQ ID NO: 1564430
ugaaauugacaaugcuuaa

SEQ ID NO: 1877128 - RNA, 19 nt, Artificial Sequence
  Description of Artificial Sequence: Synthetic oligonucleotide
  Antisense strand to SEQ ID NO: 1877127
uuaagcauugucaauuuca

SEQ ID NO: 1877129 - RNA, 19 nt, Artificial Sequence
  Description of Artificial Sequence: Synthetic oligonucleotide
  Sense strand starting at position 3833 of SEQ ID NO: 1564430
auugacaaugcuuaaaguu

SEQ ID NO: 1877130 - RNA, 19 nt, Artificial Sequence
  Description of Artificial Sequence: Synthetic oligonucleotide
  Antisense strand to SEQ ID NO: 1877129
aacuuuaagcauugucaau

SEQ ID NO: 1877131 - RNA, 19 nt, Artificial Sequence
  Description of Artificial Sequence: Synthetic oligonucleotide
  Sense strand starting at position 3841 of SEQ ID NO: 1564430
ugcuuaaaguucccaguau

SEQ ID NO: 1877132 - RNA, 19 nt, Artificial Sequence
  Description of Artificial Sequence: Synthetic oligonucleotide
  Antisense strand to SEQ ID NO: 1877131
auacugggaacuuuaagca

SEQ ID NO: 1877133 - RNA, 19 nt, Artificial Sequence
  Description of Artificial Sequence: Synthetic oligonucleotide
  Sense strand starting at position 3872 of SEQ ID NO: 1564430
ucaagaaaguuggauuuaa

SEQ ID NO: 1877134 - RNA, 19 nt, Artificial Sequence
  Description of Artificial Sequence: Synthetic oligonucleotide
  Antisense strand to SEQ ID NO: 1877133
uuaaauccaacuuucuuga

SEQ ID NO: 1877135 - RNA, 19 nt, Artificial Sequence
  Description of Artificial Sequence: Synthetic oligonucleotide
  Sense strand starting at position 3951 of SEQ ID NO: 1564430
aaaugagauugcuuggguu

SEQ ID NO: 1877136 - RNA, 19 nt, Artificial Sequence
  Description of Artificial Sequence: Synthetic oligonucleotide
  Antisense strand to SEQ ID NO: 1877135
aacccaagcaaucucauuu

SEQ ID NO: 1877137 - RNA, 19 nt, Artificial Sequence
  Description of Artificial Sequence: Synthetic oligonucleotide
  Sense strand starting at position 3953 of SEQ ID NO: 1564430
augagauugcuuggguuua

SEQ ID NO: 1877138 - RNA, 19 nt, Artificial Sequence
  Description of Artificial Sequence: Synthetic oligonucleotide
  Antisense strand to SEQ ID NO: 1877137
uaaacccaagcaaucucau

SEQ ID NO: 1877139 - RNA, 19 nt, Artificial Sequence
  Description of Artificial Sequence: Synthetic oligonucleotide
  Sense strand starting at position 3955 of SEQ ID NO: 1564430
gagauugcuuggguuuaag

SEQ ID NO: 1877140 - RNA, 19 nt, Artificial Sequence
  Description of Artificial Sequence: Synthetic oligonucleotide
  Antisense strand to SEQ ID NO: 1877139
cuuaaacccaagcaaucuc

SEQ ID NO: 1877141 - RNA, 19 nt, Artificial Sequence
  Description of Artificial Sequence: Synthetic oligonucleotide
  Sense strand starting at position 136 of SEQ ID NO: 1564432
guuuguuguugagcuuuaa

SEQ ID NO: 1877142 - RNA, 19 nt, Artificial Sequence
  Description of Artificial Sequence: Synthetic oligonucleotide
  Antisense strand to SEQ ID NO: 1877141
uuaaagcucaacaacaaac

SEQ ID NO: 1877143 - RNA, 19 nt, Artificial Sequence
  Description of Artificial Sequence: Synthetic oligonucleotide
  Sense strand starting at position 140 of SEQ ID NO: 1564432
guuguugagcuuuaauucu

SEQ ID NO: 1877144 - RNA, 19 nt, Artificial Sequence
  Description of Artificial Sequence: Synthetic oligonucleotide
  Antisense strand to SEQ ID NO: 1877143
agaauuaaagcucaacaac

SEQ ID NO: 1877145 - RNA, 19 nt, Artificial Sequence
  Description of Artificial Sequence: Synthetic oligonucleotide
  Sense strand starting at position 435 of SEQ ID NO: 1564432
ggcuguacacucugagaaa

SEQ ID NO: 1877146 - RNA, 19 nt, Artificial Sequence
  Description of Artificial Sequence: Synthetic oligonucleotide
  Antisense strand to SEQ ID NO: 1877145
uuucucagaguguacagcc

SEQ ID NO: 1877147 - RNA, 19 nt, Artificial Sequence
  Description of Artificial Sequence: Synthetic oligonucleotide
  Sense strand starting at position 436 of SEQ ID NO: 1564432
gcuguacacucugagaaag

SEQ ID NO: 1877148 - RNA, 19 nt, Artificial Sequence
  Description of Artificial Sequence: Synthetic oligonucleotide
  Antisense strand to SEQ ID NO: 1877147
cuuucucagaguguacagc

SEQ ID NO: 1877149 - RNA, 19 nt, Artificial Sequence
  Description of Artificial Sequence: Synthetic oligonucleotide
  Sense strand starting at position 624 of SEQ ID NO: 1564432
guacauuacuuuccucgaa

SEQ ID NO: 1877150 - RNA, 19 nt, Artificial Sequence
  Description of Artificial Sequence: Synthetic oligonucleotide
  Antisense strand to SEQ ID NO: 1877149
uucgaggaaaguaauguac

SEQ ID NO: 1877151 - RNA, 19 nt, Artificial Sequence
  Description of Artificial Sequence: Synthetic oligonucleotide
  Sense strand starting at position 734 of SEQ ID NO: 1564432
accaucuauuuaugggaua

SEQ ID NO: 1877152 - RNA, 19 nt, Artificial Sequence
  Description of Artificial Sequence: Synthetic oligonucleotide
  Antisense strand to SEQ ID NO: 1877151
uaucccauaaauagauggu

SEQ ID NO: 1877153 - RNA, 19 nt, Artificial Sequence
  Description of Artificial Sequence: Synthetic oligonucleotide
  Sense strand starting at position 737 of SEQ ID NO: 1564432
aucuauuuaugggauaggu

SEQ ID NO: 1877154 - RNA, 19 nt, Artificial Sequence
  Description of Artificial Sequence: Synthetic oligonucleotide
  Antisense strand to SEQ ID NO: 1877153
accuaucccauaaauagau

SEQ ID NO: 1877155 - RNA, 19 nt, Artificial Sequence
  Description of Artificial Sequence: Synthetic oligonucleotide
  Sense strand starting at position 2567 of SEQ ID NO: 1564432
gucacaguuugagcugaga

SEQ ID NO: 1877156 - RNA, 19 nt, Artificial Sequence
  Description of Artificial Sequence: Synthetic oligonucleotide
  Antisense strand to SEQ ID NO: 1877155
ucucagcucaaacugugac

SEQ ID NO: 1877157 - RNA, 19 nt, Artificial Sequence
  Description of Artificial Sequence: Synthetic oligonucleotide
  Sense strand starting at position 3229 of SEQ ID NO: 1564432
cugugcuuauccuguagaa

SEQ ID NO: 1877158 - RNA, 19 nt, Artificial Sequence
  Description of Artificial Sequence: Synthetic oligonucleotide
  Antisense strand to SEQ ID NO: 1877157
uucuacaggauaagcacag

SEQ ID NO: 1877159 - RNA, 19 nt, Artificial Sequence
  Description of Artificial Sequence: Synthetic oligonucleotide
  Sense strand starting at position 3268 of SEQ ID NO: 1564432
gugcaauuauuugaaagua

SEQ ID NO: 1877160 - RNA, 19 nt, Artificial Sequence
  Description of Artificial Sequence: Synthetic oligonucleotide
  Antisense strand to SEQ ID NO: 1877159
uacuuucaaauaauugcac

SEQ ID NO: 1877161 - RNA, 19 nt, Artificial Sequence
  Description of Artificial Sequence: Synthetic oligonucleotide
  Sense strand starting at position 3497 of SEQ ID NO: 1564432
ggcaaauccuuaugacuua

SEQ ID NO: 1877162 - RNA, 19 nt, Artificial Sequence
  Description of Artificial Sequence: Synthetic oligonucleotide
  Antisense strand to SEQ ID NO: 1877161
uaagucauaaggauuugcc

SEQ ID NO: 1877163 - RNA, 19 nt, Artificial Sequence
  Description of Artificial Sequence: Synthetic oligonucleotide
  Sense strand starting at position 3803 of SEQ ID NO: 1564432
guacucuucuugggagcua

SEQ ID NO: 1877164 - RNA, 19 nt, Artificial Sequence
  Description of Artificial Sequence: Synthetic oligonucleotide
  Antisense strand to SEQ ID NO: 1877163
uagcucccaagaagaguac

SEQ ID NO: 1877165 - RNA, 19 nt, Artificial Sequence
  Description of Artificial Sequence: Synthetic oligonucleotide
  Sense strand starting at position 3882 of SEQ ID NO: 1564432
auugcaauacuguaugaga

SEQ ID NO: 1877166 - RNA, 19 nt, Artificial Sequence
  Description of Artificial Sequence: Synthetic oligonucleotide
  Antisense strand to SEQ ID NO: 1877165
ucucauacaguauugcaau

SEQ ID NO: 1877167 - RNA, 19 nt, Artificial Sequence
  Description of Artificial Sequence: Synthetic oligonucleotide
  Sense strand starting at position 3884 of SEQ ID NO: 1564432
ugcaauacuguaugagacu

SEQ ID NO: 1877168 - RNA, 19 nt, Artificial Sequence
  Description of Artificial Sequence: Synthetic oligonucleotide
  Antisense strand to SEQ ID NO: 1877167
agucucauacaguauugca

SEQ ID NO: 1877169 - RNA, 19 nt, Artificial Sequence
  Description of Artificial Sequence: Synthetic oligonucleotide
  Sense strand starting at position 3890 of SEQ ID NO: 1564432
acuguaugagacuguguca

SEQ ID NO: 1877170 - RNA, 19 nt, Artificial Sequence
  Description of Artificial Sequence: Synthetic oligonucleotide
  Antisense strand to SEQ ID NO: 1877169
ugacacagucucauacagu

SEQ ID NO: 1877171 - RNA, 19 nt, Artificial Sequence
  Description of Artificial Sequence: Synthetic oligonucleotide
  Sense strand starting at position 371 of SEQ ID NO: 1564433
ggcuaaccuccuugucuga

SEQ ID NO: 1877172 - RNA, 19 nt, Artificial Sequence
  Description of Artificial Sequence: Synthetic oligonucleotide
  Antisense strand to SEQ ID NO: 1877171
ucagacaaggagguuagcc

SEQ ID NO: 1877173 - RNA, 19 nt, Artificial Sequence
  Description of Artificial Sequence: Synthetic oligonucleotide
  Sense strand starting at position 2495 of SEQ ID NO: 1564433
gcuucuucuggauaguacu

SEQ ID NO: 1877174 - RNA, 19 nt, Artificial Sequence
  Description of Artificial Sequence: Synthetic oligonucleotide
  Antisense strand to SEQ ID NO: 1877173
aguacuauccagaagaagc

SEQ ID NO: 1877175 - RNA, 19 nt, Artificial Sequence
  Description of Artificial Sequence: Synthetic oligonucleotide
  Sense strand starting at position 2501 of SEQ ID NO: 1564433
ucuggauaguacuuguaga

SEQ ID NO: 1877176 - RNA, 19 nt, Artificial Sequence
  Description of Artificial Sequence: Synthetic oligonucleotide
  Antisense strand to SEQ ID NO: 1877175
ucuacaaguacuauccaga

SEQ ID NO: 1877177 - RNA, 19 nt, Artificial Sequence
  Description of Artificial Sequence: Synthetic oligonucleotide
  Sense strand starting at position 2502 of SEQ ID NO: 1564433
cuggauaguacuuguagau

SEQ ID NO: 1877178 - RNA, 19 nt, Artificial Sequence
  Description of Artificial Sequence: Synthetic oligonucleotide
  Antisense strand to SEQ ID NO: 1877177
aucuacaaguacuauccag

SEQ ID NO: 1877179 - RNA, 19 nt, Artificial Sequence
  Description of Artificial Sequence: Synthetic oligonucleotide
  Sense strand starting at position 2509 of SEQ ID NO: 1564433
guacuuguagaugauauau

SEQ ID NO: 1877180 - RNA, 19 nt, Artificial Sequence
  Description of Artificial Sequence: Synthetic oligonucleotide
  Antisense strand to SEQ ID NO: 1877179
auauaucaucuacaaguac

SEQ ID NO: 1877181 - RNA, 19 nt, Artificial Sequence
  Description of Artificial Sequence: Synthetic oligonucleotide
  Sense strand starting at position 2645 of SEQ ID NO: 1564433
guguucaggugguuauuua

SEQ ID NO: 1877182 - RNA, 19 nt, Artificial Sequence
  Description of Artificial Sequence: Synthetic oligonucleotide
  Antisense strand to SEQ ID NO: 1877181
uaaauaaccaccugaacac

SEQ ID NO: 1877183 - RNA, 19 nt, Artificial Sequence
  Description of Artificial Sequence: Synthetic oligonucleotide
  Sense strand starting at position 2690 of SEQ ID NO: 1564433
gcauauagguaaccaauua

SEQ ID NO: 1877184 - RNA, 19 nt, Artificial Sequence
  Description of Artificial Sequence: Synthetic oligonucleotide
  Antisense strand to SEQ ID NO: 1877183
uaauugguuaccuauaugc

SEQ ID NO: 1877185 - RNA, 19 nt, Artificial Sequence
  Description of Artificial Sequence: Synthetic oligonucleotide
  Sense strand starting at position 2991 of SEQ ID NO: 1564433
gauaguuuaggucagcagu

SEQ ID NO: 1877186 - RNA, 19 nt, Artificial Sequence
  Description of Artificial Sequence: Synthetic oligonucleotide
  Antisense strand to SEQ ID NO: 1877185
acugcugaccuaaacuauc

SEQ ID NO: 1877187 - RNA, 19 nt, Artificial Sequence
  Description of Artificial Sequence: Synthetic oligonucleotide
  Sense strand starting at position 2994 of SEQ ID NO: 1564433
aguuuaggucagcaguaga

SEQ ID NO: 1877188 - RNA, 19 nt, Artificial Sequence
  Description of Artificial Sequence: Synthetic oligonucleotide
  Antisense strand to SEQ ID NO: 1877187
ucuacugcugaccuaaacu

SEQ ID NO: 1877189 - RNA, 19 nt, Artificial Sequence
  Description of Artificial Sequence: Synthetic oligonucleotide
  Sense strand starting at position 3088 of SEQ ID NO: 1564433
agcaguugguaucauauau

SEQ ID NO: 1877190 - RNA, 19 nt, Artificial Sequence
  Description of Artificial Sequence: Synthetic oligonucleotide
  Antisense strand to SEQ ID NO: 1877189
auauaugauaccaacugcu

SEQ ID NO: 1877191 - RNA, 19 nt, Artificial Sequence
  Description of Artificial Sequence: Synthetic oligonucleotide
  Sense strand starting at position 3128 of SEQ ID NO: 1564433
ugaguaaugcuagagguga

SEQ ID NO: 1877192 - RNA, 19 nt, Artificial Sequence
  Description of Artificial Sequence: Synthetic oligonucleotide
  Antisense strand to SEQ ID NO: 1877191
ucaccucuagcauuacuca

SEQ ID NO: 1877193 - RNA, 19 nt, Artificial Sequence
  Description of Artificial Sequence: Synthetic oligonucleotide
  Sense strand starting at position 3348 of SEQ ID NO: 1564433
acacauauauguguucuau

SEQ ID NO: 1877194 - RNA, 19 nt, Artificial Sequence
  Description of Artificial Sequence: Synthetic oligonucleotide
  Antisense strand to SEQ ID NO: 1877193
auagaacacauauaugugu

SEQ ID NO: 1877195 - RNA, 19 nt, Artificial Sequence
  Description of Artificial Sequence: Synthetic oligonucleotide
  Sense strand starting at position 3359 of SEQ ID NO: 1564433
uguucuauaugcugugaau

SEQ ID NO: 1877196 - RNA, 19 nt, Artificial Sequence
  Description of Artificial Sequence: Synthetic oligonucleotide
  Antisense strand to SEQ ID NO: 1877195
auucacagcauauagaaca

SEQ ID NO: 1877197 - RNA, 19 nt, Artificial Sequence
  Description of Artificial Sequence: Synthetic oligonucleotide
  Sense strand starting at position 3379 of SEQ ID NO: 1564433
uagcauaucuaagacguuu

SEQ ID NO: 1877198 - RNA, 19 nt, Artificial Sequence
  Description of Artificial Sequence: Synthetic oligonucleotide
  Antisense strand to SEQ ID NO: 1877197
aaacgucuuagauaugcua

SEQ ID NO: 1877199 - RNA, 19 nt, Artificial Sequence
  Description of Artificial Sequence: Synthetic oligonucleotide
  Sense strand starting at position 3396 of SEQ ID NO: 1564433
uuuggaugcuuaugugauu

SEQ ID NO: 1877200 - RNA, 19 nt, Artificial Sequence
  Description of Artificial Sequence: Synthetic oligonucleotide
  Antisense strand to SEQ ID NO: 1877199
aaucacauaagcauccaaa

SEQ ID NO: 1877201 - RNA, 19 nt, Artificial Sequence
  Description of Artificial Sequence: Synthetic oligonucleotide
  Sense strand starting at position 3939 of SEQ ID NO: 1564433
uuaauagagugaucuaguu

SEQ ID NO: 1877202 - RNA, 19 nt, Artificial Sequence
  Description of Artificial Sequence: Synthetic oligonucleotide
  Antisense strand to SEQ ID NO: 1877201
aacuagaucacucuauuaa

SEQ ID NO: 1877203 - RNA, 19 nt, Artificial Sequence
  Description of Artificial Sequence: Synthetic oligonucleotide
  Sense strand starting at position 3947 of SEQ ID NO: 1564433
gugaucuaguuccaagaag

SEQ ID NO: 1877204 - RNA, 19 nt, Artificial Sequence
  Description of Artificial Sequence: Synthetic oligonucleotide
  Antisense strand to SEQ ID NO: 1877203
cuucuuggaacuagaucac

SEQ ID NO: 1877205 - RNA, 19 nt, Artificial Sequence
  Description of Artificial Sequence: Synthetic oligonucleotide
  Sense strand starting at position 26 of SEQ ID NO: 1564436
cucaguuaggcucaacuaa

SEQ ID NO: 1877206 - RNA, 19 nt, Artificial Sequence
  Description of Artificial Sequence: Synthetic oligonucleotide
  Antisense strand to SEQ ID NO: 1877205
uuaguugagccuaacugag

SEQ ID NO: 1877207 - RNA, 19 nt, Artificial Sequence
  Description of Artificial Sequence: Synthetic oligonucleotide
  Sense strand starting at position 88 of SEQ ID NO: 1564436
aggucuacguccuucuaga

SEQ ID NO: 1877208 - RNA, 19 nt, Artificial Sequence
  Description of Artificial Sequence: Synthetic oligonucleotide
  Antisense strand to SEQ ID NO: 1877207
ucuagaaggacguagaccu

SEQ ID NO: 1877209 - RNA, 19 nt, Artificial Sequence
  Description of Artificial Sequence: Synthetic oligonucleotide
  Sense strand starting at position 340 of SEQ ID NO: 1564436
ugcaacauacuuugguaaa

SEQ ID NO: 1877210 - RNA, 19 nt, Artificial Sequence
  Description of Artificial Sequence: Synthetic oligonucleotide
  Antisense strand to SEQ ID NO: 1877209
uuuaccaaaguauguugca

SEQ ID NO: 1877211 - RNA, 19 nt, Artificial Sequence
  Description of Artificial Sequence: Synthetic oligonucleotide
  Sense strand starting at position 401 of SEQ ID NO: 1564436
ucaauuaaauggcaaggaa

SEQ ID NO: 1877212 - RNA, 19 nt, Artificial Sequence
  Description of Artificial Sequence: Synthetic oligonucleotide
  Antisense strand to SEQ ID NO: 1877211
uuccuugccauuuaauuga

SEQ ID NO: 1877213 - RNA, 19 nt, Artificial Sequence
  Description of Artificial Sequence: Synthetic oligonucleotide
  Sense strand starting at position 440 of SEQ ID NO: 1564436
aagcaauguggcugagcau

SEQ ID NO: 1877214 - RNA, 19 nt, Artificial Sequence
  Description of Artificial Sequence: Synthetic oligonucleotide
  Antisense strand to SEQ ID NO: 1877213
augcucagccacauugcuu

SEQ ID NO: 1877215 - RNA, 19 nt, Artificial Sequence
  Description of Artificial Sequence: Synthetic oligonucleotide
  Sense strand starting at position 441 of SEQ ID NO: 1564436
agcaauguggcugagcauu

SEQ ID NO: 1877216 - RNA, 19 nt, Artificial Sequence
  Description of Artificial Sequence: Synthetic oligonucleotide
  Antisense strand to SEQ ID NO: 1877215
aaugcucagccacauugcu

SEQ ID NO: 1877217 - RNA, 19 nt, Artificial Sequence
  Description of Artificial Sequence: Synthetic oligonucleotide
  Sense strand starting at position 443 of SEQ ID NO: 1564436
caauguggcugagcauuaa

SEQ ID NO: 1877218 - RNA, 19 nt, Artificial Sequence
  Description of Artificial Sequence: Synthetic oligonucleotide
  Antisense strand to SEQ ID NO: 1877217
uuaaugcucagccacauug

SEQ ID NO: 1877219 - RNA, 19 nt, Artificial Sequence
  Description of Artificial Sequence: Synthetic oligonucleotide
  Sense strand starting at position 496 of SEQ ID NO: 1564436
cccucauaccagugugagu

SEQ ID NO: 1877220 - RNA, 19 nt, Artificial Sequence
  Description of Artificial Sequence: Synthetic oligonucleotide
  Antisense strand to SEQ ID NO: 1877219
acucacacugguaugaggg

SEQ ID NO: 1877221 - RNA, 19 nt, Artificial Sequence
  Description of Artificial Sequence: Synthetic oligonucleotide
  Sense strand starting at position 639 of SEQ ID NO: 1564436
gcucuugagcugggaaaca

SEQ ID NO: 1877222 - RNA, 19 nt, Artificial Sequence
  Description of Artificial Sequence: Synthetic oligonucleotide
  Antisense strand to SEQ ID NO: 1877221
uguuucccagcucaagagc

SEQ ID NO: 1877223 - RNA, 19 nt, Artificial Sequence
  Description of Artificial Sequence: Synthetic oligonucleotide
  Sense strand starting at position 806 of SEQ ID NO: 1564436
aaaugacauucggagggaa

SEQ ID NO: 1877224 - RNA, 19 nt, Artificial Sequence
  Description of Artificial Sequence: Synthetic oligonucleotide
  Antisense strand to SEQ ID NO: 1877223
uucccuccgaaugucauuu

SEQ ID NO: 1877225 - RNA, 19 nt, Artificial Sequence
  Description of Artificial Sequence: Synthetic oligonucleotide
  Sense strand starting at position 906 of SEQ ID NO: 1564436
ugggauucguugucuggga

SEQ ID NO: 1877226 - RNA, 19 nt, Artificial Sequence
  Description of Artificial Sequence: Synthetic oligonucleotide
  Antisense strand to SEQ ID NO: 1877225
ucccagacaacgaauccca

SEQ ID NO: 1877227 - RNA, 19 nt, Artificial Sequence
  Description of Artificial Sequence: Synthetic oligonucleotide
  Sense strand starting at position 907 of SEQ ID NO: 1564436
gggauucguugucugggaa

SEQ ID NO: 1877228 - RNA, 19 nt, Artificial Sequence
  Description of Artificial Sequence: Synthetic oligonucleotide
  Antisense strand to SEQ ID NO: 1877227
uucccagacaacgaauccc

SEQ ID NO: 1877229 - RNA, 19 nt, Artificial Sequence
  Description of Artificial Sequence: Synthetic oligonucleotide
  Sense strand starting at position 908 of SEQ ID NO: 1564436
ggauucguugucugggaau

SEQ ID NO: 1877230 - RNA, 19 nt, Artificial Sequence
  Description of Artificial Sequence: Synthetic oligonucleotide
  Antisense strand to SEQ ID NO: 1877229
auucccagacaacgaaucc

SEQ ID NO: 1877231 - RNA, 19 nt, Artificial Sequence
  Description of Artificial Sequence: Synthetic oligonucleotide
  Sense strand starting at position 1430 of SEQ ID NO: 1564436
cccggcauucuccgggaau

SEQ ID NO: 1877232 - RNA, 19 nt, Artificial Sequence
  Description of Artificial Sequence: Synthetic oligonucleotide
  Antisense strand to SEQ ID NO: 1877231
auucccggagaaugccggg

SEQ ID NO: 1877233 - RNA, 19 nt, Artificial Sequence
  Description of Artificial Sequence: Synthetic oligonucleotide
  Sense strand starting at position 1433 of SEQ ID NO: 1564436
ggcauucuccgggaauggu

SEQ ID NO: 1877234 - RNA, 19 nt, Artificial Sequence
  Description of Artificial Sequence: Synthetic oligonucleotide
  Antisense strand to SEQ ID NO: 1877233
accauucccggagaaugcc

SEQ ID NO: 1877235 - RNA, 19 nt, Artificial Sequence
  Description of Artificial Sequence: Synthetic oligonucleotide
  Sense strand starting at position 1442 of SEQ ID NO: 1564436
cgggaauggucccuggacu

SEQ ID NO: 1877236 - RNA, 19 nt, Artificial Sequence
  Description of Artificial Sequence: Synthetic oligonucleotide
  Antisense strand to SEQ ID NO: 1877235
aguccagggaccauucccg

SEQ ID NO: 1877237 - RNA, 19 nt, Artificial Sequence
  Description of Artificial Sequence: Synthetic oligonucleotide
  Sense strand starting at position 1443 of SEQ ID NO: 1564436
gggaauggucccuggacuc

SEQ ID NO: 1877238 - RNA, 19 nt, Artificial Sequence
  Description of Artificial Sequence: Synthetic oligonucleotide
  Antisense strand to SEQ ID NO: 1877237
gaguccagggaccauuccc

SEQ ID NO: 1877239 - RNA, 19 nt, Artificial Sequence
  Description of Artificial Sequence: Synthetic oligonucleotide
  Sense strand starting at position 1716 of SEQ ID NO: 1564436
gggagcugcuuccugaaca

SEQ ID NO: 1877240 - RNA, 19 nt, Artificial Sequence
  Description of Artificial Sequence: Synthetic oligonucleotide
  Antisense strand to SEQ ID NO: 1877239
uguucaggaagcagcuccc

SEQ ID NO: 1877241 - RNA, 19 nt, Artificial Sequence
  Description of Artificial Sequence: Synthetic oligonucleotide
  Sense strand starting at position 1791 of SEQ ID NO: 1564436
gauuucaaugugugucgga

SEQ ID NO: 1877242 - RNA, 19 nt, Artificial Sequence
  Description of Artificial Sequence: Synthetic oligonucleotide
  Antisense strand to SEQ ID NO: 1877241
uccgacacacauugaaauc

SEQ ID NO: 1877243 - RNA, 19 nt, Artificial Sequence
  Description of Artificial Sequence: Synthetic oligonucleotide
  Sense strand starting at position 1908 of SEQ ID NO: 1564436
ugguguuggcuguaagggu

SEQ ID NO: 1877244 - RNA, 19 nt, Artificial Sequence
  Description of Artificial Sequence: Synthetic oligonucleotide
  Antisense strand to SEQ ID NO: 1877243
acccuuacagccaacacca

SEQ ID NO: 1877245 - RNA, 19 nt, Artificial Sequence
  Description of Artificial Sequence: Synthetic oligonucleotide
  Sense strand starting at position 2160 of SEQ ID NO: 1564436
gagaguuauuuauacaugu

SEQ ID NO: 1877246 - RNA, 19 nt, Artificial Sequence
  Description of Artificial Sequence: Synthetic oligonucleotide
  Antisense strand to SEQ ID NO: 1877245
acauguauaaauaacucuc

SEQ ID NO: 1877247 - RNA, 19 nt, Artificial Sequence
  Description of Artificial Sequence: Synthetic oligonucleotide
  Sense strand starting at position 2571 of SEQ ID NO: 1564436
uggaaagacucauagaaau

SEQ ID NO: 1877248 - RNA, 19 nt, Artificial Sequence
  Description of Artificial Sequence: Synthetic oligonucleotide
  Antisense strand to SEQ ID NO: 1877247
auuucuaugagucuuucca

SEQ ID NO: 1877249 - RNA, 19 nt, Artificial Sequence
  Description of Artificial Sequence: Synthetic oligonucleotide
  Sense strand starting at position 2632 of SEQ ID NO: 1564436
gagucaugcuagccaugga

SEQ ID NO: 1877250 - RNA, 19 nt, Artificial Sequence
  Description of Artificial Sequence: Synthetic oligonucleotide
  Antisense strand to SEQ ID NO: 1877249
uccauggcuagcaugacuc

SEQ ID NO: 1877251 - RNA, 19 nt, Artificial Sequence
  Description of Artificial Sequence: Synthetic oligonucleotide
  Sense strand starting at position 2633 of SEQ ID NO: 1564436
agucaugcuagccauggaa

SEQ ID NO: 1877252 - RNA, 19 nt, Artificial Sequence
  Description of Artificial Sequence: Synthetic oligonucleotide
  Antisense strand to SEQ ID NO: 1877251
uuccauggcuagcaugacu

SEQ ID NO: 1877253 - RNA, 19 nt, Artificial Sequence
  Description of Artificial Sequence: Synthetic oligonucleotide
  Sense strand starting at position 2736 of SEQ ID NO: 1564436
ucauuuggcugagagacua

SEQ ID NO: 1877254 - RNA, 19 nt, Artificial Sequence
  Description of Artificial Sequence: Synthetic oligonucleotide
  Antisense strand to SEQ ID NO: 1877253
uagucucucagccaaauga

SEQ ID NO: 1877255 - RNA, 19 nt, Artificial Sequence
  Description of Artificial Sequence: Synthetic oligonucleotide
  Sense strand starting at position 2769 of SEQ ID NO: 1564436
gacugagaguuaguaaauu

SEQ ID NO: 1877256 - RNA, 19 nt, Artificial Sequence
  Description of Artificial Sequence: Synthetic oligonucleotide
  Antisense strand to SEQ ID NO: 1877255
aauuuacuaacucucaguc

SEQ ID NO: 1877257 - RNA, 19 nt, Artificial Sequence
  Description of Artificial Sequence: Synthetic oligonucleotide
  Sense strand starting at position 2861 of SEQ ID NO: 1564436
gucuacugauuugaauaau

SEQ ID NO: 1877258 - RNA, 19 nt, Artificial Sequence
  Description of Artificial Sequence: Synthetic oligonucleotide
  Antisense strand to SEQ ID NO: 1877257
auuauucaaaucaguagac

SEQ ID NO: 1877259 - RNA, 19 nt, Artificial Sequence
  Description of Artificial Sequence: Synthetic oligonucleotide
  Sense strand starting at position 2874 of SEQ ID NO: 1564436
aauaauuguggagagcuuu

SEQ ID NO: 1877260 - RNA, 19 nt, Artificial Sequence
  Description of Artificial Sequence: Synthetic oligonucleotide
  Antisense strand to SEQ ID NO: 1877259
aaagcucuccacaauuauu

SEQ ID NO: 1877261 - RNA, 19 nt, Artificial Sequence
  Description of Artificial Sequence: Synthetic oligonucleotide
  Sense strand starting at position 3058 of SEQ ID NO: 1564436
ggucaacucuggucugguu

SEQ ID NO: 1877262 - RNA, 19 nt, Artificial Sequence
  Description of Artificial Sequence: Synthetic oligonucleotide
  Antisense strand to SEQ ID NO: 1877261
aaccagaccagaguugacc

SEQ ID NO: 1877263 - RNA, 19 nt, Artificial Sequence
  Description of Artificial Sequence: Synthetic oligonucleotide
  Sense strand starting at position 3060 of SEQ ID NO: 1564436
ucaacucuggucugguuua

SEQ ID NO: 1877264 - RNA, 19 nt, Artificial Sequence
  Description of Artificial Sequence: Synthetic oligonucleotide
  Antisense strand to SEQ ID NO: 1877263
uaaaccagaccagaguuga

SEQ ID NO: 1877265 - RNA, 19 nt, Artificial Sequence
  Description of Artificial Sequence: Synthetic oligonucleotide
  Sense strand starting at position 3073 of SEQ ID NO: 1564436
gguuuaauucuaggcaacu

SEQ ID NO: 1877266 - RNA, 19 nt, Artificial Sequence
  Description of Artificial Sequence: Synthetic oligonucleotide
  Antisense strand to SEQ ID NO: 1877265
aguugccuagaauuaaacc

SEQ ID NO: 1877267 - RNA, 19 nt, Artificial Sequence
  Description of Artificial Sequence: Synthetic oligonucleotide
  Sense strand starting at position 3074 of SEQ ID NO: 1564436
guuuaauucuaggcaacug

SEQ ID NO: 1877268 - RNA, 19 nt, Artificial Sequence
  Description of Artificial Sequence: Synthetic oligonucleotide
  Antisense strand to SEQ ID NO: 1877267
caguugccuagaauuaaac

SEQ ID NO: 1877269 - RNA, 19 nt, Artificial Sequence
  Description of Artificial Sequence: Synthetic oligonucleotide
  Sense strand starting at position 3156 of SEQ ID NO: 1564436
gugucugugcguguauguu

SEQ ID NO: 1877270 - RNA, 19 nt, Artificial Sequence
  Description of Artificial Sequence: Synthetic oligonucleotide
  Antisense strand to SEQ ID NO: 1877269
aacauacacgcacagacac

SEQ ID NO: 1877271 - RNA, 19 nt, Artificial Sequence
  Description of Artificial Sequence: Synthetic oligonucleotide
  Sense strand starting at position 3350 of SEQ ID NO: 1564436
cagauuucuugaugucagg

SEQ ID NO: 1877272 - RNA, 19 nt, Artificial Sequence
  Description of Artificial Sequence: Synthetic oligonucleotide
  Antisense strand to SEQ ID NO: 1877271
ccugacaucaagaaaucug

SEQ ID NO: 1877273 - RNA, 19 nt, Artificial Sequence
  Description of Artificial Sequence: Synthetic oligonucleotide
  Sense strand starting at position 3353 of SEQ ID NO: 1564436
auuucuugaugucaggagu

SEQ ID NO: 1877274 - RNA, 19 nt, Artificial Sequence
  Description of Artificial Sequence: Synthetic oligonucleotide
  Antisense strand to SEQ ID NO: 1877273
acuccugacaucaagaaau

SEQ ID NO: 1877275 - RNA, 19 nt, Artificial Sequence
  Description of Artificial Sequence: Synthetic oligonucleotide
  Sense strand starting at position 3470 of SEQ ID NO: 1564436
gacagaguuugcccuguau

SEQ ID NO: 1877276 - RNA, 19 nt, Artificial Sequence
  Description of Artificial Sequence: Synthetic oligonucleotide
  Antisense strand to SEQ ID NO: 1877275
auacagggcaaacucuguc

SEQ ID NO: 1877277 - RNA, 19 nt, Artificial Sequence
  Description of Artificial Sequence: Synthetic oligonucleotide
  Sense strand starting at position 3472 of SEQ ID NO: 1564436
cagaguuugcccuguauua

SEQ ID NO: 1877278 - RNA, 19 nt, Artificial Sequence
  Description of Artificial Sequence: Synthetic oligonucleotide
  Antisense strand to SEQ ID NO: 1877277
uaauacagggcaaacucug

SEQ ID NO: 1877279 - RNA, 19 nt, Artificial Sequence
  Description of Artificial Sequence: Synthetic oligonucleotide
  Sense strand starting at position 3474 of SEQ ID NO: 1564436
gaguuugcccuguauuaag

SEQ ID NO: 1877280 - RNA, 19 nt, Artificial Sequence
  Description of Artificial Sequence: Synthetic oligonucleotide
  Antisense strand to SEQ ID NO: 1877279
cuuaauacagggcaaacuc

SEQ ID NO: 1877281 - RNA, 19 nt, Artificial Sequence
  Description of Artificial Sequence: Synthetic oligonucleotide
  Sense strand starting at position 3483 of SEQ ID NO: 1564436
cuguauuaagauuaugcca

SEQ ID NO: 1877282 - RNA, 19 nt, Artificial Sequence
  Description of Artificial Sequence: Synthetic oligonucleotide
  Antisense strand to SEQ ID NO: 1877281
uggcauaaucuuaauacag

SEQ ID NO: 1877283 - RNA, 19 nt, Artificial Sequence
  Description of Artificial Sequence: Synthetic oligonucleotide
  Sense strand starting at position 3754 of SEQ ID NO: 1564436
uagguaggauuagugucau

SEQ ID NO: 1877284 - RNA, 19 nt, Artificial Sequence
  Description of Artificial Sequence: Synthetic oligonucleotide
  Antisense strand to SEQ ID NO: 1877283
augacacuaauccuaccua

SEQ ID NO: 1877285 - RNA, 19 nt, Artificial Sequence
  Description of Artificial Sequence: Synthetic oligonucleotide
  Sense strand starting at position 117 of SEQ ID NO: 1564437
uuccauauggaugguugua

SEQ ID NO: 1877286 - RNA, 19 nt, Artificial Sequence
  Description of Artificial Sequence: Synthetic oligonucleotide
  Antisense strand to SEQ ID NO: 1877285
uacaaccauccauauggaa

SEQ ID NO: 1877287 - RNA, 19 nt, Artificial Sequence
  Description of Artificial Sequence: Synthetic oligonucleotide
  Sense strand starting at position 119 of SEQ ID NO: 1564437
ccauauggaugguuguaau

SEQ ID NO: 1877288 - RNA, 19 nt, Artificial Sequence
  Description of Artificial Sequence: Synthetic oligonucleotide
  Antisense strand to SEQ ID NO: 1877287
auuacaaccauccauaugg

SEQ ID NO: 1877289 - RNA, 19 nt, Artificial Sequence
  Description of Artificial Sequence: Synthetic oligonucleotide
  Sense strand starting at position 126 of SEQ ID NO: 1564437
gaugguuguaaugggaauu

SEQ ID NO: 1877290 - RNA, 19 nt, Artificial Sequence
  Description of Artificial Sequence: Synthetic oligonucleotide
  Antisense strand to SEQ ID NO: 1877289
aauucccauuacaaccauc

SEQ ID NO: 1877291 - RNA, 19 nt, Artificial Sequence
  Description of Artificial Sequence: Synthetic oligonucleotide
  Sense strand starting at position 159 of SEQ ID NO: 1564437
ucucauauugccuagucau

SEQ ID NO: 1877292 - RNA, 19 nt, Artificial Sequence
  Description of Artificial Sequence: Synthetic oligonucleotide
  Antisense strand to SEQ ID NO: 1877291
augacuaggcaauaugaga

SEQ ID NO: 1877293 - RNA, 19 nt, Artificial Sequence
  Description of Artificial Sequence: Synthetic oligonucleotide
  Sense strand starting at position 251 of SEQ ID NO: 1564437
aaacuucuaguguggaaga

SEQ ID NO: 1877294 - RNA, 19 nt, Artificial Sequence
  Description of Artificial Sequence: Synthetic oligonucleotide
  Antisense strand to SEQ ID NO: 1877293
ucuuccacacuagaaguuu

SEQ ID NO: 1877295 - RNA, 19 nt, Artificial Sequence
  Description of Artificial Sequence: Synthetic oligonucleotide
  Sense strand starting at position 376 of SEQ ID NO: 1564437
cucauuuggcuccgguuau

SEQ ID NO: 1877296 - RNA, 19 nt, Artificial Sequence
  Description of Artificial Sequence: Synthetic oligonucleotide
  Antisense strand to SEQ ID NO: 1877295
auaaccggagccaaaugag

SEQ ID NO: 1877297 - RNA, 19 nt, Artificial Sequence
  Description of Artificial Sequence: Synthetic oligonucleotide
  Sense strand starting at position 380 of SEQ ID NO: 1564437
uuuggcuccgguuaugaaa

SEQ ID NO: 1877298 - RNA, 19 nt, Artificial Sequence
  Description of Artificial Sequence: Synthetic oligonucleotide
  Antisense strand to SEQ ID NO: 1877297
uuucauaaccggagccaaa

SEQ ID NO: 1877299 - RNA, 19 nt, Artificial Sequence
  Description of Artificial Sequence: Synthetic oligonucleotide
  Sense strand starting at position 406 of SEQ ID NO: 1564437
cauugagaguucuccagau

SEQ ID NO: 1877300 - RNA, 19 nt, Artificial Sequence
  Description of Artificial Sequence: Synthetic oligonucleotide
  Antisense strand to SEQ ID NO: 1877299
aucuggagaacucucaaug

SEQ ID NO: 1877301 - RNA, 19 nt, Artificial Sequence
  Description of Artificial Sequence: Synthetic oligonucleotide
  Sense strand starting at position 487 of SEQ ID NO: 1564437
gaagcagauucugugucau

SEQ ID NO: 1877302 - RNA, 19 nt, Artificial Sequence
  Description of Artificial Sequence: Synthetic oligonucleotide
  Antisense strand to SEQ ID NO: 1877301
augacacagaaucugcuuc

SEQ ID NO: 1877303 - RNA, 19 nt, Artificial Sequence
  Description of Artificial Sequence: Synthetic oligonucleotide
  Sense strand starting at position 1002 of SEQ ID NO: 1564437
uggagugcauaaguaauau

SEQ ID NO: 1877304 - RNA, 19 nt, Artificial Sequence
  Description of Artificial Sequence: Synthetic oligonucleotide
  Antisense strand to SEQ ID NO: 1877303
auauuacuuaugcacucca

SEQ ID NO: 1877305 - RNA, 19 nt, Artificial Sequence
  Description of Artificial Sequence: Synthetic oligonucleotide
  Sense strand starting at position 1103 of SEQ ID NO: 1564437
aaugcuccgccagaaaugu

SEQ ID NO: 1877306 - RNA, 19 nt, Artificial Sequence
  Description of Artificial Sequence: Synthetic oligonucleotide
  Antisense strand to SEQ ID NO: 1877305
acauuucuggcggagcauu

SEQ ID NO: 1877307 - RNA, 19 nt, Artificial Sequence
  Description of Artificial Sequence: Synthetic oligonucleotide
  Sense strand starting at position 1292 of SEQ ID NO: 1564437
cuaugugauucugcaagaa

SEQ ID NO: 1877308 - RNA, 19 nt, Artificial Sequence
  Description of Artificial Sequence: Synthetic oligonucleotide
  Antisense strand to SEQ ID NO: 1877307
uucuugcagaaucacauag

SEQ ID NO: 1877309 - RNA, 19 nt, Artificial Sequence
  Description of Artificial Sequence: Synthetic oligonucleotide
  Sense strand starting at position 1406 of SEQ ID NO: 1564437
cuaggcuggccugagaagu

SEQ ID NO: 1877310 - RNA, 19 nt, Artificial Sequence
  Description of Artificial Sequence: Synthetic oligonucleotide
  Antisense strand to SEQ ID NO: 1877309
acuucucaggccagccuag

SEQ ID NO: 1877311 - RNA, 19 nt, Artificial Sequence
  Description of Artificial Sequence: Synthetic oligonucleotide
  Sense strand starting at position 1419 of SEQ ID NO: 1564437
agaaguccugcagauguuu

SEQ ID NO: 1877312 - RNA, 19 nt, Artificial Sequence
  Description of Artificial Sequence: Synthetic oligonucleotide
  Antisense strand to SEQ ID NO: 1877311
aaacaucugcaggacuucu

SEQ ID NO: 1877313 - RNA, 19 nt, Artificial Sequence
  Description of Artificial Sequence: Synthetic oligonucleotide
  Sense strand starting at position 1437 of SEQ ID NO: 1564437
uuucccuguguuuaagcaa

SEQ ID NO: 1877314 - RNA, 19 nt, Artificial Sequence
  Description of Artificial Sequence: Synthetic oligonucleotide
  Antisense strand to SEQ ID NO: 1877313
uugcuuaaacacagggaaa

SEQ ID NO: 1877315 - RNA, 19 nt, Artificial Sequence
  Description of Artificial Sequence: Synthetic oligonucleotide
  Sense strand starting at position 1531 of SEQ ID NO: 1564437
cccucugugugacccuaaa

SEQ ID NO: 1877316 - RNA, 19 nt, Artificial Sequence
  Description of Artificial Sequence: Synthetic oligonucleotide
  Antisense strand to SEQ ID NO: 1877315
uuuagggucacacagaggg

SEQ ID NO: 1877317 - RNA, 19 nt, Artificial Sequence
  Description of Artificial Sequence: Synthetic oligonucleotide
  Sense strand starting at position 1638 of SEQ ID NO: 1564437
acaggcugugugcaauaau

SEQ ID NO: 1877318 - RNA, 19 nt, Artificial Sequence
  Description of Artificial Sequence: Synthetic oligonucleotide
  Antisense strand to SEQ ID NO: 1877317
auuauugcacacagccugu

SEQ ID NO: 1877319 - RNA, 19 nt, Artificial Sequence
  Description of Artificial Sequence: Synthetic oligonucleotide
  Sense strand starting at position 1649 of SEQ ID NO: 1564437
gcaauaaucuggucccaua

SEQ ID NO: 1877320 - RNA, 19 nt, Artificial Sequence
  Description of Artificial Sequence: Synthetic oligonucleotide
  Antisense strand to SEQ ID NO: 1877319
uaugggaccagauuauugc

SEQ ID NO: 1877321 - RNA, 19 nt, Artificial Sequence
  Description of Artificial Sequence: Synthetic oligonucleotide
  Sense strand starting at position 1663 of SEQ ID NO: 1564437
ccauaagaauuggaauaug

SEQ ID NO: 1877322 - RNA, 19 nt, Artificial Sequence
  Description of Artificial Sequence: Synthetic oligonucleotide
  Antisense strand to SEQ ID NO: 1877321
cauauuccaauucuuaugg

SEQ ID NO: 1877323 - RNA, 19 nt, Artificial Sequence
  Description of Artificial Sequence: Synthetic oligonucleotide
  Sense strand starting at position 1673 of SEQ ID NO: 1564437
uggaauaugaucuguugug

SEQ ID NO: 1877324 - RNA, 19 nt, Artificial Sequence
  Description of Artificial Sequence: Synthetic oligonucleotide
  Antisense strand to SEQ ID NO: 1877323
cacaacagaucauauucca

SEQ ID NO: 1877325 - RNA, 19 nt, Artificial Sequence
  Description of Artificial Sequence: Synthetic oligonucleotide
  Sense strand starting at position 1699 of SEQ ID NO: 1564437
ggguucuuugggugauaca

SEQ ID NO: 1877326 - RNA, 19 nt, Artificial Sequence
  Description of Artificial Sequence: Synthetic oligonucleotide
  Antisense strand to SEQ ID NO: 1877325
uguaucacccaaagaaccc

SEQ ID NO: 1877327 - RNA, 19 nt, Artificial Sequence
  Description of Artificial Sequence: Synthetic oligonucleotide
  Sense strand starting at position 1700 of SEQ ID NO: 1564437
gguucuuugggugauacaa

SEQ ID NO: 1877328 - RNA, 19 nt, Artificial Sequence
  Description of Artificial Sequence: Synthetic oligonucleotide
  Antisense strand to SEQ ID NO: 1877327
uuguaucacccaaagaacc

SEQ ID NO: 1877329 - RNA, 19 nt, Artificial Sequence
  Description of Artificial Sequence: Synthetic oligonucleotide
  Sense strand starting at position 1800 of SEQ ID NO: 1564437
cucagaagcucucugggaa

SEQ ID NO: 1877330 - RNA, 19 nt, Artificial Sequence
  Description of Artificial Sequence: Synthetic oligonucleotide
  Antisense strand to SEQ ID NO: 1877329
uucccagagagcuucugag

SEQ ID NO: 1877331 - RNA, 19 nt, Artificial Sequence
  Description of Artificial Sequence: Synthetic oligonucleotide
  Sense strand starting at position 1801 of SEQ ID NO: 1564437
ucagaagcucucugggaaa

SEQ ID NO: 1877332 - RNA, 19 nt, Artificial Sequence
  Description of Artificial Sequence: Synthetic oligonucleotide
  Antisense strand to SEQ ID NO: 1877331
uuucccagagagcuucuga

SEQ ID NO: 1877333 - RNA, 19 nt, Artificial Sequence
  Description of Artificial Sequence: Synthetic oligonucleotide
  Sense strand starting at position 1852 of SEQ ID NO: 1564437
ggaggaguguucucauacc

SEQ ID NO: 1877334 - RNA, 19 nt, Artificial Sequence
  Description of Artificial Sequence: Synthetic oligonucleotide
  Antisense strand to SEQ ID NO: 1877333
gguaugagaacacuccucc

SEQ ID NO: 1877335 - RNA, 19 nt, Artificial Sequence
  Description of Artificial Sequence: Synthetic oligonucleotide
  Sense strand starting at position 1900 of SEQ ID NO: 1564437
guuauucucuuaccucaga

SEQ ID NO: 1877336 - RNA, 19 nt, Artificial Sequence
  Description of Artificial Sequence: Synthetic oligonucleotide
  Antisense strand to SEQ ID NO: 1877335
ucugagguaagagaauaac

SEQ ID NO: 1877337 - RNA, 19 nt, Artificial Sequence
  Description of Artificial Sequence: Synthetic oligonucleotide
  Sense strand starting at position 2477 of SEQ ID NO: 1564437
ccaaaucuugcagauguuu

SEQ ID NO: 1877338 - RNA, 19 nt, Artificial Sequence
  Description of Artificial Sequence: Synthetic oligonucleotide
  Antisense strand to SEQ ID NO: 1877337
aaacaucugcaagauuugg

SEQ ID NO: 1877339 - RNA, 19 nt, Artificial Sequence
  Description of Artificial Sequence: Synthetic oligonucleotide
  Sense strand starting at position 2489 of SEQ ID NO: 1564437
gauguuucuggaugcuuaa

SEQ ID NO: 1877340 - RNA, 19 nt, Artificial Sequence
  Description of Artificial Sequence: Synthetic oligonucleotide
  Antisense strand to SEQ ID NO: 1877339
uuaagcauccagaaacauc

SEQ ID NO: 1877341 - RNA, 19 nt, Artificial Sequence
  Description of Artificial Sequence: Synthetic oligonucleotide
  Sense strand starting at position 2492 of SEQ ID NO: 1564437
guuucuggaugcuuaagga

SEQ ID NO: 1877342 - RNA, 19 nt, Artificial Sequence
  Description of Artificial Sequence: Synthetic oligonucleotide
  Antisense strand to SEQ ID NO: 1877341
uccuuaagcauccagaaac

SEQ ID NO: 1877343 - RNA, 19 nt, Artificial Sequence
  Description of Artificial Sequence: Synthetic oligonucleotide
  Sense strand starting at position 2528 of SEQ ID NO: 1564437
guagcuaugcuuguuucuu

SEQ ID NO: 1877344 - RNA, 19 nt, Artificial Sequence
  Description of Artificial Sequence: Synthetic oligonucleotide
  Antisense strand to SEQ ID NO: 1877343
aagaaacaagcauagcuac

SEQ ID NO: 1877345 - RNA, 19 nt, Artificial Sequence
  Description of Artificial Sequence: Synthetic oligonucleotide
  Sense strand starting at position 2666 of SEQ ID NO: 1564437
agauacuucuugcuaggca

SEQ ID NO: 1877346 - RNA, 19 nt, Artificial Sequence
  Description of Artificial Sequence: Synthetic oligonucleotide
  Antisense strand to SEQ ID NO: 1877345
ugccuagcaagaaguaucu

SEQ ID NO: 1877347 - RNA, 19 nt, Artificial Sequence
  Description of Artificial Sequence: Synthetic oligonucleotide
  Sense strand starting at position 2692 of SEQ ID NO: 1564437
cauuuauagcgaugcuaga

SEQ ID NO: 1877348 - RNA, 19 nt, Artificial Sequence
  Description of Artificial Sequence: Synthetic oligonucleotide
  Antisense strand to SEQ ID NO: 1877347
ucuagcaucgcuauaaaug

SEQ ID NO: 1877349 - RNA, 19 nt, Artificial Sequence
  Description of Artificial Sequence: Synthetic oligonucleotide
  Sense strand starting at position 2945 of SEQ ID NO: 1564437
gguguuucgcgacugcgau

SEQ ID NO: 1877350 - RNA, 19 nt, Artificial Sequence
  Description of Artificial Sequence: Synthetic oligonucleotide
  Antisense strand to SEQ ID NO: 1877349
aucgcagucgcgaaacacc

SEQ ID NO: 1877351 - RNA, 19 nt, Artificial Sequence
  Description of Artificial Sequence: Synthetic oligonucleotide
  Sense strand starting at position 2958 of SEQ ID NO: 1564437
ugcgauguggucgcuggaa

SEQ ID NO: 1877352 - RNA, 19 nt, Artificial Sequence
  Description of Artificial Sequence: Synthetic oligonucleotide
  Antisense strand to SEQ ID NO: 1877351
uuccagcgaccacaucgca

SEQ ID NO: 1877353 - RNA, 19 nt, Artificial Sequence
  Description of Artificial Sequence: Synthetic oligonucleotide
  Sense strand starting at position 3065 of SEQ ID NO: 1564437
uguucuuugggcgacagaa

SEQ ID NO: 1877354 - RNA, 19 nt, Artificial Sequence
  Description of Artificial Sequence: Synthetic oligonucleotide
  Antisense strand to SEQ ID NO: 1877353
uucugucgcccaaagaaca

SEQ ID NO: 1877355 - RNA, 19 nt, Artificial Sequence
  Description of Artificial Sequence: Synthetic oligonucleotide
  Sense strand starting at position 3882 of SEQ ID NO: 1564437
aaacauguaguguggaagu

SEQ ID NO: 1877356 - RNA, 19 nt, Artificial Sequence
  Description of Artificial Sequence: Synthetic oligonucleotide
  Antisense strand to SEQ ID NO: 1877355
acuuccacacuacauguuu

SEQ ID NO: 1877357 - RNA, 19 nt, Artificial Sequence
  Description of Artificial Sequence: Synthetic oligonucleotide
  Sense strand starting at position 3884 of SEQ ID NO: 1564437
acauguaguguggaaguca

SEQ ID NO: 1877358 - RNA, 19 nt, Artificial Sequence
  Description of Artificial Sequence: Synthetic oligonucleotide
  Antisense strand to SEQ ID NO: 1877357
ugacuuccacacuacaugu

SEQ ID NO: 1877359 - RNA, 19 nt, Artificial Sequence
  Description of Artificial Sequence: Synthetic oligonucleotide
  Sense strand starting at position 3924 of SEQ ID NO: 1564437
cuagguugacgagaaacgu

SEQ ID NO: 1877360 - RNA, 19 nt, Artificial Sequence
  Description of Artificial Sequence: Synthetic oligonucleotide
  Antisense strand to SEQ ID NO: 1877359
acguuucucgucaaccuag

SEQ ID NO: 1877361 - RNA, 19 nt, Artificial Sequence
  Description of Artificial Sequence: Synthetic oligonucleotide
  Sense strand starting at position 3930 of SEQ ID NO: 1564437
ugacgagaaacguagaagu

SEQ ID NO: 1877362 - RNA, 19 nt, Artificial Sequence
  Description of Artificial Sequence: Synthetic oligonucleotide
  Antisense strand to SEQ ID NO: 1877361
acuucuacguuucucguca

SEQ ID NO: 1877363 - RNA, 19 nt, Artificial Sequence
  Description of Artificial Sequence: Synthetic oligonucleotide
  Sense strand starting at position 3932 of SEQ ID NO: 1564437
acgagaaacguagaaguca

SEQ ID NO: 1877364 - RNA, 19 nt, Artificial Sequence
  Description of Artificial Sequence: Synthetic oligonucleotide
  Antisense strand to SEQ ID NO: 1877363
ugacuucuacguuucucgu

SEQ ID NO: 1877365 - RNA, 19 nt, Artificial Sequence
  Description of Artificial Sequence: Synthetic oligonucleotide
  Sense strand starting at position 117 of SEQ ID NO: 1564438
uuccauauggaugguugua

SEQ ID NO: 1877366 - RNA, 19 nt, Artificial Sequence
  Description of Artificial Sequence: Synthetic oligonucleotide
  Antisense strand to SEQ ID NO: 1877365
uacaaccauccauauggaa

SEQ ID NO: 1877367 - RNA, 19 nt, Artificial Sequence
  Description of Artificial Sequence: Synthetic oligonucleotide
  Sense strand starting at position 119 of SEQ ID NO: 1564438
ccauauggaugguuguaau

SEQ ID NO: 1877368 - RNA, 19 nt, Artificial Sequence
  Description of Artificial Sequence: Synthetic oligonucleotide
  Antisense strand to SEQ ID NO: 1877367
auuacaaccauccauaugg

SEQ ID NO: 1877369 - RNA, 19 nt, Artificial Sequence
  Description of Artificial Sequence: Synthetic oligonucleotide
  Sense strand starting at position 126 of SEQ ID NO: 1564438
gaugguuguaaugggaauu

SEQ ID NO: 1877370 - RNA, 19 nt, Artificial Sequence
  Description of Artificial Sequence: Synthetic oligonucleotide
  Antisense strand to SEQ ID NO: 1877369
aauucccauuacaaccauc

SEQ ID NO: 1877371 - RNA, 19 nt, Artificial Sequence
  Description of Artificial Sequence: Synthetic oligonucleotide
  Sense strand starting at position 159 of SEQ ID NO: 1564438
ucucauauugccuagucau

SEQ ID NO: 1877372 - RNA, 19 nt, Artificial Sequence
  Description of Artificial Sequence: Synthetic oligonucleotide
  Antisense strand to SEQ ID NO: 1877371
augacuaggcaauaugaga

SEQ ID NO: 1877373 - RNA, 19 nt, Artificial Sequence
  Description of Artificial Sequence: Synthetic oligonucleotide
  Sense strand starting at position 251 of SEQ ID NO: 1564438
aaacuucuaguguggaaga

SEQ ID NO: 1877374 - RNA, 19 nt, Artificial Sequence
  Description of Artificial Sequence: Synthetic oligonucleotide
  Antisense strand to SEQ ID NO: 1877373
ucuuccacacuagaaguuu

SEQ ID NO: 1877375 - RNA, 19 nt, Artificial Sequence
  Description of Artificial Sequence: Synthetic oligonucleotide
  Sense strand starting at position 376 of SEQ ID NO: 1564438
cucauuuggcuccgguuau

SEQ ID NO: 1877376 - RNA, 19 nt, Artificial Sequence
  Description of Artificial Sequence: Synthetic oligonucleotide
  Antisense strand to SEQ ID NO: 1877375
auaaccggagccaaaugag

SEQ ID NO: 1877377 - RNA, 19 nt, Artificial Sequence
  Description of Artificial Sequence: Synthetic oligonucleotide
  Sense strand starting at position 380 of SEQ ID NO: 1564438
uuuggcuccgguuaugaaa

SEQ ID NO: 1877378 - RNA, 19 nt, Artificial Sequence
  Description of Artificial Sequence: Synthetic oligonucleotide
  Antisense strand to SEQ ID NO: 1877377
uuucauaaccggagccaaa

SEQ ID NO: 1877379 - RNA, 19 nt, Artificial Sequence
  Description of Artificial Sequence: Synthetic oligonucleotide
  Sense strand starting at position 406 of SEQ ID NO: 1564438
cauugagaguucuccagau

SEQ ID NO: 1877380 - RNA, 19 nt, Artificial Sequence
  Description of Artificial Sequence: Synthetic oligonucleotide
  Antisense strand to SEQ ID NO: 1877379
aucuggagaacucucaaug

SEQ ID NO: 1877381 - RNA, 19 nt, Artificial Sequence
  Description of Artificial Sequence: Synthetic oligonucleotide
  Sense strand starting at position 1002 of SEQ ID NO: 1564438
uggagugcauaaguaauau

SEQ ID NO: 1877382 - RNA, 19 nt, Artificial Sequence
  Description of Artificial Sequence: Synthetic oligonucleotide
  Antisense strand to SEQ ID NO: 1877381
auauuacuuaugcacucca

SEQ ID NO: 1877383 - RNA, 19 nt, Artificial Sequence
  Description of Artificial Sequence: Synthetic oligonucleotide
  Sense strand starting at position 1292 of SEQ ID NO: 1564438
cuaugugauucugcaagaa

SEQ ID NO: 1877384 - RNA, 19 nt, Artificial Sequence
  Description of Artificial Sequence: Synthetic oligonucleotide
  Antisense strand to SEQ ID NO: 1877383
uucuugcagaaucacauag

SEQ ID NO: 1877385 - RNA, 19 nt, Artificial Sequence
  Description of Artificial Sequence: Synthetic oligonucleotide
  Sense strand starting at position 1406 of SEQ ID NO: 1564438
cuaggcuggccugagaagu

SEQ ID NO: 1877386 - RNA, 19 nt, Artificial Sequence
  Description of Artificial Sequence: Synthetic oligonucleotide
  Antisense strand to SEQ ID NO: 1877385
acuucucaggccagccuag

SEQ ID NO: 1877387 - RNA, 19 nt, Artificial Sequence
  Description of Artificial Sequence: Synthetic oligonucleotide
  Sense strand starting at position 1417 of SEQ ID NO: 1564438
ugagaaguccugcagaugu

SEQ ID NO: 1877388 - RNA, 19 nt, Artificial Sequence
  Description of Artificial Sequence: Synthetic oligonucleotide
  Antisense strand to SEQ ID NO: 1877387
acaucugcaggacuucuca

SEQ ID NO: 1877389 - RNA, 19 nt, Artificial Sequence
  Description of Artificial Sequence: Synthetic oligonucleotide
  Sense strand starting at position 1419 of SEQ ID NO: 1564438
agaaguccugcagauguuu

SEQ ID NO: 1877390 - RNA, 19 nt, Artificial Sequence
  Description of Artificial Sequence: Synthetic oligonucleotide
  Antisense strand to SEQ ID NO: 1877389
aaacaucugcaggacuucu

SEQ ID NO: 1877391 - RNA, 19 nt, Artificial Sequence
  Description of Artificial Sequence: Synthetic oligonucleotide
  Sense strand starting at position 1457 of SEQ ID NO: 1564438
cugacauccuaagcagaga

SEQ ID NO: 1877392 - RNA, 19 nt, Artificial Sequence
  Description of Artificial Sequence: Synthetic oligonucleotide
  Antisense strand to SEQ ID NO: 1877391
ucucugcuuaggaugucag

SEQ ID NO: 1877393 - RNA, 19 nt, Artificial Sequence
  Description of Artificial Sequence: Synthetic oligonucleotide
  Sense strand starting at position 1531 of SEQ ID NO: 1564438
cccucugugugacccuaaa

SEQ ID NO: 1877394 - RNA, 19 nt, Artificial Sequence
  Description of Artificial Sequence: Synthetic oligonucleotide
  Antisense strand to SEQ ID NO: 1877393
uuuagggucacacagaggg

SEQ ID NO: 1877395 - RNA, 19 nt, Artificial Sequence
  Description of Artificial Sequence: Synthetic oligonucleotide
  Sense strand starting at position 1639 of SEQ ID NO: 1564438
acaggcugugugcaauaau

SEQ ID NO: 1877396 - RNA, 19 nt, Artificial Sequence
  Description of Artificial Sequence: Synthetic oligonucleotide
  Antisense strand to SEQ ID NO: 1877395
auuauugcacacagccugu

SEQ ID NO: 1877397 - RNA, 19 nt, Artificial Sequence
  Description of Artificial Sequence: Synthetic oligonucleotide
  Sense strand starting at position 1650 of SEQ ID NO: 1564438
gcaauaaucuggucccaua

SEQ ID NO: 1877398 - RNA, 19 nt, Artificial Sequence
  Description of Artificial Sequence: Synthetic oligonucleotide
  Antisense strand to SEQ ID NO: 1877397
uaugggaccagauuauugc

SEQ ID NO: 1877399 - RNA, 19 nt, Artificial Sequence
  Description of Artificial Sequence: Synthetic oligonucleotide
  Sense strand starting at position 1674 of SEQ ID NO: 1564438
uggaauaugaucuguugug

SEQ ID NO: 1877400 - RNA, 19 nt, Artificial Sequence
  Description of Artificial Sequence: Synthetic oligonucleotide
  Antisense strand to SEQ ID NO: 1877399
cacaacagaucauauucca

SEQ ID NO: 1877401 - RNA, 19 nt, Artificial Sequence
  Description of Artificial Sequence: Synthetic oligonucleotide
  Sense strand starting at position 1675 of SEQ ID NO: 1564438
ggaauaugaucuguugugu

SEQ ID NO: 1877402 - RNA, 19 nt, Artificial Sequence
  Description of Artificial Sequence: Synthetic oligonucleotide
  Antisense strand to SEQ ID NO: 1877401
acacaacagaucauauucc

SEQ ID NO: 1877403 - RNA, 19 nt, Artificial Sequence
  Description of Artificial Sequence: Synthetic oligonucleotide
  Sense strand starting at position 1700 of SEQ ID NO: 1564438
ggguucuuugggugauaca

SEQ ID NO: 1877404 - RNA, 19 nt, Artificial Sequence
  Description of Artificial Sequence: Synthetic oligonucleotide
  Antisense strand to SEQ ID NO: 1877403
uguaucacccaaagaaccc

SEQ ID NO: 1877405 - RNA, 19 nt, Artificial Sequence
  Description of Artificial Sequence: Synthetic oligonucleotide
  Sense strand starting at position 1701 of SEQ ID NO: 1564438
gguucuuugggugauacaa

SEQ ID NO: 1877406 - RNA, 19 nt, Artificial Sequence
  Description of Artificial Sequence: Synthetic oligonucleotide
  Antisense strand to SEQ ID NO: 1877405
uuguaucacccaaagaacc

SEQ ID NO: 1877407 - RNA, 19 nt, Artificial Sequence
  Description of Artificial Sequence: Synthetic oligonucleotide
  Sense strand starting at position 1801 of SEQ ID NO: 1564438
cucagaagcucucugggaa

SEQ ID NO: 1877408 - RNA, 19 nt, Artificial Sequence
  Description of Artificial Sequence: Synthetic oligonucleotide
  Antisense strand to SEQ ID NO: 1877407
uucccagagagcuucugag

SEQ ID NO: 1877409 - RNA, 19 nt, Artificial Sequence
  Description of Artificial Sequence: Synthetic oligonucleotide
  Sense strand starting at position 1853 of SEQ ID NO: 1564438
ggaggaguguucucauacc

SEQ ID NO: 1877410 - RNA, 19 nt, Artificial Sequence
  Description of Artificial Sequence: Synthetic oligonucleotide
  Antisense strand to SEQ ID NO: 1877409
gguaugagaacacuccucc

SEQ ID NO: 1877411 - RNA, 19 nt, Artificial Sequence
  Description of Artificial Sequence: Synthetic oligonucleotide
  Sense strand starting at position 1901 of SEQ ID NO: 1564438
guuauucucuuaccucaga

SEQ ID NO: 1877412 - RNA, 19 nt, Artificial Sequence
  Description of Artificial Sequence: Synthetic oligonucleotide
  Antisense strand to SEQ ID NO: 1877411
ucugagguaagagaauaac

SEQ ID NO: 1877413 - RNA, 19 nt, Artificial Sequence
  Description of Artificial Sequence: Synthetic oligonucleotide
  Sense strand starting at position 2477 of SEQ ID NO: 1564438
ccaaaucuugcagauguuu

SEQ ID NO: 1877414 - RNA, 19 nt, Artificial Sequence
  Description of Artificial Sequence: Synthetic oligonucleotide
  Antisense strand to SEQ ID NO: 1877413
aaacaucugcaagauuugg

SEQ ID NO: 1877415 - RNA, 19 nt, Artificial Sequence
  Description of Artificial Sequence: Synthetic oligonucleotide
  Sense strand starting at position 2489 of SEQ ID NO: 1564438
gauguuucuggaugcuuaa

SEQ ID NO: 1877416 - RNA, 19 nt, Artificial Sequence
  Description of Artificial Sequence: Synthetic oligonucleotide
  Antisense strand to SEQ ID NO: 1877415
uuaagcauccagaaacauc

SEQ ID NO: 1877417 - RNA, 19 nt, Artificial Sequence
  Description of Artificial Sequence: Synthetic oligonucleotide
  Sense strand starting at position 2492 of SEQ ID NO: 1564438
guuucuggaugcuuaagga

SEQ ID NO: 1877418 - RNA, 19 nt, Artificial Sequence
  Description of Artificial Sequence: Synthetic oligonucleotide
  Antisense strand to SEQ ID NO: 1877417
uccuuaagcauccagaaac

SEQ ID NO: 1877419 - RNA, 19 nt, Artificial Sequence
  Description of Artificial Sequence: Synthetic oligonucleotide
  Sense strand starting at position 2528 of SEQ ID NO: 1564438
guagcuaugcuuguuucuu

SEQ ID NO: 1877420 - RNA, 19 nt, Artificial Sequence
  Description of Artificial Sequence: Synthetic oligonucleotide
  Antisense strand to SEQ ID NO: 1877419
aagaaacaagcauagcuac

SEQ ID NO: 1877421 - RNA, 19 nt, Artificial Sequence
  Description of Artificial Sequence: Synthetic oligonucleotide
  Sense strand starting at position 2575 of SEQ ID NO: 1564438
ggaucaugagacuauccgu

SEQ ID NO: 1877422 - RNA, 19 nt, Artificial Sequence
  Description of Artificial Sequence: Synthetic oligonucleotide
  Antisense strand to SEQ ID NO: 1877421
acggauagucucaugaucc

SEQ ID NO: 1877423 - RNA, 19 nt, Artificial Sequence
  Description of Artificial Sequence: Synthetic oligonucleotide
  Sense strand starting at position 2580 of SEQ ID NO: 1564438
augagacuauccguggauu

SEQ ID NO: 1877424 - RNA, 19 nt, Artificial Sequence
  Description of Artificial Sequence: Synthetic oligonucleotide
  Antisense strand to SEQ ID NO: 1877423
aauccacggauagucucau

SEQ ID NO: 1877425 - RNA, 19 nt, Artificial Sequence
  Description of Artificial Sequence: Synthetic oligonucleotide
  Sense strand starting at position 2666 of SEQ ID NO: 1564438
agauacuucuugcuaggca

SEQ ID NO: 1877426 - RNA, 19 nt, Artificial Sequence
  Description of Artificial Sequence: Synthetic oligonucleotide
  Antisense strand to SEQ ID NO: 1877425
ugccuagcaagaaguaucu

SEQ ID NO: 1877427 - RNA, 19 nt, Artificial Sequence
  Description of Artificial Sequence: Synthetic oligonucleotide
  Sense strand starting at position 2692 of SEQ ID NO: 1564438
cauuuauagcgaugcuaga

SEQ ID NO: 1877428 - RNA, 19 nt, Artificial Sequence
  Description of Artificial Sequence: Synthetic oligonucleotide
  Antisense strand to SEQ ID NO: 1877427
ucuagcaucgcuauaaaug

SEQ ID NO: 1877429 - RNA, 19 nt, Artificial Sequence
  Description of Artificial Sequence: Synthetic oligonucleotide
  Sense strand starting at position 2945 of SEQ ID NO: 1564438
gguguuucgcgacugcgau

SEQ ID NO: 1877430 - RNA, 19 nt, Artificial Sequence
  Description of Artificial Sequence: Synthetic oligonucleotide
  Antisense strand to SEQ ID NO: 1877429
aucgcagucgcgaaacacc

SEQ ID NO: 1877431 - RNA, 19 nt, Artificial Sequence
  Description of Artificial Sequence: Synthetic oligonucleotide
  Sense strand starting at position 2958 of SEQ ID NO: 1564438
ugcgauguggucgcuggaa

SEQ ID NO: 1877432 - RNA, 19 nt, Artificial Sequence
  Description of Artificial Sequence: Synthetic oligonucleotide
  Antisense strand to SEQ ID NO: 1877431
uuccagcgaccacaucgca

SEQ ID NO: 1877433 - RNA, 19 nt, Artificial Sequence
  Description of Artificial Sequence: Synthetic oligonucleotide
  Sense strand starting at position 3065 of SEQ ID NO: 1564438
uguucuuugggcgacagaa

SEQ ID NO: 1877434 - RNA, 19 nt, Artificial Sequence
  Description of Artificial Sequence: Synthetic oligonucleotide
  Antisense strand to SEQ ID NO: 1877433
uucugucgcccaaagaaca

SEQ ID NO: 1877435 - RNA, 19 nt, Artificial Sequence
  Description of Artificial Sequence: Synthetic oligonucleotide
  Sense strand starting at position 3882 of SEQ ID NO: 1564438
aaacauguaguguggaagu

SEQ ID NO: 1877436 - RNA, 19 nt, Artificial Sequence
  Description of Artificial Sequence: Synthetic oligonucleotide
  Antisense strand to SEQ ID NO: 1877435
acuuccacacuacauguuu

SEQ ID NO: 1877437 - RNA, 19 nt, Artificial Sequence
  Description of Artificial Sequence: Synthetic oligonucleotide
  Sense strand starting at position 3884 of SEQ ID NO: 1564438
acauguaguguggaaguca

SEQ ID NO: 1877438 - RNA, 19 nt, Artificial Sequence
  Description of Artificial Sequence: Synthetic oligonucleotide
  Antisense strand to SEQ ID NO: 1877437
ugacuuccacacuacaugu

SEQ ID NO: 1877439 - RNA, 19 nt, Artificial Sequence
  Description of Artificial Sequence: Synthetic oligonucleotide
  Sense strand starting at position 3924 of SEQ ID NO: 1564438
cuagguugacgagaaacgu

SEQ ID NO: 1877440 - RNA, 19 nt, Artificial Sequence
  Description of Artificial Sequence: Synthetic oligonucleotide
  Antisense strand to SEQ ID NO: 1877439
acguuucucgucaaccuag

SEQ ID NO: 1877441 - RNA, 19 nt, Artificial Sequence
  Description of Artificial Sequence: Synthetic oligonucleotide
  Sense strand starting at position 3930 of SEQ ID NO: 1564438
ugacgagaaacguagaagu

SEQ ID NO: 1877442 - RNA, 19 nt, Artificial Sequence
  Description of Artificial Sequence: Synthetic oligonucleotide
  Antisense strand to SEQ ID NO: 1877441
acuucuacguuucucguca

SEQ ID NO: 1877443 - RNA, 19 nt, Artificial Sequence
  Description of Artificial Sequence: Synthetic oligonucleotide
  Sense strand starting at position 3932 of SEQ ID NO: 1564438
acgagaaacguagaaguca

SEQ ID NO: 1877444 - RNA, 19 nt, Artificial Sequence
  Description of Artificial Sequence: Synthetic oligonucleotide
  Antisense strand to SEQ ID NO: 1877443
ugacuucuacguuucucgu

SEQ ID NO: 1877445 - RNA, 19 nt, Artificial Sequence
  Description of Artificial Sequence: Synthetic oligonucleotide
  Sense strand starting at position 117 of SEQ ID NO: 1564439
uuccauauggaugguugua

SEQ ID NO: 1877446 - RNA, 19 nt, Artificial Sequence
  Description of Artificial Sequence: Synthetic oligonucleotide
  Antisense strand to SEQ ID NO: 1877445
uacaaccauccauauggaa

SEQ ID NO: 1877447 - RNA, 19 nt, Artificial Sequence
  Description of Artificial Sequence: Synthetic oligonucleotide
  Sense strand starting at position 119 of SEQ ID NO: 1564439
ccauauggaugguuguaau

SEQ ID NO: 1877448 - RNA, 19 nt, Artificial Sequence
  Description of Artificial Sequence: Synthetic oligonucleotide
  Antisense strand to SEQ ID NO: 1877447
auuacaaccauccauaugg

SEQ ID NO: 1877449 - RNA, 19 nt, Artificial Sequence
  Description of Artificial Sequence: Synthetic oligonucleotide
  Sense strand starting at position 126 of SEQ ID NO: 1564439
gaugguuguaaugggaauu

SEQ ID NO: 1877450 - RNA, 19 nt, Artificial Sequence
  Description of Artificial Sequence: Synthetic oligonucleotide
  Antisense strand to SEQ ID NO: 1877449
aauucccauuacaaccauc

SEQ ID NO: 1877451 - RNA, 19 nt, Artificial Sequence
  Description of Artificial Sequence: Synthetic oligonucleotide
  Sense strand starting at position 159 of SEQ ID NO: 1564439
ucucauauugccuagucau

SEQ ID NO: 1877452 - RNA, 19 nt, Artificial Sequence
  Description of Artificial Sequence: Synthetic oligonucleotide
  Antisense strand to SEQ ID NO: 1877451
augacuaggcaauaugaga

SEQ ID NO: 1877453 - RNA, 19 nt, Artificial Sequence
  Description of Artificial Sequence: Synthetic oligonucleotide
  Sense strand starting at position 251 of SEQ ID NO: 1564439
aaacuucuaguguggaaga

SEQ ID NO: 1877454 - RNA, 19 nt, Artificial Sequence
  Description of Artificial Sequence: Synthetic oligonucleotide
  Antisense strand to SEQ ID NO: 1877453
ucuuccacacuagaaguuu

SEQ ID NO: 1877455 - RNA, 19 nt, Artificial Sequence
  Description of Artificial Sequence: Synthetic oligonucleotide
  Sense strand starting at position 376 of SEQ ID NO: 1564439
cucauuuggcuccgguuau

SEQ ID NO: 1877456 - RNA, 19 nt, Artificial Sequence
  Description of Artificial Sequence: Synthetic oligonucleotide
  Antisense strand to SEQ ID NO: 1877455
auaaccggagccaaaugag

SEQ ID NO: 1877457 - RNA, 19 nt, Artificial Sequence
  Description of Artificial Sequence: Synthetic oligonucleotide
  Sense strand starting at position 380 of SEQ ID NO: 1564439
uuuggcuccgguuaugaaa

SEQ ID NO: 1877458 - RNA, 19 nt, Artificial Sequence
  Description of Artificial Sequence: Synthetic oligonucleotide
  Antisense strand to SEQ ID NO: 1877457
uuucauaaccggagccaaa

SEQ ID NO: 1877459 - RNA, 19 nt, Artificial Sequence
  Description of Artificial Sequence: Synthetic oligonucleotide
  Sense strand starting at position 406 of SEQ ID NO: 1564439
cauugagaguucuccagau

SEQ ID NO: 1877460 - RNA, 19 nt, Artificial Sequence
  Description of Artificial Sequence: Synthetic oligonucleotide
  Antisense strand to SEQ ID NO: 1877459
aucuggagaacucucaaug

SEQ ID NO: 1877461 - RNA, 19 nt, Artificial Sequence
  Description of Artificial Sequence: Synthetic oligonucleotide
  Sense strand starting at position 487 of SEQ ID NO: 1564439
gaagcagauucugugucau

SEQ ID NO: 1877462 - RNA, 19 nt, Artificial Sequence
  Description of Artificial Sequence: Synthetic oligonucleotide
  Antisense strand to SEQ ID NO: 1877461
augacacagaaucugcuuc

SEQ ID NO: 1877463 - RNA, 19 nt, Artificial Sequence
  Description of Artificial Sequence: Synthetic oligonucleotide
  Sense strand starting at position 1002 of SEQ ID NO: 1564439
uggagugcauaaguaauau

SEQ ID NO: 1877464 - RNA, 19 nt, Artificial Sequence
  Description of Artificial Sequence: Synthetic oligonucleotide
  Antisense strand to SEQ ID NO: 1877463
auauuacuuaugcacucca

SEQ ID NO: 1877465 - RNA, 19 nt, Artificial Sequence
  Description of Artificial Sequence: Synthetic oligonucleotide
  Sense strand starting at position 1103 of SEQ ID NO: 1564439
aaugcuccgccagaaaugu

SEQ ID NO: 1877466 - RNA, 19 nt, Artificial Sequence
  Description of Artificial Sequence: Synthetic oligonucleotide
  Antisense strand to SEQ ID NO: 1877465
acauuucuggcggagcauu

SEQ ID NO: 1877467 - RNA, 19 nt, Artificial Sequence
  Description of Artificial Sequence: Synthetic oligonucleotide
  Sense strand starting at position 1292 of SEQ ID NO: 1564439
cuaugugauucugcaagaa

SEQ ID NO: 1877468 - RNA, 19 nt, Artificial Sequence
  Description of Artificial Sequence: Synthetic oligonucleotide
  Antisense strand to SEQ ID NO: 1877467
uucuugcagaaucacauag

SEQ ID NO: 1877469 - RNA, 19 nt, Artificial Sequence
  Description of Artificial Sequence: Synthetic oligonucleotide
  Sense strand starting at position 1406 of SEQ ID NO: 1564439
cuaggcuggccugagaagu

SEQ ID NO: 1877470 - RNA, 19 nt, Artificial Sequence
  Description of Artificial Sequence: Synthetic oligonucleotide
  Antisense strand to SEQ ID NO: 1877469
acuucucaggccagccuag

SEQ ID NO: 1877471 - RNA, 19 nt, Artificial Sequence
  Description of Artificial Sequence: Synthetic oligonucleotide
  Sense strand starting at position 1419 of SEQ ID NO: 1564439
agaaguccugcagauguuu

SEQ ID NO: 1877472 - RNA, 19 nt, Artificial Sequence
  Description of Artificial Sequence: Synthetic oligonucleotide
  Antisense strand to SEQ ID NO: 1877471
aaacaucugcaggacuucu

SEQ ID NO: 1877473 - RNA, 19 nt, Artificial Sequence
  Description of Artificial Sequence: Synthetic oligonucleotide
  Sense strand starting at position 1437 of SEQ ID NO: 1564439
uuucccuguguuuaagcaa

SEQ ID NO: 1877474 - RNA, 19 nt, Artificial Sequence
  Description of Artificial Sequence: Synthetic oligonucleotide
  Antisense strand to SEQ ID NO: 1877473
uugcuuaaacacagggaaa

SEQ ID NO: 1877475 - RNA, 19 nt, Artificial Sequence
  Description of Artificial Sequence: Synthetic oligonucleotide
  Sense strand starting at position 1531 of SEQ ID NO: 1564439
cccucugugugacccuaaa

SEQ ID NO: 1877476 - RNA, 19 nt, Artificial Sequence
  Description of Artificial Sequence: Synthetic oligonucleotide
  Antisense strand to SEQ ID NO: 1877475
uuuagggucacacagaggg

SEQ ID NO: 1877477 - RNA, 19 nt, Artificial Sequence
  Description of Artificial Sequence: Synthetic oligonucleotide
  Sense strand starting at position 1638 of SEQ ID NO: 1564439
acaggcugugugcaauaau

SEQ ID NO: 1877478 - RNA, 19 nt, Artificial Sequence
  Description of Artificial Sequence: Synthetic oligonucleotide
  Antisense strand to SEQ ID NO: 1877477
auuauugcacacagccugu

SEQ ID NO: 1877479 - RNA, 19 nt, Artificial Sequence
  Description of Artificial Sequence: Synthetic oligonucleotide
  Sense strand starting at position 1649 of SEQ ID NO: 1564439
gcaauaaucuggucccaua

SEQ ID NO: 1877480 - RNA, 19 nt, Artificial Sequence
  Description of Artificial Sequence: Synthetic oligonucleotide
  Antisense strand to SEQ ID NO: 1877479
uaugggaccagauuauugc

SEQ ID NO: 1877481 - RNA, 19 nt, Artificial Sequence
  Description of Artificial Sequence: Synthetic oligonucleotide
  Sense strand starting at position 1663 of SEQ ID NO: 1564439
ccauaagaauuggaauaug

SEQ ID NO: 1877482 - RNA, 19 nt, Artificial Sequence
  Description of Artificial Sequence: Synthetic oligonucleotide
  Antisense strand to SEQ ID NO: 1877481
cauauuccaauucuuaugg

SEQ ID NO: 1877483 - RNA, 19 nt, Artificial Sequence
  Description of Artificial Sequence: Synthetic oligonucleotide
  Sense strand starting at position 1673 of SEQ ID NO: 1564439
uggaauaugaucuguugug

SEQ ID NO: 1877484 - RNA, 19 nt, Artificial Sequence
  Description of Artificial Sequence: Synthetic oligonucleotide
  Antisense strand to SEQ ID NO: 1877483
cacaacagaucauauucca

SEQ ID NO: 1877485 - RNA, 19 nt, Artificial Sequence
  Description of Artificial Sequence: Synthetic oligonucleotide
  Sense strand starting at position 1699 of SEQ ID NO: 1564439
ggguucuuugggugauaca

SEQ ID NO: 1877486 - RNA, 19 nt, Artificial Sequence
  Description of Artificial Sequence: Synthetic oligonucleotide
  Antisense strand to SEQ ID NO: 1877485
uguaucacccaaagaaccc

SEQ ID NO: 1877487 - RNA, 19 nt, Artificial Sequence
  Description of Artificial Sequence: Synthetic oligonucleotide
  Sense strand starting at position 1700 of SEQ ID NO: 1564439
gguucuuugggugauacaa

SEQ ID NO: 1877488 - RNA, 19 nt, Artificial Sequence
  Description of Artificial Sequence: Synthetic oligonucleotide
  Antisense strand to SEQ ID NO: 1877487
uuguaucacccaaagaacc

SEQ ID NO: 1877489 - RNA, 19 nt, Artificial Sequence
  Description of Artificial Sequence: Synthetic oligonucleotide
  Sense strand starting at position 1800 of SEQ ID NO: 1564439
cucagaagcucucugggaa

SEQ ID NO: 1877490 - RNA, 19 nt, Artificial Sequence
  Description of Artificial Sequence: Synthetic oligonucleotide
  Antisense strand to SEQ ID NO: 1877489
uucccagagagcuucugag

SEQ ID NO: 1877491 - RNA, 19 nt, Artificial Sequence
  Description of Artificial Sequence: Synthetic oligonucleotide
  Sense strand starting at position 1801 of SEQ ID NO: 1564439
ucagaagcucucugggaaa

SEQ ID NO: 1877492 - RNA, 19 nt, Artificial Sequence
  Description of Artificial Sequence: Synthetic oligonucleotide
  Antisense strand to SEQ ID NO: 1877491
uuucccagagagcuucuga

SEQ ID NO: 1877493 - RNA, 19 nt, Artificial Sequence
  Description of Artificial Sequence: Synthetic oligonucleotide
  Sense strand starting at position 1852 of SEQ ID NO: 1564439
ggaggaguguucucauacc

SEQ ID NO: 1877494 - RNA, 19 nt, Artificial Sequence
  Description of Artificial Sequence: Synthetic oligonucleotide
  Antisense strand to SEQ ID NO: 1877493
gguaugagaacacuccucc

SEQ ID NO: 1877495 - RNA, 19 nt, Artificial Sequence
  Description of Artificial Sequence: Synthetic oligonucleotide
  Sense strand starting at position 1900 of SEQ ID NO: 1564439
guuauucucuuaccucaga

SEQ ID NO: 1877496 - RNA, 19 nt, Artificial Sequence
  Description of Artificial Sequence: Synthetic oligonucleotide
  Antisense strand to SEQ ID NO: 1877495
ucugagguaagagaauaac

SEQ ID NO: 1877497 - RNA, 19 nt, Artificial Sequence
  Description of Artificial Sequence: Synthetic oligonucleotide
  Sense strand starting at position 2477 of SEQ ID NO: 1564439
ccaaaucuugcagauguuu

SEQ ID NO: 1877498 - RNA, 19 nt, Artificial Sequence
  Description of Artificial Sequence: Synthetic oligonucleotide
  Antisense strand to SEQ ID NO: 1877497
aaacaucugcaagauuugg

SEQ ID NO: 1877499 - RNA, 19 nt, Artificial Sequence
  Description of Artificial Sequence: Synthetic oligonucleotide
  Sense strand starting at position 2489 of SEQ ID NO: 1564439
gauguuucuggaugcuuaa

SEQ ID NO: 1877500 - RNA, 19 nt, Artificial Sequence
  Description of Artificial Sequence: Synthetic oligonucleotide
  Antisense strand to SEQ ID NO: 1877499
uuaagcauccagaaacauc

SEQ ID NO: 1877501 - RNA, 19 nt, Artificial Sequence
  Description of Artificial Sequence: Synthetic oligonucleotide
  Sense strand starting at position 2492 of SEQ ID NO: 1564439
guuucuggaugcuuaagga

SEQ ID NO: 1877502 - RNA, 19 nt, Artificial Sequence
  Description of Artificial Sequence: Synthetic oligonucleotide
  Antisense strand to SEQ ID NO: 1877501
uccuuaagcauccagaaac

SEQ ID NO: 1877503 - RNA, 19 nt, Artificial Sequence
  Description of Artificial Sequence: Synthetic oligonucleotide
  Sense strand starting at position 2528 of SEQ ID NO: 1564439
guagcuaugcuuguuucuu

SEQ ID NO: 1877504 - RNA, 19 nt, Artificial Sequence
  Description of Artificial Sequence: Synthetic oligonucleotide
  Antisense strand to SEQ ID NO: 1877503
aagaaacaagcauagcuac

SEQ ID NO: 1877505 - RNA, 19 nt, Artificial Sequence
  Description of Artificial Sequence: Synthetic oligonucleotide
  Sense strand starting at position 2666 of SEQ ID NO: 1564439
agauacuucuugcuaggca

SEQ ID NO: 1877506 - RNA, 19 nt, Artificial Sequence
  Description of Artificial Sequence: Synthetic oligonucleotide
  Antisense strand to SEQ ID NO: 1877505
ugccuagcaagaaguaucu

SEQ ID NO: 1877507 - RNA, 19 nt, Artificial Sequence
  Description of Artificial Sequence: Synthetic oligonucleotide
  Sense strand starting at position 2692 of SEQ ID NO: 1564439
cauuuauagcgaugcuaga

SEQ ID NO: 1877508 - RNA, 19 nt, Artificial Sequence
  Description of Artificial Sequence: Synthetic oligonucleotide
  Antisense strand to SEQ ID NO: 1877507
ucuagcaucgcuauaaaug

SEQ ID NO: 1877509 - RNA, 19 nt, Artificial Sequence
  Description of Artificial Sequence: Synthetic oligonucleotide
  Sense strand starting at position 2945 of SEQ ID NO: 1564439
gguguuucgcgacugcgau

SEQ ID NO: 1877510 - RNA, 19 nt, Artificial Sequence
  Description of Artificial Sequence: Synthetic oligonucleotide
  Antisense strand to SEQ ID NO: 1877509
aucgcagucgcgaaacacc

SEQ ID NO: 1877511 - RNA, 19 nt, Artificial Sequence
  Description of Artificial Sequence: Synthetic oligonucleotide
  Sense strand starting at position 2958 of SEQ ID NO: 1564439
ugcgauguggucgcuggaa

SEQ ID NO: 1877512 - RNA, 19 nt, Artificial Sequence
  Description of Artificial Sequence: Synthetic oligonucleotide
  Antisense strand to SEQ ID NO: 1877511
uuccagcgaccacaucgca

SEQ ID NO: 1877513 - RNA, 19 nt, Artificial Sequence
  Description of Artificial Sequence: Synthetic oligonucleotide
  Sense strand starting at position 3065 of SEQ ID NO: 1564439
uguucuuugggcgacagaa

SEQ ID NO: 1877514 - RNA, 19 nt, Artificial Sequence
  Description of Artificial Sequence: Synthetic oligonucleotide
  Antisense strand to SEQ ID NO: 1877513
uucugucgcccaaagaaca

SEQ ID NO: 1877515 - RNA, 19 nt, Artificial Sequence
  Description of Artificial Sequence: Synthetic oligonucleotide
  Sense strand starting at position 3882 of SEQ ID NO: 1564439
aaacauguaguguggaagu

SEQ ID NO: 1877516 - RNA, 19 nt, Artificial Sequence
  Description of Artificial Sequence: Synthetic oligonucleotide
  Antisense strand to SEQ ID NO: 1877515
acuuccacacuacauguuu

SEQ ID NO: 1877517 - RNA, 19 nt, Artificial Sequence
  Description of Artificial Sequence: Synthetic oligonucleotide
  Sense strand starting at position 3884 of SEQ ID NO: 1564439
acauguaguguggaaguca

SEQ ID NO: 1877518 - RNA, 19 nt, Artificial Sequence
  Description of Artificial Sequence: Synthetic oligonucleotide
  Antisense strand to SEQ ID NO: 1877517
ugacuuccacacuacaugu

SEQ ID NO: 1877519 - RNA, 19 nt, Artificial Sequence
  Description of Artificial Sequence: Synthetic oligonucleotide
  Sense strand starting at position 3924 of SEQ ID NO: 1564439
cuagguugacgagaaacgu

SEQ ID NO: 1877520 - RNA, 19 nt, Artificial Sequence
  Description of Artificial Sequence: Synthetic oligonucleotide
  Antisense strand to SEQ ID NO: 1877519
acguuucucgucaaccuag

SEQ ID NO: 1877521 - RNA, 19 nt, Artificial Sequence
  Description of Artificial Sequence: Synthetic oligonucleotide
  Sense strand starting at position 3930 of SEQ ID NO: 1564439
ugacgagaaacguagaagu

SEQ ID NO: 1877522 - RNA, 19 nt, Artificial Sequence
  Description of Artificial Sequence: Synthetic oligonucleotide
  Antisense strand to SEQ ID NO: 1877521
acuucuacguuucucguca

SEQ ID NO: 1877523 - RNA, 19 nt, Artificial Sequence
  Description of Artificial Sequence: Synthetic oligonucleotide
  Sense strand starting at position 3932 of SEQ ID NO: 1564439
acgagaaacguagaaguca

SEQ ID NO: 1877524 - RNA, 19 nt, Artificial Sequence
  Description of Artificial Sequence: Synthetic oligonucleotide
  Antisense strand to SEQ ID NO: 1877523
ugacuucuacguuucucgu

SEQ ID NO: 1877525 - RNA, 19 nt, Artificial Sequence
  Description of Artificial Sequence: Synthetic oligonucleotide
  Sense strand starting at position 117 of SEQ ID NO: 1564440
uuccauauggaugguugua

SEQ ID NO: 1877526 - RNA, 19 nt, Artificial Sequence
  Description of Artificial Sequence: Synthetic oligonucleotide
  Antisense strand to SEQ ID NO: 1877525
uacaaccauccauauggaa

SEQ ID NO: 1877527 - RNA, 19 nt, Artificial Sequence
  Description of Artificial Sequence: Synthetic oligonucleotide
  Sense strand starting at position 119 of SEQ ID NO: 1564440
ccauauggaugguuguaau

SEQ ID NO: 1877528 - RNA, 19 nt, Artificial Sequence
  Description of Artificial Sequence: Synthetic oligonucleotide
  Antisense strand to SEQ ID NO: 1877527
auuacaaccauccauaugg

SEQ ID NO: 1877529 - RNA, 19 nt, Artificial Sequence
  Description of Artificial Sequence: Synthetic oligonucleotide
  Sense strand starting at position 126 of SEQ ID NO: 1564440
gaugguuguaaugggaauu

SEQ ID NO: 1877530 - RNA, 19 nt, Artificial Sequence
  Description of Artificial Sequence: Synthetic oligonucleotide
  Antisense strand to SEQ ID NO: 1877529
aauucccauuacaaccauc

SEQ ID NO: 1877531 - RNA, 19 nt, Artificial Sequence
  Description of Artificial Sequence: Synthetic oligonucleotide
  Sense strand starting at position 159 of SEQ ID NO: 1564440
ucucauauugccuagucau

SEQ ID NO: 1877532 - RNA, 19 nt, Artificial Sequence
  Description of Artificial Sequence: Synthetic oligonucleotide
  Antisense strand to SEQ ID NO: 1877531
augacuaggcaauaugaga

SEQ ID NO: 1877533 - RNA, 19 nt, Artificial Sequence
  Description of Artificial Sequence: Synthetic oligonucleotide
  Sense strand starting at position 251 of SEQ ID NO: 1564440
aaacuucuaguguggaaga

SEQ ID NO: 1877534 - RNA, 19 nt, Artificial Sequence
  Description of Artificial Sequence: Synthetic oligonucleotide
  Antisense strand to SEQ ID NO: 1877533
ucuuccacacuagaaguuu

SEQ ID NO: 1877535 - RNA, 19 nt, Artificial Sequence
  Description of Artificial Sequence: Synthetic oligonucleotide
  Sense strand starting at position 376 of SEQ ID NO: 1564440
cucauuuggcuccgguuau

SEQ ID NO: 1877536 - RNA, 19 nt, Artificial Sequence
  Description of Artificial Sequence: Synthetic oligonucleotide
  Antisense strand to SEQ ID NO: 1877535
auaaccggagccaaaugag

SEQ ID NO: 1877537 - RNA, 19 nt, Artificial Sequence
  Description of Artificial Sequence: Synthetic oligonucleotide
  Sense strand starting at position 380 of SEQ ID NO: 1564440
uuuggcuccgguuaugaaa

SEQ ID NO: 1877538 - RNA, 19 nt, Artificial Sequence
  Description of Artificial Sequence: Synthetic oligonucleotide
  Antisense strand to SEQ ID NO: 1877537
uuucauaaccggagccaaa

SEQ ID NO: 1877539 - RNA, 19 nt, Artificial Sequence
  Description of Artificial Sequence: Synthetic oligonucleotide
  Sense strand starting at position 406 of SEQ ID NO: 1564440
cauugagaguucuccagau

SEQ ID NO: 1877540 - RNA, 19 nt, Artificial Sequence
  Description of Artificial Sequence: Synthetic oligonucleotide
  Antisense strand to SEQ ID NO: 1877539
aucuggagaacucucaaug

SEQ ID NO: 1877541 - RNA, 19 nt, Artificial Sequence
  Description of Artificial Sequence: Synthetic oligonucleotide
  Sense strand starting at position 1002 of SEQ ID NO: 1564440
uggagugcauaaguaauau

SEQ ID NO: 1877542 - RNA, 19 nt, Artificial Sequence
  Description of Artificial Sequence: Synthetic oligonucleotide
  Antisense strand to SEQ ID NO: 1877541
auauuacuuaugcacucca

SEQ ID NO: 1877543 - RNA, 19 nt, Artificial Sequence
  Description of Artificial Sequence: Synthetic oligonucleotide
  Sense strand starting at position 1292 of SEQ ID NO: 1564440
cuaugugauucugcaagaa

SEQ ID NO: 1877544 - RNA, 19 nt, Artificial Sequence
  Description of Artificial Sequence: Synthetic oligonucleotide
  Antisense strand to SEQ ID NO: 1877543
uucuugcagaaucacauag

SEQ ID NO: 1877545 - RNA, 19 nt, Artificial Sequence
  Description of Artificial Sequence: Synthetic oligonucleotide
  Sense strand starting at position 1406 of SEQ ID NO: 1564440
cuaggcuggccugagaagu

SEQ ID NO: 1877546 - RNA, 19 nt, Artificial Sequence
  Description of Artificial Sequence: Synthetic oligonucleotide
  Antisense strand to SEQ ID NO: 1877545
acuucucaggccagccuag

SEQ ID NO: 1877547 - RNA, 19 nt, Artificial Sequence
  Description of Artificial Sequence: Synthetic oligonucleotide
  Sense strand starting at position 1417 of SEQ ID NO: 1564440
ugagaaguccugcagaugu

SEQ ID NO: 1877548 - RNA, 19 nt, Artificial Sequence
  Description of Artificial Sequence: Synthetic oligonucleotide
  Antisense strand to SEQ ID NO: 1877547
acaucugcaggacuucuca

SEQ ID NO: 1877549 - RNA, 19 nt, Artificial Sequence
  Description of Artificial Sequence: Synthetic oligonucleotide
  Sense strand starting at position 1419 of SEQ ID NO: 1564440
agaaguccugcagauguuu

SEQ ID NO: 1877550 - RNA, 19 nt, Artificial Sequence
  Description of Artificial Sequence: Synthetic oligonucleotide
  Antisense strand to SEQ ID NO: 1877549
aaacaucugcaggacuucu

SEQ ID NO: 1877551 - RNA, 19 nt, Artificial Sequence
  Description of Artificial Sequence: Synthetic oligonucleotide
  Sense strand starting at position 1457 of SEQ ID NO: 1564440
cugacauccuaagcagaga

SEQ ID NO: 1877552 - RNA, 19 nt, Artificial Sequence
  Description of Artificial Sequence: Synthetic oligonucleotide
  Antisense strand to SEQ ID NO: 1877551
ucucugcuuaggaugucag

SEQ ID NO: 1877553 - RNA, 19 nt, Artificial Sequence
  Description of Artificial Sequence: Synthetic oligonucleotide
  Sense strand starting at position 1531 of SEQ ID NO: 1564440
cccucugugugacccuaaa

SEQ ID NO: 1877554 - RNA, 19 nt, Artificial Sequence
  Description of Artificial Sequence: Synthetic oligonucleotide
  Antisense strand to SEQ ID NO: 1877553
uuuagggucacacagaggg

SEQ ID NO: 1877555 - RNA, 19 nt, Artificial Sequence
  Description of Artificial Sequence: Synthetic oligonucleotide
  Sense strand starting at position 1639 of SEQ ID NO: 1564440
acaggcugugugcaauaau

SEQ ID NO: 1877556 - RNA, 19 nt, Artificial Sequence
  Description of Artificial Sequence: Synthetic oligonucleotide
  Antisense strand to SEQ ID NO: 1877555
auuauugcacacagccugu

SEQ ID NO: 1877557 - RNA, 19 nt, Artificial Sequence
  Description of Artificial Sequence: Synthetic oligonucleotide
  Sense strand starting at position 1650 of SEQ ID NO: 1564440
gcaauaaucuggucccaua

SEQ ID NO: 1877558 - RNA, 19 nt, Artificial Sequence
  Description of Artificial Sequence: Synthetic oligonucleotide
  Antisense strand to SEQ ID NO: 1877557
uaugggaccagauuauugc

SEQ ID NO: 1877559 - RNA, 19 nt, Artificial Sequence
  Description of Artificial Sequence: Synthetic oligonucleotide
  Sense strand starting at position 1674 of SEQ ID NO: 1564440
uggaauaugaucuguugug

SEQ ID NO: 1877560 - RNA, 19 nt, Artificial Sequence
  Description of Artificial Sequence: Synthetic oligonucleotide
  Antisense strand to SEQ ID NO: 1877559
cacaacagaucauauucca

SEQ ID NO: 1877561 - RNA, 19 nt, Artificial Sequence
  Description of Artificial Sequence: Synthetic oligonucleotide
  Sense strand starting at position 1675 of SEQ ID NO: 1564440
ggaauaugaucuguugugu

SEQ ID NO: 1877562 - RNA, 19 nt, Artificial Sequence
  Description of Artificial Sequence: Synthetic oligonucleotide
  Antisense strand to SEQ ID NO: 1877561
acacaacagaucauauucc

SEQ ID NO: 1877563 - RNA, 19 nt, Artificial Sequence
  Description of Artificial Sequence: Synthetic oligonucleotide
  Sense strand starting at position 1700 of SEQ ID NO: 1564440
ggguucuuugggugauaca

SEQ ID NO: 1877564 - RNA, 19 nt, Artificial Sequence
  Description of Artificial Sequence: Synthetic oligonucleotide
  Antisense strand to SEQ ID NO: 1877563
uguaucacccaaagaaccc

SEQ ID NO: 1877565 - RNA, 19 nt, Artificial Sequence
  Description of Artificial Sequence: Synthetic oligonucleotide
  Sense strand starting at position 1701 of SEQ ID NO: 1564440
gguucuuugggugauacaa

SEQ ID NO: 1877566 - RNA, 19 nt, Artificial Sequence
  Description of Artificial Sequence: Synthetic oligonucleotide
  Antisense strand to SEQ ID NO: 1877565
uuguaucacccaaagaacc

SEQ ID NO: 1877567 - RNA, 19 nt, Artificial Sequence
  Description of Artificial Sequence: Synthetic oligonucleotide
  Sense strand starting at position 1801 of SEQ ID NO: 1564440
cucagaagcucucugggaa

SEQ ID NO: 1877568 - RNA, 19 nt, Artificial Sequence
  Description of Artificial Sequence: Synthetic oligonucleotide
  Antisense strand to SEQ ID NO: 1877567
uucccagagagcuucugag

SEQ ID NO: 1877569 - RNA, 19 nt, Artificial Sequence
  Description of Artificial Sequence: Synthetic oligonucleotide
  Sense strand starting at position 1853 of SEQ ID NO: 1564440
ggaggaguguucucauacc

SEQ ID NO: 1877570 - RNA, 19 nt, Artificial Sequence
  Description of Artificial Sequence: Synthetic oligonucleotide
  Antisense strand to SEQ ID NO: 1877569
gguaugagaacacuccucc

SEQ ID NO: 1877571 - RNA, 19 nt, Artificial Sequence
  Description of Artificial Sequence: Synthetic oligonucleotide
  Sense strand starting at position 1901 of SEQ ID NO: 1564440
guuauucucuuaccucaga

SEQ ID NO: 1877572 - RNA, 19 nt, Artificial Sequence
  Description of Artificial Sequence: Synthetic oligonucleotide
  Antisense strand to SEQ ID NO: 1877571
ucugagguaagagaauaac

SEQ ID NO: 1877573 - RNA, 19 nt, Artificial Sequence
  Description of Artificial Sequence: Synthetic oligonucleotide
  Sense strand starting at position 2477 of SEQ ID NO: 1564440
ccaaaucuugcagauguuu

SEQ ID NO: 1877574 - RNA, 19 nt, Artificial Sequence
  Description of Artificial Sequence: Synthetic oligonucleotide
  Antisense strand to SEQ ID NO: 1877573
aaacaucugcaagauuugg

SEQ ID NO: 1877575 - RNA, 19 nt, Artificial Sequence
  Description of Artificial Sequence: Synthetic oligonucleotide
  Sense strand starting at position 2489 of SEQ ID NO: 1564440
gauguuucuggaugcuuaa

SEQ ID NO: 1877576 - RNA, 19 nt, Artificial Sequence
  Description of Artificial Sequence: Synthetic oligonucleotide
  Antisense strand to SEQ ID NO: 1877575
uuaagcauccagaaacauc

SEQ ID NO: 1877577 - RNA, 19 nt, Artificial Sequence
  Description of Artificial Sequence: Synthetic oligonucleotide
  Sense strand starting at position 2492 of SEQ ID NO: 1564440
guuucuggaugcuuaagga

SEQ ID NO: 1877578 - RNA, 19 nt, Artificial Sequence
  Description of Artificial Sequence: Synthetic oligonucleotide
  Antisense strand to SEQ ID NO: 1877577
uccuuaagcauccagaaac

SEQ ID NO: 1877579 - RNA, 19 nt, Artificial Sequence
  Description of Artificial Sequence: Synthetic oligonucleotide
  Sense strand starting at position 2528 of SEQ ID NO: 1564440
guagcuaugcuuguuucuu

SEQ ID NO: 1877580 - RNA, 19 nt, Artificial Sequence
  Description of Artificial Sequence: Synthetic oligonucleotide
  Antisense strand to SEQ ID NO: 1877579
aagaaacaagcauagcuac

SEQ ID NO: 1877581 - RNA, 19 nt, Artificial Sequence
  Description of Artificial Sequence: Synthetic oligonucleotide
  Sense strand starting at position 2575 of SEQ ID NO: 1564440
ggaucaugagacuauccgu

SEQ ID NO: 1877582 - RNA, 19 nt, Artificial Sequence
  Description of Artificial Sequence: Synthetic oligonucleotide
  Antisense strand to SEQ ID NO: 1877581
acggauagucucaugaucc

SEQ ID NO: 1877583 - RNA, 19 nt, Artificial Sequence
  Description of Artificial Sequence: Synthetic oligonucleotide
  Sense strand starting at position 2580 of SEQ ID NO: 1564440
augagacuauccguggauu

SEQ ID NO: 1877584 - RNA, 19 nt, Artificial Sequence
  Description of Artificial Sequence: Synthetic oligonucleotide
  Antisense strand to SEQ ID NO: 1877583
aauccacggauagucucau

SEQ ID NO: 1877585 - RNA, 19 nt, Artificial Sequence
  Description of Artificial Sequence: Synthetic oligonucleotide
  Sense strand starting at position 2666 of SEQ ID NO: 1564440
agauacuucuugcuaggca

SEQ ID NO: 1877586 - RNA, 19 nt, Artificial Sequence
  Description of Artificial Sequence: Synthetic oligonucleotide
  Antisense strand to SEQ ID NO: 1877585
ugccuagcaagaaguaucu

SEQ ID NO: 1877587 - RNA, 19 nt, Artificial Sequence
  Description of Artificial Sequence: Synthetic oligonucleotide
  Sense strand starting at position 2692 of SEQ ID NO: 1564440
cauuuauagcgaugcuaga

SEQ ID NO: 1877588 - RNA, 19 nt, Artificial Sequence
  Description of Artificial Sequence: Synthetic oligonucleotide
  Antisense strand to SEQ ID NO: 1877587
ucuagcaucgcuauaaaug

SEQ ID NO: 1877589 - RNA, 19 nt, Artificial Sequence
  Description of Artificial Sequence: Synthetic oligonucleotide
  Sense strand starting at position 2945 of SEQ ID NO: 1564440
gguguuucgcgacugcgau

SEQ ID NO: 1877590 - RNA, 19 nt, Artificial Sequence
  Description of Artificial Sequence: Synthetic oligonucleotide
  Antisense strand to SEQ ID NO: 1877589
aucgcagucgcgaaacacc

SEQ ID NO: 1877591 - RNA, 19 nt, Artificial Sequence
  Description of Artificial Sequence: Synthetic oligonucleotide
  Sense strand starting at position 2958 of SEQ ID NO: 1564440
ugcgauguggucgcuggaa

SEQ ID NO: 1877592 - RNA, 19 nt, Artificial Sequence
  Description of Artificial Sequence: Synthetic oligonucleotide
  Antisense strand to SEQ ID NO: 1877591
uuccagcgaccacaucgca

SEQ ID NO: 1877593 - RNA, 19 nt, Artificial Sequence
  Description of Artificial Sequence: Synthetic oligonucleotide
  Sense strand starting at position 3065 of SEQ ID NO: 1564440
uguucuuugggcgacagaa

SEQ ID NO: 1877594 - RNA, 19 nt, Artificial Sequence
  Description of Artificial Sequence: Synthetic oligonucleotide
  Antisense strand to SEQ ID NO: 1877593
uucugucgcccaaagaaca

SEQ ID NO: 1877595 - RNA, 19 nt, Artificial Sequence
  Description of Artificial Sequence: Synthetic oligonucleotide
  Sense strand starting at position 3882 of SEQ ID NO: 1564440
aaacauguaguguggaagu

SEQ ID NO: 1877596 - RNA, 19 nt, Artificial Sequence
  Description of Artificial Sequence: Synthetic oligonucleotide
  Antisense strand to SEQ ID NO: 1877595
acuuccacacuacauguuu

SEQ ID NO: 1877597 - RNA, 19 nt, Artificial Sequence
  Description of Artificial Sequence: Synthetic oligonucleotide
  Sense strand starting at position 3884 of SEQ ID NO: 1564440
acauguaguguggaaguca

SEQ ID NO: 1877598 - RNA, 19 nt, Artificial Sequence
  Description of Artificial Sequence: Synthetic oligonucleotide
  Antisense strand to SEQ ID NO: 1877597
ugacuuccacacuacaugu

SEQ ID NO: 1877599 - RNA, 19 nt, Artificial Sequence
  Description of Artificial Sequence: Synthetic oligonucleotide
  Sense strand starting at position 3924 of SEQ ID NO: 1564440
cuagguugacgagaaacgu

SEQ ID NO: 1877600 - RNA, 19 nt, Artificial Sequence
  Description of Artificial Sequence: Synthetic oligonucleotide
  Antisense strand to SEQ ID NO: 1877599
acguuucucgucaaccuag

SEQ ID NO: 1877601 - RNA, 19 nt, Artificial Sequence
  Description of Artificial Sequence: Synthetic oligonucleotide
  Sense strand starting at position 3930 of SEQ ID NO: 1564440
ugacgagaaacguagaagu

SEQ ID NO: 1877602 - RNA, 19 nt, Artificial Sequence
  Description of Artificial Sequence: Synthetic oligonucleotide
  Antisense strand to SEQ ID NO: 1877601
acuucuacguuucucguca

SEQ ID NO: 1877603 - RNA, 19 nt, Artificial Sequence
  Description of Artificial Sequence: Synthetic oligonucleotide
  Sense strand starting at position 3932 of SEQ ID NO: 1564440
acgagaaacguagaaguca

SEQ ID NO: 1877604 - RNA, 19 nt, Artificial Sequence
  Description of Artificial Sequence: Synthetic oligonucleotide
  Antisense strand to SEQ ID NO: 1877603
ugacuucuacguuucucgu

SEQ ID NO: 1877605 - RNA, 19 nt, Artificial Sequence
  Description of Artificial Sequence: Synthetic oligonucleotide
  Sense strand starting at position 354 of SEQ ID NO: 1564455
ugagguacggugugauguu

SEQ ID NO: 1877606 - RNA, 19 nt, Artificial Sequence
  Description of Artificial Sequence: Synthetic oligonucleotide
  Antisense strand to SEQ ID NO: 1877605
aacaucacaccguaccuca

SEQ ID NO: 1877607 - RNA, 19 nt, Artificial Sequence
  Description of Artificial Sequence: Synthetic oligonucleotide
  Sense strand starting at position 355 of SEQ ID NO: 1564455
gagguacggugugauguuu

SEQ ID NO: 1877608 - RNA, 19 nt, Artificial Sequence
  Description of Artificial Sequence: Synthetic oligonucleotide
  Antisense strand to SEQ ID NO: 1877607
aaacaucacaccguaccuc

SEQ ID NO: 1877609 - RNA, 19 nt, Artificial Sequence
  Description of Artificial Sequence: Synthetic oligonucleotide
  Sense strand starting at position 1072 of SEQ ID NO: 1564455
gcaaccuuugucugaggaa

SEQ ID NO: 1877610 - RNA, 19 nt, Artificial Sequence
  Description of Artificial Sequence: Synthetic oligonucleotide
  Antisense strand to SEQ ID NO: 1877609
uuccucagacaaagguugc

SEQ ID NO: 1877611 - RNA, 19 nt, Artificial Sequence
  Description of Artificial Sequence: Synthetic oligonucleotide
  Sense strand starting at position 1073 of SEQ ID NO: 1564455
caaccuuugucugaggaaa

SEQ ID NO: 1877612 - RNA, 19 nt, Artificial Sequence
  Description of Artificial Sequence: Synthetic oligonucleotide
  Antisense strand to SEQ ID NO: 1877611
uuuccucagacaaagguug

SEQ ID NO: 1877613 - RNA, 19 nt, Artificial Sequence
  Description of Artificial Sequence: Synthetic oligonucleotide
  Sense strand starting at position 1321 of SEQ ID NO: 1564455
acuuauucgguuuaaacua

SEQ ID NO: 1877614 - RNA, 19 nt, Artificial Sequence
  Description of Artificial Sequence: Synthetic oligonucleotide
  Antisense strand to SEQ ID NO: 1877613
uaguuuaaaccgaauaagu

SEQ ID NO: 1877615 - RNA, 19 nt, Artificial Sequence
  Description of Artificial Sequence: Synthetic oligonucleotide
  Sense strand starting at position 1517 of SEQ ID NO: 1564455
cgcgacacgugcuaacuaa

SEQ ID NO: 1877616 - RNA, 19 nt, Artificial Sequence
  Description of Artificial Sequence: Synthetic oligonucleotide
  Antisense strand to SEQ ID NO: 1877615
uuaguuagcacgugucgcg

SEQ ID NO: 1877617 - RNA, 19 nt, Artificial Sequence
  Description of Artificial Sequence: Synthetic oligonucleotide
  Sense strand starting at position 1553 of SEQ ID NO: 1564455
cgcaguguuuaaguguauu

SEQ ID NO: 1877618 - RNA, 19 nt, Artificial Sequence
  Description of Artificial Sequence: Synthetic oligonucleotide
  Antisense strand to SEQ ID NO: 1877617
aauacacuuaaacacugcg

SEQ ID NO: 1877619 - RNA, 19 nt, Artificial Sequence
  Description of Artificial Sequence: Synthetic oligonucleotide
  Sense strand starting at position 2349 of SEQ ID NO: 1564455
ggcugaugguaccgaauau

SEQ ID NO: 1877620 - RNA, 19 nt, Artificial Sequence
  Description of Artificial Sequence: Synthetic oligonucleotide
  Antisense strand to SEQ ID NO: 1877619
auauucgguaccaucagcc

SEQ ID NO: 1877621 - RNA, 19 nt, Artificial Sequence
  Description of Artificial Sequence: Synthetic oligonucleotide
  Sense strand starting at position 2350 of SEQ ID NO: 1564455
gcugaugguaccgaauauu

SEQ ID NO: 1877622 - RNA, 19 nt, Artificial Sequence
  Description of Artificial Sequence: Synthetic oligonucleotide
  Antisense strand to SEQ ID NO: 1877621
aauauucgguaccaucagc

SEQ ID NO: 1877623 - RNA, 19 nt, Artificial Sequence
  Description of Artificial Sequence: Synthetic oligonucleotide
  Sense strand starting at position 2353 of SEQ ID NO: 1564455
gaugguaccgaauauugca

SEQ ID NO: 1877624 - RNA, 19 nt, Artificial Sequence
  Description of Artificial Sequence: Synthetic oligonucleotide
  Antisense strand to SEQ ID NO: 1877623
ugcaauauucgguaccauc

SEQ ID NO: 1877625 - RNA, 19 nt, Artificial Sequence
  Description of Artificial Sequence: Synthetic oligonucleotide
  Sense strand starting at position 3 of SEQ ID NO: 1564456
ugcugcaaguggucaaaga

SEQ ID NO: 1877626 - RNA, 19 nt, Artificial Sequence
  Description of Artificial Sequence: Synthetic oligonucleotide
  Antisense strand to SEQ ID NO: 1877625
ucuuugaccacuugcagca

SEQ ID NO: 1877627 - RNA, 19 nt, Artificial Sequence
  Description of Artificial Sequence: Synthetic oligonucleotide
  Sense strand starting at position 4 of SEQ ID NO: 1564456
gcugcaaguggucaaagaa

SEQ ID NO: 1877628 - RNA, 19 nt, Artificial Sequence
  Description of Artificial Sequence: Synthetic oligonucleotide
  Antisense strand to SEQ ID NO: 1877627
uucuuugaccacuugcagc

SEQ ID NO: 1877629 - RNA, 19 nt, Artificial Sequence
  Description of Artificial Sequence: Synthetic oligonucleotide
  Sense strand starting at position 192 of SEQ ID NO: 1564456
ggacaaaugcugcauuaua

SEQ ID NO: 1877630 - RNA, 19 nt, Artificial Sequence
  Description of Artificial Sequence: Synthetic oligonucleotide
  Antisense strand to SEQ ID NO: 1877629
uauaaugcagcauuugucc

SEQ ID NO: 1877631 - RNA, 19 nt, Artificial Sequence
  Description of Artificial Sequence: Synthetic oligonucleotide
  Sense strand starting at position 203 of SEQ ID NO: 1564456
gcauuauaauccguaccug

SEQ ID NO: 1877632 - RNA, 19 nt, Artificial Sequence
  Description of Artificial Sequence: Synthetic oligonucleotide
  Antisense strand to SEQ ID NO: 1877631
cagguacggauuauaaugc

SEQ ID NO: 1877633 - RNA, 19 nt, Artificial Sequence
  Description of Artificial Sequence: Synthetic oligonucleotide
  Sense strand starting at position 272 of SEQ ID NO: 1564456
uaaguuguaaugugaaggu

SEQ ID NO: 1877634 - RNA, 19 nt, Artificial Sequence
  Description of Artificial Sequence: Synthetic oligonucleotide
  Antisense strand to SEQ ID NO: 1877633
accuucacauuacaacuua

SEQ ID NO: 1877635 - RNA, 19 nt, Artificial Sequence
  Description of Artificial Sequence: Synthetic oligonucleotide
  Sense strand starting at position 320 of SEQ ID NO: 1564456
acuauacauuuaugaggua

SEQ ID NO: 1877636 - RNA, 19 nt, Artificial Sequence
  Description of Artificial Sequence: Synthetic oligonucleotide
  Antisense strand to SEQ ID NO: 1877635
uaccucauaaauguauagu

SEQ ID NO: 1877637 - RNA, 19 nt, Artificial Sequence
  Description of Artificial Sequence: Synthetic oligonucleotide
  Sense strand starting at position 483 of SEQ ID NO: 1564456
uuaccacagcuguguaauu

SEQ ID NO: 1877638 - RNA, 19 nt, Artificial Sequence
  Description of Artificial Sequence: Synthetic oligonucleotide
  Antisense strand to SEQ ID NO: 1877637
aauuacacagcugugguaa

SEQ ID NO: 1877639 - RNA, 19 nt, Artificial Sequence
  Description of Artificial Sequence: Synthetic oligonucleotide
  Sense strand starting at position 535 of SEQ ID NO: 1564456
ugugaauagacacggguuu

SEQ ID NO: 1877640 - RNA, 19 nt, Artificial Sequence
  Description of Artificial Sequence: Synthetic oligonucleotide
  Antisense strand to SEQ ID NO: 1877639
aaacccgugucuauucaca

SEQ ID NO: 1877641 - RNA, 19 nt, Artificial Sequence
  Description of Artificial Sequence: Synthetic oligonucleotide
  Sense strand starting at position 592 of SEQ ID NO: 1564456
aagugaucugccggcuuag

SEQ ID NO: 1877642 - RNA, 19 nt, Artificial Sequence
  Description of Artificial Sequence: Synthetic oligonucleotide
  Antisense strand to SEQ ID NO: 1877641
cuaagccggcagaucacuu

SEQ ID NO: 1877643 - RNA, 19 nt, Artificial Sequence
  Description of Artificial Sequence: Synthetic oligonucleotide
  Sense strand starting at position 653 of SEQ ID NO: 1564456
cagcgagauacgcggauaa

SEQ ID NO: 1877644 - RNA, 19 nt, Artificial Sequence
  Description of Artificial Sequence: Synthetic oligonucleotide
  Antisense strand to SEQ ID NO: 1877643
uuauccgcguaucucgcug

SEQ ID NO: 1877645 - RNA, 19 nt, Artificial Sequence
  Description of Artificial Sequence: Synthetic oligonucleotide
  Sense strand starting at position 1071 of SEQ ID NO: 1564456
gcaacccuugucugaggaa

SEQ ID NO: 1877646 - RNA, 19 nt, Artificial Sequence
  Description of Artificial Sequence: Synthetic oligonucleotide
  Antisense strand to SEQ ID NO: 1877645
uuccucagacaaggguugc

SEQ ID NO: 1877647 - RNA, 19 nt, Artificial Sequence
  Description of Artificial Sequence: Synthetic oligonucleotide
  Sense strand starting at position 1134 of SEQ ID NO: 1564456
gaaagaguccauuacguua

SEQ ID NO: 1877648 - RNA, 19 nt, Artificial Sequence
  Description of Artificial Sequence: Synthetic oligonucleotide
  Antisense strand to SEQ ID NO: 1877647
uaacguaauggacucuuuc

SEQ ID NO: 1877649 - RNA, 19 nt, Artificial Sequence
  Description of Artificial Sequence: Synthetic oligonucleotide
  Sense strand starting at position 1337 of SEQ ID NO: 1564456
uauuuacggugccaaacau

SEQ ID NO: 1877650 - RNA, 19 nt, Artificial Sequence
  Description of Artificial Sequence: Synthetic oligonucleotide
  Antisense strand to SEQ ID NO: 1877649
auguuuggcaccguaaaua

SEQ ID NO: 1877651 - RNA, 19 nt, Artificial Sequence
  Description of Artificial Sequence: Synthetic oligonucleotide
  Sense strand starting at position 1397 of SEQ ID NO: 1564456
ccuuuacagucuuuacaga

SEQ ID NO: 1877652 - RNA, 19 nt, Artificial Sequence
  Description of Artificial Sequence: Synthetic oligonucleotide
  Antisense strand to SEQ ID NO: 1877651
ucuguaaagacuguaaagg

SEQ ID NO: 1877653 - RNA, 19 nt, Artificial Sequence
  Description of Artificial Sequence: Synthetic oligonucleotide
  Sense strand starting at position 1488 of SEQ ID NO: 1564456
aguugauaauucccgucaa

SEQ ID NO: 1877654 - RNA, 19 nt, Artificial Sequence
  Description of Artificial Sequence: Synthetic oligonucleotide
  Antisense strand to SEQ ID NO: 1877653
uugacgggaauuaucaacu

SEQ ID NO: 1877655 - RNA, 19 nt, Artificial Sequence
  Description of Artificial Sequence: Synthetic oligonucleotide
  Sense strand starting at position 1501 of SEQ ID NO: 1564456
cgucaagcaaaucagagau

SEQ ID NO: 1877656 - RNA, 19 nt, Artificial Sequence
  Description of Artificial Sequence: Synthetic oligonucleotide
  Antisense strand to SEQ ID NO: 1877655
aucucugauuugcuugacg

SEQ ID NO: 1877657 - RNA, 19 nt, Artificial Sequence
  Description of Artificial Sequence: Synthetic oligonucleotide
  Sense strand starting at position 1507 of SEQ ID NO: 1564456
gcaaaucagagaugugaca

SEQ ID NO: 1877658 - RNA, 19 nt, Artificial Sequence
  Description of Artificial Sequence: Synthetic oligonucleotide
  Antisense strand to SEQ ID NO: 1877657
ugucacaucucugauuugc

SEQ ID NO: 1877659 - RNA, 19 nt, Artificial Sequence
  Description of Artificial Sequence: Synthetic oligonucleotide
  Sense strand starting at position 1519 of SEQ ID NO: 1564456
ugugacaugcguugacuaa

SEQ ID NO: 1877660 - RNA, 19 nt, Artificial Sequence
  Description of Artificial Sequence: Synthetic oligonucleotide
  Antisense strand to SEQ ID NO: 1877659
uuagucaacgcaugucaca

SEQ ID NO: 1877661 - RNA, 19 nt, Artificial Sequence
  Description of Artificial Sequence: Synthetic oligonucleotide
  Sense strand starting at position 1520 of SEQ ID NO: 1564456
gugacaugcguugacuaaa

SEQ ID NO: 1877662 - RNA, 19 nt, Artificial Sequence
  Description of Artificial Sequence: Synthetic oligonucleotide
  Antisense strand to SEQ ID NO: 1877661
uuuagucaacgcaugucac

SEQ ID NO: 1877663 - RNA, 19 nt, Artificial Sequence
  Description of Artificial Sequence: Synthetic oligonucleotide
  Sense strand starting at position 1552 of SEQ ID NO: 1564456
aaucgccuugguuaaguau

SEQ ID NO: 1877664 - RNA, 19 nt, Artificial Sequence
  Description of Artificial Sequence: Synthetic oligonucleotide
  Antisense strand to SEQ ID NO: 1877663
auacuuaaccaaggcgauu

SEQ ID NO: 1877665 - RNA, 19 nt, Artificial Sequence
  Description of Artificial Sequence: Synthetic oligonucleotide
  Sense strand starting at position 1555 of SEQ ID NO: 1564456
cgccuugguuaaguauauu

SEQ ID NO: 1877666 - RNA, 19 nt, Artificial Sequence
  Description of Artificial Sequence: Synthetic oligonucleotide
  Antisense strand to SEQ ID NO: 1877665
aauauacuuaaccaaggcg

SEQ ID NO: 1877667 - RNA, 19 nt, Artificial Sequence
  Description of Artificial Sequence: Synthetic oligonucleotide
  Sense strand starting at position 1563 of SEQ ID NO: 1564456
uuaaguauauugccuguau

SEQ ID NO: 1877668 - RNA, 19 nt, Artificial Sequence
  Description of Artificial Sequence: Synthetic oligonucleotide
  Antisense strand to SEQ ID NO: 1877667
auacaggcaauauacuuaa

SEQ ID NO: 1877669 - RNA, 19 nt, Artificial Sequence
  Description of Artificial Sequence: Synthetic oligonucleotide
  Sense strand starting at position 1664 of SEQ ID NO: 1564456
ccacaacuagucggacaua

SEQ ID NO: 1877670 - RNA, 19 nt, Artificial Sequence
  Description of Artificial Sequence: Synthetic oligonucleotide
  Antisense strand to SEQ ID NO: 1877669
uauguccgacuaguugugg

SEQ ID NO: 1877671 - RNA, 19 nt, Artificial Sequence
  Description of Artificial Sequence: Synthetic oligonucleotide
  Sense strand starting at position 1667 of SEQ ID NO: 1564456
caacuagucggacauauua

SEQ ID NO: 1877672 - RNA, 19 nt, Artificial Sequence
  Description of Artificial Sequence: Synthetic oligonucleotide
  Antisense strand to SEQ ID NO: 1877671
uaauauguccgacuaguug

SEQ ID NO: 1877673 - RNA, 19 nt, Artificial Sequence
  Description of Artificial Sequence: Synthetic oligonucleotide
  Sense strand starting at position 1675 of SEQ ID NO: 1564456
cggacauauuaggcaguua

SEQ ID NO: 1877674 - RNA, 19 nt, Artificial Sequence
  Description of Artificial Sequence: Synthetic oligonucleotide
  Antisense strand to SEQ ID NO: 1877673
uaacugccuaauauguccg

SEQ ID NO: 1877675 - RNA, 19 nt, Artificial Sequence
  Description of Artificial Sequence: Synthetic oligonucleotide
  Sense strand starting at position 1680 of SEQ ID NO: 1564456
auauuaggcaguuaaaggu

SEQ ID NO: 1877676 - RNA, 19 nt, Artificial Sequence
  Description of Artificial Sequence: Synthetic oligonucleotide
  Antisense strand to SEQ ID NO: 1877675
accuuuaacugccuaauau

SEQ ID NO: 1877677 - RNA, 19 nt, Artificial Sequence
  Description of Artificial Sequence: Synthetic oligonucleotide
  Sense strand starting at position 2149 of SEQ ID NO: 1564456
cuccauuaugucgcgguaa

SEQ ID NO: 1877678 - RNA, 19 nt, Artificial Sequence
  Description of Artificial Sequence: Synthetic oligonucleotide
  Antisense strand to SEQ ID NO: 1877677
uuaccgcgacauaauggag

SEQ ID NO: 1877679 - RNA, 19 nt, Artificial Sequence
  Description of Artificial Sequence: Synthetic oligonucleotide
  Sense strand starting at position 2321 of SEQ ID NO: 1564456
ugaaacaucuuacuucgua

SEQ ID NO: 1877680 - RNA, 19 nt, Artificial Sequence
  Description of Artificial Sequence: Synthetic oligonucleotide
  Antisense strand to SEQ ID NO: 1877679
uacgaaguaagauguuuca

SEQ ID NO: 1877681 - RNA, 19 nt, Artificial Sequence
  Description of Artificial Sequence: Synthetic oligonucleotide
  Sense strand starting at position 3004 of SEQ ID NO: 1564456
caaggagggcaucguguua

SEQ ID NO: 1877682 - RNA, 19 nt, Artificial Sequence
  Description of Artificial Sequence: Synthetic oligonucleotide
  Antisense strand to SEQ ID NO: 1877681
uaacacgaugcccuccuug

SEQ ID NO: 1877683 - RNA, 19 nt, Artificial Sequence
  Description of Artificial Sequence: Synthetic oligonucleotide
  Sense strand starting at position 3103 of SEQ ID NO: 1564456
augacaucauggcagagau

SEQ ID NO: 1877684 - RNA, 19 nt, Artificial Sequence
  Description of Artificial Sequence: Synthetic oligonucleotide
  Antisense strand to SEQ ID NO: 1877683
aucucugccaugaugucau

SEQ ID NO: 1877685 - RNA, 19 nt, Artificial Sequence
  Description of Artificial Sequence: Synthetic oligonucleotide
  Sense strand starting at position 3241 of SEQ ID NO: 1564456
uggagcugggcucgguaaa

SEQ ID NO: 1877686 - RNA, 19 nt, Artificial Sequence
  Description of Artificial Sequence: Synthetic oligonucleotide
  Antisense strand to SEQ ID NO: 1877685
uuuaccgagcccagcucca

SEQ ID NO: 1877687 - RNA, 19 nt, Artificial Sequence
  Description of Artificial Sequence: Synthetic oligonucleotide
  Sense strand starting at position 3242 of SEQ ID NO: 1564456
ggagcugggcucgguaaau

SEQ ID NO: 1877688 - RNA, 19 nt, Artificial Sequence
  Description of Artificial Sequence: Synthetic oligonucleotide
  Antisense strand to SEQ ID NO: 1877687
auuuaccgagcccagcucc

SEQ ID NO: 1877689 - RNA, 19 nt, Artificial Sequence
  Description of Artificial Sequence: Synthetic oligonucleotide
  Sense strand starting at position 3314 of SEQ ID NO: 1564456
cugucaauucgggauggcu

SEQ ID NO: 1877690 - RNA, 19 nt, Artificial Sequence
  Description of Artificial Sequence: Synthetic oligonucleotide
  Antisense strand to SEQ ID NO: 1877689
agccaucccgaauugacag

SEQ ID NO: 1877691 - RNA, 19 nt, Artificial Sequence
  Description of Artificial Sequence: Synthetic oligonucleotide
  Sense strand starting at position 3519 of SEQ ID NO: 1564456
gcacaauacucacaaggga

SEQ ID NO: 1877692 - RNA, 19 nt, Artificial Sequence
  Description of Artificial Sequence: Synthetic oligonucleotide
  Antisense strand to SEQ ID NO: 1877691
ucccuugugaguauugugc

SEQ ID NO: 1877693 - RNA, 19 nt, Artificial Sequence
  Description of Artificial Sequence: Synthetic oligonucleotide
  Sense strand starting at position 3546 of SEQ ID NO: 1564456
gcucaaaggacccgucaua

SEQ ID NO: 1877694 - RNA, 19 nt, Artificial Sequence
  Description of Artificial Sequence: Synthetic oligonucleotide
  Antisense strand to SEQ ID NO: 1877693
uaugacggguccuuugagc

SEQ ID NO: 1877695 - RNA, 19 nt, Artificial Sequence
  Description of Artificial Sequence: Synthetic oligonucleotide
  Sense strand starting at position 3675 of SEQ ID NO: 1564456
gcaggcuuaccucagaaac

SEQ ID NO: 1877696 - RNA, 19 nt, Artificial Sequence
  Description of Artificial Sequence: Synthetic oligonucleotide
  Antisense strand to SEQ ID NO: 1877695
guuucugagguaagccugc

SEQ ID NO: 1877697 - RNA, 19 nt, Artificial Sequence
  Description of Artificial Sequence: Synthetic oligonucleotide
  Sense strand starting at position 3804 of SEQ ID NO: 1564456
augguuaggcccugagcau

SEQ ID NO: 1877698 - RNA, 19 nt, Artificial Sequence
  Description of Artificial Sequence: Synthetic oligonucleotide
  Antisense strand to SEQ ID NO: 1877697
augcucagggccuaaccau

SEQ ID NO: 1877699 - RNA, 19 nt, Artificial Sequence
  Description of Artificial Sequence: Synthetic oligonucleotide
  Sense strand starting at position 3805 of SEQ ID NO: 1564456
ugguuaggcccugagcaua

SEQ ID NO: 1877700 - RNA, 19 nt, Artificial Sequence
  Description of Artificial Sequence: Synthetic oligonucleotide
  Antisense strand to SEQ ID NO: 1877699
uaugcucagggccuaacca

SEQ ID NO: 1877701 - RNA, 19 nt, Artificial Sequence
  Description of Artificial Sequence: Synthetic oligonucleotide
  Sense strand starting at position 3821 of SEQ ID NO: 1564456
auauauaaccuccguugaa

SEQ ID NO: 1877702 - RNA, 19 nt, Artificial Sequence
  Description of Artificial Sequence: Synthetic oligonucleotide
  Antisense strand to SEQ ID NO: 1877701
uucaacggagguuauauau

SEQ ID NO: 1877703 - RNA, 19 nt, Artificial Sequence
  Description of Artificial Sequence: Synthetic oligonucleotide
  Sense strand starting at position 3834 of SEQ ID NO: 1564456
guugaaaccacucgagucu

SEQ ID NO: 1877704 - RNA, 19 nt, Artificial Sequence
  Description of Artificial Sequence: Synthetic oligonucleotide
  Antisense strand to SEQ ID NO: 1877703
agacucgagugguuucaac

SEQ ID NO: 1877705 - RNA, 19 nt, Artificial Sequence
  Description of Artificial Sequence: Synthetic oligonucleotide
  Sense strand starting at position 354 of SEQ ID NO: 1564457
ugagguacggugugauguu

SEQ ID NO: 1877706 - RNA, 19 nt, Artificial Sequence
  Description of Artificial Sequence: Synthetic oligonucleotide
  Antisense strand to SEQ ID NO: 1877705
aacaucacaccguaccuca

SEQ ID NO: 1877707 - RNA, 19 nt, Artificial Sequence
  Description of Artificial Sequence: Synthetic oligonucleotide
  Sense strand starting at position 355 of SEQ ID NO: 1564457
gagguacggugugauguuu

SEQ ID NO: 1877708 - RNA, 19 nt, Artificial Sequence
  Description of Artificial Sequence: Synthetic oligonucleotide
  Antisense strand to SEQ ID NO: 1877707
aaacaucacaccguaccuc

SEQ ID NO: 1877709 - RNA, 19 nt, Artificial Sequence
  Description of Artificial Sequence: Synthetic oligonucleotide
  Sense strand starting at position 1072 of SEQ ID NO: 1564457
gcaaccuuugucugaggaa

SEQ ID NO: 1877710 - RNA, 19 nt, Artificial Sequence
  Description of Artificial Sequence: Synthetic oligonucleotide
  Antisense strand to SEQ ID NO: 1877709
uuccucagacaaagguugc

SEQ ID NO: 1877711 - RNA, 19 nt, Artificial Sequence
  Description of Artificial Sequence: Synthetic oligonucleotide
  Sense strand starting at position 1073 of SEQ ID NO: 1564457
caaccuuugucugaggaaa

SEQ ID NO: 1877712 - RNA, 19 nt, Artificial Sequence
  Description of Artificial Sequence: Synthetic oligonucleotide
  Antisense strand to SEQ ID NO: 1877711
uuuccucagacaaagguug

SEQ ID NO: 1877713 - RNA, 19 nt, Artificial Sequence
  Description of Artificial Sequence: Synthetic oligonucleotide
  Sense strand starting at position 1321 of SEQ ID NO: 1564457
acuuauucgguuuaaacua

SEQ ID NO: 1877714 - RNA, 19 nt, Artificial Sequence
  Description of Artificial Sequence: Synthetic oligonucleotide
  Antisense strand to SEQ ID NO: 1877713
uaguuuaaaccgaauaagu

SEQ ID NO: 1877715 - RNA, 19 nt, Artificial Sequence
  Description of Artificial Sequence: Synthetic oligonucleotide
  Sense strand starting at position 1517 of SEQ ID NO: 1564457
cgcgacacgugcuaacuaa

SEQ ID NO: 1877716 - RNA, 19 nt, Artificial Sequence
  Description of Artificial Sequence: Synthetic oligonucleotide
  Antisense strand to SEQ ID NO: 1877715
uuaguuagcacgugucgcg

SEQ ID NO: 1877717 - RNA, 19 nt, Artificial Sequence
  Description of Artificial Sequence: Synthetic oligonucleotide
  Sense strand starting at position 1553 of SEQ ID NO: 1564457
cgcaguguuuaaguguauu

SEQ ID NO: 1877718 - RNA, 19 nt, Artificial Sequence
  Description of Artificial Sequence: Synthetic oligonucleotide
  Antisense strand to SEQ ID NO: 1877717
aauacacuuaaacacugcg

SEQ ID NO: 1877719 - RNA, 19 nt, Artificial Sequence
  Description of Artificial Sequence: Synthetic oligonucleotide
  Sense strand starting at position 2349 of SEQ ID NO: 1564457
ggcugaugguaccgaauau

SEQ ID NO: 1877720 - RNA, 19 nt, Artificial Sequence
  Description of Artificial Sequence: Synthetic oligonucleotide
  Antisense strand to SEQ ID NO: 1877719
auauucgguaccaucagcc

SEQ ID NO: 1877721 - RNA, 19 nt, Artificial Sequence
  Description of Artificial Sequence: Synthetic oligonucleotide
  Sense strand starting at position 2350 of SEQ ID NO: 1564457
gcugaugguaccgaauauu

SEQ ID NO: 1877722 - RNA, 19 nt, Artificial Sequence
  Description of Artificial Sequence: Synthetic oligonucleotide
  Antisense strand to SEQ ID NO: 1877721
aauauucgguaccaucagc

SEQ ID NO: 1877723 - RNA, 19 nt, Artificial Sequence
  Description of Artificial Sequence: Synthetic oligonucleotide
  Sense strand starting at position 2353 of SEQ ID NO: 1564457
gaugguaccgaauauugca

SEQ ID NO: 1877724 - RNA, 19 nt, Artificial Sequence
  Description of Artificial Sequence: Synthetic oligonucleotide
  Antisense strand to SEQ ID NO: 1877723
ugcaauauucgguaccauc

SEQ ID NO: 1877725 - RNA, 19 nt, Artificial Sequence
  Description of Artificial Sequence: Synthetic oligonucleotide
  Sense strand starting at position 356 of SEQ ID NO: 1564458
ugagguacggugugauguu

SEQ ID NO: 1877726 - RNA, 19 nt, Artificial Sequence
  Description of Artificial Sequence: Synthetic oligonucleotide
  Antisense strand to SEQ ID NO: 1877725
aacaucacaccguaccuca

SEQ ID NO: 1877727 - RNA, 19 nt, Artificial Sequence
  Description of Artificial Sequence: Synthetic oligonucleotide
  Sense strand starting at position 357 of SEQ ID NO: 1564458
gagguacggugugauguuu

SEQ ID NO: 1877728 - RNA, 19 nt, Artificial Sequence
  Description of Artificial Sequence: Synthetic oligonucleotide
  Antisense strand to SEQ ID NO: 1877727
aaacaucacaccguaccuc

SEQ ID NO: 1877729 - RNA, 19 nt, Artificial Sequence
  Description of Artificial Sequence: Synthetic oligonucleotide
  Sense strand starting at position 1074 of SEQ ID NO: 1564458
gcaaccuuugucugaggaa

SEQ ID NO: 1877730 - RNA, 19 nt, Artificial Sequence
  Description of Artificial Sequence: Synthetic oligonucleotide
  Antisense strand to SEQ ID NO: 1877729
uuccucagacaaagguugc

SEQ ID NO: 1877731 - RNA, 19 nt, Artificial Sequence
  Description of Artificial Sequence: Synthetic oligonucleotide
  Sense strand starting at position 1075 of SEQ ID NO: 1564458
caaccuuugucugaggaaa

SEQ ID NO: 1877732 - RNA, 19 nt, Artificial Sequence
  Description of Artificial Sequence: Synthetic oligonucleotide
  Antisense strand to SEQ ID NO: 1877731
uuuccucagacaaagguug

SEQ ID NO: 1877733 - RNA, 19 nt, Artificial Sequence
  Description of Artificial Sequence: Synthetic oligonucleotide
  Sense strand starting at position 1323 of SEQ ID NO: 1564458
acuuauucgguuuaaacua

SEQ ID NO: 1877734 - RNA, 19 nt, Artificial Sequence
  Description of Artificial Sequence: Synthetic oligonucleotide
  Antisense strand to SEQ ID NO: 1877733
uaguuuaaaccgaauaagu

SEQ ID NO: 1877735 - RNA, 19 nt, Artificial Sequence
  Description of Artificial Sequence: Synthetic oligonucleotide
  Sense strand starting at position 1519 of SEQ ID NO: 1564458
cgcgacacgugcuaacuaa

SEQ ID NO: 1877736 - RNA, 19 nt, Artificial Sequence
  Description of Artificial Sequence: Synthetic oligonucleotide
  Antisense strand to SEQ ID NO: 1877735
uuaguuagcacgugucgcg

SEQ ID NO: 1877737 - RNA, 19 nt, Artificial Sequence
  Description of Artificial Sequence: Synthetic oligonucleotide
  Sense strand starting at position 2350 of SEQ ID NO: 1564458
ggcugaugguaccgaauau

SEQ ID NO: 1877738 - RNA, 19 nt, Artificial Sequence
  Description of Artificial Sequence: Synthetic oligonucleotide
  Antisense strand to SEQ ID NO: 1877737
auauucgguaccaucagcc

SEQ ID NO: 1877739 - RNA, 19 nt, Artificial Sequence
  Description of Artificial Sequence: Synthetic oligonucleotide
  Sense strand starting at position 2351 of SEQ ID NO: 1564458
gcugaugguaccgaauauu

SEQ ID NO: 1877740 - RNA, 19 nt, Artificial Sequence
  Description of Artificial Sequence: Synthetic oligonucleotide
  Antisense strand to SEQ ID NO: 1877739
aauauucgguaccaucagc

SEQ ID NO: 1877741 - RNA, 19 nt, Artificial Sequence
  Description of Artificial Sequence: Synthetic oligonucleotide
  Sense strand starting at position 2354 of SEQ ID NO: 1564458
gaugguaccgaauauugca

SEQ ID NO: 1877742 - RNA, 19 nt, Artificial Sequence
  Description of Artificial Sequence: Synthetic oligonucleotide
  Antisense strand to SEQ ID NO: 1877741
ugcaauauucgguaccauc

SEQ ID NO: 1877743 - RNA, 19 nt, Artificial Sequence
  Description of Artificial Sequence: Synthetic oligonucleotide
  Sense strand starting at position 59 of SEQ ID NO: 1564459
guuauacuguccuuaggau

SEQ ID NO: 1877744 - RNA, 19 nt, Artificial Sequence
  Description of Artificial Sequence: Synthetic oligonucleotide
  Antisense strand to SEQ ID NO: 1877743
auccuaaggacaguauaac

SEQ ID NO: 1877745 - RNA, 19 nt, Artificial Sequence
  Description of Artificial Sequence: Synthetic oligonucleotide
  Sense strand starting at position 60 of SEQ ID NO: 1564459
uuauacuguccuuaggaua

SEQ ID NO: 1877746 - RNA, 19 nt, Artificial Sequence
  Description of Artificial Sequence: Synthetic oligonucleotide
  Antisense strand to SEQ ID NO: 1877745
uauccuaaggacaguauaa

SEQ ID NO: 1877747 - RNA, 19 nt, Artificial Sequence
  Description of Artificial Sequence: Synthetic oligonucleotide
  Sense strand starting at position 78 of SEQ ID NO: 1564459
aucugcuaccaguacauau

SEQ ID NO: 1877748 - RNA, 19 nt, Artificial Sequence
  Description of Artificial Sequence: Synthetic oligonucleotide
  Antisense strand to SEQ ID NO: 1877747
auauguacugguagcagau

SEQ ID NO: 1877749 - RNA, 19 nt, Artificial Sequence
  Description of Artificial Sequence: Synthetic oligonucleotide
  Sense strand starting at position 229 of SEQ ID NO: 1564459
cggacucgcgaucauuaac

SEQ ID NO: 1877750 - RNA, 19 nt, Artificial Sequence
  Description of Artificial Sequence: Synthetic oligonucleotide
  Antisense strand to SEQ ID NO: 1877749
guuaaugaucgcgaguccg

SEQ ID NO: 1877751 - RNA, 19 nt, Artificial Sequence
  Description of Artificial Sequence: Synthetic oligonucleotide
  Sense strand starting at position 383 of SEQ ID NO: 1564459
ggucaaauaguaggugaca

SEQ ID NO: 1877752 - RNA, 19 nt, Artificial Sequence
  Description of Artificial Sequence: Synthetic oligonucleotide
  Antisense strand to SEQ ID NO: 1877751
ugucaccuacuauuugacc

SEQ ID NO: 1877753 - RNA, 19 nt, Artificial Sequence
  Description of Artificial Sequence: Synthetic oligonucleotide
  Sense strand starting at position 385 of SEQ ID NO: 1564459
ucaaauaguaggugacagu

SEQ ID NO: 1877754 - RNA, 19 nt, Artificial Sequence
  Description of Artificial Sequence: Synthetic oligonucleotide
  Antisense strand to SEQ ID NO: 1877753
acugucaccuacuauuuga

SEQ ID NO: 1877755 - RNA, 19 nt, Artificial Sequence
  Description of Artificial Sequence: Synthetic oligonucleotide
  Sense strand starting at position 747 of SEQ ID NO: 1564459
gugugaccacaccaucaau

SEQ ID NO: 1877756 - RNA, 19 nt, Artificial Sequence
  Description of Artificial Sequence: Synthetic oligonucleotide
  Antisense strand to SEQ ID NO: 1877755
auugaugguguggucacac

SEQ ID NO: 1877757 - RNA, 19 nt, Artificial Sequence
  Description of Artificial Sequence: Synthetic oligonucleotide
  Sense strand starting at position 766 of SEQ ID NO: 1564459
guggaaauugccuagucuc

SEQ ID NO: 1877758 - RNA, 19 nt, Artificial Sequence
  Description of Artificial Sequence: Synthetic oligonucleotide
  Antisense strand to SEQ ID NO: 1877757
gagacuaggcaauuuccac

SEQ ID NO: 1877759 - RNA, 19 nt, Artificial Sequence
  Description of Artificial Sequence: Synthetic oligonucleotide
  Sense strand starting at position 906 of SEQ ID NO: 1564459
uccuguagccuuuacuauu

SEQ ID NO: 1877760 - RNA, 19 nt, Artificial Sequence
  Description of Artificial Sequence: Synthetic oligonucleotide
  Antisense strand to SEQ ID NO: 1877759
aauaguaaaggcuacagga

SEQ ID NO: 1877761 - RNA, 19 nt, Artificial Sequence
  Description of Artificial Sequence: Synthetic oligonucleotide
  Sense strand starting at position 1200 of SEQ ID NO: 1564459
gcgggaagucuuuaccaac

SEQ ID NO: 1877762 - RNA, 19 nt, Artificial Sequence
  Description of Artificial Sequence: Synthetic oligonucleotide
  Antisense strand to SEQ ID NO: 1877761
guugguaaagacuucccgc

SEQ ID NO: 1877763 - RNA, 19 nt, Artificial Sequence
  Description of Artificial Sequence: Synthetic oligonucleotide
  Sense strand starting at position 1441 of SEQ ID NO: 1564459
agaaauuaguuuccgcuga

SEQ ID NO: 1877764 - RNA, 19 nt, Artificial Sequence
  Description of Artificial Sequence: Synthetic oligonucleotide
  Antisense strand to SEQ ID NO: 1877763
ucagcggaaacuaauuucu

SEQ ID NO: 1877765 - RNA, 19 nt, Artificial Sequence
  Description of Artificial Sequence: Synthetic oligonucleotide
  Sense strand starting at position 1443 of SEQ ID NO: 1564459
aaauuaguuuccgcugaca

SEQ ID NO: 1877766 - RNA, 19 nt, Artificial Sequence
  Description of Artificial Sequence: Synthetic oligonucleotide
  Antisense strand to SEQ ID NO: 1877765
ugucagcggaaacuaauuu

SEQ ID NO: 1877767 - RNA, 19 nt, Artificial Sequence
  Description of Artificial Sequence: Synthetic oligonucleotide
  Sense strand starting at position 1462 of SEQ ID NO: 1564459
gugaaaugcccucaucuuc

SEQ ID NO: 1877768 - RNA, 19 nt, Artificial Sequence
  Description of Artificial Sequence: Synthetic oligonucleotide
  Antisense strand to SEQ ID NO: 1877767
gaagaugagggcauuucac

SEQ ID NO: 1877769 - RNA, 19 nt, Artificial Sequence
  Description of Artificial Sequence: Synthetic oligonucleotide
  Sense strand starting at position 1488 of SEQ ID NO: 1564459
ggaacugcuaacggguaau

SEQ ID NO: 1877770 - RNA, 19 nt, Artificial Sequence
  Description of Artificial Sequence: Synthetic oligonucleotide
  Antisense strand to SEQ ID NO: 1877769
auuacccguuagcaguucc

SEQ ID NO: 1877771 - RNA, 19 nt, Artificial Sequence
  Description of Artificial Sequence: Synthetic oligonucleotide
  Sense strand starting at position 1498 of SEQ ID NO: 1564459
acggguaauaccugacuca

SEQ ID NO: 1877772 - RNA, 19 nt, Artificial Sequence
  Description of Artificial Sequence: Synthetic oligonucleotide
  Antisense strand to SEQ ID NO: 1877771
ugagucagguauuacccgu

SEQ ID NO: 1877773 - RNA, 19 nt, Artificial Sequence
  Description of Artificial Sequence: Synthetic oligonucleotide
  Sense strand starting at position 1499 of SEQ ID NO: 1564459
cggguaauaccugacucaa

SEQ ID NO: 1877774 - RNA, 19 nt, Artificial Sequence
  Description of Artificial Sequence: Synthetic oligonucleotide
  Antisense strand to SEQ ID NO: 1877773
uugagucagguauuacccg

SEQ ID NO: 1877775 - RNA, 19 nt, Artificial Sequence
  Description of Artificial Sequence: Synthetic oligonucleotide
  Sense strand starting at position 1632 of SEQ ID NO: 1564459
ccuagcauccgucaagaga

SEQ ID NO: 1877776 - RNA, 19 nt, Artificial Sequence
  Description of Artificial Sequence: Synthetic oligonucleotide
  Antisense strand to SEQ ID NO: 1877775
ucucuugacggaugcuagg

SEQ ID NO: 1877777 - RNA, 19 nt, Artificial Sequence
  Description of Artificial Sequence: Synthetic oligonucleotide
  Sense strand starting at position 1874 of SEQ ID NO: 1564459
agugaaacaucgccaaggu

SEQ ID NO: 1877778 - RNA, 19 nt, Artificial Sequence
  Description of Artificial Sequence: Synthetic oligonucleotide
  Antisense strand to SEQ ID NO: 1877777
accuuggcgauguuucacu

SEQ ID NO: 1877779 - RNA, 19 nt, Artificial Sequence
  Description of Artificial Sequence: Synthetic oligonucleotide
  Sense strand starting at position 1875 of SEQ ID NO: 1564459
gugaaacaucgccaaggua

SEQ ID NO: 1877780 - RNA, 19 nt, Artificial Sequence
  Description of Artificial Sequence: Synthetic oligonucleotide
  Antisense strand to SEQ ID NO: 1877779
uaccuuggcgauguuucac

SEQ ID NO: 1877781 - RNA, 19 nt, Artificial Sequence
  Description of Artificial Sequence: Synthetic oligonucleotide
  Sense strand starting at position 1920 of SEQ ID NO: 1564459
gcagauauacuaggaguua

SEQ ID NO: 1877782 - RNA, 19 nt, Artificial Sequence
  Description of Artificial Sequence: Synthetic oligonucleotide
  Antisense strand to SEQ ID NO: 1877781
uaacuccuaguauaucugc

SEQ ID NO: 1877783 - RNA, 19 nt, Artificial Sequence
  Description of Artificial Sequence: Synthetic oligonucleotide
  Sense strand starting at position 1932 of SEQ ID NO: 1564459
ggaguuaggaacuaucggu

SEQ ID NO: 1877784 - RNA, 19 nt, Artificial Sequence
  Description of Artificial Sequence: Synthetic oligonucleotide
  Antisense strand to SEQ ID NO: 1877783
accgauaguuccuaacucc

SEQ ID NO: 1877785 - RNA, 19 nt, Artificial Sequence
  Description of Artificial Sequence: Synthetic oligonucleotide
  Sense strand starting at position 1936 of SEQ ID NO: 1564459
uuaggaacuaucggucuua

SEQ ID NO: 1877786 - RNA, 19 nt, Artificial Sequence
  Description of Artificial Sequence: Synthetic oligonucleotide
  Antisense strand to SEQ ID NO: 1877785
uaagaccgauaguuccuaa

SEQ ID NO: 1877787 - RNA, 19 nt, Artificial Sequence
  Description of Artificial Sequence: Synthetic oligonucleotide
  Sense strand starting at position 2027 of SEQ ID NO: 1564459
caggaagucagaugaguga

SEQ ID NO: 1877788 - RNA, 19 nt, Artificial Sequence
  Description of Artificial Sequence: Synthetic oligonucleotide
  Antisense strand to SEQ ID NO: 1877787
ucacucaucugacuuccug

SEQ ID NO: 1877789 - RNA, 19 nt, Artificial Sequence
  Description of Artificial Sequence: Synthetic oligonucleotide
  Sense strand starting at position 2129 of SEQ ID NO: 1564459
cugauuuacaggugucagu

SEQ ID NO: 1877790 - RNA, 19 nt, Artificial Sequence
  Description of Artificial Sequence: Synthetic oligonucleotide
  Antisense strand to SEQ ID NO: 1877789
acugacaccuguaaaucag

SEQ ID NO: 1877791 - RNA, 19 nt, Artificial Sequence
  Description of Artificial Sequence: Synthetic oligonucleotide
  Sense strand starting at position 2297 of SEQ ID NO: 1564459
aaugccaaucgugagaaau

SEQ ID NO: 1877792 - RNA, 19 nt, Artificial Sequence
  Description of Artificial Sequence: Synthetic oligonucleotide
  Antisense strand to SEQ ID NO: 1877791
auuucucacgauuggcauu

SEQ ID NO: 1877793 - RNA, 19 nt, Artificial Sequence
  Description of Artificial Sequence: Synthetic oligonucleotide
  Sense strand starting at position 2318 of SEQ ID NO: 1564459
ccuauaugauuccuuguga

SEQ ID NO: 1877794 - RNA, 19 nt, Artificial Sequence
  Description of Artificial Sequence: Synthetic oligonucleotide
  Antisense strand to SEQ ID NO: 1877793
ucacaaggaaucauauagg

SEQ ID NO: 1877795 - RNA, 19 nt, Artificial Sequence
  Description of Artificial Sequence: Synthetic oligonucleotide
  Sense strand starting at position 2319 of SEQ ID NO: 1564459
cuauaugauuccuugugac

SEQ ID NO: 1877796 - RNA, 19 nt, Artificial Sequence
  Description of Artificial Sequence: Synthetic oligonucleotide
  Antisense strand to SEQ ID NO: 1877795
gucacaaggaaucauauag

SEQ ID NO: 1877797 - RNA, 19 nt, Artificial Sequence
  Description of Artificial Sequence: Synthetic oligonucleotide
  Sense strand starting at position 2492 of SEQ ID NO: 1564459
ucgaauaccuugcuuugga

SEQ ID NO: 1877798 - RNA, 19 nt, Artificial Sequence
  Description of Artificial Sequence: Synthetic oligonucleotide
  Antisense strand to SEQ ID NO: 1877797
uccaaagcaagguauucga

SEQ ID NO: 1877799 - RNA, 19 nt, Artificial Sequence
  Description of Artificial Sequence: Synthetic oligonucleotide
  Sense strand starting at position 2493 of SEQ ID NO: 1564459
cgaauaccuugcuuuggau

SEQ ID NO: 1877800 - RNA, 19 nt, Artificial Sequence
  Description of Artificial Sequence: Synthetic oligonucleotide
  Antisense strand to SEQ ID NO: 1877799
auccaaagcaagguauucg

SEQ ID NO: 1877801 - RNA, 19 nt, Artificial Sequence
  Description of Artificial Sequence: Synthetic oligonucleotide
  Sense strand starting at position 2508 of SEQ ID NO: 1564459
ggauuagcucgugaugaug

SEQ ID NO: 1877802 - RNA, 19 nt, Artificial Sequence
  Description of Artificial Sequence: Synthetic oligonucleotide
  Antisense strand to SEQ ID NO: 1877801
caucaucacgagcuaaucc

SEQ ID NO: 1877803 - RNA, 19 nt, Artificial Sequence
  Description of Artificial Sequence: Synthetic oligonucleotide
  Sense strand starting at position 2534 of SEQ ID NO: 1564459
agcucuguccaugucguaa

SEQ ID NO: 1877804 - RNA, 19 nt, Artificial Sequence
  Description of Artificial Sequence: Synthetic oligonucleotide
  Antisense strand to SEQ ID NO: 1877803
uuacgacauggacagagcu

SEQ ID NO: 1877805 - RNA, 19 nt, Artificial Sequence
  Description of Artificial Sequence: Synthetic oligonucleotide
  Sense strand starting at position 2581 of SEQ ID NO: 1564459
agugaaguccgcuauguaa

SEQ ID NO: 1877806 - RNA, 19 nt, Artificial Sequence
  Description of Artificial Sequence: Synthetic oligonucleotide
  Antisense strand to SEQ ID NO: 1877805
uuacauagcggacuucacu

SEQ ID NO: 1877807 - RNA, 19 nt, Artificial Sequence
  Description of Artificial Sequence: Synthetic oligonucleotide
  Sense strand starting at position 2589 of SEQ ID NO: 1564459
ccgcuauguaaguuguacu

SEQ ID NO: 1877808 - RNA, 19 nt, Artificial Sequence
  Description of Artificial Sequence: Synthetic oligonucleotide
  Antisense strand to SEQ ID NO: 1877807
aguacaacuuacauagcgg

SEQ ID NO: 1877809 - RNA, 19 nt, Artificial Sequence
  Description of Artificial Sequence: Synthetic oligonucleotide
  Sense strand starting at position 3042 of SEQ ID NO: 1564459
cuuccuuaauguguacaau

SEQ ID NO: 1877810 - RNA, 19 nt, Artificial Sequence
  Description of Artificial Sequence: Synthetic oligonucleotide
  Antisense strand to SEQ ID NO: 1877809
auuguacacauuaaggaag

SEQ ID NO: 1877811 - RNA, 19 nt, Artificial Sequence
  Description of Artificial Sequence: Synthetic oligonucleotide
  Sense strand starting at position 3080 of SEQ ID NO: 1564459
gcguaaauccacgauacca

SEQ ID NO: 1877812 - RNA, 19 nt, Artificial Sequence
  Description of Artificial Sequence: Synthetic oligonucleotide
  Antisense strand to SEQ ID NO: 1877811
ugguaucguggauuuacgc

SEQ ID NO: 1877813 - RNA, 19 nt, Artificial Sequence
  Description of Artificial Sequence: Synthetic oligonucleotide
  Sense strand starting at position 3310 of SEQ ID NO: 1564459
gugggaagguagaguuuga

SEQ ID NO: 1877814 - RNA, 19 nt, Artificial Sequence
  Description of Artificial Sequence: Synthetic oligonucleotide
  Antisense strand to SEQ ID NO: 1877813
ucaaacucuaccuucccac

SEQ ID NO: 1877815 - RNA, 19 nt, Artificial Sequence
  Description of Artificial Sequence: Synthetic oligonucleotide
  Sense strand starting at position 3392 of SEQ ID NO: 1564459
auuuaacuguaacaggaaa

SEQ ID NO: 1877816 - RNA, 19 nt, Artificial Sequence
  Description of Artificial Sequence: Synthetic oligonucleotide
  Antisense strand to SEQ ID NO: 1877815
uuuccuguuacaguuaaau

SEQ ID NO: 1877817 - RNA, 19 nt, Artificial Sequence
  Description of Artificial Sequence: Synthetic oligonucleotide
  Sense strand starting at position 3606 of SEQ ID NO: 1564459
ggagaaucgcuuuggaaac

SEQ ID NO: 1877818 - RNA, 19 nt, Artificial Sequence
  Description of Artificial Sequence: Synthetic oligonucleotide
  Antisense strand to SEQ ID NO: 1877817
guuuccaaagcgauucucc

SEQ ID NO: 1877819 - RNA, 19 nt, Artificial Sequence
  Description of Artificial Sequence: Synthetic oligonucleotide
  Sense strand starting at position 3833 of SEQ ID NO: 1564459
acagaacugcuuuggagua

SEQ ID NO: 1877820 - RNA, 19 nt, Artificial Sequence
  Description of Artificial Sequence: Synthetic oligonucleotide
  Antisense strand to SEQ ID NO: 1877819
uacuccaaagcaguucugu

SEQ ID NO: 1877821 - RNA, 19 nt, Artificial Sequence
  Description of Artificial Sequence: Synthetic oligonucleotide
  Sense strand starting at position 3838 of SEQ ID NO: 1564459
acugcuuuggaguaaagau

SEQ ID NO: 1877822 - RNA, 19 nt, Artificial Sequence
  Description of Artificial Sequence: Synthetic oligonucleotide
  Antisense strand to SEQ ID NO: 1877821
aucuuuacuccaaagcagu

SEQ ID NO: 1877823 - RNA, 19 nt, Artificial Sequence
  Description of Artificial Sequence: Synthetic oligonucleotide
  Sense strand starting at position 148 of SEQ ID NO: 1564460
ggaagugcccucuaaagug

SEQ ID NO: 1877824 - RNA, 19 nt, Artificial Sequence
  Description of Artificial Sequence: Synthetic oligonucleotide
  Antisense strand to SEQ ID NO: 1877823
cacuuuagagggcacuucc

SEQ ID NO: 1877825 - RNA, 19 nt, Artificial Sequence
  Description of Artificial Sequence: Synthetic oligonucleotide
  Sense strand starting at position 198 of SEQ ID NO: 1564460
acuugacauccugguguuu

SEQ ID NO: 1877826 - RNA, 19 nt, Artificial Sequence
  Description of Artificial Sequence: Synthetic oligonucleotide
  Antisense strand to SEQ ID NO: 1877825
aaacaccaggaugucaagu

SEQ ID NO: 1877827 - RNA, 19 nt, Artificial Sequence
  Description of Artificial Sequence: Synthetic oligonucleotide
  Sense strand starting at position 432 of SEQ ID NO: 1564460
cagggugaaacuugguauc

SEQ ID NO: 1877828 - RNA, 19 nt, Artificial Sequence
  Description of Artificial Sequence: Synthetic oligonucleotide
  Antisense strand to SEQ ID NO: 1877827
gauaccaaguuucacccug

SEQ ID NO: 1877829 - RNA, 19 nt, Artificial Sequence
  Description of Artificial Sequence: Synthetic oligonucleotide
  Sense strand starting at position 434 of SEQ ID NO: 1564460
gggugaaacuugguaucua

SEQ ID NO: 1877830 - RNA, 19 nt, Artificial Sequence
  Description of Artificial Sequence: Synthetic oligonucleotide
  Antisense strand to SEQ ID NO: 1877829
uagauaccaaguuucaccc

SEQ ID NO: 1877831 - RNA, 19 nt, Artificial Sequence
  Description of Artificial Sequence: Synthetic oligonucleotide
  Sense strand starting at position 631 of SEQ ID NO: 1564460
cccaaacauguccaauagu

SEQ ID NO: 1877832 - RNA, 19 nt, Artificial Sequence
  Description of Artificial Sequence: Synthetic oligonucleotide
  Antisense strand to SEQ ID NO: 1877831
acuauuggacauguuuggg

SEQ ID NO: 1877833 - RNA, 19 nt, Artificial Sequence
  Description of Artificial Sequence: Synthetic oligonucleotide
  Sense strand starting at position 666 of SEQ ID NO: 1564460
uucuguucuucuguaagag

SEQ ID NO: 1877834 - RNA, 19 nt, Artificial Sequence
  Description of Artificial Sequence: Synthetic oligonucleotide
  Antisense strand to SEQ ID NO: 1877833
cucuuacagaagaacagaa

SEQ ID NO: 1877835 - RNA, 19 nt, Artificial Sequence
  Description of Artificial Sequence: Synthetic oligonucleotide
  Sense strand starting at position 872 of SEQ ID NO: 1564460
cggacauauccuuaagggu

SEQ ID NO: 1877836 - RNA, 19 nt, Artificial Sequence
  Description of Artificial Sequence: Synthetic oligonucleotide
  Antisense strand to SEQ ID NO: 1877835
acccuuaaggauauguccg

SEQ ID NO: 1877837 - RNA, 19 nt, Artificial Sequence
  Description of Artificial Sequence: Synthetic oligonucleotide
  Sense strand starting at position 922 of SEQ ID NO: 1564460
ggcucucaauaguuacuaa

SEQ ID NO: 1877838 - RNA, 19 nt, Artificial Sequence
  Description of Artificial Sequence: Synthetic oligonucleotide
  Antisense strand to SEQ ID NO: 1877837
uuaguaacuauugagagcc

SEQ ID NO: 1877839 - RNA, 19 nt, Artificial Sequence
  Description of Artificial Sequence: Synthetic oligonucleotide
  Sense strand starting at position 956 of SEQ ID NO: 1564460
gguucucagcgacauuaug

SEQ ID NO: 1877840 - RNA, 19 nt, Artificial Sequence
  Description of Artificial Sequence: Synthetic oligonucleotide
  Antisense strand to SEQ ID NO: 1877839
cauaaugucgcugagaacc

SEQ ID NO: 1877841 - RNA, 19 nt, Artificial Sequence
  Description of Artificial Sequence: Synthetic oligonucleotide
  Sense strand starting at position 977 of SEQ ID NO: 1564460
ccacaauagugcucaaagu

SEQ ID NO: 1877842 - RNA, 19 nt, Artificial Sequence
  Description of Artificial Sequence: Synthetic oligonucleotide
  Antisense strand to SEQ ID NO: 1877841
acuuugagcacuauugugg

SEQ ID NO: 1877843 - RNA, 19 nt, Artificial Sequence
  Description of Artificial Sequence: Synthetic oligonucleotide
  Sense strand starting at position 998 of SEQ ID NO: 1564460
aggucagagagcuguucga

SEQ ID NO: 1877844 - RNA, 19 nt, Artificial Sequence
  Description of Artificial Sequence: Synthetic oligonucleotide
  Antisense strand to SEQ ID NO: 1877843
ucgaacagcucucugaccu

SEQ ID NO: 1877845 - RNA, 19 nt, Artificial Sequence
  Description of Artificial Sequence: Synthetic oligonucleotide
  Sense strand starting at position 1133 of SEQ ID NO: 1564460
caaacaguguucccacgaa

SEQ ID NO: 1877846 - RNA, 19 nt, Artificial Sequence
  Description of Artificial Sequence: Synthetic oligonucleotide
  Antisense strand to SEQ ID NO: 1877845
uucgugggaacacuguuug

SEQ ID NO: 1877847 - RNA, 19 nt, Artificial Sequence
  Description of Artificial Sequence: Synthetic oligonucleotide
  Sense strand starting at position 1137 of SEQ ID NO: 1564460
caguguucccacgaaauag

SEQ ID NO: 1877848 - RNA, 19 nt, Artificial Sequence
  Description of Artificial Sequence: Synthetic oligonucleotide
  Antisense strand to SEQ ID NO: 1877847
cuauuucgugggaacacug

SEQ ID NO: 1877849 - RNA, 19 nt, Artificial Sequence
  Description of Artificial Sequence: Synthetic oligonucleotide
  Sense strand starting at position 1315 of SEQ ID NO: 1564460
cagagaaacucgucucagu

SEQ ID NO: 1877850 - RNA, 19 nt, Artificial Sequence
  Description of Artificial Sequence: Synthetic oligonucleotide
  Antisense strand to SEQ ID NO: 1877849
acugagacgaguuucucug

SEQ ID NO: 1877851 - RNA, 19 nt, Artificial Sequence
  Description of Artificial Sequence: Synthetic oligonucleotide
  Sense strand starting at position 1322 of SEQ ID NO: 1564460
acucgucucaguuaacagu

SEQ ID NO: 1877852 - RNA, 19 nt, Artificial Sequence
  Description of Artificial Sequence: Synthetic oligonucleotide
  Antisense strand to SEQ ID NO: 1877851
acuguuaacugagacgagu

SEQ ID NO: 1877853 - RNA, 19 nt, Artificial Sequence
  Description of Artificial Sequence: Synthetic oligonucleotide
  Sense strand starting at position 1376 of SEQ ID NO: 1564460
cggguaauaccggaucgga

SEQ ID NO: 1877854 - RNA, 19 nt, Artificial Sequence
  Description of Artificial Sequence: Synthetic oligonucleotide
  Antisense strand to SEQ ID NO: 1877853
uccgauccgguauuacccg

SEQ ID NO: 1877855 - RNA, 19 nt, Artificial Sequence
  Description of Artificial Sequence: Synthetic oligonucleotide
  Sense strand starting at position 1645 of SEQ ID NO: 1564460
cgaggaagcuuauuccuaa

SEQ ID NO: 1877856 - RNA, 19 nt, Artificial Sequence
  Description of Artificial Sequence: Synthetic oligonucleotide
  Antisense strand to SEQ ID NO: 1877855
uuaggaauaagcuuccucg

SEQ ID NO: 1877857 - RNA, 19 nt, Artificial Sequence
  Description of Artificial Sequence: Synthetic oligonucleotide
  Sense strand starting at position 1648 of SEQ ID NO: 1564460
ggaagcuuauuccuaacaa

SEQ ID NO: 1877858 - RNA, 19 nt, Artificial Sequence
  Description of Artificial Sequence: Synthetic oligonucleotide
  Antisense strand to SEQ ID NO: 1877857
uuguuaggaauaagcuucc

SEQ ID NO: 1877859 - RNA, 19 nt, Artificial Sequence
  Description of Artificial Sequence: Synthetic oligonucleotide
  Sense strand starting at position 2061 of SEQ ID NO: 1564460
ggaacugaguuucuuagca

SEQ ID NO: 1877860 - RNA, 19 nt, Artificial Sequence
  Description of Artificial Sequence: Synthetic oligonucleotide
  Antisense strand to SEQ ID NO: 1877859
ugcuaagaaacucaguucc

SEQ ID NO: 1877861 - RNA, 19 nt, Artificial Sequence
  Description of Artificial Sequence: Synthetic oligonucleotide
  Sense strand starting at position 2065 of SEQ ID NO: 1564460
cugaguuucuuagcauauu

SEQ ID NO: 1877862 - RNA, 19 nt, Artificial Sequence
  Description of Artificial Sequence: Synthetic oligonucleotide
  Antisense strand to SEQ ID NO: 1877861
aauaugcuaagaaacucag

SEQ ID NO: 1877863 - RNA, 19 nt, Artificial Sequence
  Description of Artificial Sequence: Synthetic oligonucleotide
  Sense strand starting at position 2103 of SEQ ID NO: 1564460
auaggugucaguuaugcca

SEQ ID NO: 1877864 - RNA, 19 nt, Artificial Sequence
  Description of Artificial Sequence: Synthetic oligonucleotide
  Antisense strand to SEQ ID NO: 1877863
uggcauaacugacaccuau

SEQ ID NO: 1877865 - RNA, 19 nt, Artificial Sequence
  Description of Artificial Sequence: Synthetic oligonucleotide
  Sense strand starting at position 2110 of SEQ ID NO: 1564460
ucaguuaugccacgggacu

SEQ ID NO: 1877866 - RNA, 19 nt, Artificial Sequence
  Description of Artificial Sequence: Synthetic oligonucleotide
  Antisense strand to SEQ ID NO: 1877865
agucccguggcauaacuga

SEQ ID NO: 1877867 - RNA, 19 nt, Artificial Sequence
  Description of Artificial Sequence: Synthetic oligonucleotide
  Sense strand starting at position 2111 of SEQ ID NO: 1564460
caguuaugccacgggacuu

SEQ ID NO: 1877868 - RNA, 19 nt, Artificial Sequence
  Description of Artificial Sequence: Synthetic oligonucleotide
  Antisense strand to SEQ ID NO: 1877867
aagucccguggcauaacug

SEQ ID NO: 1877869 - RNA, 19 nt, Artificial Sequence
  Description of Artificial Sequence: Synthetic oligonucleotide
  Sense strand starting at position 2238 of SEQ ID NO: 1564460
gcaggauuuagccgccuua

SEQ ID NO: 1877870 - RNA, 19 nt, Artificial Sequence
  Description of Artificial Sequence: Synthetic oligonucleotide
  Antisense strand to SEQ ID NO: 1877869
uaaggcggcuaaauccugc

SEQ ID NO: 1877871 - RNA, 19 nt, Artificial Sequence
  Description of Artificial Sequence: Synthetic oligonucleotide
  Sense strand starting at position 2287 of SEQ ID NO: 1564460
ccuguaugauuccuuguga

SEQ ID NO: 1877872 - RNA, 19 nt, Artificial Sequence
  Description of Artificial Sequence: Synthetic oligonucleotide
  Antisense strand to SEQ ID NO: 1877871
ucacaaggaaucauacagg

SEQ ID NO: 1877873 - RNA, 19 nt, Artificial Sequence
  Description of Artificial Sequence: Synthetic oligonucleotide
  Sense strand starting at position 2288 of SEQ ID NO: 1564460
cuguaugauuccuugugac

SEQ ID NO: 1877874 - RNA, 19 nt, Artificial Sequence
  Description of Artificial Sequence: Synthetic oligonucleotide
  Antisense strand to SEQ ID NO: 1877873
gucacaaggaaucauacag

SEQ ID NO: 1877875 - RNA, 19 nt, Artificial Sequence
  Description of Artificial Sequence: Synthetic oligonucleotide
  Sense strand starting at position 2302 of SEQ ID NO: 1564460
gugacugugacauguugua

SEQ ID NO: 1877876 - RNA, 19 nt, Artificial Sequence
  Description of Artificial Sequence: Synthetic oligonucleotide
  Antisense strand to SEQ ID NO: 1877875
uacaacaugucacagucac

SEQ ID NO: 1877877 - RNA, 19 nt, Artificial Sequence
  Description of Artificial Sequence: Synthetic oligonucleotide
  Sense strand starting at position 2376 of SEQ ID NO: 1564460
cagguuugagaauguauua

SEQ ID NO: 1877878 - RNA, 19 nt, Artificial Sequence
  Description of Artificial Sequence: Synthetic oligonucleotide
  Antisense strand to SEQ ID NO: 1877877
uaauacauucucaaaccug

SEQ ID NO: 1877879 - RNA, 19 nt, Artificial Sequence
  Description of Artificial Sequence: Synthetic oligonucleotide
  Sense strand starting at position 2434 of SEQ ID NO: 1564460
ugggacgugaauuguaagu

SEQ ID NO: 1877880 - RNA, 19 nt, Artificial Sequence
  Description of Artificial Sequence: Synthetic oligonucleotide
  Antisense strand to SEQ ID NO: 1877879
acuuacaauucacguccca

SEQ ID NO: 1877881 - RNA, 19 nt, Artificial Sequence
  Description of Artificial Sequence: Synthetic oligonucleotide
  Sense strand starting at position 2466 of SEQ ID NO: 1564460
uugcauuaacuugagguga

SEQ ID NO: 1877882 - RNA, 19 nt, Artificial Sequence
  Description of Artificial Sequence: Synthetic oligonucleotide
  Antisense strand to SEQ ID NO: 1877881
ucaccucaaguuaaugcaa

SEQ ID NO: 1877883 - RNA, 19 nt, Artificial Sequence
  Description of Artificial Sequence: Synthetic oligonucleotide
  Sense strand starting at position 2542 of SEQ ID NO: 1564460
ggugaacucggcuauguaa

SEQ ID NO: 1877884 - RNA, 19 nt, Artificial Sequence
  Description of Artificial Sequence: Synthetic oligonucleotide
  Antisense strand to SEQ ID NO: 1877883
uuacauagccgaguucacc

SEQ ID NO: 1877885 - RNA, 19 nt, Artificial Sequence
  Description of Artificial Sequence: Synthetic oligonucleotide
  Sense strand starting at position 2659 of SEQ ID NO: 1564460
guuugacgaguucggacau

SEQ ID NO: 1877886 - RNA, 19 nt, Artificial Sequence
  Description of Artificial Sequence: Synthetic oligonucleotide
  Antisense strand to SEQ ID NO: 1877885
auguccgaacucgucaaac

SEQ ID NO: 1877887 - RNA, 19 nt, Artificial Sequence
  Description of Artificial Sequence: Synthetic oligonucleotide
  Sense strand starting at position 3357 of SEQ ID NO: 1564460
ccaauuuguaagcgcguaa

SEQ ID NO: 1877888 - RNA, 19 nt, Artificial Sequence
  Description of Artificial Sequence: Synthetic oligonucleotide
  Antisense strand to SEQ ID NO: 1877887
uuacgcgcuuacaaauugg

SEQ ID NO: 1877889 - RNA, 19 nt, Artificial Sequence
  Description of Artificial Sequence: Synthetic oligonucleotide
  Sense strand starting at position 3368 of SEQ ID NO: 1564460
gcgcguaacagugccuaaa

SEQ ID NO: 1877890 - RNA, 19 nt, Artificial Sequence
  Description of Artificial Sequence: Synthetic oligonucleotide
  Antisense strand to SEQ ID NO: 1877889
uuuaggcacuguuacgcgc

SEQ ID NO: 1877891 - RNA, 19 nt, Artificial Sequence
  Description of Artificial Sequence: Synthetic oligonucleotide
  Sense strand starting at position 3650 of SEQ ID NO: 1564460
aaagcugcucuagaaaugu

SEQ ID NO: 1877892 - RNA, 19 nt, Artificial Sequence
  Description of Artificial Sequence: Synthetic oligonucleotide
  Antisense strand to SEQ ID NO: 1877891
acauuucuagagcagcuuu

SEQ ID NO: 1877893 - RNA, 19 nt, Artificial Sequence
  Description of Artificial Sequence: Synthetic oligonucleotide
  Sense strand starting at position 3664 of SEQ ID NO: 1564460
aauguuucuugucuagaag

SEQ ID NO: 1877894 - RNA, 19 nt, Artificial Sequence
  Description of Artificial Sequence: Synthetic oligonucleotide
  Antisense strand to SEQ ID NO: 1877893
cuucuagacaagaaacauu

SEQ ID NO: 1877895 - RNA, 19 nt, Artificial Sequence
  Description of Artificial Sequence: Synthetic oligonucleotide
  Sense strand starting at position 3667 of SEQ ID NO: 1564460
guuucuugucuagaagcaa

SEQ ID NO: 1877896 - RNA, 19 nt, Artificial Sequence
  Description of Artificial Sequence: Synthetic oligonucleotide
  Antisense strand to SEQ ID NO: 1877895
uugcuucuagacaagaaac

SEQ ID NO: 1877897 - RNA, 19 nt, Artificial Sequence
  Description of Artificial Sequence: Synthetic oligonucleotide
  Sense strand starting at position 3696 of SEQ ID NO: 1564460
cuuagagcuuuggcucuua

SEQ ID NO: 1877898 - RNA, 19 nt, Artificial Sequence
  Description of Artificial Sequence: Synthetic oligonucleotide
  Antisense strand to SEQ ID NO: 1877897
uaagagccaaagcucuaag

SEQ ID NO: 1877899 - RNA, 19 nt, Artificial Sequence
  Description of Artificial Sequence: Synthetic oligonucleotide
  Sense strand starting at position 3740 of SEQ ID NO: 1564460
gcaaauguaggccauuaga

SEQ ID NO: 1877900 - RNA, 19 nt, Artificial Sequence
  Description of Artificial Sequence: Synthetic oligonucleotide
  Antisense strand to SEQ ID NO: 1877899
ucuaauggccuacauuugc

SEQ ID NO: 1877901 - RNA, 19 nt, Artificial Sequence
  Description of Artificial Sequence: Synthetic oligonucleotide
  Sense strand starting at position 3866 of SEQ ID NO: 1564460
ggcguccuucguuugcaua

SEQ ID NO: 1877902 - RNA, 19 nt, Artificial Sequence
  Description of Artificial Sequence: Synthetic oligonucleotide
  Antisense strand to SEQ ID NO: 1877901
uaugcaaacgaaggacgcc

SEQ ID NO: 1877903 - RNA, 19 nt, Artificial Sequence
  Description of Artificial Sequence: Synthetic oligonucleotide
  Sense strand starting at position 82 of SEQ ID NO: 1564464
uggcauaaagcucagauua

SEQ ID NO: 1877904 - RNA, 19 nt, Artificial Sequence
  Description of Artificial Sequence: Synthetic oligonucleotide
  Antisense strand to SEQ ID NO: 1877903
uaaucugagcuuuaugcca

SEQ ID NO: 1877905 - RNA, 19 nt, Artificial Sequence
  Description of Artificial Sequence: Synthetic oligonucleotide
  Sense strand starting at position 90 of SEQ ID NO: 1564464
agcucagauuaaguaauau

SEQ ID NO: 1877906 - RNA, 19 nt, Artificial Sequence
  Description of Artificial Sequence: Synthetic oligonucleotide
  Antisense strand to SEQ ID NO: 1877905
auauuacuuaaucugagcu

SEQ ID NO: 1877907 - RNA, 19 nt, Artificial Sequence
  Description of Artificial Sequence: Synthetic oligonucleotide
  Sense strand starting at position 100 of SEQ ID NO: 1564464
aaguaauauugucucugga

SEQ ID NO: 1877908 - RNA, 19 nt, Artificial Sequence
  Description of Artificial Sequence: Synthetic oligonucleotide
  Antisense strand to SEQ ID NO: 1877907
uccagagacaauauuacuu

SEQ ID NO: 1877909 - RNA, 19 nt, Artificial Sequence
  Description of Artificial Sequence: Synthetic oligonucleotide
  Sense strand starting at position 235 of SEQ ID NO: 1564464
uuggaaagcugacuuugau

SEQ ID NO: 1877910 - RNA, 19 nt, Artificial Sequence
  Description of Artificial Sequence: Synthetic oligonucleotide
  Antisense strand to SEQ ID NO: 1877909
aucaaagucagcuuuccaa

SEQ ID NO: 1877911 - RNA, 19 nt, Artificial Sequence
  Description of Artificial Sequence: Synthetic oligonucleotide
  Sense strand starting at position 320 of SEQ ID NO: 1564464
uaaacugugguuuacaguu

SEQ ID NO: 1877912 - RNA, 19 nt, Artificial Sequence
  Description of Artificial Sequence: Synthetic oligonucleotide
  Antisense strand to SEQ ID NO: 1877911
aacuguaaaccacaguuua

SEQ ID NO: 1877913 - RNA, 19 nt, Artificial Sequence
  Description of Artificial Sequence: Synthetic oligonucleotide
  Sense strand starting at position 326 of SEQ ID NO: 1564464
gugguuuacaguuauuugu

SEQ ID NO: 1877914 - RNA, 19 nt, Artificial Sequence
  Description of Artificial Sequence: Synthetic oligonucleotide
  Antisense strand to SEQ ID NO: 1877913
acaaauaacuguaaaccac

SEQ ID NO: 1877915 - RNA, 19 nt, Artificial Sequence
  Description of Artificial Sequence: Synthetic oligonucleotide
  Sense strand starting at position 472 of SEQ ID NO: 1564464
ggguagucggcguucucaa

SEQ ID NO: 1877916 - RNA, 19 nt, Artificial Sequence
  Description of Artificial Sequence: Synthetic oligonucleotide
  Antisense strand to SEQ ID NO: 1877915
uugagaacgccgacuaccc

SEQ ID NO: 1877917 - RNA, 19 nt, Artificial Sequence
  Description of Artificial Sequence: Synthetic oligonucleotide
  Sense strand starting at position 542 of SEQ ID NO: 1564464
guuaauaggccauggaaac

SEQ ID NO: 1877918 - RNA, 19 nt, Artificial Sequence
  Description of Artificial Sequence: Synthetic oligonucleotide
  Antisense strand to SEQ ID NO: 1877917
guuuccauggccuauuaac

SEQ ID NO: 1877919 - RNA, 19 nt, Artificial Sequence
  Description of Artificial Sequence: Synthetic oligonucleotide
  Sense strand starting at position 680 of SEQ ID NO: 1564464
guugaaaggaaaugucaac

SEQ ID NO: 1877920 - RNA, 19 nt, Artificial Sequence
  Description of Artificial Sequence: Synthetic oligonucleotide
  Antisense strand to SEQ ID NO: 1877919
guugacauuuccuuucaac

SEQ ID NO: 1877921 - RNA, 19 nt, Artificial Sequence
  Description of Artificial Sequence: Synthetic oligonucleotide
  Sense strand starting at position 691 of SEQ ID NO: 1564464
augucaaccguuuggauuu

SEQ ID NO: 1877922 - RNA, 19 nt, Artificial Sequence
  Description of Artificial Sequence: Synthetic oligonucleotide
  Antisense strand to SEQ ID NO: 1877921
aaauccaaacgguugacau

SEQ ID NO: 1877923 - RNA, 19 nt, Artificial Sequence
  Description of Artificial Sequence: Synthetic oligonucleotide
  Sense strand starting at position 841 of SEQ ID NO: 1564464
guacaaaguagcugaaaga

SEQ ID NO: 1877924 - RNA, 19 nt, Artificial Sequence
  Description of Artificial Sequence: Synthetic oligonucleotide
  Antisense strand to SEQ ID NO: 1877923
ucuuucagcuacuuuguac

SEQ ID NO: 1877925 - RNA, 19 nt, Artificial Sequence
  Description of Artificial Sequence: Synthetic oligonucleotide
  Sense strand starting at position 875 of SEQ ID NO: 1564464
ucuagagaggacugcuuaa

SEQ ID NO: 1877926 - RNA, 19 nt, Artificial Sequence
  Description of Artificial Sequence: Synthetic oligonucleotide
  Antisense strand to SEQ ID NO: 1877925
uuaagcaguccucucuaga

SEQ ID NO: 1877927 - RNA, 19 nt, Artificial Sequence
  Description of Artificial Sequence: Synthetic oligonucleotide
  Sense strand starting at position 1036 of SEQ ID NO: 1564464
ugucuuauuucuuugcaug

SEQ ID NO: 1877928 - RNA, 19 nt, Artificial Sequence
  Description of Artificial Sequence: Synthetic oligonucleotide
  Antisense strand to SEQ ID NO: 1877927
caugcaaagaaauaagaca

SEQ ID NO: 1877929 - RNA, 19 nt, Artificial Sequence
  Description of Artificial Sequence: Synthetic oligonucleotide
  Sense strand starting at position 1065 of SEQ ID NO: 1564464
ugacacaacuugucuugaa

SEQ ID NO: 1877930 - RNA, 19 nt, Artificial Sequence
  Description of Artificial Sequence: Synthetic oligonucleotide
  Antisense strand to SEQ ID NO: 1877929
uucaagacaaguuguguca

SEQ ID NO: 1877931 - RNA, 19 nt, Artificial Sequence
  Description of Artificial Sequence: Synthetic oligonucleotide
  Sense strand starting at position 1176 of SEQ ID NO: 1564464
aagugagggcuguaaguua

SEQ ID NO: 1877932 - RNA, 19 nt, Artificial Sequence
  Description of Artificial Sequence: Synthetic oligonucleotide
  Antisense strand to SEQ ID NO: 1877931
uaacuuacagcccucacuu

SEQ ID NO: 1877933 - RNA, 19 nt, Artificial Sequence
  Description of Artificial Sequence: Synthetic oligonucleotide
  Sense strand starting at position 1489 of SEQ ID NO: 1564464
ggguauuucucucugugca

SEQ ID NO: 1877934 - RNA, 19 nt, Artificial Sequence
  Description of Artificial Sequence: Synthetic oligonucleotide
  Antisense strand to SEQ ID NO: 1877933
ugcacagagagaaauaccc

SEQ ID NO: 1877935 - RNA, 19 nt, Artificial Sequence
  Description of Artificial Sequence: Synthetic oligonucleotide
  Sense strand starting at position 1490 of SEQ ID NO: 1564464
gguauuucucucugugcau

SEQ ID NO: 1877936 - RNA, 19 nt, Artificial Sequence
  Description of Artificial Sequence: Synthetic oligonucleotide
  Antisense strand to SEQ ID NO: 1877935
augcacagagagaaauacc

SEQ ID NO: 1877937 - RNA, 19 nt, Artificial Sequence
  Description of Artificial Sequence: Synthetic oligonucleotide
  Sense strand starting at position 1503 of SEQ ID NO: 1564464
gugcauggccuguaauuuc

SEQ ID NO: 1877938 - RNA, 19 nt, Artificial Sequence
  Description of Artificial Sequence: Synthetic oligonucleotide
  Antisense strand to SEQ ID NO: 1877937
gaaauuacaggccaugcac

SEQ ID NO: 1877939 - RNA, 19 nt, Artificial Sequence
  Description of Artificial Sequence: Synthetic oligonucleotide
  Sense strand starting at position 1521 of SEQ ID NO: 1564464
cugugccuccuggaagaau

SEQ ID NO: 1877940 - RNA, 19 nt, Artificial Sequence
  Description of Artificial Sequence: Synthetic oligonucleotide
  Antisense strand to SEQ ID NO: 1877939
auucuuccaggaggcacag

SEQ ID NO: 1877941 - RNA, 19 nt, Artificial Sequence
  Description of Artificial Sequence: Synthetic oligonucleotide
  Sense strand starting at position 1613 of SEQ ID NO: 1564464
ugggauucucuagagccau

SEQ ID NO: 1877942 - RNA, 19 nt, Artificial Sequence
  Description of Artificial Sequence: Synthetic oligonucleotide
  Antisense strand to SEQ ID NO: 1877941
auggcucuagagaauccca

SEQ ID NO: 1877943 - RNA, 19 nt, Artificial Sequence
  Description of Artificial Sequence: Synthetic oligonucleotide
  Sense strand starting at position 1647 of SEQ ID NO: 1564464
gcgagaccacacgaugaau

SEQ ID NO: 1877944 - RNA, 19 nt, Artificial Sequence
  Description of Artificial Sequence: Synthetic oligonucleotide
  Antisense strand to SEQ ID NO: 1877943
auucaucguguggucucgc

SEQ ID NO: 1877945 - RNA, 19 nt, Artificial Sequence
  Description of Artificial Sequence: Synthetic oligonucleotide
  Sense strand starting at position 1723 of SEQ ID NO: 1564464
ucacacugauacuuagagu

SEQ ID NO: 1877946 - RNA, 19 nt, Artificial Sequence
  Description of Artificial Sequence: Synthetic oligonucleotide
  Antisense strand to SEQ ID NO: 1877945
acucuaaguaucaguguga

SEQ ID NO: 1877947 - RNA, 19 nt, Artificial Sequence
  Description of Artificial Sequence: Synthetic oligonucleotide
  Sense strand starting at position 1764 of SEQ ID NO: 1564464
ggaagagcuucuccggaga

SEQ ID NO: 1877948 - RNA, 19 nt, Artificial Sequence
  Description of Artificial Sequence: Synthetic oligonucleotide
  Antisense strand to SEQ ID NO: 1877947
ucuccggagaagcucuucc

SEQ ID NO: 1877949 - RNA, 19 nt, Artificial Sequence
  Description of Artificial Sequence: Synthetic oligonucleotide
  Sense strand starting at position 1775 of SEQ ID NO: 1564464
uccggagagcgggaauauu

SEQ ID NO: 1877950 - RNA, 19 nt, Artificial Sequence
  Description of Artificial Sequence: Synthetic oligonucleotide
  Antisense strand to SEQ ID NO: 1877949
aauauucccgcucuccgga

SEQ ID NO: 1877951 - RNA, 19 nt, Artificial Sequence
  Description of Artificial Sequence: Synthetic oligonucleotide
  Sense strand starting at position 1801 of SEQ ID NO: 1564464
acagcuggacuguaaucau

SEQ ID NO: 1877952 - RNA, 19 nt, Artificial Sequence
  Description of Artificial Sequence: Synthetic oligonucleotide
  Antisense strand to SEQ ID NO: 1877951
augauuacaguccagcugu

SEQ ID NO: 1877953 - RNA, 19 nt, Artificial Sequence
  Description of Artificial Sequence: Synthetic oligonucleotide
  Sense strand starting at position 1824 of SEQ ID NO: 1564464
guugaauacgcuuaacaua

SEQ ID NO: 1877954 - RNA, 19 nt, Artificial Sequence
  Description of Artificial Sequence: Synthetic oligonucleotide
  Antisense strand to SEQ ID NO: 1877953
uauguuaagcguauucaac

SEQ ID NO: 1877955 - RNA, 19 nt, Artificial Sequence
  Description of Artificial Sequence: Synthetic oligonucleotide
  Sense strand starting at position 1840 of SEQ ID NO: 1564464
auagcagaagcauaugauu

SEQ ID NO: 1877956 - RNA, 19 nt, Artificial Sequence
  Description of Artificial Sequence: Synthetic oligonucleotide
  Antisense strand to SEQ ID NO: 1877955
aaucauaugcuucugcuau

SEQ ID NO: 1877957 - RNA, 19 nt, Artificial Sequence
  Description of Artificial Sequence: Synthetic oligonucleotide
  Sense strand starting at position 1845 of SEQ ID NO: 1564464
agaagcauaugauugcauu

SEQ ID NO: 1877958 - RNA, 19 nt, Artificial Sequence
  Description of Artificial Sequence: Synthetic oligonucleotide
  Antisense strand to SEQ ID NO: 1877957
aaugcaaucauaugcuucu

SEQ ID NO: 1877959 - RNA, 19 nt, Artificial Sequence
  Description of Artificial Sequence: Synthetic oligonucleotide
  Sense strand starting at position 2274 of SEQ ID NO: 1564464
augagaaccuaauugucuu

SEQ ID NO: 1877960 - RNA, 19 nt, Artificial Sequence
  Description of Artificial Sequence: Synthetic oligonucleotide
  Antisense strand to SEQ ID NO: 1877959
aagacaauuagguucucau

SEQ ID NO: 1877961 - RNA, 19 nt, Artificial Sequence
  Description of Artificial Sequence: Synthetic oligonucleotide
  Sense strand starting at position 2485 of SEQ ID NO: 1564464
aauuguuucguuuagagaa

SEQ ID NO: 1877962 - RNA, 19 nt, Artificial Sequence
  Description of Artificial Sequence: Synthetic oligonucleotide
  Antisense strand to SEQ ID NO: 1877961
uucucuaaacgaaacaauu

SEQ ID NO: 1877963 - RNA, 19 nt, Artificial Sequence
  Description of Artificial Sequence: Synthetic oligonucleotide
  Sense strand starting at position 2543 of SEQ ID NO: 1564464
aguguuaagcuacacuaaa

SEQ ID NO: 1877964 - RNA, 19 nt, Artificial Sequence
  Description of Artificial Sequence: Synthetic oligonucleotide
  Antisense strand to SEQ ID NO: 1877963
uuuaguguagcuuaacacu

SEQ ID NO: 1877965 - RNA, 19 nt, Artificial Sequence
  Description of Artificial Sequence: Synthetic oligonucleotide
  Sense strand starting at position 2588 of SEQ ID NO: 1564464
gauuguauagugggauauu

SEQ ID NO: 1877966 - RNA, 19 nt, Artificial Sequence
  Description of Artificial Sequence: Synthetic oligonucleotide
  Antisense strand to SEQ ID NO: 1877965
aauaucccacuauacaauc

SEQ ID NO: 1877967 - RNA, 19 nt, Artificial Sequence
  Description of Artificial Sequence: Synthetic oligonucleotide
  Sense strand starting at position 3124 of SEQ ID NO: 1564464
uguaauuuguauccuaguu

SEQ ID NO: 1877968 - RNA, 19 nt, Artificial Sequence
  Description of Artificial Sequence: Synthetic oligonucleotide
  Antisense strand to SEQ ID NO: 1877967
aacuaggauacaaauuaca

SEQ ID NO: 1877969 - RNA, 19 nt, Artificial Sequence
  Description of Artificial Sequence: Synthetic oligonucleotide
  Sense strand starting at position 3196 of SEQ ID NO: 1564464
uggaaauauaguuggcuca

SEQ ID NO: 1877970 - RNA, 19 nt, Artificial Sequence
  Description of Artificial Sequence: Synthetic oligonucleotide
  Antisense strand to SEQ ID NO: 1877969
ugagccaacuauauuucca

SEQ ID NO: 1877971 - RNA, 19 nt, Artificial Sequence
  Description of Artificial Sequence: Synthetic oligonucleotide
  Sense strand starting at position 3197 of SEQ ID NO: 1564464
ggaaauauaguuggcucaa

SEQ ID NO: 1877972 - RNA, 19 nt, Artificial Sequence
  Description of Artificial Sequence: Synthetic oligonucleotide
  Antisense strand to SEQ ID NO: 1877971
uugagccaacuauauuucc

SEQ ID NO: 1877973 - RNA, 19 nt, Artificial Sequence
  Description of Artificial Sequence: Synthetic oligonucleotide
  Sense strand starting at position 3198 of SEQ ID NO: 1564464
gaaauauaguuggcucaag

SEQ ID NO: 1877974 - RNA, 19 nt, Artificial Sequence
  Description of Artificial Sequence: Synthetic oligonucleotide
  Antisense strand to SEQ ID NO: 1877973
cuugagccaacuauauuuc

SEQ ID NO: 1877975 - RNA, 19 nt, Artificial Sequence
  Description of Artificial Sequence: Synthetic oligonucleotide
  Sense strand starting at position 3223 of SEQ ID NO: 1564464
cauguaucuggauagcaaa

SEQ ID NO: 1877976 - RNA, 19 nt, Artificial Sequence
  Description of Artificial Sequence: Synthetic oligonucleotide
  Antisense strand to SEQ ID NO: 1877975
uuugcuauccagauacaug

SEQ ID NO: 1877977 - RNA, 19 nt, Artificial Sequence
  Description of Artificial Sequence: Synthetic oligonucleotide
  Sense strand starting at position 3759 of SEQ ID NO: 1564464
aagagaaaguugguacuca

SEQ ID NO: 1877978 - RNA, 19 nt, Artificial Sequence
  Description of Artificial Sequence: Synthetic oligonucleotide
  Antisense strand to SEQ ID NO: 1877977
ugaguaccaacuuucucuu

SEQ ID NO: 1877979 - RNA, 19 nt, Artificial Sequence
  Description of Artificial Sequence: Synthetic oligonucleotide
  Sense strand starting at position 3763 of SEQ ID NO: 1564464
gaaaguugguacucauuag

SEQ ID NO: 1877980 - RNA, 19 nt, Artificial Sequence
  Description of Artificial Sequence: Synthetic oligonucleotide
  Antisense strand to SEQ ID NO: 1877979
cuaaugaguaccaacuuuc

SEQ ID NO: 1877981 - RNA, 19 nt, Artificial Sequence
  Description of Artificial Sequence: Synthetic oligonucleotide
  Sense strand starting at position 3805 of SEQ ID NO: 1564464
auugguaaugaaggguuau

SEQ ID NO: 1877982 - RNA, 19 nt, Artificial Sequence
  Description of Artificial Sequence: Synthetic oligonucleotide
  Antisense strand to SEQ ID NO: 1877981
auaacccuucauuaccaau

SEQ ID NO: 1877983 - RNA, 19 nt, Artificial Sequence
  Description of Artificial Sequence: Synthetic oligonucleotide
  Sense strand starting at position 190 of SEQ ID NO: 1564465
gggccaaaugccugggagu

SEQ ID NO: 1877984 - RNA, 19 nt, Artificial Sequence
  Description of Artificial Sequence: Synthetic oligonucleotide
  Antisense strand to SEQ ID NO: 1877983
acucccaggcauuuggccc

SEQ ID NO: 1877985 - RNA, 19 nt, Artificial Sequence
  Description of Artificial Sequence: Synthetic oligonucleotide
  Sense strand starting at position 192 of SEQ ID NO: 1564465
gccaaaugccugggaguga

SEQ ID NO: 1877986 - RNA, 19 nt, Artificial Sequence
  Description of Artificial Sequence: Synthetic oligonucleotide
  Antisense strand to SEQ ID NO: 1877985
ucacucccaggcauuuggc

SEQ ID NO: 1877987 - RNA, 19 nt, Artificial Sequence
  Description of Artificial Sequence: Synthetic oligonucleotide
  Sense strand starting at position 372 of SEQ ID NO: 1564465
aaaucuguagcauauguga

SEQ ID NO: 1877988 - RNA, 19 nt, Artificial Sequence
  Description of Artificial Sequence: Synthetic oligonucleotide
  Antisense strand to SEQ ID NO: 1877987
ucacauaugcuacagauuu

SEQ ID NO: 1877989 - RNA, 19 nt, Artificial Sequence
  Description of Artificial Sequence: Synthetic oligonucleotide
  Sense strand starting at position 374 of SEQ ID NO: 1564465
aucuguagcauaugugaga

SEQ ID NO: 1877990 - RNA, 19 nt, Artificial Sequence
  Description of Artificial Sequence: Synthetic oligonucleotide
  Antisense strand to SEQ ID NO: 1877989
ucucacauaugcuacagau

SEQ ID NO: 1877991 - RNA, 19 nt, Artificial Sequence
  Description of Artificial Sequence: Synthetic oligonucleotide
  Sense strand starting at position 381 of SEQ ID NO: 1564465
gcauaugugagacaugauu

SEQ ID NO: 1877992 - RNA, 19 nt, Artificial Sequence
  Description of Artificial Sequence: Synthetic oligonucleotide
  Antisense strand to SEQ ID NO: 1877991
aaucaugucucacauaugc

SEQ ID NO: 1877993 - RNA, 19 nt, Artificial Sequence
  Description of Artificial Sequence: Synthetic oligonucleotide
  Sense strand starting at position 721 of SEQ ID NO: 1564465
ggucccuaacuuuguggaa

SEQ ID NO: 1877994 - RNA, 19 nt, Artificial Sequence
  Description of Artificial Sequence: Synthetic oligonucleotide
  Antisense strand to SEQ ID NO: 1877993
uuccacaaaguuagggacc

SEQ ID NO: 1877995 - RNA, 19 nt, Artificial Sequence
  Description of Artificial Sequence: Synthetic oligonucleotide
  Sense strand starting at position 722 of SEQ ID NO: 1564465
gucccuaacuuuguggaau

SEQ ID NO: 1877996 - RNA, 19 nt, Artificial Sequence
  Description of Artificial Sequence: Synthetic oligonucleotide
  Antisense strand to SEQ ID NO: 1877995
auuccacaaaguuagggac

SEQ ID NO: 1877997 - RNA, 19 nt, Artificial Sequence
  Description of Artificial Sequence: Synthetic oligonucleotide
  Sense strand starting at position 884 of SEQ ID NO: 1564465
cacauauccggcgaucacu

SEQ ID NO: 1877998 - RNA, 19 nt, Artificial Sequence
  Description of Artificial Sequence: Synthetic oligonucleotide
  Antisense strand to SEQ ID NO: 1877997
agugaucgccggauaugug

SEQ ID NO: 1877999 - RNA, 19 nt, Artificial Sequence
  Description of Artificial Sequence: Synthetic oligonucleotide
  Sense strand starting at position 1133 of SEQ ID NO: 1564465
uccgaauuccuugacgguu

SEQ ID NO: 1878000 - RNA, 19 nt, Artificial Sequence
  Description of Artificial Sequence: Synthetic oligonucleotide
  Antisense strand to SEQ ID NO: 1877999
aaccgucaaggaauucgga

SEQ ID NO: 1878001 - RNA, 19 nt, Artificial Sequence
  Description of Artificial Sequence: Synthetic oligonucleotide
  Sense strand starting at position 1256 of SEQ ID NO: 1564465
ccgagucccguggaugaaa

SEQ ID NO: 1878002 - RNA, 19 nt, Artificial Sequence
  Description of Artificial Sequence: Synthetic oligonucleotide
  Antisense strand to SEQ ID NO: 1878001
uuucauccacgggacucgg

SEQ ID NO: 1878003 - RNA, 19 nt, Artificial Sequence
  Description of Artificial Sequence: Synthetic oligonucleotide
  Sense strand starting at position 1388 of SEQ ID NO: 1564465
gaaaccgaguacuuuccua

SEQ ID NO: 1878004 - RNA, 19 nt, Artificial Sequence
  Description of Artificial Sequence: Synthetic oligonucleotide
  Antisense strand to SEQ ID NO: 1878003
uaggaaaguacucgguuuc

SEQ ID NO: 1878005 - RNA, 19 nt, Artificial Sequence
  Description of Artificial Sequence: Synthetic oligonucleotide
  Sense strand starting at position 1392 of SEQ ID NO: 1564465
ccgaguacuuuccuaaacu

SEQ ID NO: 1878006 - RNA, 19 nt, Artificial Sequence
  Description of Artificial Sequence: Synthetic oligonucleotide
  Antisense strand to SEQ ID NO: 1878005
aguuuaggaaaguacucgg

SEQ ID NO: 1878007 - RNA, 19 nt, Artificial Sequence
  Description of Artificial Sequence: Synthetic oligonucleotide
  Sense strand starting at position 1497 of SEQ ID NO: 1564465
cggaaaccucccgguauug

SEQ ID NO: 1878008 - RNA, 19 nt, Artificial Sequence
  Description of Artificial Sequence: Synthetic oligonucleotide
  Antisense strand to SEQ ID NO: 1878007
caauaccgggagguuuccg

SEQ ID NO: 1878009 - RNA, 19 nt, Artificial Sequence
  Description of Artificial Sequence: Synthetic oligonucleotide
  Sense strand starting at position 1499 of SEQ ID NO: 1564465
gaaaccucccgguauuguu

SEQ ID NO: 1878010 - RNA, 19 nt, Artificial Sequence
  Description of Artificial Sequence: Synthetic oligonucleotide
  Antisense strand to SEQ ID NO: 1878009
aacaauaccgggagguuuc

SEQ ID NO: 1878011 - RNA, 19 nt, Artificial Sequence
  Description of Artificial Sequence: Synthetic oligonucleotide
  Sense strand starting at position 2218 of SEQ ID NO: 1564465
gguuuagauccggaaccag

SEQ ID NO: 1878012 - RNA, 19 nt, Artificial Sequence
  Description of Artificial Sequence: Synthetic oligonucleotide
  Antisense strand to SEQ ID NO: 1878011
cugguuccggaucuaaacc

SEQ ID NO: 1878013 - RNA, 19 nt, Artificial Sequence
  Description of Artificial Sequence: Synthetic oligonucleotide
  Sense strand starting at position 2800 of SEQ ID NO: 1564465
uuaguauaugaugagcuuu

SEQ ID NO: 1878014 - RNA, 19 nt, Artificial Sequence
  Description of Artificial Sequence: Synthetic oligonucleotide
  Antisense strand to SEQ ID NO: 1878013
aaagcucaucauauacuaa

SEQ ID NO: 1878015 - RNA, 19 nt, Artificial Sequence
  Description of Artificial Sequence: Synthetic oligonucleotide
  Sense strand starting at position 3031 of SEQ ID NO: 1564465
ugcgaaauauugcuguaaa

SEQ ID NO: 1878016 - RNA, 19 nt, Artificial Sequence
  Description of Artificial Sequence: Synthetic oligonucleotide
  Antisense strand to SEQ ID NO: 1878015
uuuacagcaauauuucgca

SEQ ID NO: 1878017 - RNA, 19 nt, Artificial Sequence
  Description of Artificial Sequence: Synthetic oligonucleotide
  Sense strand starting at position 3060 of SEQ ID NO: 1564465
auaugaaaucacgguugcu

SEQ ID NO: 1878018 - RNA, 19 nt, Artificial Sequence
  Description of Artificial Sequence: Synthetic oligonucleotide
  Antisense strand to SEQ ID NO: 1878017
agcaaccgugauuucauau

SEQ ID NO: 1878019 - RNA, 19 nt, Artificial Sequence
  Description of Artificial Sequence: Synthetic oligonucleotide
  Sense strand starting at position 3063 of SEQ ID NO: 1564465
ugaaaucacgguugcuaca

SEQ ID NO: 1878020 - RNA, 19 nt, Artificial Sequence
  Description of Artificial Sequence: Synthetic oligonucleotide
  Antisense strand to SEQ ID NO: 1878019
uguagcaaccgugauuuca

SEQ ID NO: 1878021 - RNA, 19 nt, Artificial Sequence
  Description of Artificial Sequence: Synthetic oligonucleotide
  Sense strand starting at position 3084 of SEQ ID NO: 1564465
aucauuagagcacaucgau

SEQ ID NO: 1878022 - RNA, 19 nt, Artificial Sequence
  Description of Artificial Sequence: Synthetic oligonucleotide
  Antisense strand to SEQ ID NO: 1878021
aucgaugugcucuaaugau

SEQ ID NO: 1878023 - RNA, 19 nt, Artificial Sequence
  Description of Artificial Sequence: Synthetic oligonucleotide
  Sense strand starting at position 3087 of SEQ ID NO: 1564465
auuagagcacaucgauaaa

SEQ ID NO: 1878024 - RNA, 19 nt, Artificial Sequence
  Description of Artificial Sequence: Synthetic oligonucleotide
  Antisense strand to SEQ ID NO: 1878023
uuuaucgaugugcucuaau

SEQ ID NO: 1878025 - RNA, 19 nt, Artificial Sequence
  Description of Artificial Sequence: Synthetic oligonucleotide
  Sense strand starting at position 3156 of SEQ ID NO: 1564465
gucuuauuaugucuuauca

SEQ ID NO: 1878026 - RNA, 19 nt, Artificial Sequence
  Description of Artificial Sequence: Synthetic oligonucleotide
  Antisense strand to SEQ ID NO: 1878025
ugauaagacauaauaagac

SEQ ID NO: 1878027 - RNA, 19 nt, Artificial Sequence
  Description of Artificial Sequence: Synthetic oligonucleotide
  Sense strand starting at position 3258 of SEQ ID NO: 1564465
uaaacugaugcugagguau

SEQ ID NO: 1878028 - RNA, 19 nt, Artificial Sequence
  Description of Artificial Sequence: Synthetic oligonucleotide
  Antisense strand to SEQ ID NO: 1878027
auaccucagcaucaguuua

SEQ ID NO: 1878029 - RNA, 19 nt, Artificial Sequence
  Description of Artificial Sequence: Synthetic oligonucleotide
  Sense strand starting at position 3269 of SEQ ID NO: 1564465
ugagguauugcaugcaauc

SEQ ID NO: 1878030 - RNA, 19 nt, Artificial Sequence
  Description of Artificial Sequence: Synthetic oligonucleotide
  Antisense strand to SEQ ID NO: 1878029
gauugcaugcaauaccuca

SEQ ID NO: 1878031 - RNA, 19 nt, Artificial Sequence
  Description of Artificial Sequence: Synthetic oligonucleotide
  Sense strand starting at position 3271 of SEQ ID NO: 1564465
agguauugcaugcaaucga

SEQ ID NO: 1878032 - RNA, 19 nt, Artificial Sequence
  Description of Artificial Sequence: Synthetic oligonucleotide
  Antisense strand to SEQ ID NO: 1878031
ucgauugcaugcaauaccu

SEQ ID NO: 1878033 - RNA, 19 nt, Artificial Sequence
  Description of Artificial Sequence: Synthetic oligonucleotide
  Sense strand starting at position 3316 of SEQ ID NO: 1564465
aagcgagcucaugaugcaa

SEQ ID NO: 1878034 - RNA, 19 nt, Artificial Sequence
  Description of Artificial Sequence: Synthetic oligonucleotide
  Antisense strand to SEQ ID NO: 1878033
uugcaucaugagcucgcuu

SEQ ID NO: 1878035 - RNA, 19 nt, Artificial Sequence
  Description of Artificial Sequence: Synthetic oligonucleotide
  Sense strand starting at position 3411 of SEQ ID NO: 1564465
ucacuuugcgguuaauuga

SEQ ID NO: 1878036 - RNA, 19 nt, Artificial Sequence
  Description of Artificial Sequence: Synthetic oligonucleotide
  Antisense strand to SEQ ID NO: 1878035
ucaauuaaccgcaaaguga

SEQ ID NO: 1878037 - RNA, 19 nt, Artificial Sequence
  Description of Artificial Sequence: Synthetic oligonucleotide
  Sense strand starting at position 3470 of SEQ ID NO: 1564465
aguagaagucuuuacagcu

SEQ ID NO: 1878038 - RNA, 19 nt, Artificial Sequence
  Description of Artificial Sequence: Synthetic oligonucleotide
  Antisense strand to SEQ ID NO: 1878037
agcuguaaagacuucuacu

SEQ ID NO: 1878039 - RNA, 19 nt, Artificial Sequence
  Description of Artificial Sequence: Synthetic oligonucleotide
  Sense strand starting at position 3480 of SEQ ID NO: 1564465
uuuacagcucuggacuuaa

SEQ ID NO: 1878040 - RNA, 19 nt, Artificial Sequence
  Description of Artificial Sequence: Synthetic oligonucleotide
  Antisense strand to SEQ ID NO: 1878039
uuaaguccagagcuguaaa

SEQ ID NO: 1878041 - RNA, 19 nt, Artificial Sequence
  Description of Artificial Sequence: Synthetic oligonucleotide
  Sense strand starting at position 3615 of SEQ ID NO: 1564465
accucuuuguauguucuaa

SEQ ID NO: 1878042 - RNA, 19 nt, Artificial Sequence
  Description of Artificial Sequence: Synthetic oligonucleotide
  Antisense strand to SEQ ID NO: 1878041
uuagaacauacaaagaggu

SEQ ID NO: 1878043 - RNA, 19 nt, Artificial Sequence
  Description of Artificial Sequence: Synthetic oligonucleotide
  Sense strand starting at position 3617 of SEQ ID NO: 1564465
cucuuuguauguucuaauu

SEQ ID NO: 1878044 - RNA, 19 nt, Artificial Sequence
  Description of Artificial Sequence: Synthetic oligonucleotide
  Antisense strand to SEQ ID NO: 1878043
aauuagaacauacaaagag

SEQ ID NO: 1878045 - RNA, 19 nt, Artificial Sequence
  Description of Artificial Sequence: Synthetic oligonucleotide
  Sense strand starting at position 3628 of SEQ ID NO: 1564465
uucuaauuacuuggcagau

SEQ ID NO: 1878046 - RNA, 19 nt, Artificial Sequence
  Description of Artificial Sequence: Synthetic oligonucleotide
  Antisense strand to SEQ ID NO: 1878045
aucugccaaguaauuagaa

SEQ ID NO: 1878047 - RNA, 19 nt, Artificial Sequence
  Description of Artificial Sequence: Synthetic oligonucleotide
  Sense strand starting at position 3629 of SEQ ID NO: 1564465
ucuaauuacuuggcagaug

SEQ ID NO: 1878048 - RNA, 19 nt, Artificial Sequence
  Description of Artificial Sequence: Synthetic oligonucleotide
  Antisense strand to SEQ ID NO: 1878047
caucugccaaguaauuaga

SEQ ID NO: 1878049 - RNA, 19 nt, Artificial Sequence
  Description of Artificial Sequence: Synthetic oligonucleotide
  Sense strand starting at position 3632 of SEQ ID NO: 1564465
aauuacuuggcagauguca

SEQ ID NO: 1878050 - RNA, 19 nt, Artificial Sequence
  Description of Artificial Sequence: Synthetic oligonucleotide
  Antisense strand to SEQ ID NO: 1878049
ugacaucugccaaguaauu

SEQ ID NO: 1878051 - RNA, 19 nt, Artificial Sequence
  Description of Artificial Sequence: Synthetic oligonucleotide
  Sense strand starting at position 3723 of SEQ ID NO: 1564465
gcugaucuucuguagcuaa

SEQ ID NO: 1878052 - RNA, 19 nt, Artificial Sequence
  Description of Artificial Sequence: Synthetic oligonucleotide
  Antisense strand to SEQ ID NO: 1878051
uuagcuacagaagaucagc

SEQ ID NO: 1878053 - RNA, 19 nt, Artificial Sequence
  Description of Artificial Sequence: Synthetic oligonucleotide
  Sense strand starting at position 3915 of SEQ ID NO: 1564465
uuaggugggcgguagauaa

SEQ ID NO: 1878054 - RNA, 19 nt, Artificial Sequence
  Description of Artificial Sequence: Synthetic oligonucleotide
  Antisense strand to SEQ ID NO: 1878053
uuaucuaccgcccaccuaa

SEQ ID NO: 1878055 - RNA, 19 nt, Artificial Sequence
  Description of Artificial Sequence: Synthetic oligonucleotide
  Sense strand starting at position 3923 of SEQ ID NO: 1564465
gcgguagauaagugauaga

SEQ ID NO: 1878056 - RNA, 19 nt, Artificial Sequence
  Description of Artificial Sequence: Synthetic oligonucleotide
  Antisense strand to SEQ ID NO: 1878055
ucuaucacuuaucuaccgc

SEQ ID NO: 1878057 - RNA, 19 nt, Artificial Sequence
  Description of Artificial Sequence: Synthetic oligonucleotide
  Sense strand starting at position 3933 of SEQ ID NO: 1564465
agugauagacuguguuauu

SEQ ID NO: 1878058 - RNA, 19 nt, Artificial Sequence
  Description of Artificial Sequence: Synthetic oligonucleotide
  Antisense strand to SEQ ID NO: 1878057
aauaacacagucuaucacu

SEQ ID NO: 1878059 - RNA, 19 nt, Artificial Sequence
  Description of Artificial Sequence: Synthetic oligonucleotide
  Sense strand starting at position 3936 of SEQ ID NO: 1564465
gauagacuguguuauuuaa

SEQ ID NO: 1878060 - RNA, 19 nt, Artificial Sequence
  Description of Artificial Sequence: Synthetic oligonucleotide
  Antisense strand to SEQ ID NO: 1878059
uuaaauaacacagucuauc

SEQ ID NO: 1878061 - RNA, 19 nt, Artificial Sequence
  Description of Artificial Sequence: Synthetic oligonucleotide
  Sense strand starting at position 3946 of SEQ ID NO: 1564465
guuauuuaaugcuucgaau

SEQ ID NO: 1878062 - RNA, 19 nt, Artificial Sequence
  Description of Artificial Sequence: Synthetic oligonucleotide
  Antisense strand to SEQ ID NO: 1878061
auucgaagcauuaaauaac

SEQ ID NO: 1878063 - RNA, 19 nt, Artificial Sequence
  Description of Artificial Sequence: Synthetic oligonucleotide
  Sense strand starting at position 704 of SEQ ID NO: 1564466
aacagagauuaccgagaga

SEQ ID NO: 1878064 - RNA, 19 nt, Artificial Sequence
  Description of Artificial Sequence: Synthetic oligonucleotide
  Antisense strand to SEQ ID NO: 1878063
ucucucgguaaucucuguu

SEQ ID NO: 1878065 - RNA, 19 nt, Artificial Sequence
  Description of Artificial Sequence: Synthetic oligonucleotide
  Sense strand starting at position 751 of SEQ ID NO: 1564466
uguagcaacccugggauua

SEQ ID NO: 1878066 - RNA, 19 nt, Artificial Sequence
  Description of Artificial Sequence: Synthetic oligonucleotide
  Antisense strand to SEQ ID NO: 1878065
uaaucccaggguugcuaca

SEQ ID NO: 1878067 - RNA, 19 nt, Artificial Sequence
  Description of Artificial Sequence: Synthetic oligonucleotide
  Sense strand starting at position 752 of SEQ ID NO: 1564466
guagcaacccugggauuaa

SEQ ID NO: 1878068 - RNA, 19 nt, Artificial Sequence
  Description of Artificial Sequence: Synthetic oligonucleotide
  Antisense strand to SEQ ID NO: 1878067
uuaaucccaggguugcuac

SEQ ID NO: 1878069 - RNA, 19 nt, Artificial Sequence
  Description of Artificial Sequence: Synthetic oligonucleotide
  Sense strand starting at position 767 of SEQ ID NO: 1564466
uuaagaaaguuggcuagaa

SEQ ID NO: 1878070 - RNA, 19 nt, Artificial Sequence
  Description of Artificial Sequence: Synthetic oligonucleotide
  Antisense strand to SEQ ID NO: 1878069
uucuagccaacuuucuuaa

SEQ ID NO: 1878071 - RNA, 19 nt, Artificial Sequence
  Description of Artificial Sequence: Synthetic oligonucleotide
  Sense strand starting at position 821 of SEQ ID NO: 1564466
uguuuaaucucagauguac

SEQ ID NO: 1878072 - RNA, 19 nt, Artificial Sequence
  Description of Artificial Sequence: Synthetic oligonucleotide
  Antisense strand to SEQ ID NO: 1878071
guacaucugagauuaaaca

SEQ ID NO: 1878073 - RNA, 19 nt, Artificial Sequence
  Description of Artificial Sequence: Synthetic oligonucleotide
  Sense strand starting at position 833 of SEQ ID NO: 1564466
gauguacuagucugauggu

SEQ ID NO: 1878074 - RNA, 19 nt, Artificial Sequence
  Description of Artificial Sequence: Synthetic oligonucleotide
  Antisense strand to SEQ ID NO: 1878073
accaucagacuaguacauc

SEQ ID NO: 1878075 - RNA, 19 nt, Artificial Sequence
  Description of Artificial Sequence: Synthetic oligonucleotide
  Sense strand starting at position 836 of SEQ ID NO: 1564466
guacuagucugauggucua

SEQ ID NO: 1878076 - RNA, 19 nt, Artificial Sequence
  Description of Artificial Sequence: Synthetic oligonucleotide
  Antisense strand to SEQ ID NO: 1878075
uagaccaucagacuaguac

SEQ ID NO: 1878077 - RNA, 19 nt, Artificial Sequence
  Description of Artificial Sequence: Synthetic oligonucleotide
  Sense strand starting at position 839 of SEQ ID NO: 1564466
cuagucugauggucuaaag

SEQ ID NO: 1878078 - RNA, 19 nt, Artificial Sequence
  Description of Artificial Sequence: Synthetic oligonucleotide
  Antisense strand to SEQ ID NO: 1878077
cuuuagaccaucagacuag

SEQ ID NO: 1878079 - RNA, 19 nt, Artificial Sequence
  Description of Artificial Sequence: Synthetic oligonucleotide
  Sense strand starting at position 2074 of SEQ ID NO: 1564466
uggaguucuucucccauug

SEQ ID NO: 1878080 - RNA, 19 nt, Artificial Sequence
  Description of Artificial Sequence: Synthetic oligonucleotide
  Antisense strand to SEQ ID NO: 1878079
caaugggagaagaacucca

SEQ ID NO: 1878081 - RNA, 19 nt, Artificial Sequence
  Description of Artificial Sequence: Synthetic oligonucleotide
  Sense strand starting at position 2084 of SEQ ID NO: 1564466
cucccauuguucuugcgua

SEQ ID NO: 1878082 - RNA, 19 nt, Artificial Sequence
  Description of Artificial Sequence: Synthetic oligonucleotide
  Antisense strand to SEQ ID NO: 1878081
uacgcaagaacaaugggag

SEQ ID NO: 1878083 - RNA, 19 nt, Artificial Sequence
  Description of Artificial Sequence: Synthetic oligonucleotide
  Sense strand starting at position 2193 of SEQ ID NO: 1564466
ggacucuauuucuauuagu

SEQ ID NO: 1878084 - RNA, 19 nt, Artificial Sequence
  Description of Artificial Sequence: Synthetic oligonucleotide
  Antisense strand to SEQ ID NO: 1878083
acuaauagaaauagagucc

SEQ ID NO: 1878085 - RNA, 19 nt, Artificial Sequence
  Description of Artificial Sequence: Synthetic oligonucleotide
  Sense strand starting at position 2211 of SEQ ID NO: 1564466
uguaaauacgccuaucacu

SEQ ID NO: 1878086 - RNA, 19 nt, Artificial Sequence
  Description of Artificial Sequence: Synthetic oligonucleotide
  Antisense strand to SEQ ID NO: 1878085
agugauaggcguauuuaca

SEQ ID NO: 1878087 - RNA, 19 nt, Artificial Sequence
  Description of Artificial Sequence: Synthetic oligonucleotide
  Sense strand starting at position 2348 of SEQ ID NO: 1564466
gaguguaacuacuguacgu

SEQ ID NO: 1878088 - RNA, 19 nt, Artificial Sequence
  Description of Artificial Sequence: Synthetic oligonucleotide
  Antisense strand to SEQ ID NO: 1878087
acguacaguaguuacacuc

SEQ ID NO: 1878089 - RNA, 19 nt, Artificial Sequence
  Description of Artificial Sequence: Synthetic oligonucleotide
  Sense strand starting at position 2817 of SEQ ID NO: 1564466
aucuuugucuuucgaauga

SEQ ID NO: 1878090 - RNA, 19 nt, Artificial Sequence
  Description of Artificial Sequence: Synthetic oligonucleotide
  Antisense strand to SEQ ID NO: 1878089
ucauucgaaagacaaagau

SEQ ID NO: 1878091 - RNA, 19 nt, Artificial Sequence
  Description of Artificial Sequence: Synthetic oligonucleotide
  Sense strand starting at position 2821 of SEQ ID NO: 1564466
uugucuuucgaaugacuuu

SEQ ID NO: 1878092 - RNA, 19 nt, Artificial Sequence
  Description of Artificial Sequence: Synthetic oligonucleotide
  Antisense strand to SEQ ID NO: 1878091
aaagucauucgaaagacaa

SEQ ID NO: 1878093 - RNA, 19 nt, Artificial Sequence
  Description of Artificial Sequence: Synthetic oligonucleotide
  Sense strand starting at position 2827 of SEQ ID NO: 1564466
uucgaaugacuuugcuauu

SEQ ID NO: 1878094 - RNA, 19 nt, Artificial Sequence
  Description of Artificial Sequence: Synthetic oligonucleotide
  Antisense strand to SEQ ID NO: 1878093
aauagcaaagucauucgaa

SEQ ID NO: 1878095 - RNA, 19 nt, Artificial Sequence
  Description of Artificial Sequence: Synthetic oligonucleotide
  Sense strand starting at position 3356 of SEQ ID NO: 1564466
guggaaaucacccgauaag

SEQ ID NO: 1878096 - RNA, 19 nt, Artificial Sequence
  Description of Artificial Sequence: Synthetic oligonucleotide
  Antisense strand to SEQ ID NO: 1878095
cuuaucgggugauuuccac

SEQ ID NO: 1878097 - RNA, 19 nt, Artificial Sequence
  Description of Artificial Sequence: Synthetic oligonucleotide
  Sense strand starting at position 3544 of SEQ ID NO: 1564466
uuugcagaguccuagcuau

SEQ ID NO: 1878098 - RNA, 19 nt, Artificial Sequence
  Description of Artificial Sequence: Synthetic oligonucleotide
  Antisense strand to SEQ ID NO: 1878097
auagcuaggacucugcaaa

SEQ ID NO: 1878099 - RNA, 19 nt, Artificial Sequence
  Description of Artificial Sequence: Synthetic oligonucleotide
  Sense strand starting at position 408 of SEQ ID NO: 1564467
gccuaauauggaugggaug

SEQ ID NO: 1878100 - RNA, 19 nt, Artificial Sequence
  Description of Artificial Sequence: Synthetic oligonucleotide
  Antisense strand to SEQ ID NO: 1878099
caucccauccauauuaggc

SEQ ID NO: 1878101 - RNA, 19 nt, Artificial Sequence
  Description of Artificial Sequence: Synthetic oligonucleotide
  Sense strand starting at position 669 of SEQ ID NO: 1564467
uaaggaucgcccuauuguu

SEQ ID NO: 1878102 - RNA, 19 nt, Artificial Sequence
  Description of Artificial Sequence: Synthetic oligonucleotide
  Antisense strand to SEQ ID NO: 1878101
aacaauagggcgauccuua

SEQ ID NO: 1878103 - RNA, 19 nt, Artificial Sequence
  Description of Artificial Sequence: Synthetic oligonucleotide
  Sense strand starting at position 1124 of SEQ ID NO: 1564467
ggagcuuacuuucuuugga

SEQ ID NO: 1878104 - RNA, 19 nt, Artificial Sequence
  Description of Artificial Sequence: Synthetic oligonucleotide
  Antisense strand to SEQ ID NO: 1878103
uccaaagaaaguaagcucc

SEQ ID NO: 1878105 - RNA, 19 nt, Artificial Sequence
  Description of Artificial Sequence: Synthetic oligonucleotide
  Sense strand starting at position 1127 of SEQ ID NO: 1564467
gcuuacuuucuuuggaaga

SEQ ID NO: 1878106 - RNA, 19 nt, Artificial Sequence
  Description of Artificial Sequence: Synthetic oligonucleotide
  Antisense strand to SEQ ID NO: 1878105
ucuuccaaagaaaguaagc

SEQ ID NO: 1878107 - RNA, 19 nt, Artificial Sequence
  Description of Artificial Sequence: Synthetic oligonucleotide
  Sense strand starting at position 1985 of SEQ ID NO: 1564467
ggaucugucuguucccaca

SEQ ID NO: 1878108 - RNA, 19 nt, Artificial Sequence
  Description of Artificial Sequence: Synthetic oligonucleotide
  Antisense strand to SEQ ID NO: 1878107
ugugggaacagacagaucc

SEQ ID NO: 1878109 - RNA, 19 nt, Artificial Sequence
  Description of Artificial Sequence: Synthetic oligonucleotide
  Sense strand starting at position 2023 of SEQ ID NO: 1564467
gcacaauaccuuugagagc

SEQ ID NO: 1878110 - RNA, 19 nt, Artificial Sequence
  Description of Artificial Sequence: Synthetic oligonucleotide
  Antisense strand to SEQ ID NO: 1878109
gcucucaaagguauugugc

SEQ ID NO: 1878111 - RNA, 19 nt, Artificial Sequence
  Description of Artificial Sequence: Synthetic oligonucleotide
  Sense strand starting at position 2399 of SEQ ID NO: 1564467
guuuauuugcuuuguucuu

SEQ ID NO: 1878112 - RNA, 19 nt, Artificial Sequence
  Description of Artificial Sequence: Synthetic oligonucleotide
  Antisense strand to SEQ ID NO: 1878111
aagaacaaagcaaauaaac

SEQ ID NO: 1878113 - RNA, 19 nt, Artificial Sequence
  Description of Artificial Sequence: Synthetic oligonucleotide
  Sense strand starting at position 2495 of SEQ ID NO: 1564467
gggauaaucacucggcuug

SEQ ID NO: 1878114 - RNA, 19 nt, Artificial Sequence
  Description of Artificial Sequence: Synthetic oligonucleotide
  Antisense strand to SEQ ID NO: 1878113
caagccgagugauuauccc

SEQ ID NO: 1878115 - RNA, 19 nt, Artificial Sequence
  Description of Artificial Sequence: Synthetic oligonucleotide
  Sense strand starting at position 2635 of SEQ ID NO: 1564467
agugaaaucuagucuacac

SEQ ID NO: 1878116 - RNA, 19 nt, Artificial Sequence
  Description of Artificial Sequence: Synthetic oligonucleotide
  Antisense strand to SEQ ID NO: 1878115
guguagacuagauuucacu

SEQ ID NO: 1878117 - RNA, 19 nt, Artificial Sequence
  Description of Artificial Sequence: Synthetic oligonucleotide
  Sense strand starting at position 2710 of SEQ ID NO: 1564467
cuauguaaaugaguugaug

SEQ ID NO: 1878118 - RNA, 19 nt, Artificial Sequence
  Description of Artificial Sequence: Synthetic oligonucleotide
  Antisense strand to SEQ ID NO: 1878117
caucaacucauuuacauag

SEQ ID NO: 1878119 - RNA, 19 nt, Artificial Sequence
  Description of Artificial Sequence: Synthetic oligonucleotide
  Sense strand starting at position 2712 of SEQ ID NO: 1564467
auguaaaugaguugauguc

SEQ ID NO: 1878120 - RNA, 19 nt, Artificial Sequence
  Description of Artificial Sequence: Synthetic oligonucleotide
  Antisense strand to SEQ ID NO: 1878119
gacaucaacucauuuacau

SEQ ID NO: 1878121 - RNA, 19 nt, Artificial Sequence
  Description of Artificial Sequence: Synthetic oligonucleotide
  Sense strand starting at position 2713 of SEQ ID NO: 1564467
uguaaaugaguugauguca

SEQ ID NO: 1878122 - RNA, 19 nt, Artificial Sequence
  Description of Artificial Sequence: Synthetic oligonucleotide
  Antisense strand to SEQ ID NO: 1878121
ugacaucaacucauuuaca

SEQ ID NO: 1878123 - RNA, 19 nt, Artificial Sequence
  Description of Artificial Sequence: Synthetic oligonucleotide
  Sense strand starting at position 2940 of SEQ ID NO: 1564467
cggacuggugcauauuauu

SEQ ID NO: 1878124 - RNA, 19 nt, Artificial Sequence
  Description of Artificial Sequence: Synthetic oligonucleotide
  Antisense strand to SEQ ID NO: 1878123
aauaauaugcaccaguccg

SEQ ID NO: 1878125 - RNA, 19 nt, Artificial Sequence
  Description of Artificial Sequence: Synthetic oligonucleotide
  Sense strand starting at position 2956 of SEQ ID NO: 1564467
auuuaagggucggaguaau

SEQ ID NO: 1878126 - RNA, 19 nt, Artificial Sequence
  Description of Artificial Sequence: Synthetic oligonucleotide
  Antisense strand to SEQ ID NO: 1878125
auuacuccgacccuuaaau

SEQ ID NO: 1878127 - RNA, 19 nt, Artificial Sequence
  Description of Artificial Sequence: Synthetic oligonucleotide
  Sense strand starting at position 2966 of SEQ ID NO: 1564467
cggaguaauaccuagggua

SEQ ID NO: 1878128 - RNA, 19 nt, Artificial Sequence
  Description of Artificial Sequence: Synthetic oligonucleotide
  Antisense strand to SEQ ID NO: 1878127
uacccuagguauuacuccg

SEQ ID NO: 1878129 - RNA, 19 nt, Artificial Sequence
  Description of Artificial Sequence: Synthetic oligonucleotide
  Sense strand starting at position 2968 of SEQ ID NO: 1564467
gaguaauaccuaggguaac

SEQ ID NO: 1878130 - RNA, 19 nt, Artificial Sequence
  Description of Artificial Sequence: Synthetic oligonucleotide
  Antisense strand to SEQ ID NO: 1878129
guuacccuagguauuacuc

SEQ ID NO: 1878131 - RNA, 19 nt, Artificial Sequence
  Description of Artificial Sequence: Synthetic oligonucleotide
  Sense strand starting at position 3080 of SEQ ID NO: 1564467
gggauaucauuccugugac

SEQ ID NO: 1878132 - RNA, 19 nt, Artificial Sequence
  Description of Artificial Sequence: Synthetic oligonucleotide
  Antisense strand to SEQ ID NO: 1878131
gucacaggaaugauauccc

SEQ ID NO: 1878133 - RNA, 19 nt, Artificial Sequence
  Description of Artificial Sequence: Synthetic oligonucleotide
  Sense strand starting at position 3083 of SEQ ID NO: 1564467
auaucauuccugugacuca

SEQ ID NO: 1878134 - RNA, 19 nt, Artificial Sequence
  Description of Artificial Sequence: Synthetic oligonucleotide
  Antisense strand to SEQ ID NO: 1878133
ugagucacaggaaugauau

SEQ ID NO: 1878135 - RNA, 19 nt, Artificial Sequence
  Description of Artificial Sequence: Synthetic oligonucleotide
  Sense strand starting at position 3164 of SEQ ID NO: 1564467
uugccuuuggcagaaggua

SEQ ID NO: 1878136 - RNA, 19 nt, Artificial Sequence
  Description of Artificial Sequence: Synthetic oligonucleotide
  Antisense strand to SEQ ID NO: 1878135
uaccuucugccaaaggcaa

SEQ ID NO: 1878137 - RNA, 19 nt, Artificial Sequence
  Description of Artificial Sequence: Synthetic oligonucleotide
  Sense strand starting at position 3222 of SEQ ID NO: 1564467
uuguaacauccauauuguu

SEQ ID NO: 1878138 - RNA, 19 nt, Artificial Sequence
  Description of Artificial Sequence: Synthetic oligonucleotide
  Antisense strand to SEQ ID NO: 1878137
aacaauauggauguuacaa

SEQ ID NO: 1878139 - RNA, 19 nt, Artificial Sequence
  Description of Artificial Sequence: Synthetic oligonucleotide
  Sense strand starting at position 3258 of SEQ ID NO: 1564467
guaggcacucaacaguaau

SEQ ID NO: 1878140 - RNA, 19 nt, Artificial Sequence
  Description of Artificial Sequence: Synthetic oligonucleotide
  Antisense strand to SEQ ID NO: 1878139
auuacuguugagugccuac

SEQ ID NO: 1878141 - RNA, 19 nt, Artificial Sequence
  Description of Artificial Sequence: Synthetic oligonucleotide
  Sense strand starting at position 3261 of SEQ ID NO: 1564467
ggcacucaacaguaauauu

SEQ ID NO: 1878142 - RNA, 19 nt, Artificial Sequence
  Description of Artificial Sequence: Synthetic oligonucleotide
  Antisense strand to SEQ ID NO: 1878141
aauauuacuguugagugcc

SEQ ID NO: 1878143 - RNA, 19 nt, Artificial Sequence
  Description of Artificial Sequence: Synthetic oligonucleotide
  Sense strand starting at position 3273 of SEQ ID NO: 1564467
uaauauugaguguagggua

SEQ ID NO: 1878144 - RNA, 19 nt, Artificial Sequence
  Description of Artificial Sequence: Synthetic oligonucleotide
  Antisense strand to SEQ ID NO: 1878143
uacccuacacucaauauua

SEQ ID NO: 1878145 - RNA, 19 nt, Artificial Sequence
  Description of Artificial Sequence: Synthetic oligonucleotide
  Sense strand starting at position 3278 of SEQ ID NO: 1564467
uugaguguaggguaauauu

SEQ ID NO: 1878146 - RNA, 19 nt, Artificial Sequence
  Description of Artificial Sequence: Synthetic oligonucleotide
  Antisense strand to SEQ ID NO: 1878145
aauauuacccuacacucaa

SEQ ID NO: 1878147 - RNA, 19 nt, Artificial Sequence
  Description of Artificial Sequence: Synthetic oligonucleotide
  Sense strand starting at position 3289 of SEQ ID NO: 1564467
guaauauuguacucuacac

SEQ ID NO: 1878148 - RNA, 19 nt, Artificial Sequence
  Description of Artificial Sequence: Synthetic oligonucleotide
  Antisense strand to SEQ ID NO: 1878147
guguagaguacaauauuac

SEQ ID NO: 1878149 - RNA, 19 nt, Artificial Sequence
  Description of Artificial Sequence: Synthetic oligonucleotide
  Sense strand starting at position 3312 of SEQ ID NO: 1564467
gguguagaguaauuugucu

SEQ ID NO: 1878150 - RNA, 19 nt, Artificial Sequence
  Description of Artificial Sequence: Synthetic oligonucleotide
  Antisense strand to SEQ ID NO: 1878149
agacaaauuacucuacacc

SEQ ID NO: 1878151 - RNA, 19 nt, Artificial Sequence
  Description of Artificial Sequence: Synthetic oligonucleotide
  Sense strand starting at position 3381 of SEQ ID NO: 1564467
uugacuuacugccugacaa

SEQ ID NO: 1878152 - RNA, 19 nt, Artificial Sequence
  Description of Artificial Sequence: Synthetic oligonucleotide
  Antisense strand to SEQ ID NO: 1878151
uugucaggcaguaagucaa

SEQ ID NO: 1878153 - RNA, 19 nt, Artificial Sequence
  Description of Artificial Sequence: Synthetic oligonucleotide
  Sense strand starting at position 3382 of SEQ ID NO: 1564467
ugacuuacugccugacaau

SEQ ID NO: 1878154 - RNA, 19 nt, Artificial Sequence
  Description of Artificial Sequence: Synthetic oligonucleotide
  Antisense strand to SEQ ID NO: 1878153
auugucaggcaguaaguca

SEQ ID NO: 1878155 - RNA, 19 nt, Artificial Sequence
  Description of Artificial Sequence: Synthetic oligonucleotide
  Sense strand starting at position 3440 of SEQ ID NO: 1564467
uugucagagugauugcuaa

SEQ ID NO: 1878156 - RNA, 19 nt, Artificial Sequence
  Description of Artificial Sequence: Synthetic oligonucleotide
  Antisense strand to SEQ ID NO: 1878155
uuagcaaucacucugacaa

SEQ ID NO: 1878157 - RNA, 19 nt, Artificial Sequence
  Description of Artificial Sequence: Synthetic oligonucleotide
  Sense strand starting at position 3456 of SEQ ID NO: 1564467
uaagaaggacuguguugaa

SEQ ID NO: 1878158 - RNA, 19 nt, Artificial Sequence
  Description of Artificial Sequence: Synthetic oligonucleotide
  Antisense strand to SEQ ID NO: 1878157
uucaacacaguccuucuua

SEQ ID NO: 1878159 - RNA, 19 nt, Artificial Sequence
  Description of Artificial Sequence: Synthetic oligonucleotide
  Sense strand starting at position 3632 of SEQ ID NO: 1564467
augacaccugacugugaau

SEQ ID NO: 1878160 - RNA, 19 nt, Artificial Sequence
  Description of Artificial Sequence: Synthetic oligonucleotide
  Antisense strand to SEQ ID NO: 1878159
auucacagucaggugucau

SEQ ID NO: 1878161 - RNA, 19 nt, Artificial Sequence
  Description of Artificial Sequence: Synthetic oligonucleotide
  Sense strand starting at position 3644 of SEQ ID NO: 1564467
ugugaauuccagugaccca

SEQ ID NO: 1878162 - RNA, 19 nt, Artificial Sequence
  Description of Artificial Sequence: Synthetic oligonucleotide
  Antisense strand to SEQ ID NO: 1878161
ugggucacuggaauucaca

SEQ ID NO: 1878163 - RNA, 19 nt, Artificial Sequence
  Description of Artificial Sequence: Synthetic oligonucleotide
  Sense strand starting at position 3743 of SEQ ID NO: 1564467
gaggccuaacugugauuau

SEQ ID NO: 1878164 - RNA, 19 nt, Artificial Sequence
  Description of Artificial Sequence: Synthetic oligonucleotide
  Antisense strand to SEQ ID NO: 1878163
auaaucacaguuaggccuc

SEQ ID NO: 1878165 - RNA, 19 nt, Artificial Sequence
  Description of Artificial Sequence: Synthetic oligonucleotide
  Sense strand starting at position 3746 of SEQ ID NO: 1564467
gccuaacugugauuauuuc

SEQ ID NO: 1878166 - RNA, 19 nt, Artificial Sequence
  Description of Artificial Sequence: Synthetic oligonucleotide
  Antisense strand to SEQ ID NO: 1878165
gaaauaaucacaguuaggc

SEQ ID NO: 1878167 - RNA, 19 nt, Artificial Sequence
  Description of Artificial Sequence: Synthetic oligonucleotide
  Sense strand starting at position 3754 of SEQ ID NO: 1564467
gugauuauuucugagacaa

SEQ ID NO: 1878168 - RNA, 19 nt, Artificial Sequence
  Description of Artificial Sequence: Synthetic oligonucleotide
  Antisense strand to SEQ ID NO: 1878167
uugucucagaaauaaucac

SEQ ID NO: 1878169 - RNA, 19 nt, Artificial Sequence
  Description of Artificial Sequence: Synthetic oligonucleotide
  Sense strand starting at position 3766 of SEQ ID NO: 1564467
gagacaaggcaguguguaa

SEQ ID NO: 1878170 - RNA, 19 nt, Artificial Sequence
  Description of Artificial Sequence: Synthetic oligonucleotide
  Antisense strand to SEQ ID NO: 1878169
uuacacacugccuugucuc

SEQ ID NO: 1878171 - RNA, 19 nt, Artificial Sequence
  Description of Artificial Sequence: Synthetic oligonucleotide
  Sense strand starting at position 3799 of SEQ ID NO: 1564467
ucuguaaccugagcaaaug

SEQ ID NO: 1878172 - RNA, 19 nt, Artificial Sequence
  Description of Artificial Sequence: Synthetic oligonucleotide
  Antisense strand to SEQ ID NO: 1878171
cauuugcucagguuacaga

SEQ ID NO: 1878173 - RNA, 19 nt, Artificial Sequence
  Description of Artificial Sequence: Synthetic oligonucleotide
  Sense strand starting at position 3824 of SEQ ID NO: 1564467
agaaauccguugcuaauua

SEQ ID NO: 1878174 - RNA, 19 nt, Artificial Sequence
  Description of Artificial Sequence: Synthetic oligonucleotide
  Antisense strand to SEQ ID NO: 1878173
uaauuagcaacggauuucu

SEQ ID NO: 1878175 - RNA, 19 nt, Artificial Sequence
  Description of Artificial Sequence: Synthetic oligonucleotide
  Sense strand starting at position 3963 of SEQ ID NO: 1564467
ccaucugguucccuaggua

SEQ ID NO: 1878176 - RNA, 19 nt, Artificial Sequence
  Description of Artificial Sequence: Synthetic oligonucleotide
  Antisense strand to SEQ ID NO: 1878175
uaccuagggaaccagaugg

SEQ ID NO: 1878177 - RNA, 19 nt, Artificial Sequence
  Description of Artificial Sequence: Synthetic oligonucleotide
  Sense strand starting at position 3966 of SEQ ID NO: 1564467
ucugguucccuagguaaug

SEQ ID NO: 1878178 - RNA, 19 nt, Artificial Sequence
  Description of Artificial Sequence: Synthetic oligonucleotide
  Antisense strand to SEQ ID NO: 1878177
cauuaccuagggaaccaga

SEQ ID NO: 1878179 - RNA, 19 nt, Artificial Sequence
  Description of Artificial Sequence: Synthetic oligonucleotide
  Sense strand starting at position 63 of SEQ ID NO: 1564468
cccuuauacugcgcaucaa

SEQ ID NO: 1878180 - RNA, 19 nt, Artificial Sequence
  Description of Artificial Sequence: Synthetic oligonucleotide
  Antisense strand to SEQ ID NO: 1878179
uugaugcgcaguauaaggg

SEQ ID NO: 1878181 - RNA, 19 nt, Artificial Sequence
  Description of Artificial Sequence: Synthetic oligonucleotide
  Sense strand starting at position 64 of SEQ ID NO: 1564468
ccuuauacugcgcaucaaa

SEQ ID NO: 1878182 - RNA, 19 nt, Artificial Sequence
  Description of Artificial Sequence: Synthetic oligonucleotide
  Antisense strand to SEQ ID NO: 1878181
uuugaugcgcaguauaagg

SEQ ID NO: 1878183 - RNA, 19 nt, Artificial Sequence
  Description of Artificial Sequence: Synthetic oligonucleotide
  Sense strand starting at position 2820 of SEQ ID NO: 1564468
agcggacguccucaggaaa

SEQ ID NO: 1878184 - RNA, 19 nt, Artificial Sequence
  Description of Artificial Sequence: Synthetic oligonucleotide
  Antisense strand to SEQ ID NO: 1878183
uuuccugaggacguccgcu

SEQ ID NO: 1878185 - RNA, 19 nt, Artificial Sequence
  Description of Artificial Sequence: Synthetic oligonucleotide
  Sense strand starting at position 3822 of SEQ ID NO: 1564468
cuguauaacuuccuaugga

SEQ ID NO: 1878186 - RNA, 19 nt, Artificial Sequence
  Description of Artificial Sequence: Synthetic oligonucleotide
  Antisense strand to SEQ ID NO: 1878185
uccauaggaaguuauacag

SEQ ID NO: 1878187 - RNA, 19 nt, Artificial Sequence
  Description of Artificial Sequence: Synthetic oligonucleotide
  Sense strand starting at position 3823 of SEQ ID NO: 1564468
uguauaacuuccuauggac

SEQ ID NO: 1878188 - RNA, 19 nt, Artificial Sequence
  Description of Artificial Sequence: Synthetic oligonucleotide
  Antisense strand to SEQ ID NO: 1878187
guccauaggaaguuauaca

SEQ ID NO: 1878189 - RNA, 19 nt, Artificial Sequence
  Description of Artificial Sequence: Synthetic oligonucleotide
  Sense strand starting at position 983 of SEQ ID NO: 1564472
cagaucugcuuccacguau

SEQ ID NO: 1878190 - RNA, 19 nt, Artificial Sequence
  Description of Artificial Sequence: Synthetic oligonucleotide
  Antisense strand to SEQ ID NO: 1878189
auacguggaagcagaucug

SEQ ID NO: 1878191 - RNA, 19 nt, Artificial Sequence
  Description of Artificial Sequence: Synthetic oligonucleotide
  Sense strand starting at position 2142 of SEQ ID NO: 1564473
ccgagaagcccuuggaacu

SEQ ID NO: 1878192 - RNA, 19 nt, Artificial Sequence
  Description of Artificial Sequence: Synthetic oligonucleotide
  Antisense strand to SEQ ID NO: 1878191
aguuccaagggcuucucgg

SEQ ID NO: 1878193 - RNA, 19 nt, Artificial Sequence
  Description of Artificial Sequence: Synthetic oligonucleotide
  Sense strand starting at position 2143 of SEQ ID NO: 1564473
cgagaagcccuuggaacuu

SEQ ID NO: 1878194 - RNA, 19 nt, Artificial Sequence
  Description of Artificial Sequence: Synthetic oligonucleotide
  Antisense strand to SEQ ID NO: 1878193
aaguuccaagggcuucucg

SEQ ID NO: 1878195 - RNA, 19 nt, Artificial Sequence
  Description of Artificial Sequence: Synthetic oligonucleotide
  Sense strand starting at position 2315 of SEQ ID NO: 1564473
ccagguagaugguacauaa

SEQ ID NO: 1878196 - RNA, 19 nt, Artificial Sequence
  Description of Artificial Sequence: Synthetic oligonucleotide
  Antisense strand to SEQ ID NO: 1878195
uuauguaccaucuaccugg

SEQ ID NO: 1878197 - RNA, 19 nt, Artificial Sequence
  Description of Artificial Sequence: Synthetic oligonucleotide
  Sense strand starting at position 2322 of SEQ ID NO: 1564473
gaugguacauaaggaauau

SEQ ID NO: 1878198 - RNA, 19 nt, Artificial Sequence
  Description of Artificial Sequence: Synthetic oligonucleotide
  Antisense strand to SEQ ID NO: 1878197
auauuccuuauguaccauc

SEQ ID NO: 1878199 - RNA, 19 nt, Artificial Sequence
  Description of Artificial Sequence: Synthetic oligonucleotide
  Sense strand starting at position 2352 of SEQ ID NO: 1564473
aggagaacuuucucugguu

SEQ ID NO: 1878200 - RNA, 19 nt, Artificial Sequence
  Description of Artificial Sequence: Synthetic oligonucleotide
  Antisense strand to SEQ ID NO: 1878199
aaccagagaaaguucuccu

SEQ ID NO: 1878201 - RNA, 19 nt, Artificial Sequence
  Description of Artificial Sequence: Synthetic oligonucleotide
  Sense strand starting at position 2353 of SEQ ID NO: 1564473
ggagaacuuucucugguug

SEQ ID NO: 1878202 - RNA, 19 nt, Artificial Sequence
  Description of Artificial Sequence: Synthetic oligonucleotide
  Antisense strand to SEQ ID NO: 1878201
caaccagagaaaguucucc

SEQ ID NO: 1878203 - RNA, 19 nt, Artificial Sequence
  Description of Artificial Sequence: Synthetic oligonucleotide
  Sense strand starting at position 2416 of SEQ ID NO: 1564473
gcggguaugugggaggaaa

SEQ ID NO: 1878204 - RNA, 19 nt, Artificial Sequence
  Description of Artificial Sequence: Synthetic oligonucleotide
  Antisense strand to SEQ ID NO: 1878203
uuuccucccacauacccgc

SEQ ID NO: 1878205 - RNA, 19 nt, Artificial Sequence
  Description of Artificial Sequence: Synthetic oligonucleotide
  Sense strand starting at position 2427 of SEQ ID NO: 1564473
ggaggaaagucaccugcuu

SEQ ID NO: 1878206 - RNA, 19 nt, Artificial Sequence
  Description of Artificial Sequence: Synthetic oligonucleotide
  Antisense strand to SEQ ID NO: 1878205
aagcaggugacuuuccucc

SEQ ID NO: 1878207 - RNA, 19 nt, Artificial Sequence
  Description of Artificial Sequence: Synthetic oligonucleotide
  Sense strand starting at position 2454 of SEQ ID NO: 1564473
guggaauucgucugcacug

SEQ ID NO: 1878208 - RNA, 19 nt, Artificial Sequence
  Description of Artificial Sequence: Synthetic oligonucleotide
  Antisense strand to SEQ ID NO: 1878207
cagugcagacgaauuccac

SEQ ID NO: 1878209 - RNA, 19 nt, Artificial Sequence
  Description of Artificial Sequence: Synthetic oligonucleotide
  Sense strand starting at position 2456 of SEQ ID NO: 1564473
ggaauucgucugcacugua

SEQ ID NO: 1878210 - RNA, 19 nt, Artificial Sequence
  Description of Artificial Sequence: Synthetic oligonucleotide
  Antisense strand to SEQ ID NO: 1878209
uacagugcagacgaauucc

SEQ ID NO: 1878211 - RNA, 19 nt, Artificial Sequence
  Description of Artificial Sequence: Synthetic oligonucleotide
  Sense strand starting at position 2836 of SEQ ID NO: 1564473
ucaggaaaccuggguccau

SEQ ID NO: 1878212 - RNA, 19 nt, Artificial Sequence
  Description of Artificial Sequence: Synthetic oligonucleotide
  Antisense strand to SEQ ID NO: 1878211
auggacccagguuuccuga

SEQ ID NO: 1878213 - RNA, 19 nt, Artificial Sequence
  Description of Artificial Sequence: Synthetic oligonucleotide
  Sense strand starting at position 3219 of SEQ ID NO: 1564473
gguccuucacuuggaggua

SEQ ID NO: 1878214 - RNA, 19 nt, Artificial Sequence
  Description of Artificial Sequence: Synthetic oligonucleotide
  Antisense strand to SEQ ID NO: 1878213
uaccuccaagugaaggacc

SEQ ID NO: 1878215 - RNA, 19 nt, Artificial Sequence
  Description of Artificial Sequence: Synthetic oligonucleotide
  Sense strand starting at position 3231 of SEQ ID NO: 1564473
ggagguagacuccgugaau

SEQ ID NO: 1878216 - RNA, 19 nt, Artificial Sequence
  Description of Artificial Sequence: Synthetic oligonucleotide
  Antisense strand to SEQ ID NO: 1878215
auucacggagucuaccucc

SEQ ID NO: 1878217 - RNA, 19 nt, Artificial Sequence
  Description of Artificial Sequence: Synthetic oligonucleotide
  Sense strand starting at position 3232 of SEQ ID NO: 1564473
gagguagacuccgugaaug

SEQ ID NO: 1878218 - RNA, 19 nt, Artificial Sequence
  Description of Artificial Sequence: Synthetic oligonucleotide
  Antisense strand to SEQ ID NO: 1878217
cauucacggagucuaccuc

SEQ ID NO: 1878219 - RNA, 19 nt, Artificial Sequence
  Description of Artificial Sequence: Synthetic oligonucleotide
  Sense strand starting at position 3580 of SEQ ID NO: 1564473
gcauguuucccugggaaug

SEQ ID NO: 1878220 - RNA, 19 nt, Artificial Sequence
  Description of Artificial Sequence: Synthetic oligonucleotide
  Antisense strand to SEQ ID NO: 1878219
cauucccagggaaacaugc

SEQ ID NO: 1878221 - RNA, 19 nt, Artificial Sequence
  Description of Artificial Sequence: Synthetic oligonucleotide
  Sense strand starting at position 3581 of SEQ ID NO: 1564473
cauguuucccugggaaugu

SEQ ID NO: 1878222 - RNA, 19 nt, Artificial Sequence
  Description of Artificial Sequence: Synthetic oligonucleotide
  Antisense strand to SEQ ID NO: 1878221
acauucccagggaaacaug

SEQ ID NO: 1878223 - RNA, 19 nt, Artificial Sequence
  Description of Artificial Sequence: Synthetic oligonucleotide
  Sense strand starting at position 3619 of SEQ ID NO: 1564473
gcaugacauugccagccau

SEQ ID NO: 1878224 - RNA, 19 nt, Artificial Sequence
  Description of Artificial Sequence: Synthetic oligonucleotide
  Antisense strand to SEQ ID NO: 1878223
auggcuggcaaugucaugc

SEQ ID NO: 1878225 - RNA, 19 nt, Artificial Sequence
  Description of Artificial Sequence: Synthetic oligonucleotide
  Sense strand starting at position 3694 of SEQ ID NO: 1564473
gugcuuaagacucggguua

SEQ ID NO: 1878226 - RNA, 19 nt, Artificial Sequence
  Description of Artificial Sequence: Synthetic oligonucleotide
  Antisense strand to SEQ ID NO: 1878225
uaacccgagucuuaagcac

SEQ ID NO: 1878227 - RNA, 19 nt, Artificial Sequence
  Description of Artificial Sequence: Synthetic oligonucleotide
  Sense strand starting at position 964 of SEQ ID NO: 1564477
cagaucugcuuccacguau

SEQ ID NO: 1878228 - RNA, 19 nt, Artificial Sequence
  Description of Artificial Sequence: Synthetic oligonucleotide
  Antisense strand to SEQ ID NO: 1878227
auacguggaagcagaucug

SEQ ID NO: 1878229 - RNA, 19 nt, Artificial Sequence
  Description of Artificial Sequence: Synthetic oligonucleotide
  Sense strand starting at position 483 of SEQ ID NO: 1564482
ggcaaagaccucuaauguc

SEQ ID NO: 1878230 - RNA, 19 nt, Artificial Sequence
  Description of Artificial Sequence: Synthetic oligonucleotide
  Antisense strand to SEQ ID NO: 1878229
gacauuagaggucuuugcc

SEQ ID NO: 1878231 - RNA, 19 nt, Artificial Sequence
  Description of Artificial Sequence: Synthetic oligonucleotide
  Sense strand starting at position 489 of SEQ ID NO: 1564482
gaccucuaauguccaggua

SEQ ID NO: 1878232 - RNA, 19 nt, Artificial Sequence
  Description of Artificial Sequence: Synthetic oligonucleotide
  Antisense strand to SEQ ID NO: 1878231
uaccuggacauuagagguc

SEQ ID NO: 1878233 - RNA, 19 nt, Artificial Sequence
  Description of Artificial Sequence: Synthetic oligonucleotide
  Sense strand starting at position 490 of SEQ ID NO: 1564482
accucuaauguccagguau

SEQ ID NO: 1878234 - RNA, 19 nt, Artificial Sequence
  Description of Artificial Sequence: Synthetic oligonucleotide
  Antisense strand to SEQ ID NO: 1878233
auaccuggacauuagaggu

SEQ ID NO: 1878235 - RNA, 19 nt, Artificial Sequence
  Description of Artificial Sequence: Synthetic oligonucleotide
  Sense strand starting at position 492 of SEQ ID NO: 1564482
cucuaauguccagguauua

SEQ ID NO: 1878236 - RNA, 19 nt, Artificial Sequence
  Description of Artificial Sequence: Synthetic oligonucleotide
  Antisense strand to SEQ ID NO: 1878235
uaauaccuggacauuagag

SEQ ID NO: 1878237 - RNA, 19 nt, Artificial Sequence
  Description of Artificial Sequence: Synthetic oligonucleotide
  Sense strand starting at position 517 of SEQ ID NO: 1564482
uuacuacuguuaucaguac

SEQ ID NO: 1878238 - RNA, 19 nt, Artificial Sequence
  Description of Artificial Sequence: Synthetic oligonucleotide
  Antisense strand to SEQ ID NO: 1878237
guacugauaacaguaguaa

SEQ ID NO: 1878239 - RNA, 19 nt, Artificial Sequence
  Description of Artificial Sequence: Synthetic oligonucleotide
  Sense strand starting at position 727 of SEQ ID NO: 1564482
agguacccuuagcuugaua

SEQ ID NO: 1878240 - RNA, 19 nt, Artificial Sequence
  Description of Artificial Sequence: Synthetic oligonucleotide
  Antisense strand to SEQ ID NO: 1878239
uaucaagcuaaggguaccu

SEQ ID NO: 1878241 - RNA, 19 nt, Artificial Sequence
  Description of Artificial Sequence: Synthetic oligonucleotide
  Sense strand starting at position 849 of SEQ ID NO: 1564482
caaucaugugaguaagcca

SEQ ID NO: 1878242 - RNA, 19 nt, Artificial Sequence
  Description of Artificial Sequence: Synthetic oligonucleotide
  Antisense strand to SEQ ID NO: 1878241
uggcuuacucacaugauug

SEQ ID NO: 1878243 - RNA, 19 nt, Artificial Sequence
  Description of Artificial Sequence: Synthetic oligonucleotide
  Sense strand starting at position 857 of SEQ ID NO: 1564482
ugaguaagccauuguggaa

SEQ ID NO: 1878244 - RNA, 19 nt, Artificial Sequence
  Description of Artificial Sequence: Synthetic oligonucleotide
  Antisense strand to SEQ ID NO: 1878243
uuccacaauggcuuacuca

SEQ ID NO: 1878245 - RNA, 19 nt, Artificial Sequence
  Description of Artificial Sequence: Synthetic oligonucleotide
  Sense strand starting at position 948 of SEQ ID NO: 1564482
guuaaacugugagcuauuu

SEQ ID NO: 1878246 - RNA, 19 nt, Artificial Sequence
  Description of Artificial Sequence: Synthetic oligonucleotide
  Antisense strand to SEQ ID NO: 1878245
aaauagcucacaguuuaac

SEQ ID NO: 1878247 - RNA, 19 nt, Artificial Sequence
  Description of Artificial Sequence: Synthetic oligonucleotide
  Sense strand starting at position 1005 of SEQ ID NO: 1564482
guaauuaacucagugacaa

SEQ ID NO: 1878248 - RNA, 19 nt, Artificial Sequence
  Description of Artificial Sequence: Synthetic oligonucleotide
  Antisense strand to SEQ ID NO: 1878247
uugucacugaguuaauuac

SEQ ID NO: 1878249 - RNA, 19 nt, Artificial Sequence
  Description of Artificial Sequence: Synthetic oligonucleotide
  Sense strand starting at position 1050 of SEQ ID NO: 1564482
ccucuaucagaccauggua

SEQ ID NO: 1878250 - RNA, 19 nt, Artificial Sequence
  Description of Artificial Sequence: Synthetic oligonucleotide
  Antisense strand to SEQ ID NO: 1878249
uaccauggucugauagagg

SEQ ID NO: 1878251 - RNA, 19 nt, Artificial Sequence
  Description of Artificial Sequence: Synthetic oligonucleotide
  Sense strand starting at position 1052 of SEQ ID NO: 1564482
ucuaucagaccaugguaau

SEQ ID NO: 1878252 - RNA, 19 nt, Artificial Sequence
  Description of Artificial Sequence: Synthetic oligonucleotide
  Antisense strand to SEQ ID NO: 1878251
auuaccauggucugauaga

SEQ ID NO: 1878253 - RNA, 19 nt, Artificial Sequence
  Description of Artificial Sequence: Synthetic oligonucleotide
  Sense strand starting at position 1053 of SEQ ID NO: 1564482
cuaucagaccaugguaauc

SEQ ID NO: 1878254 - RNA, 19 nt, Artificial Sequence
  Description of Artificial Sequence: Synthetic oligonucleotide
  Antisense strand to SEQ ID NO: 1878253
gauuaccauggucugauag

SEQ ID NO: 1878255 - RNA, 19 nt, Artificial Sequence
  Description of Artificial Sequence: Synthetic oligonucleotide
  Sense strand starting at position 1058 of SEQ ID NO: 1564482
agaccaugguaaucucaua

SEQ ID NO: 1878256 - RNA, 19 nt, Artificial Sequence
  Description of Artificial Sequence: Synthetic oligonucleotide
  Antisense strand to SEQ ID NO: 1878255
uaugagauuaccauggucu

SEQ ID NO: 1878257 - RNA, 19 nt, Artificial Sequence
  Description of Artificial Sequence: Synthetic oligonucleotide
  Sense strand starting at position 2002 of SEQ ID NO: 1564482
acagucugauagcuacaga

SEQ ID NO: 1878258 - RNA, 19 nt, Artificial Sequence
  Description of Artificial Sequence: Synthetic oligonucleotide
  Antisense strand to SEQ ID NO: 1878257
ucuguagcuaucagacugu

SEQ ID NO: 1878259 - RNA, 19 nt, Artificial Sequence
  Description of Artificial Sequence: Synthetic oligonucleotide
  Sense strand starting at position 2105 of SEQ ID NO: 1564482
cugcuaguccuguaugaaa

SEQ ID NO: 1878260 - RNA, 19 nt, Artificial Sequence
  Description of Artificial Sequence: Synthetic oligonucleotide
  Antisense strand to SEQ ID NO: 1878259
uuucauacaggacuagcag

SEQ ID NO: 1878261 - RNA, 19 nt, Artificial Sequence
  Description of Artificial Sequence: Synthetic oligonucleotide
  Sense strand starting at position 2135 of SEQ ID NO: 1564482
augagaaccucuguuccuu

SEQ ID NO: 1878262 - RNA, 19 nt, Artificial Sequence
  Description of Artificial Sequence: Synthetic oligonucleotide
  Antisense strand to SEQ ID NO: 1878261
aaggaacagagguucucau

SEQ ID NO: 1878263 - RNA, 19 nt, Artificial Sequence
  Description of Artificial Sequence: Synthetic oligonucleotide
  Sense strand starting at position 2173 of SEQ ID NO: 1564482
augauugauucuuucugaa

SEQ ID NO: 1878264 - RNA, 19 nt, Artificial Sequence
  Description of Artificial Sequence: Synthetic oligonucleotide
  Antisense strand to SEQ ID NO: 1878263
uucagaaagaaucaaucau

SEQ ID NO: 1878265 - RNA, 19 nt, Artificial Sequence
  Description of Artificial Sequence: Synthetic oligonucleotide
  Sense strand starting at position 2275 of SEQ ID NO: 1564482
ccgacucagccauauuaga

SEQ ID NO: 1878266 - RNA, 19 nt, Artificial Sequence
  Description of Artificial Sequence: Synthetic oligonucleotide
  Antisense strand to SEQ ID NO: 1878265
ucuaauauggcugagucgg

SEQ ID NO: 1878267 - RNA, 19 nt, Artificial Sequence
  Description of Artificial Sequence: Synthetic oligonucleotide
  Sense strand starting at position 2283 of SEQ ID NO: 1564482
gccauauuagagggaccuu

SEQ ID NO: 1878268 - RNA, 19 nt, Artificial Sequence
  Description of Artificial Sequence: Synthetic oligonucleotide
  Antisense strand to SEQ ID NO: 1878267
aaggucccucuaauauggc

SEQ ID NO: 1878269 - RNA, 19 nt, Artificial Sequence
  Description of Artificial Sequence: Synthetic oligonucleotide
  Sense strand starting at position 2340 of SEQ ID NO: 1564482
ucagguuugccugacuagu

SEQ ID NO: 1878270 - RNA, 19 nt, Artificial Sequence
  Description of Artificial Sequence: Synthetic oligonucleotide
  Antisense strand to SEQ ID NO: 1878269
acuagucaggcaaaccuga

SEQ ID NO: 1878271 - RNA, 19 nt, Artificial Sequence
  Description of Artificial Sequence: Synthetic oligonucleotide
  Sense strand starting at position 2351 of SEQ ID NO: 1564482
ugacuaguucgugacucaa

SEQ ID NO: 1878272 - RNA, 19 nt, Artificial Sequence
  Description of Artificial Sequence: Synthetic oligonucleotide
  Antisense strand to SEQ ID NO: 1878271
uugagucacgaacuaguca

SEQ ID NO: 1878273 - RNA, 19 nt, Artificial Sequence
  Description of Artificial Sequence: Synthetic oligonucleotide
  Sense strand starting at position 2353 of SEQ ID NO: 1564482
acuaguucgugacucaaua

SEQ ID NO: 1878274 - RNA, 19 nt, Artificial Sequence
  Description of Artificial Sequence: Synthetic oligonucleotide
  Antisense strand to SEQ ID NO: 1878273
uauugagucacgaacuagu

SEQ ID NO: 1878275 - RNA, 19 nt, Artificial Sequence
  Description of Artificial Sequence: Synthetic oligonucleotide
  Sense strand starting at position 2531 of SEQ ID NO: 1564482
gguucaucagcuuacgaag

SEQ ID NO: 1878276 - RNA, 19 nt, Artificial Sequence
  Description of Artificial Sequence: Synthetic oligonucleotide
  Antisense strand to SEQ ID NO: 1878275
cuucguaagcugaugaacc

SEQ ID NO: 1878277 - RNA, 19 nt, Artificial Sequence
  Description of Artificial Sequence: Synthetic oligonucleotide
  Sense strand starting at position 2640 of SEQ ID NO: 1564482
gugaacucuuguccucaga

SEQ ID NO: 1878278 - RNA, 19 nt, Artificial Sequence
  Description of Artificial Sequence: Synthetic oligonucleotide
  Antisense strand to SEQ ID NO: 1878277
ucugaggacaagaguucac

SEQ ID NO: 1878279 - RNA, 19 nt, Artificial Sequence
  Description of Artificial Sequence: Synthetic oligonucleotide
  Sense strand starting at position 2692 of SEQ ID NO: 1564482
cugguaagcuaguuaagaa

SEQ ID NO: 1878280 - RNA, 19 nt, Artificial Sequence
  Description of Artificial Sequence: Synthetic oligonucleotide
  Antisense strand to SEQ ID NO: 1878279
uucuuaacuagcuuaccag

SEQ ID NO: 1878281 - RNA, 19 nt, Artificial Sequence
  Description of Artificial Sequence: Synthetic oligonucleotide
  Sense strand starting at position 2693 of SEQ ID NO: 1564482
ugguaagcuaguuaagaac

SEQ ID NO: 1878282 - RNA, 19 nt, Artificial Sequence
  Description of Artificial Sequence: Synthetic oligonucleotide
  Antisense strand to SEQ ID NO: 1878281
guucuuaacuagcuuacca

SEQ ID NO: 1878283 - RNA, 19 nt, Artificial Sequence
  Description of Artificial Sequence: Synthetic oligonucleotide
  Sense strand starting at position 2865 of SEQ ID NO: 1564482
guugcaaguguuguugcaa

SEQ ID NO: 1878284 - RNA, 19 nt, Artificial Sequence
  Description of Artificial Sequence: Synthetic oligonucleotide
  Antisense strand to SEQ ID NO: 1878283
uugcaacaacacuugcaac

SEQ ID NO: 1878285 - RNA, 19 nt, Artificial Sequence
  Description of Artificial Sequence: Synthetic oligonucleotide
  Sense strand starting at position 3012 of SEQ ID NO: 1564482
ggaaucuauuugcauaaag

SEQ ID NO: 1878286 - RNA, 19 nt, Artificial Sequence
  Description of Artificial Sequence: Synthetic oligonucleotide
  Antisense strand to SEQ ID NO: 1878285
cuuuaugcaaauagauucc

SEQ ID NO: 1878287 - RNA, 19 nt, Artificial Sequence
  Description of Artificial Sequence: Synthetic oligonucleotide
  Sense strand starting at position 3157 of SEQ ID NO: 1564482
gcaucuuacuaggccagau

SEQ ID NO: 1878288 - RNA, 19 nt, Artificial Sequence
  Description of Artificial Sequence: Synthetic oligonucleotide
  Antisense strand to SEQ ID NO: 1878287
aucuggccuaguaagaugc

SEQ ID NO: 1878289 - RNA, 19 nt, Artificial Sequence
  Description of Artificial Sequence: Synthetic oligonucleotide
  Sense strand starting at position 3195 of SEQ ID NO: 1564482
uccauugucugaguacaaa

SEQ ID NO: 1878290 - RNA, 19 nt, Artificial Sequence
  Description of Artificial Sequence: Synthetic oligonucleotide
  Antisense strand to SEQ ID NO: 1878289
uuuguacucagacaaugga

SEQ ID NO: 1878291 - RNA, 19 nt, Artificial Sequence
  Description of Artificial Sequence: Synthetic oligonucleotide
  Sense strand starting at position 3222 of SEQ ID NO: 1564482
acagcuauaccugaguauu

SEQ ID NO: 1878292 - RNA, 19 nt, Artificial Sequence
  Description of Artificial Sequence: Synthetic oligonucleotide
  Antisense strand to SEQ ID NO: 1878291
aauacucagguauagcugu

SEQ ID NO: 1878293 - RNA, 19 nt, Artificial Sequence
  Description of Artificial Sequence: Synthetic oligonucleotide
  Sense strand starting at position 3558 of SEQ ID NO: 1564482
aggcaauggauaggugaau

SEQ ID NO: 1878294 - RNA, 19 nt, Artificial Sequence
  Description of Artificial Sequence: Synthetic oligonucleotide
  Antisense strand to SEQ ID NO: 1878293
auucaccuauccauugccu

SEQ ID NO: 1878295 - RNA, 19 nt, Artificial Sequence
  Description of Artificial Sequence: Synthetic oligonucleotide
  Sense strand starting at position 3591 of SEQ ID NO: 1564482
ccuguuacacgugcgugaa

SEQ ID NO: 1878296 - RNA, 19 nt, Artificial Sequence
  Description of Artificial Sequence: Synthetic oligonucleotide
  Antisense strand to SEQ ID NO: 1878295
uucacgcacguguaacagg

SEQ ID NO: 1878297 - RNA, 19 nt, Artificial Sequence
  Description of Artificial Sequence: Synthetic oligonucleotide
  Sense strand starting at position 3777 of SEQ ID NO: 1564482
ugcacuucucuuggauaca

SEQ ID NO: 1878298 - RNA, 19 nt, Artificial Sequence
  Description of Artificial Sequence: Synthetic oligonucleotide
  Antisense strand to SEQ ID NO: 1878297
uguauccaagagaagugca

SEQ ID NO: 1878299 - RNA, 19 nt, Artificial Sequence
  Description of Artificial Sequence: Synthetic oligonucleotide
  Sense strand starting at position 3862 of SEQ ID NO: 1564482
cuccucuuugcagaugagu

SEQ ID NO: 1878300 - RNA, 19 nt, Artificial Sequence
  Description of Artificial Sequence: Synthetic oligonucleotide
  Antisense strand to SEQ ID NO: 1878299
acucaucugcaaagaggag

SEQ ID NO: 1878301 - RNA, 19 nt, Artificial Sequence
  Description of Artificial Sequence: Synthetic oligonucleotide
  Sense strand starting at position 3865 of SEQ ID NO: 1564482
cucuuugcagaugaguaau

SEQ ID NO: 1878302 - RNA, 19 nt, Artificial Sequence
  Description of Artificial Sequence: Synthetic oligonucleotide
  Antisense strand to SEQ ID NO: 1878301
auuacucaucugcaaagag

SEQ ID NO: 1878303 - RNA, 19 nt, Artificial Sequence
  Description of Artificial Sequence: Synthetic oligonucleotide
  Sense strand starting at position 3868 of SEQ ID NO: 1564482
uuugcagaugaguaauugu

SEQ ID NO: 1878304 - RNA, 19 nt, Artificial Sequence
  Description of Artificial Sequence: Synthetic oligonucleotide
  Antisense strand to SEQ ID NO: 1878303
acaauuacucaucugcaaa

SEQ ID NO: 1878305 - RNA, 19 nt, Artificial Sequence
  Description of Artificial Sequence: Synthetic oligonucleotide
  Sense strand starting at position 3895 of SEQ ID NO: 1564482
gcuacagaaucccuacaga

SEQ ID NO: 1878306 - RNA, 19 nt, Artificial Sequence
  Description of Artificial Sequence: Synthetic oligonucleotide
  Antisense strand to SEQ ID NO: 1878305
ucuguagggauucuguagc

SEQ ID NO: 1878307 - RNA, 19 nt, Artificial Sequence
  Description of Artificial Sequence: Synthetic oligonucleotide
  Sense strand starting at position 3953 of SEQ ID NO: 1564482
ucaaacuguuuggcuuaaa

SEQ ID NO: 1878308 - RNA, 19 nt, Artificial Sequence
  Description of Artificial Sequence: Synthetic oligonucleotide
  Antisense strand to SEQ ID NO: 1878307
uuuaagccaaacaguuuga

SEQ ID NO: 1878309 - RNA, 19 nt, Artificial Sequence
  Description of Artificial Sequence: Synthetic oligonucleotide
  Sense strand starting at position 91 of SEQ ID NO: 1564483
auacacgcaucaguuuaua

SEQ ID NO: 1878310 - RNA, 19 nt, Artificial Sequence
  Description of Artificial Sequence: Synthetic oligonucleotide
  Antisense strand to SEQ ID NO: 1878309
uauaaacugaugcguguau

SEQ ID NO: 1878311 - RNA, 19 nt, Artificial Sequence
  Description of Artificial Sequence: Synthetic oligonucleotide
  Sense strand starting at position 99 of SEQ ID NO: 1564483
aucaguuuauaggucaaau

SEQ ID NO: 1878312 - RNA, 19 nt, Artificial Sequence
  Description of Artificial Sequence: Synthetic oligonucleotide
  Antisense strand to SEQ ID NO: 1878311
auuugaccuauaaacugau

SEQ ID NO: 1878313 - RNA, 19 nt, Artificial Sequence
  Description of Artificial Sequence: Synthetic oligonucleotide
  Sense strand starting at position 424 of SEQ ID NO: 1564483
cgaaguauuccagaguacg

SEQ ID NO: 1878314 - RNA, 19 nt, Artificial Sequence
  Description of Artificial Sequence: Synthetic oligonucleotide
  Antisense strand to SEQ ID NO: 1878313
cguacucuggaauacuucg

SEQ ID NO: 1878315 - RNA, 19 nt, Artificial Sequence
  Description of Artificial Sequence: Synthetic oligonucleotide
  Sense strand starting at position 660 of SEQ ID NO: 1564483
agacacagagcuuguuaau

SEQ ID NO: 1878316 - RNA, 19 nt, Artificial Sequence
  Description of Artificial Sequence: Synthetic oligonucleotide
  Antisense strand to SEQ ID NO: 1878315
auuaacaagcucugugucu

SEQ ID NO: 1878317 - RNA, 19 nt, Artificial Sequence
  Description of Artificial Sequence: Synthetic oligonucleotide
  Sense strand starting at position 667 of SEQ ID NO: 1564483
gagcuuguuaauggucuga

SEQ ID NO: 1878318 - RNA, 19 nt, Artificial Sequence
  Description of Artificial Sequence: Synthetic oligonucleotide
  Antisense strand to SEQ ID NO: 1878317
ucagaccauuaacaagcuc

SEQ ID NO: 1878319 - RNA, 19 nt, Artificial Sequence
  Description of Artificial Sequence: Synthetic oligonucleotide
  Sense strand starting at position 669 of SEQ ID NO: 1564483
gcuuguuaauggucugaga

SEQ ID NO: 1878320 - RNA, 19 nt, Artificial Sequence
  Description of Artificial Sequence: Synthetic oligonucleotide
  Antisense strand to SEQ ID NO: 1878319
ucucagaccauuaacaagc

SEQ ID NO: 1878321 - RNA, 19 nt, Artificial Sequence
  Description of Artificial Sequence: Synthetic oligonucleotide
  Sense strand starting at position 671 of SEQ ID NO: 1564483
uuguuaauggucugagaaa

SEQ ID NO: 1878322 - RNA, 19 nt, Artificial Sequence
  Description of Artificial Sequence: Synthetic oligonucleotide
  Antisense strand to SEQ ID NO: 1878321
uuucucagaccauuaacaa

SEQ ID NO: 1878323 - RNA, 19 nt, Artificial Sequence
  Description of Artificial Sequence: Synthetic oligonucleotide
  Sense strand starting at position 730 of SEQ ID NO: 1564483
acagauuggugagugccaa

SEQ ID NO: 1878324 - RNA, 19 nt, Artificial Sequence
  Description of Artificial Sequence: Synthetic oligonucleotide
  Antisense strand to SEQ ID NO: 1878323
uuggcacucaccaaucugu

SEQ ID NO: 1878325 - RNA, 19 nt, Artificial Sequence
  Description of Artificial Sequence: Synthetic oligonucleotide
  Sense strand starting at position 1028 of SEQ ID NO: 1564483
acccaaccuuaaucgagua

SEQ ID NO: 1878326 - RNA, 19 nt, Artificial Sequence
  Description of Artificial Sequence: Synthetic oligonucleotide
  Antisense strand to SEQ ID NO: 1878325
uacucgauuaagguugggu

SEQ ID NO: 1878327 - RNA, 19 nt, Artificial Sequence
  Description of Artificial Sequence: Synthetic oligonucleotide
  Sense strand starting at position 1033 of SEQ ID NO: 1564483
accuuaaucgaguaguuga

SEQ ID NO: 1878328 - RNA, 19 nt, Artificial Sequence
  Description of Artificial Sequence: Synthetic oligonucleotide
  Antisense strand to SEQ ID NO: 1878327
ucaacuacucgauuaaggu

SEQ ID NO: 1878329 - RNA, 19 nt, Artificial Sequence
  Description of Artificial Sequence: Synthetic oligonucleotide
  Sense strand starting at position 1385 of SEQ ID NO: 1564483
guugacuuacgucaggcau

SEQ ID NO: 1878330 - RNA, 19 nt, Artificial Sequence
  Description of Artificial Sequence: Synthetic oligonucleotide
  Antisense strand to SEQ ID NO: 1878329
augccugacguaagucaac

SEQ ID NO: 1878331 - RNA, 19 nt, Artificial Sequence
  Description of Artificial Sequence: Synthetic oligonucleotide
  Sense strand starting at position 1397 of SEQ ID NO: 1564483
caggcauugcuccacugua

SEQ ID NO: 1878332 - RNA, 19 nt, Artificial Sequence
  Description of Artificial Sequence: Synthetic oligonucleotide
  Antisense strand to SEQ ID NO: 1878331
uacaguggagcaaugccug

SEQ ID NO: 1878333 - RNA, 19 nt, Artificial Sequence
  Description of Artificial Sequence: Synthetic oligonucleotide
  Sense strand starting at position 1506 of SEQ ID NO: 1564483
uggucacgucuauggagaa

SEQ ID NO: 1878334 - RNA, 19 nt, Artificial Sequence
  Description of Artificial Sequence: Synthetic oligonucleotide
  Antisense strand to SEQ ID NO: 1878333
uucuccauagacgugacca

SEQ ID NO: 1878335 - RNA, 19 nt, Artificial Sequence
  Description of Artificial Sequence: Synthetic oligonucleotide
  Sense strand starting at position 1525 of SEQ ID NO: 1564483
aaggguagucucugggaug

SEQ ID NO: 1878336 - RNA, 19 nt, Artificial Sequence
  Description of Artificial Sequence: Synthetic oligonucleotide
  Antisense strand to SEQ ID NO: 1878335
caucccagagacuacccuu

SEQ ID NO: 1878337 - RNA, 19 nt, Artificial Sequence
  Description of Artificial Sequence: Synthetic oligonucleotide
  Sense strand starting at position 1527 of SEQ ID NO: 1564483
ggguagucucugggaugga

SEQ ID NO: 1878338 - RNA, 19 nt, Artificial Sequence
  Description of Artificial Sequence: Synthetic oligonucleotide
  Antisense strand to SEQ ID NO: 1878337
uccaucccagagacuaccc

SEQ ID NO: 1878339 - RNA, 19 nt, Artificial Sequence
  Description of Artificial Sequence: Synthetic oligonucleotide
  Sense strand starting at position 1711 of SEQ ID NO: 1564483
uuaggagaguccguaauga

SEQ ID NO: 1878340 - RNA, 19 nt, Artificial Sequence
  Description of Artificial Sequence: Synthetic oligonucleotide
  Antisense strand to SEQ ID NO: 1878339
ucauuacggacucuccuaa

SEQ ID NO: 1878341 - RNA, 19 nt, Artificial Sequence
  Description of Artificial Sequence: Synthetic oligonucleotide
  Sense strand starting at position 2062 of SEQ ID NO: 1564483
aaugauaauuccgugaggu

SEQ ID NO: 1878342 - RNA, 19 nt, Artificial Sequence
  Description of Artificial Sequence: Synthetic oligonucleotide
  Antisense strand to SEQ ID NO: 1878341
accucacggaauuaucauu

SEQ ID NO: 1878343 - RNA, 19 nt, Artificial Sequence
  Description of Artificial Sequence: Synthetic oligonucleotide
  Sense strand starting at position 2063 of SEQ ID NO: 1564483
augauaauuccgugagguc

SEQ ID NO: 1878344 - RNA, 19 nt, Artificial Sequence
  Description of Artificial Sequence: Synthetic oligonucleotide
  Antisense strand to SEQ ID NO: 1878343
gaccucacggaauuaucau

SEQ ID NO: 1878345 - RNA, 19 nt, Artificial Sequence
  Description of Artificial Sequence: Synthetic oligonucleotide
  Sense strand starting at position 2064 of SEQ ID NO: 1564483
ugauaauuccgugaggucu

SEQ ID NO: 1878346 - RNA, 19 nt, Artificial Sequence
  Description of Artificial Sequence: Synthetic oligonucleotide
  Antisense strand to SEQ ID NO: 1878345
agaccucacggaauuauca

SEQ ID NO: 1878347 - RNA, 19 nt, Artificial Sequence
  Description of Artificial Sequence: Synthetic oligonucleotide
  Sense strand starting at position 2091 of SEQ ID NO: 1564483
guaggagcuucuguggaca

SEQ ID NO: 1878348 - RNA, 19 nt, Artificial Sequence
  Description of Artificial Sequence: Synthetic oligonucleotide
  Antisense strand to SEQ ID NO: 1878347
uguccacagaagcuccuac

SEQ ID NO: 1878349 - RNA, 19 nt, Artificial Sequence
  Description of Artificial Sequence: Synthetic oligonucleotide
  Sense strand starting at position 2096 of SEQ ID NO: 1564483
agcuucuguggacaggaau

SEQ ID NO: 1878350 - RNA, 19 nt, Artificial Sequence
  Description of Artificial Sequence: Synthetic oligonucleotide
  Antisense strand to SEQ ID NO: 1878349
auuccuguccacagaagcu

SEQ ID NO: 1878351 - RNA, 19 nt, Artificial Sequence
  Description of Artificial Sequence: Synthetic oligonucleotide
  Sense strand starting at position 2259 of SEQ ID NO: 1564483
auaucugagagaggucuua

SEQ ID NO: 1878352 - RNA, 19 nt, Artificial Sequence
  Description of Artificial Sequence: Synthetic oligonucleotide
  Antisense strand to SEQ ID NO: 1878351
uaagaccucucucagauau

SEQ ID NO: 1878353 - RNA, 19 nt, Artificial Sequence
  Description of Artificial Sequence: Synthetic oligonucleotide
  Sense strand starting at position 2896 of SEQ ID NO: 1564483
gcgccucacagggauaacu

SEQ ID NO: 1878354 - RNA, 19 nt, Artificial Sequence
  Description of Artificial Sequence: Synthetic oligonucleotide
  Antisense strand to SEQ ID NO: 1878353
aguuaucccugugaggcgc

SEQ ID NO: 1878355 - RNA, 19 nt, Artificial Sequence
  Description of Artificial Sequence: Synthetic oligonucleotide
  Sense strand starting at position 2898 of SEQ ID NO: 1564483
gccucacagggauaacuuu

SEQ ID NO: 1878356 - RNA, 19 nt, Artificial Sequence
  Description of Artificial Sequence: Synthetic oligonucleotide
  Antisense strand to SEQ ID NO: 1878355
aaaguuaucccugugaggc

SEQ ID NO: 1878357 - RNA, 19 nt, Artificial Sequence
  Description of Artificial Sequence: Synthetic oligonucleotide
  Sense strand starting at position 2904 of SEQ ID NO: 1564483
cagggauaacuuugaguug

SEQ ID NO: 1878358 - RNA, 19 nt, Artificial Sequence
  Description of Artificial Sequence: Synthetic oligonucleotide
  Antisense strand to SEQ ID NO: 1878357
caacucaaaguuaucccug

SEQ ID NO: 1878359 - RNA, 19 nt, Artificial Sequence
  Description of Artificial Sequence: Synthetic oligonucleotide
  Sense strand starting at position 2907 of SEQ ID NO: 1564483
ggauaacuuugaguugggu

SEQ ID NO: 1878360 - RNA, 19 nt, Artificial Sequence
  Description of Artificial Sequence: Synthetic oligonucleotide
  Antisense strand to SEQ ID NO: 1878359
acccaacucaaaguuaucc

SEQ ID NO: 1878361 - RNA, 19 nt, Artificial Sequence
  Description of Artificial Sequence: Synthetic oligonucleotide
  Sense strand starting at position 2990 of SEQ ID NO: 1564483
cuuuguacguaucuuauuu

SEQ ID NO: 1878362 - RNA, 19 nt, Artificial Sequence
  Description of Artificial Sequence: Synthetic oligonucleotide
  Antisense strand to SEQ ID NO: 1878361
aaauaagauacguacaaag

SEQ ID NO: 1878363 - RNA, 19 nt, Artificial Sequence
  Description of Artificial Sequence: Synthetic oligonucleotide
  Sense strand starting at position 3022 of SEQ ID NO: 1564483
gaggcaaguuuagugacau

SEQ ID NO: 1878364 - RNA, 19 nt, Artificial Sequence
  Description of Artificial Sequence: Synthetic oligonucleotide
  Antisense strand to SEQ ID NO: 1878363
augucacuaaacuugccuc

SEQ ID NO: 1878365 - RNA, 19 nt, Artificial Sequence
  Description of Artificial Sequence: Synthetic oligonucleotide
  Sense strand starting at position 3058 of SEQ ID NO: 1564483
uuccguuacuuagugauuu

SEQ ID NO: 1878366 - RNA, 19 nt, Artificial Sequence
  Description of Artificial Sequence: Synthetic oligonucleotide
  Antisense strand to SEQ ID NO: 1878365
aaaucacuaaguaacggaa

SEQ ID NO: 1878367 - RNA, 19 nt, Artificial Sequence
  Description of Artificial Sequence: Synthetic oligonucleotide
  Sense strand starting at position 3120 of SEQ ID NO: 1564483
auguauguugaggaauugu

SEQ ID NO: 1878368 - RNA, 19 nt, Artificial Sequence
  Description of Artificial Sequence: Synthetic oligonucleotide
  Antisense strand to SEQ ID NO: 1878367
acaauuccucaacauacau

SEQ ID NO: 1878369 - RNA, 19 nt, Artificial Sequence
  Description of Artificial Sequence: Synthetic oligonucleotide
  Sense strand starting at position 3240 of SEQ ID NO: 1564483
ucaaauaguuuacugguua

SEQ ID NO: 1878370 - RNA, 19 nt, Artificial Sequence
  Description of Artificial Sequence: Synthetic oligonucleotide
  Antisense strand to SEQ ID NO: 1878369
uaaccaguaaacuauuuga

SEQ ID NO: 1878371 - RNA, 19 nt, Artificial Sequence
  Description of Artificial Sequence: Synthetic oligonucleotide
  Sense strand starting at position 3253 of SEQ ID NO: 1564483
ugguuauaccuccagauau

SEQ ID NO: 1878372 - RNA, 19 nt, Artificial Sequence
  Description of Artificial Sequence: Synthetic oligonucleotide
  Antisense strand to SEQ ID NO: 1878371
auaucuggagguauaacca

SEQ ID NO: 1878373 - RNA, 19 nt, Artificial Sequence
  Description of Artificial Sequence: Synthetic oligonucleotide
  Sense strand starting at position 3309 of SEQ ID NO: 1564483
gggaaauguuccuuuauaa

SEQ ID NO: 1878374 - RNA, 19 nt, Artificial Sequence
  Description of Artificial Sequence: Synthetic oligonucleotide
  Antisense strand to SEQ ID NO: 1878373
uuauaaaggaacauuuccc

SEQ ID NO: 1878375 - RNA, 19 nt, Artificial Sequence
  Description of Artificial Sequence: Synthetic oligonucleotide
  Sense strand starting at position 3316 of SEQ ID NO: 1564483
guuccuuuauaagugaaga

SEQ ID NO: 1878376 - RNA, 19 nt, Artificial Sequence
  Description of Artificial Sequence: Synthetic oligonucleotide
  Antisense strand to SEQ ID NO: 1878375
ucuucacuuauaaaggaac

SEQ ID NO: 1878377 - RNA, 19 nt, Artificial Sequence
  Description of Artificial Sequence: Synthetic oligonucleotide
  Sense strand starting at position 3404 of SEQ ID NO: 1564483
guuuaaaugagaggacagu

SEQ ID NO: 1878378 - RNA, 19 nt, Artificial Sequence
  Description of Artificial Sequence: Synthetic oligonucleotide
  Antisense strand to SEQ ID NO: 1878377
acuguccucucauuuaaac

SEQ ID NO: 1878379 - RNA, 19 nt, Artificial Sequence
  Description of Artificial Sequence: Synthetic oligonucleotide
  Sense strand starting at position 3582 of SEQ ID NO: 1564483
guugaaucgcuacaccaca

SEQ ID NO: 1878380 - RNA, 19 nt, Artificial Sequence
  Description of Artificial Sequence: Synthetic oligonucleotide
  Antisense strand to SEQ ID NO: 1878379
ugugguguagcgauucaac

SEQ ID NO: 1878381 - RNA, 19 nt, Artificial Sequence
  Description of Artificial Sequence: Synthetic oligonucleotide
  Sense strand starting at position 3587 of SEQ ID NO: 1564483
aucgcuacaccacagaaua

SEQ ID NO: 1878382 - RNA, 19 nt, Artificial Sequence
  Description of Artificial Sequence: Synthetic oligonucleotide
  Antisense strand to SEQ ID NO: 1878381
uauucugugguguagcgau

SEQ ID NO: 1878383 - RNA, 19 nt, Artificial Sequence
  Description of Artificial Sequence: Synthetic oligonucleotide
  Sense strand starting at position 3788 of SEQ ID NO: 1564483
ucacuugaggcagguaauu

SEQ ID NO: 1878384 - RNA, 19 nt, Artificial Sequence
  Description of Artificial Sequence: Synthetic oligonucleotide
  Antisense strand to SEQ ID NO: 1878383
aauuaccugccucaaguga

SEQ ID NO: 1878385 - RNA, 19 nt, Artificial Sequence
  Description of Artificial Sequence: Synthetic oligonucleotide
  Sense strand starting at position 3790 of SEQ ID NO: 1564483
acuugaggcagguaauuau

SEQ ID NO: 1878386 - RNA, 19 nt, Artificial Sequence
  Description of Artificial Sequence: Synthetic oligonucleotide
  Antisense strand to SEQ ID NO: 1878385
auaauuaccugccucaagu

SEQ ID NO: 1878387 - RNA, 19 nt, Artificial Sequence
  Description of Artificial Sequence: Synthetic oligonucleotide
  Sense strand starting at position 3971 of SEQ ID NO: 1564483
auguacauuuggcagauua

SEQ ID NO: 1878388 - RNA, 19 nt, Artificial Sequence
  Description of Artificial Sequence: Synthetic oligonucleotide
  Antisense strand to SEQ ID NO: 1878387
uaaucugccaaauguacau

SEQ ID NO: 1878389 - RNA, 19 nt, Artificial Sequence
  Description of Artificial Sequence: Synthetic oligonucleotide
  Sense strand starting at position 50 of SEQ ID NO: 1564485
gauggaaaccauuguacca

SEQ ID NO: 1878390 - RNA, 19 nt, Artificial Sequence
  Description of Artificial Sequence: Synthetic oligonucleotide
  Antisense strand to SEQ ID NO: 1878389
ugguacaaugguuuccauc

SEQ ID NO: 1878391 - RNA, 19 nt, Artificial Sequence
  Description of Artificial Sequence: Synthetic oligonucleotide
  Sense strand starting at position 60 of SEQ ID NO: 1564485
auuguaccaucaguuuaua

SEQ ID NO: 1878392 - RNA, 19 nt, Artificial Sequence
  Description of Artificial Sequence: Synthetic oligonucleotide
  Antisense strand to SEQ ID NO: 1878391
uauaaacugaugguacaau

SEQ ID NO: 1878393 - RNA, 19 nt, Artificial Sequence
  Description of Artificial Sequence: Synthetic oligonucleotide
  Sense strand starting at position 63 of SEQ ID NO: 1564485
guaccaucaguuuauauug

SEQ ID NO: 1878394 - RNA, 19 nt, Artificial Sequence
  Description of Artificial Sequence: Synthetic oligonucleotide
  Antisense strand to SEQ ID NO: 1878393
caauauaaacugaugguac

SEQ ID NO: 1878395 - RNA, 19 nt, Artificial Sequence
  Description of Artificial Sequence: Synthetic oligonucleotide
  Sense strand starting at position 68 of SEQ ID NO: 1564485
aucaguuuauauugaggaa

SEQ ID NO: 1878396 - RNA, 19 nt, Artificial Sequence
  Description of Artificial Sequence: Synthetic oligonucleotide
  Antisense strand to SEQ ID NO: 1878395
uuccucaauauaaacugau

SEQ ID NO: 1878397 - RNA, 19 nt, Artificial Sequence
  Description of Artificial Sequence: Synthetic oligonucleotide
  Sense strand starting at position 140 of SEQ ID NO: 1564485
gugcuugugcuggcaggau

SEQ ID NO: 1878398 - RNA, 19 nt, Artificial Sequence
  Description of Artificial Sequence: Synthetic oligonucleotide
  Antisense strand to SEQ ID NO: 1878397
auccugccagcacaagcac

SEQ ID NO: 1878399 - RNA, 19 nt, Artificial Sequence
  Description of Artificial Sequence: Synthetic oligonucleotide
  Sense strand starting at position 149 of SEQ ID NO: 1564485
cuggcaggauugcaagaaa

SEQ ID NO: 1878400 - RNA, 19 nt, Artificial Sequence
  Description of Artificial Sequence: Synthetic oligonucleotide
  Antisense strand to SEQ ID NO: 1878399
uuucuugcaauccugccag

SEQ ID NO: 1878401 - RNA, 19 nt, Artificial Sequence
  Description of Artificial Sequence: Synthetic oligonucleotide
  Sense strand starting at position 244 of SEQ ID NO: 1564485
uaugcuccugucuggcaaa

SEQ ID NO: 1878402 - RNA, 19 nt, Artificial Sequence
  Description of Artificial Sequence: Synthetic oligonucleotide
  Antisense strand to SEQ ID NO: 1878401
uuugccagacaggagcaua

SEQ ID NO: 1878403 - RNA, 19 nt, Artificial Sequence
  Description of Artificial Sequence: Synthetic oligonucleotide
  Sense strand starting at position 1254 of SEQ ID NO: 1564485
cucagaucgguuugcaaca

SEQ ID NO: 1878404 - RNA, 19 nt, Artificial Sequence
  Description of Artificial Sequence: Synthetic oligonucleotide
  Antisense strand to SEQ ID NO: 1878403
uguugcaaaccgaucugag

SEQ ID NO: 1878405 - RNA, 19 nt, Artificial Sequence
  Description of Artificial Sequence: Synthetic oligonucleotide
  Sense strand starting at position 1284 of SEQ ID NO: 1564485
uugucaucaacaugggaag

SEQ ID NO: 1878406 - RNA, 19 nt, Artificial Sequence
  Description of Artificial Sequence: Synthetic oligonucleotide
  Antisense strand to SEQ ID NO: 1878405
cuucccauguugaugacaa

SEQ ID NO: 1878407 - RNA, 19 nt, Artificial Sequence
  Description of Artificial Sequence: Synthetic oligonucleotide
  Sense strand starting at position 1351 of SEQ ID NO: 1564485
guugcugcucagggagaua

SEQ ID NO: 1878408 - RNA, 19 nt, Artificial Sequence
  Description of Artificial Sequence: Synthetic oligonucleotide
  Antisense strand to SEQ ID NO: 1878407
uaucucccugagcagcaac

SEQ ID NO: 1878409 - RNA, 19 nt, Artificial Sequence
  Description of Artificial Sequence: Synthetic oligonucleotide
  Sense strand starting at position 1765 of SEQ ID NO: 1564485
gaggcuucuugugaggaaa

SEQ ID NO: 1878410 - RNA, 19 nt, Artificial Sequence
  Description of Artificial Sequence: Synthetic oligonucleotide
  Antisense strand to SEQ ID NO: 1878409
uuuccucacaagaagccuc

SEQ ID NO: 1878411 - RNA, 19 nt, Artificial Sequence
  Description of Artificial Sequence: Synthetic oligonucleotide
  Sense strand starting at position 1767 of SEQ ID NO: 1564485
ggcuucuugugaggaaaga

SEQ ID NO: 1878412 - RNA, 19 nt, Artificial Sequence
  Description of Artificial Sequence: Synthetic oligonucleotide
  Antisense strand to SEQ ID NO: 1878411
ucuuuccucacaagaagcc

SEQ ID NO: 1878413 - RNA, 19 nt, Artificial Sequence
  Description of Artificial Sequence: Synthetic oligonucleotide
  Sense strand starting at position 2088 of SEQ ID NO: 1564485
aaggccuuauacgucauaa

SEQ ID NO: 1878414 - RNA, 19 nt, Artificial Sequence
  Description of Artificial Sequence: Synthetic oligonucleotide
  Antisense strand to SEQ ID NO: 1878413
uuaugacguauaaggccuu

SEQ ID NO: 1878415 - RNA, 19 nt, Artificial Sequence
  Description of Artificial Sequence: Synthetic oligonucleotide
  Sense strand starting at position 2090 of SEQ ID NO: 1564485
ggccuuauacgucauaaag

SEQ ID NO: 1878416 - RNA, 19 nt, Artificial Sequence
  Description of Artificial Sequence: Synthetic oligonucleotide
  Antisense strand to SEQ ID NO: 1878415
cuuuaugacguauaaggcc

SEQ ID NO: 1878417 - RNA, 19 nt, Artificial Sequence
  Description of Artificial Sequence: Synthetic oligonucleotide
  Sense strand starting at position 2152 of SEQ ID NO: 1564485
ggcggugacaucuaaugag

SEQ ID NO: 1878418 - RNA, 19 nt, Artificial Sequence
  Description of Artificial Sequence: Synthetic oligonucleotide
  Antisense strand to SEQ ID NO: 1878417
cucauuagaugucaccgcc

SEQ ID NO: 1878419 - RNA, 19 nt, Artificial Sequence
  Description of Artificial Sequence: Synthetic oligonucleotide
  Sense strand starting at position 2179 of SEQ ID NO: 1564485
ggugcucuaguuggagaaa

SEQ ID NO: 1878420 - RNA, 19 nt, Artificial Sequence
  Description of Artificial Sequence: Synthetic oligonucleotide
  Antisense strand to SEQ ID NO: 1878419
uuucuccaacuagagcacc

SEQ ID NO: 1878421 - RNA, 19 nt, Artificial Sequence
  Description of Artificial Sequence: Synthetic oligonucleotide
  Sense strand starting at position 2180 of SEQ ID NO: 1564485
gugcucuaguuggagaaag

SEQ ID NO: 1878422 - RNA, 19 nt, Artificial Sequence
  Description of Artificial Sequence: Synthetic oligonucleotide
  Antisense strand to SEQ ID NO: 1878421
cuuucuccaacuagagcac

SEQ ID NO: 1878423 - RNA, 19 nt, Artificial Sequence
  Description of Artificial Sequence: Synthetic oligonucleotide
  Sense strand starting at position 2434 of SEQ ID NO: 1564485
guacgaagacgucagucau

SEQ ID NO: 1878424 - RNA, 19 nt, Artificial Sequence
  Description of Artificial Sequence: Synthetic oligonucleotide
  Antisense strand to SEQ ID NO: 1878423
augacugacgucuucguac

SEQ ID NO: 1878425 - RNA, 19 nt, Artificial Sequence
  Description of Artificial Sequence: Synthetic oligonucleotide
  Sense strand starting at position 2596 of SEQ ID NO: 1564485
gcuuccagaggucaagauu

SEQ ID NO: 1878426 - RNA, 19 nt, Artificial Sequence
  Description of Artificial Sequence: Synthetic oligonucleotide
  Antisense strand to SEQ ID NO: 1878425
aaucuugaccucuggaagc

SEQ ID NO: 1878427 - RNA, 19 nt, Artificial Sequence
  Description of Artificial Sequence: Synthetic oligonucleotide
  Sense strand starting at position 2859 of SEQ ID NO: 1564485
ggucuaggcagcugaaaug

SEQ ID NO: 1878428 - RNA, 19 nt, Artificial Sequence
  Description of Artificial Sequence: Synthetic oligonucleotide
  Antisense strand to SEQ ID NO: 1878427
cauuucagcugccuagacc

SEQ ID NO: 1878429 - RNA, 19 nt, Artificial Sequence
  Description of Artificial Sequence: Synthetic oligonucleotide
  Sense strand starting at position 2871 of SEQ ID NO: 1564485
ugaaauguauagggcaagu

SEQ ID NO: 1878430 - RNA, 19 nt, Artificial Sequence
  Description of Artificial Sequence: Synthetic oligonucleotide
  Antisense strand to SEQ ID NO: 1878429
acuugcccuauacauuuca

SEQ ID NO: 1878431 - RNA, 19 nt, Artificial Sequence
  Description of Artificial Sequence: Synthetic oligonucleotide
  Sense strand starting at position 2888 of SEQ ID NO: 1564485
gugagcauccuggaaacua

SEQ ID NO: 1878432 - RNA, 19 nt, Artificial Sequence
  Description of Artificial Sequence: Synthetic oligonucleotide
  Antisense strand to SEQ ID NO: 1878431
uaguuuccaggaugcucac

SEQ ID NO: 1878433 - RNA, 19 nt, Artificial Sequence
  Description of Artificial Sequence: Synthetic oligonucleotide
  Sense strand starting at position 2946 of SEQ ID NO: 1564485
cacgcuaugguuugggaga

SEQ ID NO: 1878434 - RNA, 19 nt, Artificial Sequence
  Description of Artificial Sequence: Synthetic oligonucleotide
  Antisense strand to SEQ ID NO: 1878433
ucucccaaaccauagcgug

SEQ ID NO: 1878435 - RNA, 19 nt, Artificial Sequence
  Description of Artificial Sequence: Synthetic oligonucleotide
  Sense strand starting at position 2992 of SEQ ID NO: 1564485
augaguuaauauccaaagu

SEQ ID NO: 1878436 - RNA, 19 nt, Artificial Sequence
  Description of Artificial Sequence: Synthetic oligonucleotide
  Antisense strand to SEQ ID NO: 1878435
acuuuggauauuaacucau

SEQ ID NO: 1878437 - RNA, 19 nt, Artificial Sequence
  Description of Artificial Sequence: Synthetic oligonucleotide
  Sense strand starting at position 3037 of SEQ ID NO: 1564485
gcaaauaaauaguaugguu

SEQ ID NO: 1878438 - RNA, 19 nt, Artificial Sequence
  Description of Artificial Sequence: Synthetic oligonucleotide
  Antisense strand to SEQ ID NO: 1878437
aaccauacuauuuauuugc

SEQ ID NO: 1878439 - RNA, 19 nt, Artificial Sequence
  Description of Artificial Sequence: Synthetic oligonucleotide
  Sense strand starting at position 3243 of SEQ ID NO: 1564485
guauaauuguuccuuggaa

SEQ ID NO: 1878440 - RNA, 19 nt, Artificial Sequence
  Description of Artificial Sequence: Synthetic oligonucleotide
  Antisense strand to SEQ ID NO: 1878439
uuccaaggaacaauuauac

SEQ ID NO: 1878441 - RNA, 19 nt, Artificial Sequence
  Description of Artificial Sequence: Synthetic oligonucleotide
  Sense strand starting at position 3294 of SEQ ID NO: 1564485
cucaucuguugaguaugua

SEQ ID NO: 1878442 - RNA, 19 nt, Artificial Sequence
  Description of Artificial Sequence: Synthetic oligonucleotide
  Antisense strand to SEQ ID NO: 1878441
uacauacucaacagaugag

SEQ ID NO: 1878443 - RNA, 19 nt, Artificial Sequence
  Description of Artificial Sequence: Synthetic oligonucleotide
  Sense strand starting at position 3331 of SEQ ID NO: 1564485
guccacaucucauacagau

SEQ ID NO: 1878444 - RNA, 19 nt, Artificial Sequence
  Description of Artificial Sequence: Synthetic oligonucleotide
  Antisense strand to SEQ ID NO: 1878443
aucuguaugagauguggac

SEQ ID NO: 1878445 - RNA, 19 nt, Artificial Sequence
  Description of Artificial Sequence: Synthetic oligonucleotide
  Sense strand starting at position 3538 of SEQ ID NO: 1564485
gagaaauauugaggagaau

SEQ ID NO: 1878446 - RNA, 19 nt, Artificial Sequence
  Description of Artificial Sequence: Synthetic oligonucleotide
  Antisense strand to SEQ ID NO: 1878445
auucuccucaauauuucuc

SEQ ID NO: 1878447 - RNA, 19 nt, Artificial Sequence
  Description of Artificial Sequence: Synthetic oligonucleotide
  Sense strand starting at position 3597 of SEQ ID NO: 1564485
uagggaggauucuguauuu

SEQ ID NO: 1878448 - RNA, 19 nt, Artificial Sequence
  Description of Artificial Sequence: Synthetic oligonucleotide
  Antisense strand to SEQ ID NO: 1878447
aaauacagaauccucccua

SEQ ID NO: 1878449 - RNA, 19 nt, Artificial Sequence
  Description of Artificial Sequence: Synthetic oligonucleotide
  Sense strand starting at position 3627 of SEQ ID NO: 1564485
agguaacucuaguuaccau

SEQ ID NO: 1878450 - RNA, 19 nt, Artificial Sequence
  Description of Artificial Sequence: Synthetic oligonucleotide
  Antisense strand to SEQ ID NO: 1878449
augguaacuagaguuaccu

SEQ ID NO: 1878451 - RNA, 19 nt, Artificial Sequence
  Description of Artificial Sequence: Synthetic oligonucleotide
  Sense strand starting at position 3637 of SEQ ID NO: 1564485
aguuaccauauccguagua

SEQ ID NO: 1878452 - RNA, 19 nt, Artificial Sequence
  Description of Artificial Sequence: Synthetic oligonucleotide
  Antisense strand to SEQ ID NO: 1878451
uacuacggauaugguaacu

SEQ ID NO: 1878453 - RNA, 19 nt, Artificial Sequence
  Description of Artificial Sequence: Synthetic oligonucleotide
  Sense strand starting at position 3646 of SEQ ID NO: 1564485
auccguaguaccuagucaa

SEQ ID NO: 1878454 - RNA, 19 nt, Artificial Sequence
  Description of Artificial Sequence: Synthetic oligonucleotide
  Antisense strand to SEQ ID NO: 1878453
uugacuagguacuacggau

SEQ ID NO: 1878455 - RNA, 19 nt, Artificial Sequence
  Description of Artificial Sequence: Synthetic oligonucleotide
  Sense strand starting at position 3649 of SEQ ID NO: 1564485
cguaguaccuagucaacaa

SEQ ID NO: 1878456 - RNA, 19 nt, Artificial Sequence
  Description of Artificial Sequence: Synthetic oligonucleotide
  Antisense strand to SEQ ID NO: 1878455
uuguugacuagguacuacg

SEQ ID NO: 1878457 - RNA, 19 nt, Artificial Sequence
  Description of Artificial Sequence: Synthetic oligonucleotide
  Sense strand starting at position 3697 of SEQ ID NO: 1564485
uggagugguuacuaaacuu

SEQ ID NO: 1878458 - RNA, 19 nt, Artificial Sequence
  Description of Artificial Sequence: Synthetic oligonucleotide
  Antisense strand to SEQ ID NO: 1878457
aaguuuaguaaccacucca

SEQ ID NO: 1878459 - RNA, 19 nt, Artificial Sequence
  Description of Artificial Sequence: Synthetic oligonucleotide
  Sense strand starting at position 3723 of SEQ ID NO: 1564485
ucaaccaguuuccuaguaa

SEQ ID NO: 1878460 - RNA, 19 nt, Artificial Sequence
  Description of Artificial Sequence: Synthetic oligonucleotide
  Antisense strand to SEQ ID NO: 1878459
uuacuaggaaacugguuga

SEQ ID NO: 1878461 - RNA, 19 nt, Artificial Sequence
  Description of Artificial Sequence: Synthetic oligonucleotide
  Sense strand starting at position 3737 of SEQ ID NO: 1564485
aguaauugcuaguuguuua

SEQ ID NO: 1878462 - RNA, 19 nt, Artificial Sequence
  Description of Artificial Sequence: Synthetic oligonucleotide
  Antisense strand to SEQ ID NO: 1878461
uaaacaacuagcaauuacu

SEQ ID NO: 1878463 - RNA, 19 nt, Artificial Sequence
  Description of Artificial Sequence: Synthetic oligonucleotide
  Sense strand starting at position 3738 of SEQ ID NO: 1564485
guaauugcuaguuguuuau

SEQ ID NO: 1878464 - RNA, 19 nt, Artificial Sequence
  Description of Artificial Sequence: Synthetic oligonucleotide
  Antisense strand to SEQ ID NO: 1878463
auaaacaacuagcaauuac

SEQ ID NO: 1878465 - RNA, 19 nt, Artificial Sequence
  Description of Artificial Sequence: Synthetic oligonucleotide
  Sense strand starting at position 3844 of SEQ ID NO: 1564485
aagcuacuguauuagguaa

SEQ ID NO: 1878466 - RNA, 19 nt, Artificial Sequence
  Description of Artificial Sequence: Synthetic oligonucleotide
  Antisense strand to SEQ ID NO: 1878465
uuaccuaauacaguagcuu

SEQ ID NO: 1878467 - RNA, 19 nt, Artificial Sequence
  Description of Artificial Sequence: Synthetic oligonucleotide
  Sense strand starting at position 3857 of SEQ ID NO: 1564485
agguaauacuucuaacaug

SEQ ID NO: 1878468 - RNA, 19 nt, Artificial Sequence
  Description of Artificial Sequence: Synthetic oligonucleotide
  Antisense strand to SEQ ID NO: 1878467
cauguuagaaguauuaccu

SEQ ID NO: 1878469 - RNA, 19 nt, Artificial Sequence
  Description of Artificial Sequence: Synthetic oligonucleotide
  Sense strand starting at position 51 of SEQ ID NO: 1564486
gauggaaaccauuguacca

SEQ ID NO: 1878470 - RNA, 19 nt, Artificial Sequence
  Description of Artificial Sequence: Synthetic oligonucleotide
  Antisense strand to SEQ ID NO: 1878469
ugguacaaugguuuccauc

SEQ ID NO: 1878471 - RNA, 19 nt, Artificial Sequence
  Description of Artificial Sequence: Synthetic oligonucleotide
  Sense strand starting at position 61 of SEQ ID NO: 1564486
auuguaccaucaguuuaua

SEQ ID NO: 1878472 - RNA, 19 nt, Artificial Sequence
  Description of Artificial Sequence: Synthetic oligonucleotide
  Antisense strand to SEQ ID NO: 1878471
uauaaacugaugguacaau

SEQ ID NO: 1878473 - RNA, 19 nt, Artificial Sequence
  Description of Artificial Sequence: Synthetic oligonucleotide
  Sense strand starting at position 64 of SEQ ID NO: 1564486
guaccaucaguuuauauug

SEQ ID NO: 1878474 - RNA, 19 nt, Artificial Sequence
  Description of Artificial Sequence: Synthetic oligonucleotide
  Antisense strand to SEQ ID NO: 1878473
caauauaaacugaugguac

SEQ ID NO: 1878475 - RNA, 19 nt, Artificial Sequence
  Description of Artificial Sequence: Synthetic oligonucleotide
  Sense strand starting at position 69 of SEQ ID NO: 1564486
aucaguuuauauugaggaa

SEQ ID NO: 1878476 - RNA, 19 nt, Artificial Sequence
  Description of Artificial Sequence: Synthetic oligonucleotide
  Antisense strand to SEQ ID NO: 1878475
uuccucaauauaaacugau

SEQ ID NO: 1878477 - RNA, 19 nt, Artificial Sequence
  Description of Artificial Sequence: Synthetic oligonucleotide
  Sense strand starting at position 141 of SEQ ID NO: 1564486
gugcuugugcuggcaggau

SEQ ID NO: 1878478 - RNA, 19 nt, Artificial Sequence
  Description of Artificial Sequence: Synthetic oligonucleotide
  Antisense strand to SEQ ID NO: 1878477
auccugccagcacaagcac

SEQ ID NO: 1878479 - RNA, 19 nt, Artificial Sequence
  Description of Artificial Sequence: Synthetic oligonucleotide
  Sense strand starting at position 150 of SEQ ID NO: 1564486
cuggcaggauugcaagaaa

SEQ ID NO: 1878480 - RNA, 19 nt, Artificial Sequence
  Description of Artificial Sequence: Synthetic oligonucleotide
  Antisense strand to SEQ ID NO: 1878479
uuucuugcaauccugccag

SEQ ID NO: 1878481 - RNA, 19 nt, Artificial Sequence
  Description of Artificial Sequence: Synthetic oligonucleotide
  Sense strand starting at position 245 of SEQ ID NO: 1564486
uaugcuccugucuggcaaa

SEQ ID NO: 1878482 - RNA, 19 nt, Artificial Sequence
  Description of Artificial Sequence: Synthetic oligonucleotide
  Antisense strand to SEQ ID NO: 1878481
uuugccagacaggagcaua

SEQ ID NO: 1878483 - RNA, 19 nt, Artificial Sequence
  Description of Artificial Sequence: Synthetic oligonucleotide
  Sense strand starting at position 1255 of SEQ ID NO: 1564486
cucagaucgguuugcaaca

SEQ ID NO: 1878484 - RNA, 19 nt, Artificial Sequence
  Description of Artificial Sequence: Synthetic oligonucleotide
  Antisense strand to SEQ ID NO: 1878483
uguugcaaaccgaucugag

SEQ ID NO: 1878485 - RNA, 19 nt, Artificial Sequence
  Description of Artificial Sequence: Synthetic oligonucleotide
  Sense strand starting at position 1658 of SEQ ID NO: 1564486
acagaagggcucugguuua

SEQ ID NO: 1878486 - RNA, 19 nt, Artificial Sequence
  Description of Artificial Sequence: Synthetic oligonucleotide
  Antisense strand to SEQ ID NO: 1878485
uaaaccagagcccuucugu

SEQ ID NO: 1878487 - RNA, 19 nt, Artificial Sequence
  Description of Artificial Sequence: Synthetic oligonucleotide
  Sense strand starting at position 1766 of SEQ ID NO: 1564486
gaggcuucuugugaggaaa

SEQ ID NO: 1878488 - RNA, 19 nt, Artificial Sequence
  Description of Artificial Sequence: Synthetic oligonucleotide
  Antisense strand to SEQ ID NO: 1878487
uuuccucacaagaagccuc

SEQ ID NO: 1878489 - RNA, 19 nt, Artificial Sequence
  Description of Artificial Sequence: Synthetic oligonucleotide
  Sense strand starting at position 2089 of SEQ ID NO: 1564486
aaggccuuauacgucauaa

SEQ ID NO: 1878490 - RNA, 19 nt, Artificial Sequence
  Description of Artificial Sequence: Synthetic oligonucleotide
  Antisense strand to SEQ ID NO: 1878489
uuaugacguauaaggccuu

SEQ ID NO: 1878491 - RNA, 19 nt, Artificial Sequence
  Description of Artificial Sequence: Synthetic oligonucleotide
  Sense strand starting at position 2091 of SEQ ID NO: 1564486
ggccuuauacgucauaaag

SEQ ID NO: 1878492 - RNA, 19 nt, Artificial Sequence
  Description of Artificial Sequence: Synthetic oligonucleotide
  Antisense strand to SEQ ID NO: 1878491
cuuuaugacguauaaggcc

SEQ ID NO: 1878493 - RNA, 19 nt, Artificial Sequence
  Description of Artificial Sequence: Synthetic oligonucleotide
  Sense strand starting at position 2153 of SEQ ID NO: 1564486
ggcggugacaucuaaugag

SEQ ID NO: 1878494 - RNA, 19 nt, Artificial Sequence
  Description of Artificial Sequence: Synthetic oligonucleotide
  Antisense strand to SEQ ID NO: 1878493
cucauuagaugucaccgcc

SEQ ID NO: 1878495 - RNA, 19 nt, Artificial Sequence
  Description of Artificial Sequence: Synthetic oligonucleotide
  Sense strand starting at position 2179 of SEQ ID NO: 1564486
gggugcucuaguuggagaa

SEQ ID NO: 1878496 - RNA, 19 nt, Artificial Sequence
  Description of Artificial Sequence: Synthetic oligonucleotide
  Antisense strand to SEQ ID NO: 1878495
uucuccaacuagagcaccc

SEQ ID NO: 1878497 - RNA, 19 nt, Artificial Sequence
  Description of Artificial Sequence: Synthetic oligonucleotide
  Sense strand starting at position 2180 of SEQ ID NO: 1564486
ggugcucuaguuggagaaa

SEQ ID NO: 1878498 - RNA, 19 nt, Artificial Sequence
  Description of Artificial Sequence: Synthetic oligonucleotide
  Antisense strand to SEQ ID NO: 1878497
uuucuccaacuagagcacc

SEQ ID NO: 1878499 - RNA, 19 nt, Artificial Sequence
  Description of Artificial Sequence: Synthetic oligonucleotide
  Sense strand starting at position 2376 of SEQ ID NO: 1564486
ccaguuucuguauguccua

SEQ ID NO: 1878500 - RNA, 19 nt, Artificial Sequence
  Description of Artificial Sequence: Synthetic oligonucleotide
  Antisense strand to SEQ ID NO: 1878499
uaggacauacagaaacugg

SEQ ID NO: 1878501 - RNA, 19 nt, Artificial Sequence
  Description of Artificial Sequence: Synthetic oligonucleotide
  Sense strand starting at position 2435 of SEQ ID NO: 1564486
guacgaagacgucagucau

SEQ ID NO: 1878502 - RNA, 19 nt, Artificial Sequence
  Description of Artificial Sequence: Synthetic oligonucleotide
  Antisense strand to SEQ ID NO: 1878501
augacugacgucuucguac

SEQ ID NO: 1878503 - RNA, 19 nt, Artificial Sequence
  Description of Artificial Sequence: Synthetic oligonucleotide
  Sense strand starting at position 2597 of SEQ ID NO: 1564486
gcuuccagaggucaagauu

SEQ ID NO: 1878504 - RNA, 19 nt, Artificial Sequence
  Description of Artificial Sequence: Synthetic oligonucleotide
  Antisense strand to SEQ ID NO: 1878503
aaucuugaccucuggaagc

SEQ ID NO: 1878505 - RNA, 19 nt, Artificial Sequence
  Description of Artificial Sequence: Synthetic oligonucleotide
  Sense strand starting at position 2860 of SEQ ID NO: 1564486
ggucuaggcagcugaaaug

SEQ ID NO: 1878506 - RNA, 19 nt, Artificial Sequence
  Description of Artificial Sequence: Synthetic oligonucleotide
  Antisense strand to SEQ ID NO: 1878505
cauuucagcugccuagacc

SEQ ID NO: 1878507 - RNA, 19 nt, Artificial Sequence
  Description of Artificial Sequence: Synthetic oligonucleotide
  Sense strand starting at position 2889 of SEQ ID NO: 1564486
gugagcauccuggaaacua

SEQ ID NO: 1878508 - RNA, 19 nt, Artificial Sequence
  Description of Artificial Sequence: Synthetic oligonucleotide
  Antisense strand to SEQ ID NO: 1878507
uaguuuccaggaugcucac

SEQ ID NO: 1878509 - RNA, 19 nt, Artificial Sequence
  Description of Artificial Sequence: Synthetic oligonucleotide
  Sense strand starting at position 2947 of SEQ ID NO: 1564486
cacgcuaugguuugggaga

SEQ ID NO: 1878510 - RNA, 19 nt, Artificial Sequence
  Description of Artificial Sequence: Synthetic oligonucleotide
  Antisense strand to SEQ ID NO: 1878509
ucucccaaaccauagcgug

SEQ ID NO: 1878511 - RNA, 19 nt, Artificial Sequence
  Description of Artificial Sequence: Synthetic oligonucleotide
  Sense strand starting at position 2952 of SEQ ID NO: 1564486
uaugguuugggagaagcua

SEQ ID NO: 1878512 - RNA, 19 nt, Artificial Sequence
  Description of Artificial Sequence: Synthetic oligonucleotide
  Antisense strand to SEQ ID NO: 1878511
uagcuucucccaaaccaua

SEQ ID NO: 1878513 - RNA, 19 nt, Artificial Sequence
  Description of Artificial Sequence: Synthetic oligonucleotide
  Sense strand starting at position 2963 of SEQ ID NO: 1564486
agaagcuauuugcgaacca

SEQ ID NO: 1878514 - RNA, 19 nt, Artificial Sequence
  Description of Artificial Sequence: Synthetic oligonucleotide
  Antisense strand to SEQ ID NO: 1878513
ugguucgcaaauagcuucu

SEQ ID NO: 1878515 - RNA, 19 nt, Artificial Sequence
  Description of Artificial Sequence: Synthetic oligonucleotide
  Sense strand starting at position 2964 of SEQ ID NO: 1564486
gaagcuauuugcgaaccau

SEQ ID NO: 1878516 - RNA, 19 nt, Artificial Sequence
  Description of Artificial Sequence: Synthetic oligonucleotide
  Antisense strand to SEQ ID NO: 1878515
augguucgcaaauagcuuc

SEQ ID NO: 1878517 - RNA, 19 nt, Artificial Sequence
  Description of Artificial Sequence: Synthetic oligonucleotide
  Sense strand starting at position 2993 of SEQ ID NO: 1564486
augaguuaauauccaaagu

SEQ ID NO: 1878518 - RNA, 19 nt, Artificial Sequence
  Description of Artificial Sequence: Synthetic oligonucleotide
  Antisense strand to SEQ ID NO: 1878517
acuuuggauauuaacucau

SEQ ID NO: 1878519 - RNA, 19 nt, Artificial Sequence
  Description of Artificial Sequence: Synthetic oligonucleotide
  Sense strand starting at position 3244 of SEQ ID NO: 1564486
guauaauuguuccuuggaa

SEQ ID NO: 1878520 - RNA, 19 nt, Artificial Sequence
  Description of Artificial Sequence: Synthetic oligonucleotide
  Antisense strand to SEQ ID NO: 1878519
uuccaaggaacaauuauac

SEQ ID NO: 1878521 - RNA, 19 nt, Artificial Sequence
  Description of Artificial Sequence: Synthetic oligonucleotide
  Sense strand starting at position 3295 of SEQ ID NO: 1564486
cucaucuguugaguaugua

SEQ ID NO: 1878522 - RNA, 19 nt, Artificial Sequence
  Description of Artificial Sequence: Synthetic oligonucleotide
  Antisense strand to SEQ ID NO: 1878521
uacauacucaacagaugag

SEQ ID NO: 1878523 - RNA, 19 nt, Artificial Sequence
  Description of Artificial Sequence: Synthetic oligonucleotide
  Sense strand starting at position 3332 of SEQ ID NO: 1564486
guccacaucucauacagau

SEQ ID NO: 1878524 - RNA, 19 nt, Artificial Sequence
  Description of Artificial Sequence: Synthetic oligonucleotide
  Antisense strand to SEQ ID NO: 1878523
aucuguaugagauguggac

SEQ ID NO: 1878525 - RNA, 19 nt, Artificial Sequence
  Description of Artificial Sequence: Synthetic oligonucleotide
  Sense strand starting at position 3539 of SEQ ID NO: 1564486
gagaaauauugaggagaau

SEQ ID NO: 1878526 - RNA, 19 nt, Artificial Sequence
  Description of Artificial Sequence: Synthetic oligonucleotide
  Antisense strand to SEQ ID NO: 1878525
auucuccucaauauuucuc

SEQ ID NO: 1878527 - RNA, 19 nt, Artificial Sequence
  Description of Artificial Sequence: Synthetic oligonucleotide
  Sense strand starting at position 3598 of SEQ ID NO: 1564486
uagggaggauucuguauuu

SEQ ID NO: 1878528 - RNA, 19 nt, Artificial Sequence
  Description of Artificial Sequence: Synthetic oligonucleotide
  Antisense strand to SEQ ID NO: 1878527
aaauacagaauccucccua

SEQ ID NO: 1878529 - RNA, 19 nt, Artificial Sequence
  Description of Artificial Sequence: Synthetic oligonucleotide
  Sense strand starting at position 3638 of SEQ ID NO: 1564486
aguuaccauauccguagua

SEQ ID NO: 1878530 - RNA, 19 nt, Artificial Sequence
  Description of Artificial Sequence: Synthetic oligonucleotide
  Antisense strand to SEQ ID NO: 1878529
uacuacggauaugguaacu

SEQ ID NO: 1878531 - RNA, 19 nt, Artificial Sequence
  Description of Artificial Sequence: Synthetic oligonucleotide
  Sense strand starting at position 3647 of SEQ ID NO: 1564486
auccguaguaccuagucaa

SEQ ID NO: 1878532 - RNA, 19 nt, Artificial Sequence
  Description of Artificial Sequence: Synthetic oligonucleotide
  Antisense strand to SEQ ID NO: 1878531
uugacuagguacuacggau

SEQ ID NO: 1878533 - RNA, 19 nt, Artificial Sequence
  Description of Artificial Sequence: Synthetic oligonucleotide
  Sense strand starting at position 3650 of SEQ ID NO: 1564486
cguaguaccuagucaacaa

SEQ ID NO: 1878534 - RNA, 19 nt, Artificial Sequence
  Description of Artificial Sequence: Synthetic oligonucleotide
  Antisense strand to SEQ ID NO: 1878533
uuguugacuagguacuacg

SEQ ID NO: 1878535 - RNA, 19 nt, Artificial Sequence
  Description of Artificial Sequence: Synthetic oligonucleotide
  Sense strand starting at position 3698 of SEQ ID NO: 1564486
uggagugguuacuaaacuu

SEQ ID NO: 1878536 - RNA, 19 nt, Artificial Sequence
  Description of Artificial Sequence: Synthetic oligonucleotide
  Antisense strand to SEQ ID NO: 1878535
aaguuuaguaaccacucca

SEQ ID NO: 1878537 - RNA, 19 nt, Artificial Sequence
  Description of Artificial Sequence: Synthetic oligonucleotide
  Sense strand starting at position 3724 of SEQ ID NO: 1564486
ucaaccaguuuccuaguaa

SEQ ID NO: 1878538 - RNA, 19 nt, Artificial Sequence
  Description of Artificial Sequence: Synthetic oligonucleotide
  Antisense strand to SEQ ID NO: 1878537
uuacuaggaaacugguuga

SEQ ID NO: 1878539 - RNA, 19 nt, Artificial Sequence
  Description of Artificial Sequence: Synthetic oligonucleotide
  Sense strand starting at position 3801 of SEQ ID NO: 1564486
ucauguaguuaucucuagu

SEQ ID NO: 1878540 - RNA, 19 nt, Artificial Sequence
  Description of Artificial Sequence: Synthetic oligonucleotide
  Antisense strand to SEQ ID NO: 1878539
acuagagauaacuacauga

SEQ ID NO: 1878541 - RNA, 19 nt, Artificial Sequence
  Description of Artificial Sequence: Synthetic oligonucleotide
  Sense strand starting at position 3804 of SEQ ID NO: 1564486
uguaguuaucucuaguuaa

SEQ ID NO: 1878542 - RNA, 19 nt, Artificial Sequence
  Description of Artificial Sequence: Synthetic oligonucleotide
  Antisense strand to SEQ ID NO: 1878541
uuaacuagagauaacuaca

SEQ ID NO: 1878543 - RNA, 19 nt, Artificial Sequence
  Description of Artificial Sequence: Synthetic oligonucleotide
  Sense strand starting at position 3818 of SEQ ID NO: 1564486
guuaauuacuuacuuggau

SEQ ID NO: 1878544 - RNA, 19 nt, Artificial Sequence
  Description of Artificial Sequence: Synthetic oligonucleotide
  Antisense strand to SEQ ID NO: 1878543
auccaaguaaguaauuaac

SEQ ID NO: 1878545 - RNA, 19 nt, Artificial Sequence
  Description of Artificial Sequence: Synthetic oligonucleotide
  Sense strand starting at position 3858 of SEQ ID NO: 1564486
agguaauacuucuaacaug

SEQ ID NO: 1878546 - RNA, 19 nt, Artificial Sequence
  Description of Artificial Sequence: Synthetic oligonucleotide
  Antisense strand to SEQ ID NO: 1878545
cauguuagaaguauuaccu

SEQ ID NO: 1878547 - RNA, 19 nt, Artificial Sequence
  Description of Artificial Sequence: Synthetic oligonucleotide
  Sense strand starting at position 3967 of SEQ ID NO: 1564486
ggcuaauucuagcuaucuu

SEQ ID NO: 1878548 - RNA, 19 nt, Artificial Sequence
  Description of Artificial Sequence: Synthetic oligonucleotide
  Antisense strand to SEQ ID NO: 1878547
aagauagcuagaauuagcc

SEQ ID NO: 1878549 - RNA, 19 nt, Artificial Sequence
  Description of Artificial Sequence: Synthetic oligonucleotide
  Sense strand starting at position 54 of SEQ ID NO: 1564487
gauggaaaccauuguacca

SEQ ID NO: 1878550 - RNA, 19 nt, Artificial Sequence
  Description of Artificial Sequence: Synthetic oligonucleotide
  Antisense strand to SEQ ID NO: 1878549
ugguacaaugguuuccauc

SEQ ID NO: 1878551 - RNA, 19 nt, Artificial Sequence
  Description of Artificial Sequence: Synthetic oligonucleotide
  Sense strand starting at position 64 of SEQ ID NO: 1564487
auuguaccaucaguuuaua

SEQ ID NO: 1878552 - RNA, 19 nt, Artificial Sequence
  Description of Artificial Sequence: Synthetic oligonucleotide
  Antisense strand to SEQ ID NO: 1878551
uauaaacugaugguacaau

SEQ ID NO: 1878553 - RNA, 19 nt, Artificial Sequence
  Description of Artificial Sequence: Synthetic oligonucleotide
  Sense strand starting at position 67 of SEQ ID NO: 1564487
guaccaucaguuuauauug

SEQ ID NO: 1878554 - RNA, 19 nt, Artificial Sequence
  Description of Artificial Sequence: Synthetic oligonucleotide
  Antisense strand to SEQ ID NO: 1878553
caauauaaacugaugguac

SEQ ID NO: 1878555 - RNA, 19 nt, Artificial Sequence
  Description of Artificial Sequence: Synthetic oligonucleotide
  Sense strand starting at position 72 of SEQ ID NO: 1564487
aucaguuuauauugaggaa

SEQ ID NO: 1878556 - RNA, 19 nt, Artificial Sequence
  Description of Artificial Sequence: Synthetic oligonucleotide
  Antisense strand to SEQ ID NO: 1878555
uuccucaauauaaacugau

SEQ ID NO: 1878557 - RNA, 19 nt, Artificial Sequence
  Description of Artificial Sequence: Synthetic oligonucleotide
  Sense strand starting at position 144 of SEQ ID NO: 1564487
gugcuugugcuggcaggau

SEQ ID NO: 1878558 - RNA, 19 nt, Artificial Sequence
  Description of Artificial Sequence: Synthetic oligonucleotide
  Antisense strand to SEQ ID NO: 1878557
auccugccagcacaagcac

SEQ ID NO: 1878559 - RNA, 19 nt, Artificial Sequence
  Description of Artificial Sequence: Synthetic oligonucleotide
  Sense strand starting at position 153 of SEQ ID NO: 1564487
cuggcaggauugcaagaaa

SEQ ID NO: 1878560 - RNA, 19 nt, Artificial Sequence
  Description of Artificial Sequence: Synthetic oligonucleotide
  Antisense strand to SEQ ID NO: 1878559
uuucuugcaauccugccag

SEQ ID NO: 1878561 - RNA, 19 nt, Artificial Sequence
  Description of Artificial Sequence: Synthetic oligonucleotide
  Sense strand starting at position 248 of SEQ ID NO: 1564487
uaugcuccugucuggcaaa

SEQ ID NO: 1878562 - RNA, 19 nt, Artificial Sequence
  Description of Artificial Sequence: Synthetic oligonucleotide
  Antisense strand to SEQ ID NO: 1878561
uuugccagacaggagcaua

SEQ ID NO: 1878563 - RNA, 19 nt, Artificial Sequence
  Description of Artificial Sequence: Synthetic oligonucleotide
  Sense strand starting at position 1258 of SEQ ID NO: 1564487
cucagaucgguuugcaaca

SEQ ID NO: 1878564 - RNA, 19 nt, Artificial Sequence
  Description of Artificial Sequence: Synthetic oligonucleotide
  Antisense strand to SEQ ID NO: 1878563
uguugcaaaccgaucugag

SEQ ID NO: 1878565 - RNA, 19 nt, Artificial Sequence
  Description of Artificial Sequence: Synthetic oligonucleotide
  Sense strand starting at position 1288 of SEQ ID NO: 1564487
uugucaucaacaugggaag

SEQ ID NO: 1878566 - RNA, 19 nt, Artificial Sequence
  Description of Artificial Sequence: Synthetic oligonucleotide
  Antisense strand to SEQ ID NO: 1878565
cuucccauguugaugacaa

SEQ ID NO: 1878567 - RNA, 19 nt, Artificial Sequence
  Description of Artificial Sequence: Synthetic oligonucleotide
  Sense strand starting at position 1355 of SEQ ID NO: 1564487
guugcugcucagggagaua

SEQ ID NO: 1878568 - RNA, 19 nt, Artificial Sequence
  Description of Artificial Sequence: Synthetic oligonucleotide
  Antisense strand to SEQ ID NO: 1878567
uaucucccugagcagcaac

SEQ ID NO: 1878569 - RNA, 19 nt, Artificial Sequence
  Description of Artificial Sequence: Synthetic oligonucleotide
  Sense strand starting at position 1769 of SEQ ID NO: 1564487
gaggcuucuugugaggaaa

SEQ ID NO: 1878570 - RNA, 19 nt, Artificial Sequence
  Description of Artificial Sequence: Synthetic oligonucleotide
  Antisense strand to SEQ ID NO: 1878569
uuuccucacaagaagccuc

SEQ ID NO: 1878571 - RNA, 19 nt, Artificial Sequence
  Description of Artificial Sequence: Synthetic oligonucleotide
  Sense strand starting at position 1771 of SEQ ID NO: 1564487
ggcuucuugugaggaaaga

SEQ ID NO: 1878572 - RNA, 19 nt, Artificial Sequence
  Description of Artificial Sequence: Synthetic oligonucleotide
  Antisense strand to SEQ ID NO: 1878571
ucuuuccucacaagaagcc

SEQ ID NO: 1878573 - RNA, 19 nt, Artificial Sequence
  Description of Artificial Sequence: Synthetic oligonucleotide
  Sense strand starting at position 2092 of SEQ ID NO: 1564487
aaggccuuauacgucauaa

SEQ ID NO: 1878574 - RNA, 19 nt, Artificial Sequence
  Description of Artificial Sequence: Synthetic oligonucleotide
  Antisense strand to SEQ ID NO: 1878573
uuaugacguauaaggccuu

SEQ ID NO: 1878575 - RNA, 19 nt, Artificial Sequence
  Description of Artificial Sequence: Synthetic oligonucleotide
  Sense strand starting at position 2094 of SEQ ID NO: 1564487
ggccuuauacgucauaaag

SEQ ID NO: 1878576 - RNA, 19 nt, Artificial Sequence
  Description of Artificial Sequence: Synthetic oligonucleotide
  Antisense strand to SEQ ID NO: 1878575
cuuuaugacguauaaggcc

SEQ ID NO: 1878577 - RNA, 19 nt, Artificial Sequence
  Description of Artificial Sequence: Synthetic oligonucleotide
  Sense strand starting at position 2156 of SEQ ID NO: 1564487
ggcggugacaucuaaugag

SEQ ID NO: 1878578 - RNA, 19 nt, Artificial Sequence
  Description of Artificial Sequence: Synthetic oligonucleotide
  Antisense strand to SEQ ID NO: 1878577
cucauuagaugucaccgcc

SEQ ID NO: 1878579 - RNA, 19 nt, Artificial Sequence
  Description of Artificial Sequence: Synthetic oligonucleotide
  Sense strand starting at position 2183 of SEQ ID NO: 1564487
ggugcucuaguuggagaaa

SEQ ID NO: 1878580 - RNA, 19 nt, Artificial Sequence
  Description of Artificial Sequence: Synthetic oligonucleotide
  Antisense strand to SEQ ID NO: 1878579
uuucuccaacuagagcacc

SEQ ID NO: 1878581 - RNA, 19 nt, Artificial Sequence
  Description of Artificial Sequence: Synthetic oligonucleotide
  Sense strand starting at position 2184 of SEQ ID NO: 1564487
gugcucuaguuggagaaag

SEQ ID NO: 1878582 - RNA, 19 nt, Artificial Sequence
  Description of Artificial Sequence: Synthetic oligonucleotide
  Antisense strand to SEQ ID NO: 1878581
cuuucuccaacuagagcac

SEQ ID NO: 1878583 - RNA, 19 nt, Artificial Sequence
  Description of Artificial Sequence: Synthetic oligonucleotide
  Sense strand starting at position 2438 of SEQ ID NO: 1564487
guacgaagacgucagucau

SEQ ID NO: 1878584 - RNA, 19 nt, Artificial Sequence
  Description of Artificial Sequence: Synthetic oligonucleotide
  Antisense strand to SEQ ID NO: 1878583
augacugacgucuucguac

SEQ ID NO: 1878585 - RNA, 19 nt, Artificial Sequence
  Description of Artificial Sequence: Synthetic oligonucleotide
  Sense strand starting at position 2600 of SEQ ID NO: 1564487
gcuuccagaggucaagauu

SEQ ID NO: 1878586 - RNA, 19 nt, Artificial Sequence
  Description of Artificial Sequence: Synthetic oligonucleotide
  Antisense strand to SEQ ID NO: 1878585
aaucuugaccucuggaagc

SEQ ID NO: 1878587 - RNA, 19 nt, Artificial Sequence
  Description of Artificial Sequence: Synthetic oligonucleotide
  Sense strand starting at position 2863 of SEQ ID NO: 1564487
ggucuaggcagcugaaaug

SEQ ID NO: 1878588 - RNA, 19 nt, Artificial Sequence
  Description of Artificial Sequence: Synthetic oligonucleotide
  Antisense strand to SEQ ID NO: 1878587
cauuucagcugccuagacc

SEQ ID NO: 1878589 - RNA, 19 nt, Artificial Sequence
  Description of Artificial Sequence: Synthetic oligonucleotide
  Sense strand starting at position 2875 of SEQ ID NO: 1564487
ugaaauguauagggcaagu

SEQ ID NO: 1878590 - RNA, 19 nt, Artificial Sequence
  Description of Artificial Sequence: Synthetic oligonucleotide
  Antisense strand to SEQ ID NO: 1878589
acuugcccuauacauuuca

SEQ ID NO: 1878591 - RNA, 19 nt, Artificial Sequence
  Description of Artificial Sequence: Synthetic oligonucleotide
  Sense strand starting at position 2892 of SEQ ID NO: 1564487
gugagcauccuggaaacua

SEQ ID NO: 1878592 - RNA, 19 nt, Artificial Sequence
  Description of Artificial Sequence: Synthetic oligonucleotide
  Antisense strand to SEQ ID NO: 1878591
uaguuuccaggaugcucac

SEQ ID NO: 1878593 - RNA, 19 nt, Artificial Sequence
  Description of Artificial Sequence: Synthetic oligonucleotide
  Sense strand starting at position 2950 of SEQ ID NO: 1564487
cacgcuaugguuugggaga

SEQ ID NO: 1878594 - RNA, 19 nt, Artificial Sequence
  Description of Artificial Sequence: Synthetic oligonucleotide
  Antisense strand to SEQ ID NO: 1878593
ucucccaaaccauagcgug

SEQ ID NO: 1878595 - RNA, 19 nt, Artificial Sequence
  Description of Artificial Sequence: Synthetic oligonucleotide
  Sense strand starting at position 2996 of SEQ ID NO: 1564487
augaguuaauauccaaagu

SEQ ID NO: 1878596 - RNA, 19 nt, Artificial Sequence
  Description of Artificial Sequence: Synthetic oligonucleotide
  Antisense strand to SEQ ID NO: 1878595
acuuuggauauuaacucau

SEQ ID NO: 1878597 - RNA, 19 nt, Artificial Sequence
  Description of Artificial Sequence: Synthetic oligonucleotide
  Sense strand starting at position 3041 of SEQ ID NO: 1564487
gcaaauaaauaguaugguu

SEQ ID NO: 1878598 - RNA, 19 nt, Artificial Sequence
  Description of Artificial Sequence: Synthetic oligonucleotide
  Antisense strand to SEQ ID NO: 1878597
aaccauacuauuuauuugc

SEQ ID NO: 1878599 - RNA, 19 nt, Artificial Sequence
  Description of Artificial Sequence: Synthetic oligonucleotide
  Sense strand starting at position 3247 of SEQ ID NO: 1564487
guauaauuguuccuuggaa

SEQ ID NO: 1878600 - RNA, 19 nt, Artificial Sequence
  Description of Artificial Sequence: Synthetic oligonucleotide
  Antisense strand to SEQ ID NO: 1878599
uuccaaggaacaauuauac

SEQ ID NO: 1878601 - RNA, 19 nt, Artificial Sequence
  Description of Artificial Sequence: Synthetic oligonucleotide
  Sense strand starting at position 3298 of SEQ ID NO: 1564487
cucaucuguugaguaugua

SEQ ID NO: 1878602 - RNA, 19 nt, Artificial Sequence
  Description of Artificial Sequence: Synthetic oligonucleotide
  Antisense strand to SEQ ID NO: 1878601
uacauacucaacagaugag

SEQ ID NO: 1878603 - RNA, 19 nt, Artificial Sequence
  Description of Artificial Sequence: Synthetic oligonucleotide
  Sense strand starting at position 3335 of SEQ ID NO: 1564487
guccacaucucauacagau

SEQ ID NO: 1878604 - RNA, 19 nt, Artificial Sequence
  Description of Artificial Sequence: Synthetic oligonucleotide
  Antisense strand to SEQ ID NO: 1878603
aucuguaugagauguggac

SEQ ID NO: 1878605 - RNA, 19 nt, Artificial Sequence
  Description of Artificial Sequence: Synthetic oligonucleotide
  Sense strand starting at position 3542 of SEQ ID NO: 1564487
gagaaauauugaggagaau

SEQ ID NO: 1878606 - RNA, 19 nt, Artificial Sequence
  Description of Artificial Sequence: Synthetic oligonucleotide
  Antisense strand to SEQ ID NO: 1878605
auucuccucaauauuucuc

SEQ ID NO: 1878607 - RNA, 19 nt, Artificial Sequence
  Description of Artificial Sequence: Synthetic oligonucleotide
  Sense strand starting at position 3601 of SEQ ID NO: 1564487
uagggaggauucuguauuu

SEQ ID NO: 1878608 - RNA, 19 nt, Artificial Sequence
  Description of Artificial Sequence: Synthetic oligonucleotide
  Antisense strand to SEQ ID NO: 1878607
aaauacagaauccucccua

SEQ ID NO: 1878609 - RNA, 19 nt, Artificial Sequence
  Description of Artificial Sequence: Synthetic oligonucleotide
  Sense strand starting at position 3631 of SEQ ID NO: 1564487
agguaacucuaguuaccau

SEQ ID NO: 1878610 - RNA, 19 nt, Artificial Sequence
  Description of Artificial Sequence: Synthetic oligonucleotide
  Antisense strand to SEQ ID NO: 1878609
augguaacuagaguuaccu

SEQ ID NO: 1878611 - RNA, 19 nt, Artificial Sequence
  Description of Artificial Sequence: Synthetic oligonucleotide
  Sense strand starting at position 3641 of SEQ ID NO: 1564487
aguuaccauauccguagua

SEQ ID NO: 1878612 - RNA, 19 nt, Artificial Sequence
  Description of Artificial Sequence: Synthetic oligonucleotide
  Antisense strand to SEQ ID NO: 1878611
uacuacggauaugguaacu

SEQ ID NO: 1878613 - RNA, 19 nt, Artificial Sequence
  Description of Artificial Sequence: Synthetic oligonucleotide
  Sense strand starting at position 3650 of SEQ ID NO: 1564487
auccguaguaccuagucaa

SEQ ID NO: 1878614 - RNA, 19 nt, Artificial Sequence
  Description of Artificial Sequence: Synthetic oligonucleotide
  Antisense strand to SEQ ID NO: 1878613
uugacuagguacuacggau

SEQ ID NO: 1878615 - RNA, 19 nt, Artificial Sequence
  Description of Artificial Sequence: Synthetic oligonucleotide
  Sense strand starting at position 3653 of SEQ ID NO: 1564487
cguaguaccuagucaacaa

SEQ ID NO: 1878616 - RNA, 19 nt, Artificial Sequence
  Description of Artificial Sequence: Synthetic oligonucleotide
  Antisense strand to SEQ ID NO: 1878615
uuguugacuagguacuacg

SEQ ID NO: 1878617 - RNA, 19 nt, Artificial Sequence
  Description of Artificial Sequence: Synthetic oligonucleotide
  Sense strand starting at position 3701 of SEQ ID NO: 1564487
uggagugguuacuaaacuu

SEQ ID NO: 1878618 - RNA, 19 nt, Artificial Sequence
  Description of Artificial Sequence: Synthetic oligonucleotide
  Antisense strand to SEQ ID NO: 1878617
aaguuuaguaaccacucca

SEQ ID NO: 1878619 - RNA, 19 nt, Artificial Sequence
  Description of Artificial Sequence: Synthetic oligonucleotide
  Sense strand starting at position 3727 of SEQ ID NO: 1564487
ucaaccaguuuccuaguaa

SEQ ID NO: 1878620 - RNA, 19 nt, Artificial Sequence
  Description of Artificial Sequence: Synthetic oligonucleotide
  Antisense strand to SEQ ID NO: 1878619
uuacuaggaaacugguuga

SEQ ID NO: 1878621 - RNA, 19 nt, Artificial Sequence
  Description of Artificial Sequence: Synthetic oligonucleotide
  Sense strand starting at position 3741 of SEQ ID NO: 1564487
aguaauugcuaguuguuua

SEQ ID NO: 1878622 - RNA, 19 nt, Artificial Sequence
  Description of Artificial Sequence: Synthetic oligonucleotide
  Antisense strand to SEQ ID NO: 1878621
uaaacaacuagcaauuacu

SEQ ID NO: 1878623 - RNA, 19 nt, Artificial Sequence
  Description of Artificial Sequence: Synthetic oligonucleotide
  Sense strand starting at position 3742 of SEQ ID NO: 1564487
guaauugcuaguuguuuau

SEQ ID NO: 1878624 - RNA, 19 nt, Artificial Sequence
  Description of Artificial Sequence: Synthetic oligonucleotide
  Antisense strand to SEQ ID NO: 1878623
auaaacaacuagcaauuac

SEQ ID NO: 1878625 - RNA, 19 nt, Artificial Sequence
  Description of Artificial Sequence: Synthetic oligonucleotide
  Sense strand starting at position 3848 of SEQ ID NO: 1564487
aagcuacuguauuagguaa

SEQ ID NO: 1878626 - RNA, 19 nt, Artificial Sequence
  Description of Artificial Sequence: Synthetic oligonucleotide
  Antisense strand to SEQ ID NO: 1878625
uuaccuaauacaguagcuu

SEQ ID NO: 1878627 - RNA, 19 nt, Artificial Sequence
  Description of Artificial Sequence: Synthetic oligonucleotide
  Sense strand starting at position 3861 of SEQ ID NO: 1564487
agguaauacuucuaacaug

SEQ ID NO: 1878628 - RNA, 19 nt, Artificial Sequence
  Description of Artificial Sequence: Synthetic oligonucleotide
  Antisense strand to SEQ ID NO: 1878627
cauguuagaaguauuaccu

SEQ ID NO: 1878629 - RNA, 19 nt, Artificial Sequence
  Description of Artificial Sequence: Synthetic oligonucleotide
  Sense strand starting at position 55 of SEQ ID NO: 1564488
gauggaaaccauuguacca

SEQ ID NO: 1878630 - RNA, 19 nt, Artificial Sequence
  Description of Artificial Sequence: Synthetic oligonucleotide
  Antisense strand to SEQ ID NO: 1878629
ugguacaaugguuuccauc

SEQ ID NO: 1878631 - RNA, 19 nt, Artificial Sequence
  Description of Artificial Sequence: Synthetic oligonucleotide
  Sense strand starting at position 65 of SEQ ID NO: 1564488
auuguaccaucaguuuaua

SEQ ID NO: 1878632 - RNA, 19 nt, Artificial Sequence
  Description of Artificial Sequence: Synthetic oligonucleotide
  Antisense strand to SEQ ID NO: 1878631
uauaaacugaugguacaau

SEQ ID NO: 1878633 - RNA, 19 nt, Artificial Sequence
  Description of Artificial Sequence: Synthetic oligonucleotide
  Sense strand starting at position 68 of SEQ ID NO: 1564488
guaccaucaguuuauauug

SEQ ID NO: 1878634 - RNA, 19 nt, Artificial Sequence
  Description of Artificial Sequence: Synthetic oligonucleotide
  Antisense strand to SEQ ID NO: 1878633
caauauaaacugaugguac

SEQ ID NO: 1878635 - RNA, 19 nt, Artificial Sequence
  Description of Artificial Sequence: Synthetic oligonucleotide
  Sense strand starting at position 73 of SEQ ID NO: 1564488
aucaguuuauauugaggaa

SEQ ID NO: 1878636 - RNA, 19 nt, Artificial Sequence
  Description of Artificial Sequence: Synthetic oligonucleotide
  Antisense strand to SEQ ID NO: 1878635
uuccucaauauaaacugau

SEQ ID NO: 1878637 - RNA, 19 nt, Artificial Sequence
  Description of Artificial Sequence: Synthetic oligonucleotide
  Sense strand starting at position 145 of SEQ ID NO: 1564488
gugcuugugcuggcaggau

SEQ ID NO: 1878638 - RNA, 19 nt, Artificial Sequence
  Description of Artificial Sequence: Synthetic oligonucleotide
  Antisense strand to SEQ ID NO: 1878637
auccugccagcacaagcac

SEQ ID NO: 1878639 - RNA, 19 nt, Artificial Sequence
  Description of Artificial Sequence: Synthetic oligonucleotide
  Sense strand starting at position 154 of SEQ ID NO: 1564488
cuggcaggauugcaagaaa

SEQ ID NO: 1878640 - RNA, 19 nt, Artificial Sequence
  Description of Artificial Sequence: Synthetic oligonucleotide
  Antisense strand to SEQ ID NO: 1878639
uuucuugcaauccugccag

SEQ ID NO: 1878641 - RNA, 19 nt, Artificial Sequence
  Description of Artificial Sequence: Synthetic oligonucleotide
  Sense strand starting at position 249 of SEQ ID NO: 1564488
uaugcuccugucuggcaaa

SEQ ID NO: 1878642 - RNA, 19 nt, Artificial Sequence
  Description of Artificial Sequence: Synthetic oligonucleotide
  Antisense strand to SEQ ID NO: 1878641
uuugccagacaggagcaua

SEQ ID NO: 1878643 - RNA, 19 nt, Artificial Sequence
  Description of Artificial Sequence: Synthetic oligonucleotide
  Sense strand starting at position 1259 of SEQ ID NO: 1564488
cucagaucgguuugcaaca

SEQ ID NO: 1878644 - RNA, 19 nt, Artificial Sequence
  Description of Artificial Sequence: Synthetic oligonucleotide
  Antisense strand to SEQ ID NO: 1878643
uguugcaaaccgaucugag

SEQ ID NO: 1878645 - RNA, 19 nt, Artificial Sequence
  Description of Artificial Sequence: Synthetic oligonucleotide
  Sense strand starting at position 1662 of SEQ ID NO: 1564488
acagaagggcucugguuua

SEQ ID NO: 1878646 - RNA, 19 nt, Artificial Sequence
  Description of Artificial Sequence: Synthetic oligonucleotide
  Antisense strand to SEQ ID NO: 1878645
uaaaccagagcccuucugu

SEQ ID NO: 1878647 - RNA, 19 nt, Artificial Sequence
  Description of Artificial Sequence: Synthetic oligonucleotide
  Sense strand starting at position 1770 of SEQ ID NO: 1564488
gaggcuucuugugaggaaa

SEQ ID NO: 1878648 - RNA, 19 nt, Artificial Sequence
  Description of Artificial Sequence: Synthetic oligonucleotide
  Antisense strand to SEQ ID NO: 1878647
uuuccucacaagaagccuc

SEQ ID NO: 1878649 - RNA, 19 nt, Artificial Sequence
  Description of Artificial Sequence: Synthetic oligonucleotide
  Sense strand starting at position 2093 of SEQ ID NO: 1564488
aaggccuuauacgucauaa

SEQ ID NO: 1878650 - RNA, 19 nt, Artificial Sequence
  Description of Artificial Sequence: Synthetic oligonucleotide
  Antisense strand to SEQ ID NO: 1878649
uuaugacguauaaggccuu

SEQ ID NO: 1878651 - RNA, 19 nt, Artificial Sequence
  Description of Artificial Sequence: Synthetic oligonucleotide
  Sense strand starting at position 2095 of SEQ ID NO: 1564488
ggccuuauacgucauaaag

SEQ ID NO: 1878652 - RNA, 19 nt, Artificial Sequence
  Description of Artificial Sequence: Synthetic oligonucleotide
  Antisense strand to SEQ ID NO: 1878651
cuuuaugacguauaaggcc

SEQ ID NO: 1878653 - RNA, 19 nt, Artificial Sequence
  Description of Artificial Sequence: Synthetic oligonucleotide
  Sense strand starting at position 2157 of SEQ ID NO: 1564488
ggcggugacaucuaaugag

SEQ ID NO: 1878654 - RNA, 19 nt, Artificial Sequence
  Description of Artificial Sequence: Synthetic oligonucleotide
  Antisense strand to SEQ ID NO: 1878653
cucauuagaugucaccgcc

SEQ ID NO: 1878655 - RNA, 19 nt, Artificial Sequence
  Description of Artificial Sequence: Synthetic oligonucleotide
  Sense strand starting at position 2183 of SEQ ID NO: 1564488
gggugcucuaguuggagaa

SEQ ID NO: 1878656 - RNA, 19 nt, Artificial Sequence
  Description of Artificial Sequence: Synthetic oligonucleotide
  Antisense strand to SEQ ID NO: 1878655
uucuccaacuagagcaccc

SEQ ID NO: 1878657 - RNA, 19 nt, Artificial Sequence
  Description of Artificial Sequence: Synthetic oligonucleotide
  Sense strand starting at position 2184 of SEQ ID NO: 1564488
ggugcucuaguuggagaaa

SEQ ID NO: 1878658 - RNA, 19 nt, Artificial Sequence
  Description of Artificial Sequence: Synthetic oligonucleotide
  Antisense strand to SEQ ID NO: 1878657
uuucuccaacuagagcacc

SEQ ID NO: 1878659 - RNA, 19 nt, Artificial Sequence
  Description of Artificial Sequence: Synthetic oligonucleotide
  Sense strand starting at position 2380 of SEQ ID NO: 1564488
ccaguuucuguauguccua

SEQ ID NO: 1878660 - RNA, 19 nt, Artificial Sequence
  Description of Artificial Sequence: Synthetic oligonucleotide
  Antisense strand to SEQ ID NO: 1878659
uaggacauacagaaacugg

SEQ ID NO: 1878661 - RNA, 19 nt, Artificial Sequence
  Description of Artificial Sequence: Synthetic oligonucleotide
  Sense strand starting at position 2439 of SEQ ID NO: 1564488
guacgaagacgucagucau

SEQ ID NO: 1878662 - RNA, 19 nt, Artificial Sequence
  Description of Artificial Sequence: Synthetic oligonucleotide
  Antisense strand to SEQ ID NO: 1878661
augacugacgucuucguac

SEQ ID NO: 1878663 - RNA, 19 nt, Artificial Sequence
  Description of Artificial Sequence: Synthetic oligonucleotide
  Sense strand starting at position 2601 of SEQ ID NO: 1564488
gcuuccagaggucaagauu

SEQ ID NO: 1878664 - RNA, 19 nt, Artificial Sequence
  Description of Artificial Sequence: Synthetic oligonucleotide
  Antisense strand to SEQ ID NO: 1878663
aaucuugaccucuggaagc

SEQ ID NO: 1878665 - RNA, 19 nt, Artificial Sequence
  Description of Artificial Sequence: Synthetic oligonucleotide
  Sense strand starting at position 2864 of SEQ ID NO: 1564488
ggucuaggcagcugaaaug

SEQ ID NO: 1878666 - RNA, 19 nt, Artificial Sequence
  Description of Artificial Sequence: Synthetic oligonucleotide
  Antisense strand to SEQ ID NO: 1878665
cauuucagcugccuagacc

SEQ ID NO: 1878667 - RNA, 19 nt, Artificial Sequence
  Description of Artificial Sequence: Synthetic oligonucleotide
  Sense strand starting at position 2893 of SEQ ID NO: 1564488
gugagcauccuggaaacua

SEQ ID NO: 1878668 - RNA, 19 nt, Artificial Sequence
  Description of Artificial Sequence: Synthetic oligonucleotide
  Antisense strand to SEQ ID NO: 1878667
uaguuuccaggaugcucac

SEQ ID NO: 1878669 - RNA, 19 nt, Artificial Sequence
  Description of Artificial Sequence: Synthetic oligonucleotide
  Sense strand starting at position 2951 of SEQ ID NO: 1564488
cacgcuaugguuugggaga

SEQ ID NO: 1878670 - RNA, 19 nt, Artificial Sequence
  Description of Artificial Sequence: Synthetic oligonucleotide
  Antisense strand to SEQ ID NO: 1878669
ucucccaaaccauagcgug

SEQ ID NO: 1878671 - RNA, 19 nt, Artificial Sequence
  Description of Artificial Sequence: Synthetic oligonucleotide
  Sense strand starting at position 2956 of SEQ ID NO: 1564488
uaugguuugggagaagcua

SEQ ID NO: 1878672 - RNA, 19 nt, Artificial Sequence
  Description of Artificial Sequence: Synthetic oligonucleotide
  Antisense strand to SEQ ID NO: 1878671
uagcuucucccaaaccaua

SEQ ID NO: 1878673 - RNA, 19 nt, Artificial Sequence
  Description of Artificial Sequence: Synthetic oligonucleotide
  Sense strand starting at position 2967 of SEQ ID NO: 1564488
agaagcuauuugcgaacca

SEQ ID NO: 1878674 - RNA, 19 nt, Artificial Sequence
  Description of Artificial Sequence: Synthetic oligonucleotide
  Antisense strand to SEQ ID NO: 1878673
ugguucgcaaauagcuucu

SEQ ID NO: 1878675 - RNA, 19 nt, Artificial Sequence
  Description of Artificial Sequence: Synthetic oligonucleotide
  Sense strand starting at position 2968 of SEQ ID NO: 1564488
gaagcuauuugcgaaccau

SEQ ID NO: 1878676 - RNA, 19 nt, Artificial Sequence
  Description of Artificial Sequence: Synthetic oligonucleotide
  Antisense strand to SEQ ID NO: 1878675
augguucgcaaauagcuuc

SEQ ID NO: 1878677 - RNA, 19 nt, Artificial Sequence
  Description of Artificial Sequence: Synthetic oligonucleotide
  Sense strand starting at position 2997 of SEQ ID NO: 1564488
augaguuaauauccaaagu

SEQ ID NO: 1878678 - RNA, 19 nt, Artificial Sequence
  Description of Artificial Sequence: Synthetic oligonucleotide
  Antisense strand to SEQ ID NO: 1878677
acuuuggauauuaacucau

SEQ ID NO: 1878679 - RNA, 19 nt, Artificial Sequence
  Description of Artificial Sequence: Synthetic oligonucleotide
  Sense strand starting at position 3248 of SEQ ID NO: 1564488
guauaauuguuccuuggaa

SEQ ID NO: 1878680 - RNA, 19 nt, Artificial Sequence
  Description of Artificial Sequence: Synthetic oligonucleotide
  Antisense strand to SEQ ID NO: 1878679
uuccaaggaacaauuauac

SEQ ID NO: 1878681 - RNA, 19 nt, Artificial Sequence
  Description of Artificial Sequence: Synthetic oligonucleotide
  Sense strand starting at position 3299 of SEQ ID NO: 1564488
cucaucuguugaguaugua

SEQ ID NO: 1878682 - RNA, 19 nt, Artificial Sequence
  Description of Artificial Sequence: Synthetic oligonucleotide
  Antisense strand to SEQ ID NO: 1878681
uacauacucaacagaugag

SEQ ID NO: 1878683 - RNA, 19 nt, Artificial Sequence
  Description of Artificial Sequence: Synthetic oligonucleotide
  Sense strand starting at position 3336 of SEQ ID NO: 1564488
guccacaucucauacagau

SEQ ID NO: 1878684 - RNA, 19 nt, Artificial Sequence
  Description of Artificial Sequence: Synthetic oligonucleotide
  Antisense strand to SEQ ID NO: 1878683
aucuguaugagauguggac

SEQ ID NO: 1878685 - RNA, 19 nt, Artificial Sequence
  Description of Artificial Sequence: Synthetic oligonucleotide
  Sense strand starting at position 3543 of SEQ ID NO: 1564488
gagaaauauugaggagaau

SEQ ID NO: 1878686 - RNA, 19 nt, Artificial Sequence
  Description of Artificial Sequence: Synthetic oligonucleotide
  Antisense strand to SEQ ID NO: 1878685
auucuccucaauauuucuc

SEQ ID NO: 1878687 - RNA, 19 nt, Artificial Sequence
  Description of Artificial Sequence: Synthetic oligonucleotide
  Sense strand starting at position 3602 of SEQ ID NO: 1564488
uagggaggauucuguauuu

SEQ ID NO: 1878688 - RNA, 19 nt, Artificial Sequence
  Description of Artificial Sequence: Synthetic oligonucleotide
  Antisense strand to SEQ ID NO: 1878687
aaauacagaauccucccua

SEQ ID NO: 1878689 - RNA, 19 nt, Artificial Sequence
  Description of Artificial Sequence: Synthetic oligonucleotide
  Sense strand starting at position 3642 of SEQ ID NO: 1564488
aguuaccauauccguagua

SEQ ID NO: 1878690 - RNA, 19 nt, Artificial Sequence
  Description of Artificial Sequence: Synthetic oligonucleotide
  Antisense strand to SEQ ID NO: 1878689
uacuacggauaugguaacu

SEQ ID NO: 1878691 - RNA, 19 nt, Artificial Sequence
  Description of Artificial Sequence: Synthetic oligonucleotide
  Sense strand starting at position 3651 of SEQ ID NO: 1564488
auccguaguaccuagucaa

SEQ ID NO: 1878692 - RNA, 19 nt, Artificial Sequence
  Description of Artificial Sequence: Synthetic oligonucleotide
  Antisense strand to SEQ ID NO: 1878691
uugacuagguacuacggau

SEQ ID NO: 1878693 - RNA, 19 nt, Artificial Sequence
  Description of Artificial Sequence: Synthetic oligonucleotide
  Sense strand starting at position 3654 of SEQ ID NO: 1564488
cguaguaccuagucaacaa

SEQ ID NO: 1878694 - RNA, 19 nt, Artificial Sequence
  Description of Artificial Sequence: Synthetic oligonucleotide
  Antisense strand to SEQ ID NO: 1878693
uuguugacuagguacuacg

SEQ ID NO: 1878695 - RNA, 19 nt, Artificial Sequence
  Description of Artificial Sequence: Synthetic oligonucleotide
  Sense strand starting at position 3702 of SEQ ID NO: 1564488
uggagugguuacuaaacuu

SEQ ID NO: 1878696 - RNA, 19 nt, Artificial Sequence
  Description of Artificial Sequence: Synthetic oligonucleotide
  Antisense strand to SEQ ID NO: 1878695
aaguuuaguaaccacucca

SEQ ID NO: 1878697 - RNA, 19 nt, Artificial Sequence
  Description of Artificial Sequence: Synthetic oligonucleotide
  Sense strand starting at position 3728 of SEQ ID NO: 1564488
ucaaccaguuuccuaguaa

SEQ ID NO: 1878698 - RNA, 19 nt, Artificial Sequence
  Description of Artificial Sequence: Synthetic oligonucleotide
  Antisense strand to SEQ ID NO: 1878697
uuacuaggaaacugguuga

SEQ ID NO: 1878699 - RNA, 19 nt, Artificial Sequence
  Description of Artificial Sequence: Synthetic oligonucleotide
  Sense strand starting at position 3805 of SEQ ID NO: 1564488
ucauguaguuaucucuagu

SEQ ID NO: 1878700 - RNA, 19 nt, Artificial Sequence
  Description of Artificial Sequence: Synthetic oligonucleotide
  Antisense strand to SEQ ID NO: 1878699
acuagagauaacuacauga

SEQ ID NO: 1878701 - RNA, 19 nt, Artificial Sequence
  Description of Artificial Sequence: Synthetic oligonucleotide
  Sense strand starting at position 3808 of SEQ ID NO: 1564488
uguaguuaucucuaguuaa

SEQ ID NO: 1878702 - RNA, 19 nt, Artificial Sequence
  Description of Artificial Sequence: Synthetic oligonucleotide
  Antisense strand to SEQ ID NO: 1878701
uuaacuagagauaacuaca

SEQ ID NO: 1878703 - RNA, 19 nt, Artificial Sequence
  Description of Artificial Sequence: Synthetic oligonucleotide
  Sense strand starting at position 3822 of SEQ ID NO: 1564488
guuaauuacuuacuuggau

SEQ ID NO: 1878704 - RNA, 19 nt, Artificial Sequence
  Description of Artificial Sequence: Synthetic oligonucleotide
  Antisense strand to SEQ ID NO: 1878703
auccaaguaaguaauuaac

SEQ ID NO: 1878705 - RNA, 19 nt, Artificial Sequence
  Description of Artificial Sequence: Synthetic oligonucleotide
  Sense strand starting at position 3862 of SEQ ID NO: 1564488
agguaauacuucuaacaug

SEQ ID NO: 1878706 - RNA, 19 nt, Artificial Sequence
  Description of Artificial Sequence: Synthetic oligonucleotide
  Antisense strand to SEQ ID NO: 1878705
cauguuagaaguauuaccu

SEQ ID NO: 1878707 - RNA, 19 nt, Artificial Sequence
  Description of Artificial Sequence: Synthetic oligonucleotide
  Sense strand starting at position 3971 of SEQ ID NO: 1564488
ggcuaauucuagcuaucuu

SEQ ID NO: 1878708 - RNA, 19 nt, Artificial Sequence
  Description of Artificial Sequence: Synthetic oligonucleotide
  Antisense strand to SEQ ID NO: 1878707
aagauagcuagaauuagcc

SEQ ID NO: 1878709 - RNA, 19 nt, Artificial Sequence
  Description of Artificial Sequence: Synthetic oligonucleotide
  Sense strand starting at position 35 of SEQ ID NO: 1564489
cguaucuggaaguagagua

SEQ ID NO: 1878710 - RNA, 19 nt, Artificial Sequence
  Description of Artificial Sequence: Synthetic oligonucleotide
  Antisense strand to SEQ ID NO: 1878709
uacucuacuuccagauacg

SEQ ID NO: 1878711 - RNA, 19 nt, Artificial Sequence
  Description of Artificial Sequence: Synthetic oligonucleotide
  Sense strand starting at position 43 of SEQ ID NO: 1564489
gaaguagaguagcuggauu

SEQ ID NO: 1878712 - RNA, 19 nt, Artificial Sequence
  Description of Artificial Sequence: Synthetic oligonucleotide
  Antisense strand to SEQ ID NO: 1878711
aauccagcuacucuacuuc

SEQ ID NO: 1878713 - RNA, 19 nt, Artificial Sequence
  Description of Artificial Sequence: Synthetic oligonucleotide
  Sense strand starting at position 45 of SEQ ID NO: 1564489
aguagaguagcuggauuau

SEQ ID NO: 1878714 - RNA, 19 nt, Artificial Sequence
  Description of Artificial Sequence: Synthetic oligonucleotide
  Antisense strand to SEQ ID NO: 1878713
auaauccagcuacucuacu

SEQ ID NO: 1878715 - RNA, 19 nt, Artificial Sequence
  Description of Artificial Sequence: Synthetic oligonucleotide
  Sense strand starting at position 232 of SEQ ID NO: 1564489
guguauaugcuauauuaca

SEQ ID NO: 1878716 - RNA, 19 nt, Artificial Sequence
  Description of Artificial Sequence: Synthetic oligonucleotide
  Antisense strand to SEQ ID NO: 1878715
uguaauauagcauauacac

SEQ ID NO: 1878717 - RNA, 19 nt, Artificial Sequence
  Description of Artificial Sequence: Synthetic oligonucleotide
  Sense strand starting at position 529 of SEQ ID NO: 1564489
aguauauauggauauugca

SEQ ID NO: 1878718 - RNA, 19 nt, Artificial Sequence
  Description of Artificial Sequence: Synthetic oligonucleotide
  Antisense strand to SEQ ID NO: 1878717
ugcaauauccauauauacu

SEQ ID NO: 1878719 - RNA, 19 nt, Artificial Sequence
  Description of Artificial Sequence: Synthetic oligonucleotide
  Sense strand starting at position 574 of SEQ ID NO: 1564489
cuucuccaugagugauagu

SEQ ID NO: 1878720 - RNA, 19 nt, Artificial Sequence
  Description of Artificial Sequence: Synthetic oligonucleotide
  Antisense strand to SEQ ID NO: 1878719
acuaucacucauggagaag

SEQ ID NO: 1878721 - RNA, 19 nt, Artificial Sequence
  Description of Artificial Sequence: Synthetic oligonucleotide
  Sense strand starting at position 583 of SEQ ID NO: 1564489
gagugauaguaauuccuca

SEQ ID NO: 1878722 - RNA, 19 nt, Artificial Sequence
  Description of Artificial Sequence: Synthetic oligonucleotide
  Antisense strand to SEQ ID NO: 1878721
ugaggaauuacuaucacuc

SEQ ID NO: 1878723 - RNA, 19 nt, Artificial Sequence
  Description of Artificial Sequence: Synthetic oligonucleotide
  Sense strand starting at position 587 of SEQ ID NO: 1564489
gauaguaauuccucagcug

SEQ ID NO: 1878724 - RNA, 19 nt, Artificial Sequence
  Description of Artificial Sequence: Synthetic oligonucleotide
  Antisense strand to SEQ ID NO: 1878723
cagcugaggaauuacuauc

SEQ ID NO: 1878725 - RNA, 19 nt, Artificial Sequence
  Description of Artificial Sequence: Synthetic oligonucleotide
  Sense strand starting at position 780 of SEQ ID NO: 1564489
ggcaauuauugagucacaa

SEQ ID NO: 1878726 - RNA, 19 nt, Artificial Sequence
  Description of Artificial Sequence: Synthetic oligonucleotide
  Antisense strand to SEQ ID NO: 1878725
uugugacucaauaauugcc

SEQ ID NO: 1878727 - RNA, 19 nt, Artificial Sequence
  Description of Artificial Sequence: Synthetic oligonucleotide
  Sense strand starting at position 792 of SEQ ID NO: 1564489
gucacaacacuucgguaaa

SEQ ID NO: 1878728 - RNA, 19 nt, Artificial Sequence
  Description of Artificial Sequence: Synthetic oligonucleotide
  Antisense strand to SEQ ID NO: 1878727
uuuaccgaaguguugugac

SEQ ID NO: 1878729 - RNA, 19 nt, Artificial Sequence
  Description of Artificial Sequence: Synthetic oligonucleotide
  Sense strand starting at position 862 of SEQ ID NO: 1564489
aacugaaaucuguagugua

SEQ ID NO: 1878730 - RNA, 19 nt, Artificial Sequence
  Description of Artificial Sequence: Synthetic oligonucleotide
  Antisense strand to SEQ ID NO: 1878729
uacacuacagauuucaguu

SEQ ID NO: 1878731 - RNA, 19 nt, Artificial Sequence
  Description of Artificial Sequence: Synthetic oligonucleotide
  Sense strand starting at position 867 of SEQ ID NO: 1564489
aaaucuguaguguaggauu

SEQ ID NO: 1878732 - RNA, 19 nt, Artificial Sequence
  Description of Artificial Sequence: Synthetic oligonucleotide
  Antisense strand to SEQ ID NO: 1878731
aauccuacacuacagauuu

SEQ ID NO: 1878733 - RNA, 19 nt, Artificial Sequence
  Description of Artificial Sequence: Synthetic oligonucleotide
  Sense strand starting at position 972 of SEQ ID NO: 1564489
auacuagcaugauuaagau

SEQ ID NO: 1878734 - RNA, 19 nt, Artificial Sequence
  Description of Artificial Sequence: Synthetic oligonucleotide
  Antisense strand to SEQ ID NO: 1878733
aucuuaaucaugcuaguau

SEQ ID NO: 1878735 - RNA, 19 nt, Artificial Sequence
  Description of Artificial Sequence: Synthetic oligonucleotide
  Sense strand starting at position 1155 of SEQ ID NO: 1564489
agucacuacaggugagaua

SEQ ID NO: 1878736 - RNA, 19 nt, Artificial Sequence
  Description of Artificial Sequence: Synthetic oligonucleotide
  Antisense strand to SEQ ID NO: 1878735
uaucucaccuguagugacu

SEQ ID NO: 1878737 - RNA, 19 nt, Artificial Sequence
  Description of Artificial Sequence: Synthetic oligonucleotide
  Sense strand starting at position 1166 of SEQ ID NO: 1564489
gugagauaaucaccaacga

SEQ ID NO: 1878738 - RNA, 19 nt, Artificial Sequence
  Description of Artificial Sequence: Synthetic oligonucleotide
  Antisense strand to SEQ ID NO: 1878737
ucguuggugauuaucucac

SEQ ID NO: 1878739 - RNA, 19 nt, Artificial Sequence
  Description of Artificial Sequence: Synthetic oligonucleotide
  Sense strand starting at position 1300 of SEQ ID NO: 1564489
gggaauaugucaucagcaa

SEQ ID NO: 1878740 - RNA, 19 nt, Artificial Sequence
  Description of Artificial Sequence: Synthetic oligonucleotide
  Antisense strand to SEQ ID NO: 1878739
uugcugaugacauauuccc

SEQ ID NO: 1878741 - RNA, 19 nt, Artificial Sequence
  Description of Artificial Sequence: Synthetic oligonucleotide
  Sense strand starting at position 1301 of SEQ ID NO: 1564489
ggaauaugucaucagcaau

SEQ ID NO: 1878742 - RNA, 19 nt, Artificial Sequence
  Description of Artificial Sequence: Synthetic oligonucleotide
  Antisense strand to SEQ ID NO: 1878741
auugcugaugacauauucc

SEQ ID NO: 1878743 - RNA, 19 nt, Artificial Sequence
  Description of Artificial Sequence: Synthetic oligonucleotide
  Sense strand starting at position 1618 of SEQ ID NO: 1564489
uagagacauuuguaucuga

SEQ ID NO: 1878744 - RNA, 19 nt, Artificial Sequence
  Description of Artificial Sequence: Synthetic oligonucleotide
  Antisense strand to SEQ ID NO: 1878743
ucagauacaaaugucucua

SEQ ID NO: 1878745 - RNA, 19 nt, Artificial Sequence
  Description of Artificial Sequence: Synthetic oligonucleotide
  Sense strand starting at position 1740 of SEQ ID NO: 1564489
gaguguaaaguaggaaauu

SEQ ID NO: 1878746 - RNA, 19 nt, Artificial Sequence
  Description of Artificial Sequence: Synthetic oligonucleotide
  Antisense strand to SEQ ID NO: 1878745
aauuuccuacuuuacacuc

SEQ ID NO: 1878747 - RNA, 19 nt, Artificial Sequence
  Description of Artificial Sequence: Synthetic oligonucleotide
  Sense strand starting at position 1769 of SEQ ID NO: 1564489
auaggaggugaaugcaaua

SEQ ID NO: 1878748 - RNA, 19 nt, Artificial Sequence
  Description of Artificial Sequence: Synthetic oligonucleotide
  Antisense strand to SEQ ID NO: 1878747
uauugcauucaccuccuau

SEQ ID NO: 1878749 - RNA, 19 nt, Artificial Sequence
  Description of Artificial Sequence: Synthetic oligonucleotide
  Sense strand starting at position 1832 of SEQ ID NO: 1564489
agcuguggaguucaaguaa

SEQ ID NO: 1878750 - RNA, 19 nt, Artificial Sequence
  Description of Artificial Sequence: Synthetic oligonucleotide
  Antisense strand to SEQ ID NO: 1878749
uuacuugaacuccacagcu

SEQ ID NO: 1878751 - RNA, 19 nt, Artificial Sequence
  Description of Artificial Sequence: Synthetic oligonucleotide
  Sense strand starting at position 1877 of SEQ ID NO: 1564489
ugcugugugauggaauaca

SEQ ID NO: 1878752 - RNA, 19 nt, Artificial Sequence
  Description of Artificial Sequence: Synthetic oligonucleotide
  Antisense strand to SEQ ID NO: 1878751
uguauuccaucacacagca

SEQ ID NO: 1878753 - RNA, 19 nt, Artificial Sequence
  Description of Artificial Sequence: Synthetic oligonucleotide
  Sense strand starting at position 1936 of SEQ ID NO: 1564489
aagugauuugugugggcau

SEQ ID NO: 1878754 - RNA, 19 nt, Artificial Sequence
  Description of Artificial Sequence: Synthetic oligonucleotide
  Antisense strand to SEQ ID NO: 1878753
augcccacacaaaucacuu

SEQ ID NO: 1878755 - RNA, 19 nt, Artificial Sequence
  Description of Artificial Sequence: Synthetic oligonucleotide
  Sense strand starting at position 1938 of SEQ ID NO: 1564489
gugauuugugugggcaugu

SEQ ID NO: 1878756 - RNA, 19 nt, Artificial Sequence
  Description of Artificial Sequence: Synthetic oligonucleotide
  Antisense strand to SEQ ID NO: 1878755
acaugcccacacaaaucac

SEQ ID NO: 1878757 - RNA, 19 nt, Artificial Sequence
  Description of Artificial Sequence: Synthetic oligonucleotide
  Sense strand starting at position 1939 of SEQ ID NO: 1564489
ugauuugugugggcauguu

SEQ ID NO: 1878758 - RNA, 19 nt, Artificial Sequence
  Description of Artificial Sequence: Synthetic oligonucleotide
  Antisense strand to SEQ ID NO: 1878757
aacaugcccacacaaauca

SEQ ID NO: 1878759 - RNA, 19 nt, Artificial Sequence
  Description of Artificial Sequence: Synthetic oligonucleotide
  Sense strand starting at position 1965 of SEQ ID NO: 1564489
guguguacuuagguaauuu

SEQ ID NO: 1878760 - RNA, 19 nt, Artificial Sequence
  Description of Artificial Sequence: Synthetic oligonucleotide
  Antisense strand to SEQ ID NO: 1878759
aaauuaccuaaguacacac

SEQ ID NO: 1878761 - RNA, 19 nt, Artificial Sequence
  Description of Artificial Sequence: Synthetic oligonucleotide
  Sense strand starting at position 2077 of SEQ ID NO: 1564489
guaguagcuguauaaucag

SEQ ID NO: 1878762 - RNA, 19 nt, Artificial Sequence
  Description of Artificial Sequence: Synthetic oligonucleotide
  Antisense strand to SEQ ID NO: 1878761
cugauuauacagcuacuac

SEQ ID NO: 1878763 - RNA, 19 nt, Artificial Sequence
  Description of Artificial Sequence: Synthetic oligonucleotide
  Sense strand starting at position 2342 of SEQ ID NO: 1564489
cugcauuuaugagaaauaa

SEQ ID NO: 1878764 - RNA, 19 nt, Artificial Sequence
  Description of Artificial Sequence: Synthetic oligonucleotide
  Antisense strand to SEQ ID NO: 1878763
uuauuucucauaaaugcag

SEQ ID NO: 1878765 - RNA, 19 nt, Artificial Sequence
  Description of Artificial Sequence: Synthetic oligonucleotide
  Sense strand starting at position 2710 of SEQ ID NO: 1564489
cuaugaucuccgcagaaug

SEQ ID NO: 1878766 - RNA, 19 nt, Artificial Sequence
  Description of Artificial Sequence: Synthetic oligonucleotide
  Antisense strand to SEQ ID NO: 1878765
cauucugcggagaucauag

SEQ ID NO: 1878767 - RNA, 19 nt, Artificial Sequence
  Description of Artificial Sequence: Synthetic oligonucleotide
  Sense strand starting at position 2732 of SEQ ID NO: 1564489
cugaguucccgucaauauu

SEQ ID NO: 1878768 - RNA, 19 nt, Artificial Sequence
  Description of Artificial Sequence: Synthetic oligonucleotide
  Antisense strand to SEQ ID NO: 1878767
aauauugacgggaacucag

SEQ ID NO: 1878769 - RNA, 19 nt, Artificial Sequence
  Description of Artificial Sequence: Synthetic oligonucleotide
  Sense strand starting at position 2892 of SEQ ID NO: 1564489
uuacuccagccaugaaagu

SEQ ID NO: 1878770 - RNA, 19 nt, Artificial Sequence
  Description of Artificial Sequence: Synthetic oligonucleotide
  Antisense strand to SEQ ID NO: 1878769
acuuucauggcuggaguaa

SEQ ID NO: 1878771 - RNA, 19 nt, Artificial Sequence
  Description of Artificial Sequence: Synthetic oligonucleotide
  Sense strand starting at position 2903 of SEQ ID NO: 1564489
augaaagucugcucauuaa

SEQ ID NO: 1878772 - RNA, 19 nt, Artificial Sequence
  Description of Artificial Sequence: Synthetic oligonucleotide
  Antisense strand to SEQ ID NO: 1878771
uuaaugagcagacuuucau

SEQ ID NO: 1878773 - RNA, 19 nt, Artificial Sequence
  Description of Artificial Sequence: Synthetic oligonucleotide
  Sense strand starting at position 3003 of SEQ ID NO: 1564489
acagccuuacuguggaaga

SEQ ID NO: 1878774 - RNA, 19 nt, Artificial Sequence
  Description of Artificial Sequence: Synthetic oligonucleotide
  Antisense strand to SEQ ID NO: 1878773
ucuuccacaguaaggcugu

SEQ ID NO: 1878775 - RNA, 19 nt, Artificial Sequence
  Description of Artificial Sequence: Synthetic oligonucleotide
  Sense strand starting at position 3264 of SEQ ID NO: 1564489
ugaaauuuaucagagaagc

SEQ ID NO: 1878776 - RNA, 19 nt, Artificial Sequence
  Description of Artificial Sequence: Synthetic oligonucleotide
  Antisense strand to SEQ ID NO: 1878775
gcuucucugauaaauuuca

SEQ ID NO: 1878777 - RNA, 19 nt, Artificial Sequence
  Description of Artificial Sequence: Synthetic oligonucleotide
  Sense strand starting at position 3361 of SEQ ID NO: 1564489
aauugacagcagugacaau

SEQ ID NO: 1878778 - RNA, 19 nt, Artificial Sequence
  Description of Artificial Sequence: Synthetic oligonucleotide
  Antisense strand to SEQ ID NO: 1878777
auugucacugcugucaauu

SEQ ID NO: 1878779 - RNA, 19 nt, Artificial Sequence
  Description of Artificial Sequence: Synthetic oligonucleotide
  Sense strand starting at position 3373 of SEQ ID NO: 1564489
ugacaauagaaguggucaa

SEQ ID NO: 1878780 - RNA, 19 nt, Artificial Sequence
  Description of Artificial Sequence: Synthetic oligonucleotide
  Antisense strand to SEQ ID NO: 1878779
uugaccacuucuauuguca

SEQ ID NO: 1878781 - RNA, 19 nt, Artificial Sequence
  Description of Artificial Sequence: Synthetic oligonucleotide
  Sense strand starting at position 3582 of SEQ ID NO: 1564489
gaucauauguugucaggag

SEQ ID NO: 1878782 - RNA, 19 nt, Artificial Sequence
  Description of Artificial Sequence: Synthetic oligonucleotide
  Antisense strand to SEQ ID NO: 1878781
cuccugacaacauaugauc

SEQ ID NO: 1878783 - RNA, 19 nt, Artificial Sequence
  Description of Artificial Sequence: Synthetic oligonucleotide
  Sense strand starting at position 3604 of SEQ ID NO: 1564489
gagaguagcccggacaaua

SEQ ID NO: 1878784 - RNA, 19 nt, Artificial Sequence
  Description of Artificial Sequence: Synthetic oligonucleotide
  Antisense strand to SEQ ID NO: 1878783
uauuguccgggcuacucuc

SEQ ID NO: 1878785 - RNA, 19 nt, Artificial Sequence
  Description of Artificial Sequence: Synthetic oligonucleotide
  Sense strand starting at position 3624 of SEQ ID NO: 1564489
ggugaaaugguuuaucuau

SEQ ID NO: 1878786 - RNA, 19 nt, Artificial Sequence
  Description of Artificial Sequence: Synthetic oligonucleotide
  Antisense strand to SEQ ID NO: 1878785
auagauaaaccauuucacc

SEQ ID NO: 1878787 - RNA, 19 nt, Artificial Sequence
  Description of Artificial Sequence: Synthetic oligonucleotide
  Sense strand starting at position 3663 of SEQ ID NO: 1564489
gguguauugguggacaucu

SEQ ID NO: 1878788 - RNA, 19 nt, Artificial Sequence
  Description of Artificial Sequence: Synthetic oligonucleotide
  Antisense strand to SEQ ID NO: 1878787
agauguccaccaauacacc

SEQ ID NO: 1878789 - RNA, 19 nt, Artificial Sequence
  Description of Artificial Sequence: Synthetic oligonucleotide
  Sense strand starting at position 21 of SEQ ID NO: 1564490
uauauccuuugaguacgua

SEQ ID NO: 1878790 - RNA, 19 nt, Artificial Sequence
  Description of Artificial Sequence: Synthetic oligonucleotide
  Antisense strand to SEQ ID NO: 1878789
uacguacucaaaggauaua

SEQ ID NO: 1878791 - RNA, 19 nt, Artificial Sequence
  Description of Artificial Sequence: Synthetic oligonucleotide
  Sense strand starting at position 22 of SEQ ID NO: 1564490
auauccuuugaguacguau

SEQ ID NO: 1878792 - RNA, 19 nt, Artificial Sequence
  Description of Artificial Sequence: Synthetic oligonucleotide
  Antisense strand to SEQ ID NO: 1878791
auacguacucaaaggauau

SEQ ID NO: 1878793 - RNA, 19 nt, Artificial Sequence
  Description of Artificial Sequence: Synthetic oligonucleotide
  Sense strand starting at position 30 of SEQ ID NO: 1564490
ugaguacguaucuggaagu

SEQ ID NO: 1878794 - RNA, 19 nt, Artificial Sequence
  Description of Artificial Sequence: Synthetic oligonucleotide
  Antisense strand to SEQ ID NO: 1878793
acuuccagauacguacuca

SEQ ID NO: 1878795 - RNA, 19 nt, Artificial Sequence
  Description of Artificial Sequence: Synthetic oligonucleotide
  Sense strand starting at position 36 of SEQ ID NO: 1564490
cguaucuggaaguagagua

SEQ ID NO: 1878796 - RNA, 19 nt, Artificial Sequence
  Description of Artificial Sequence: Synthetic oligonucleotide
  Antisense strand to SEQ ID NO: 1878795
uacucuacuuccagauacg

SEQ ID NO: 1878797 - RNA, 19 nt, Artificial Sequence
  Description of Artificial Sequence: Synthetic oligonucleotide
  Sense strand starting at position 46 of SEQ ID NO: 1564490
aguagaguagcuggauuau

SEQ ID NO: 1878798 - RNA, 19 nt, Artificial Sequence
  Description of Artificial Sequence: Synthetic oligonucleotide
  Antisense strand to SEQ ID NO: 1878797
auaauccagcuacucuacu

SEQ ID NO: 1878799 - RNA, 19 nt, Artificial Sequence
  Description of Artificial Sequence: Synthetic oligonucleotide
  Sense strand starting at position 226 of SEQ ID NO: 1564490
acugauaguguauaugcua

SEQ ID NO: 1878800 - RNA, 19 nt, Artificial Sequence
  Description of Artificial Sequence: Synthetic oligonucleotide
  Antisense strand to SEQ ID NO: 1878799
uagcauauacacuaucagu

SEQ ID NO: 1878801 - RNA, 19 nt, Artificial Sequence
  Description of Artificial Sequence: Synthetic oligonucleotide
  Sense strand starting at position 229 of SEQ ID NO: 1564490
gauaguguauaugcuauau

SEQ ID NO: 1878802 - RNA, 19 nt, Artificial Sequence
  Description of Artificial Sequence: Synthetic oligonucleotide
  Antisense strand to SEQ ID NO: 1878801
auauagcauauacacuauc

SEQ ID NO: 1878803 - RNA, 19 nt, Artificial Sequence
  Description of Artificial Sequence: Synthetic oligonucleotide
  Sense strand starting at position 233 of SEQ ID NO: 1564490
guguauaugcuauauuaca

SEQ ID NO: 1878804 - RNA, 19 nt, Artificial Sequence
  Description of Artificial Sequence: Synthetic oligonucleotide
  Antisense strand to SEQ ID NO: 1878803
uguaauauagcauauacac

SEQ ID NO: 1878805 - RNA, 19 nt, Artificial Sequence
  Description of Artificial Sequence: Synthetic oligonucleotide
  Sense strand starting at position 2074 of SEQ ID NO: 1564490
uuauguaguagcuguauaa

SEQ ID NO: 1878806 - RNA, 19 nt, Artificial Sequence
  Description of Artificial Sequence: Synthetic oligonucleotide
  Antisense strand to SEQ ID NO: 1878805
uuauacagcuacuacauaa

SEQ ID NO: 1878807 - RNA, 19 nt, Artificial Sequence
  Description of Artificial Sequence: Synthetic oligonucleotide
  Sense strand starting at position 2084 of SEQ ID NO: 1564490
gcuguauaaucaguuuaaa

SEQ ID NO: 1878808 - RNA, 19 nt, Artificial Sequence
  Description of Artificial Sequence: Synthetic oligonucleotide
  Antisense strand to SEQ ID NO: 1878807
uuuaaacugauuauacagc

SEQ ID NO: 1878809 - RNA, 19 nt, Artificial Sequence
  Description of Artificial Sequence: Synthetic oligonucleotide
  Sense strand starting at position 2343 of SEQ ID NO: 1564490
cugcauuuaugagaaauaa

SEQ ID NO: 1878810 - RNA, 19 nt, Artificial Sequence
  Description of Artificial Sequence: Synthetic oligonucleotide
  Antisense strand to SEQ ID NO: 1878809
uuauuucucauaaaugcag

SEQ ID NO: 1878811 - RNA, 19 nt, Artificial Sequence
  Description of Artificial Sequence: Synthetic oligonucleotide
  Sense strand starting at position 2695 of SEQ ID NO: 1564490
ggcaacagauuagaaacua

SEQ ID NO: 1878812 - RNA, 19 nt, Artificial Sequence
  Description of Artificial Sequence: Synthetic oligonucleotide
  Antisense strand to SEQ ID NO: 1878811
uaguuucuaaucuguugcc

SEQ ID NO: 1878813 - RNA, 19 nt, Artificial Sequence
  Description of Artificial Sequence: Synthetic oligonucleotide
  Sense strand starting at position 2711 of SEQ ID NO: 1564490
cuaugaucuccgcagaaug

SEQ ID NO: 1878814 - RNA, 19 nt, Artificial Sequence
  Description of Artificial Sequence: Synthetic oligonucleotide
  Antisense strand to SEQ ID NO: 1878813
cauucugcggagaucauag

SEQ ID NO: 1878815 - RNA, 19 nt, Artificial Sequence
  Description of Artificial Sequence: Synthetic oligonucleotide
  Sense strand starting at position 2722 of SEQ ID NO: 1564490
gcagaauggagcugaguuc

SEQ ID NO: 1878816 - RNA, 19 nt, Artificial Sequence
  Description of Artificial Sequence: Synthetic oligonucleotide
  Antisense strand to SEQ ID NO: 1878815
gaacucagcuccauucugc

SEQ ID NO: 1878817 - RNA, 19 nt, Artificial Sequence
  Description of Artificial Sequence: Synthetic oligonucleotide
  Sense strand starting at position 2729 of SEQ ID NO: 1564490
ggagcugaguucccgucaa

SEQ ID NO: 1878818 - RNA, 19 nt, Artificial Sequence
  Description of Artificial Sequence: Synthetic oligonucleotide
  Antisense strand to SEQ ID NO: 1878817
uugacgggaacucagcucc

SEQ ID NO: 1878819 - RNA, 19 nt, Artificial Sequence
  Description of Artificial Sequence: Synthetic oligonucleotide
  Sense strand starting at position 2733 of SEQ ID NO: 1564490
cugaguucccgucaauauu

SEQ ID NO: 1878820 - RNA, 19 nt, Artificial Sequence
  Description of Artificial Sequence: Synthetic oligonucleotide
  Antisense strand to SEQ ID NO: 1878819
aauauugacgggaacucag

SEQ ID NO: 1878821 - RNA, 19 nt, Artificial Sequence
  Description of Artificial Sequence: Synthetic oligonucleotide
  Sense strand starting at position 2741 of SEQ ID NO: 1564490
ccgucaauauucccacuga

SEQ ID NO: 1878822 - RNA, 19 nt, Artificial Sequence
  Description of Artificial Sequence: Synthetic oligonucleotide
  Antisense strand to SEQ ID NO: 1878821
ucagugggaauauugacgg

SEQ ID NO: 1878823 - RNA, 19 nt, Artificial Sequence
  Description of Artificial Sequence: Synthetic oligonucleotide
  Sense strand starting at position 2742 of SEQ ID NO: 1564490
cgucaauauucccacugau

SEQ ID NO: 1878824 - RNA, 19 nt, Artificial Sequence
  Description of Artificial Sequence: Synthetic oligonucleotide
  Antisense strand to SEQ ID NO: 1878823
aucagugggaauauugacg

SEQ ID NO: 1878825 - RNA, 19 nt, Artificial Sequence
  Description of Artificial Sequence: Synthetic oligonucleotide
  Sense strand starting at position 2825 of SEQ ID NO: 1564490
gagugcauccagugcucaa

SEQ ID NO: 1878826 - RNA, 19 nt, Artificial Sequence
  Description of Artificial Sequence: Synthetic oligonucleotide
  Antisense strand to SEQ ID NO: 1878825
uugagcacuggaugcacuc

SEQ ID NO: 1878827 - RNA, 19 nt, Artificial Sequence
  Description of Artificial Sequence: Synthetic oligonucleotide
  Sense strand starting at position 2835 of SEQ ID NO: 1564490
agugcucaacugugugaua

SEQ ID NO: 1878828 - RNA, 19 nt, Artificial Sequence
  Description of Artificial Sequence: Synthetic oligonucleotide
  Antisense strand to SEQ ID NO: 1878827
uaucacacaguugagcacu

SEQ ID NO: 1878829 - RNA, 19 nt, Artificial Sequence
  Description of Artificial Sequence: Synthetic oligonucleotide
  Sense strand starting at position 2837 of SEQ ID NO: 1564490
ugcucaacugugugauaca

SEQ ID NO: 1878830 - RNA, 19 nt, Artificial Sequence
  Description of Artificial Sequence: Synthetic oligonucleotide
  Antisense strand to SEQ ID NO: 1878829
uguaucacacaguugagca

SEQ ID NO: 1878831 - RNA, 19 nt, Artificial Sequence
  Description of Artificial Sequence: Synthetic oligonucleotide
  Sense strand starting at position 2844 of SEQ ID NO: 1564490
cugugugauacaggugcaa

SEQ ID NO: 1878832 - RNA, 19 nt, Artificial Sequence
  Description of Artificial Sequence: Synthetic oligonucleotide
  Antisense strand to SEQ ID NO: 1878831
uugcaccuguaucacacag

SEQ ID NO: 1878833 - RNA, 19 nt, Artificial Sequence
  Description of Artificial Sequence: Synthetic oligonucleotide
  Sense strand starting at position 2870 of SEQ ID NO: 1564490
cugagucgacuuugucagu

SEQ ID NO: 1878834 - RNA, 19 nt, Artificial Sequence
  Description of Artificial Sequence: Synthetic oligonucleotide
  Antisense strand to SEQ ID NO: 1878833
acugacaaagucgacucag

SEQ ID NO: 1878835 - RNA, 19 nt, Artificial Sequence
  Description of Artificial Sequence: Synthetic oligonucleotide
  Sense strand starting at position 2893 of SEQ ID NO: 1564490
uuacuccagccaugaaagu

SEQ ID NO: 1878836 - RNA, 19 nt, Artificial Sequence
  Description of Artificial Sequence: Synthetic oligonucleotide
  Antisense strand to SEQ ID NO: 1878835
acuuucauggcuggaguaa

SEQ ID NO: 1878837 - RNA, 19 nt, Artificial Sequence
  Description of Artificial Sequence: Synthetic oligonucleotide
  Sense strand starting at position 2904 of SEQ ID NO: 1564490
augaaagucugcucauuaa

SEQ ID NO: 1878838 - RNA, 19 nt, Artificial Sequence
  Description of Artificial Sequence: Synthetic oligonucleotide
  Antisense strand to SEQ ID NO: 1878837
uuaaugagcagacuuucau

SEQ ID NO: 1878839 - RNA, 19 nt, Artificial Sequence
  Description of Artificial Sequence: Synthetic oligonucleotide
  Sense strand starting at position 3004 of SEQ ID NO: 1564490
acagccuuacuguggaaga

SEQ ID NO: 1878840 - RNA, 19 nt, Artificial Sequence
  Description of Artificial Sequence: Synthetic oligonucleotide
  Antisense strand to SEQ ID NO: 1878839
ucuuccacaguaaggcugu

SEQ ID NO: 1878841 - RNA, 19 nt, Artificial Sequence
  Description of Artificial Sequence: Synthetic oligonucleotide
  Sense strand starting at position 3087 of SEQ ID NO: 1564490
gaugcauagucacaagcau

SEQ ID NO: 1878842 - RNA, 19 nt, Artificial Sequence
  Description of Artificial Sequence: Synthetic oligonucleotide
  Antisense strand to SEQ ID NO: 1878841
augcuugugacuaugcauc

SEQ ID NO: 1878843 - RNA, 19 nt, Artificial Sequence
  Description of Artificial Sequence: Synthetic oligonucleotide
  Sense strand starting at position 3128 of SEQ ID NO: 1564490
acggcaucaaguggucaaa

SEQ ID NO: 1878844 - RNA, 19 nt, Artificial Sequence
  Description of Artificial Sequence: Synthetic oligonucleotide
  Antisense strand to SEQ ID NO: 1878843
uuugaccacuugaugccgu

SEQ ID NO: 1878845 - RNA, 19 nt, Artificial Sequence
  Description of Artificial Sequence: Synthetic oligonucleotide
  Sense strand starting at position 3265 of SEQ ID NO: 1564490
ugaaauuuaucagagaagc

SEQ ID NO: 1878846 - RNA, 19 nt, Artificial Sequence
  Description of Artificial Sequence: Synthetic oligonucleotide
  Antisense strand to SEQ ID NO: 1878845
gcuucucugauaaauuuca

SEQ ID NO: 1878847 - RNA, 19 nt, Artificial Sequence
  Description of Artificial Sequence: Synthetic oligonucleotide
  Sense strand starting at position 3275 of SEQ ID NO: 1564490
cagagaagcuuacagaaga

SEQ ID NO: 1878848 - RNA, 19 nt, Artificial Sequence
  Description of Artificial Sequence: Synthetic oligonucleotide
  Antisense strand to SEQ ID NO: 1878847
ucuucuguaagcuucucug

SEQ ID NO: 1878849 - RNA, 19 nt, Artificial Sequence
  Description of Artificial Sequence: Synthetic oligonucleotide
  Sense strand starting at position 3362 of SEQ ID NO: 1564490
aauugacagcagugacaau

SEQ ID NO: 1878850 - RNA, 19 nt, Artificial Sequence
  Description of Artificial Sequence: Synthetic oligonucleotide
  Antisense strand to SEQ ID NO: 1878849
auugucacugcugucaauu

SEQ ID NO: 1878851 - RNA, 19 nt, Artificial Sequence
  Description of Artificial Sequence: Synthetic oligonucleotide
  Sense strand starting at position 3374 of SEQ ID NO: 1564490
ugacaauagaaguggucaa

SEQ ID NO: 1878852 - RNA, 19 nt, Artificial Sequence
  Description of Artificial Sequence: Synthetic oligonucleotide
  Antisense strand to SEQ ID NO: 1878851
uugaccacuucuauuguca

SEQ ID NO: 1878853 - RNA, 19 nt, Artificial Sequence
  Description of Artificial Sequence: Synthetic oligonucleotide
  Sense strand starting at position 3583 of SEQ ID NO: 1564490
gaucauauguugucaggag

SEQ ID NO: 1878854 - RNA, 19 nt, Artificial Sequence
  Description of Artificial Sequence: Synthetic oligonucleotide
  Antisense strand to SEQ ID NO: 1878853
cuccugacaacauaugauc

SEQ ID NO: 1878855 - RNA, 19 nt, Artificial Sequence
  Description of Artificial Sequence: Synthetic oligonucleotide
  Sense strand starting at position 3592 of SEQ ID NO: 1564490
uugucaggagcuugagagu

SEQ ID NO: 1878856 - RNA, 19 nt, Artificial Sequence
  Description of Artificial Sequence: Synthetic oligonucleotide
  Antisense strand to SEQ ID NO: 1878855
acucucaagcuccugacaa

SEQ ID NO: 1878857 - RNA, 19 nt, Artificial Sequence
  Description of Artificial Sequence: Synthetic oligonucleotide
  Sense strand starting at position 3605 of SEQ ID NO: 1564490
gagaguagcccggacaaua

SEQ ID NO: 1878858 - RNA, 19 nt, Artificial Sequence
  Description of Artificial Sequence: Synthetic oligonucleotide
  Antisense strand to SEQ ID NO: 1878857
uauuguccgggcuacucuc

SEQ ID NO: 1878859 - RNA, 19 nt, Artificial Sequence
  Description of Artificial Sequence: Synthetic oligonucleotide
  Sense strand starting at position 3615 of SEQ ID NO: 1564490
cggacaauauggugaaaug

SEQ ID NO: 1878860 - RNA, 19 nt, Artificial Sequence
  Description of Artificial Sequence: Synthetic oligonucleotide
  Antisense strand to SEQ ID NO: 1878859
cauuucaccauauuguccg

SEQ ID NO: 1878861 - RNA, 19 nt, Artificial Sequence
  Description of Artificial Sequence: Synthetic oligonucleotide
  Sense strand starting at position 3625 of SEQ ID NO: 1564490
ggugaaaugguuuaucuau

SEQ ID NO: 1878862 - RNA, 19 nt, Artificial Sequence
  Description of Artificial Sequence: Synthetic oligonucleotide
  Antisense strand to SEQ ID NO: 1878861
auagauaaaccauuucacc

SEQ ID NO: 1878863 - RNA, 19 nt, Artificial Sequence
  Description of Artificial Sequence: Synthetic oligonucleotide
  Sense strand starting at position 3663 of SEQ ID NO: 1564490
ggguguauugguggacauc

SEQ ID NO: 1878864 - RNA, 19 nt, Artificial Sequence
  Description of Artificial Sequence: Synthetic oligonucleotide
  Antisense strand to SEQ ID NO: 1878863
gauguccaccaauacaccc

SEQ ID NO: 1878865 - RNA, 19 nt, Artificial Sequence
  Description of Artificial Sequence: Synthetic oligonucleotide
  Sense strand starting at position 3664 of SEQ ID NO: 1564490
gguguauugguggacaucu

SEQ ID NO: 1878866 - RNA, 19 nt, Artificial Sequence
  Description of Artificial Sequence: Synthetic oligonucleotide
  Antisense strand to SEQ ID NO: 1878865
agauguccaccaauacacc

SEQ ID NO: 1878867 - RNA, 19 nt, Artificial Sequence
  Description of Artificial Sequence: Synthetic oligonucleotide
  Sense strand starting at position 3701 of SEQ ID NO: 1564490
aaaccugagucaggagaau

SEQ ID NO: 1878868 - RNA, 19 nt, Artificial Sequence
  Description of Artificial Sequence: Synthetic oligonucleotide
  Antisense strand to SEQ ID NO: 1878867
auucuccugacucagguuu

SEQ ID NO: 1878869 - RNA, 19 nt, Artificial Sequence
  Description of Artificial Sequence: Synthetic oligonucleotide
  Sense strand starting at position 35 of SEQ ID NO: 1564491
cguaucuggaaguagagua

SEQ ID NO: 1878870 - RNA, 19 nt, Artificial Sequence
  Description of Artificial Sequence: Synthetic oligonucleotide
  Antisense strand to SEQ ID NO: 1878869
uacucuacuuccagauacg

SEQ ID NO: 1878871 - RNA, 19 nt, Artificial Sequence
  Description of Artificial Sequence: Synthetic oligonucleotide
  Sense strand starting at position 43 of SEQ ID NO: 1564491
gaaguagaguagcuggauu

SEQ ID NO: 1878872 - RNA, 19 nt, Artificial Sequence
  Description of Artificial Sequence: Synthetic oligonucleotide
  Antisense strand to SEQ ID NO: 1878871
aauccagcuacucuacuuc

SEQ ID NO: 1878873 - RNA, 19 nt, Artificial Sequence
  Description of Artificial Sequence: Synthetic oligonucleotide
  Sense strand starting at position 45 of SEQ ID NO: 1564491
aguagaguagcuggauuau

SEQ ID NO: 1878874 - RNA, 19 nt, Artificial Sequence
  Description of Artificial Sequence: Synthetic oligonucleotide
  Antisense strand to SEQ ID NO: 1878873
auaauccagcuacucuacu

SEQ ID NO: 1878875 - RNA, 19 nt, Artificial Sequence
  Description of Artificial Sequence: Synthetic oligonucleotide
  Sense strand starting at position 232 of SEQ ID NO: 1564491
guguauaugcuauauuaca

SEQ ID NO: 1878876 - RNA, 19 nt, Artificial Sequence
  Description of Artificial Sequence: Synthetic oligonucleotide
  Antisense strand to SEQ ID NO: 1878875
uguaauauagcauauacac

SEQ ID NO: 1878877 - RNA, 19 nt, Artificial Sequence
  Description of Artificial Sequence: Synthetic oligonucleotide
  Sense strand starting at position 529 of SEQ ID NO: 1564491
aguauauauggauauugca

SEQ ID NO: 1878878 - RNA, 19 nt, Artificial Sequence
  Description of Artificial Sequence: Synthetic oligonucleotide
  Antisense strand to SEQ ID NO: 1878877
ugcaauauccauauauacu

SEQ ID NO: 1878879 - RNA, 19 nt, Artificial Sequence
  Description of Artificial Sequence: Synthetic oligonucleotide
  Sense strand starting at position 574 of SEQ ID NO: 1564491
cuucuccaugagugauagu

SEQ ID NO: 1878880 - RNA, 19 nt, Artificial Sequence
  Description of Artificial Sequence: Synthetic oligonucleotide
  Antisense strand to SEQ ID NO: 1878879
acuaucacucauggagaag

SEQ ID NO: 1878881 - RNA, 19 nt, Artificial Sequence
  Description of Artificial Sequence: Synthetic oligonucleotide
  Sense strand starting at position 583 of SEQ ID NO: 1564491
gagugauaguaauuccuca

SEQ ID NO: 1878882 - RNA, 19 nt, Artificial Sequence
  Description of Artificial Sequence: Synthetic oligonucleotide
  Antisense strand to SEQ ID NO: 1878881
ugaggaauuacuaucacuc

SEQ ID NO: 1878883 - RNA, 19 nt, Artificial Sequence
  Description of Artificial Sequence: Synthetic oligonucleotide
  Sense strand starting at position 587 of SEQ ID NO: 1564491
gauaguaauuccucagcug

SEQ ID NO: 1878884 - RNA, 19 nt, Artificial Sequence
  Description of Artificial Sequence: Synthetic oligonucleotide
  Antisense strand to SEQ ID NO: 1878883
cagcugaggaauuacuauc

SEQ ID NO: 1878885 - RNA, 19 nt, Artificial Sequence
  Description of Artificial Sequence: Synthetic oligonucleotide
  Sense strand starting at position 780 of SEQ ID NO: 1564491
ggcaauuauugagucacaa

SEQ ID NO: 1878886 - RNA, 19 nt, Artificial Sequence
  Description of Artificial Sequence: Synthetic oligonucleotide
  Antisense strand to SEQ ID NO: 1878885
uugugacucaauaauugcc

SEQ ID NO: 1878887 - RNA, 19 nt, Artificial Sequence
  Description of Artificial Sequence: Synthetic oligonucleotide
  Sense strand starting at position 792 of SEQ ID NO: 1564491
gucacaacacuucgguaaa

SEQ ID NO: 1878888 - RNA, 19 nt, Artificial Sequence
  Description of Artificial Sequence: Synthetic oligonucleotide
  Antisense strand to SEQ ID NO: 1878887
uuuaccgaaguguugugac

SEQ ID NO: 1878889 - RNA, 19 nt, Artificial Sequence
  Description of Artificial Sequence: Synthetic oligonucleotide
  Sense strand starting at position 862 of SEQ ID NO: 1564491
aacugaaaucuguagugua

SEQ ID NO: 1878890 - RNA, 19 nt, Artificial Sequence
  Description of Artificial Sequence: Synthetic oligonucleotide
  Antisense strand to SEQ ID NO: 1878889
uacacuacagauuucaguu

SEQ ID NO: 1878891 - RNA, 19 nt, Artificial Sequence
  Description of Artificial Sequence: Synthetic oligonucleotide
  Sense strand starting at position 867 of SEQ ID NO: 1564491
aaaucuguaguguaggauu

SEQ ID NO: 1878892 - RNA, 19 nt, Artificial Sequence
  Description of Artificial Sequence: Synthetic oligonucleotide
  Antisense strand to SEQ ID NO: 1878891
aauccuacacuacagauuu

SEQ ID NO: 1878893 - RNA, 19 nt, Artificial Sequence
  Description of Artificial Sequence: Synthetic oligonucleotide
  Sense strand starting at position 972 of SEQ ID NO: 1564491
auacuagcaugauuaagau

SEQ ID NO: 1878894 - RNA, 19 nt, Artificial Sequence
  Description of Artificial Sequence: Synthetic oligonucleotide
  Antisense strand to SEQ ID NO: 1878893
aucuuaaucaugcuaguau

SEQ ID NO: 1878895 - RNA, 19 nt, Artificial Sequence
  Description of Artificial Sequence: Synthetic oligonucleotide
  Sense strand starting at position 1155 of SEQ ID NO: 1564491
agucacuacaggugagaua

SEQ ID NO: 1878896 - RNA, 19 nt, Artificial Sequence
  Description of Artificial Sequence: Synthetic oligonucleotide
  Antisense strand to SEQ ID NO: 1878895
uaucucaccuguagugacu

SEQ ID NO: 1878897 - RNA, 19 nt, Artificial Sequence
  Description of Artificial Sequence: Synthetic oligonucleotide
  Sense strand starting at position 1166 of SEQ ID NO: 1564491
gugagauaaucaccaacga

SEQ ID NO: 1878898 - RNA, 19 nt, Artificial Sequence
  Description of Artificial Sequence: Synthetic oligonucleotide
  Antisense strand to SEQ ID NO: 1878897
ucguuggugauuaucucac

SEQ ID NO: 1878899 - RNA, 19 nt, Artificial Sequence
  Description of Artificial Sequence: Synthetic oligonucleotide
  Sense strand starting at position 1300 of SEQ ID NO: 1564491
gggaauaugucaucagcaa

SEQ ID NO: 1878900 - RNA, 19 nt, Artificial Sequence
  Description of Artificial Sequence: Synthetic oligonucleotide
  Antisense strand to SEQ ID NO: 1878899
uugcugaugacauauuccc

SEQ ID NO: 1878901 - RNA, 19 nt, Artificial Sequence
  Description of Artificial Sequence: Synthetic oligonucleotide
  Sense strand starting at position 1301 of SEQ ID NO: 1564491
ggaauaugucaucagcaau

SEQ ID NO: 1878902 - RNA, 19 nt, Artificial Sequence
  Description of Artificial Sequence: Synthetic oligonucleotide
  Antisense strand to SEQ ID NO: 1878901
auugcugaugacauauucc

SEQ ID NO: 1878903 - RNA, 19 nt, Artificial Sequence
  Description of Artificial Sequence: Synthetic oligonucleotide
  Sense strand starting at position 1618 of SEQ ID NO: 1564491
uagagacauuuguaucuga

SEQ ID NO: 1878904 - RNA, 19 nt, Artificial Sequence
  Description of Artificial Sequence: Synthetic oligonucleotide
  Antisense strand to SEQ ID NO: 1878903
ucagauacaaaugucucua

SEQ ID NO: 1878905 - RNA, 19 nt, Artificial Sequence
  Description of Artificial Sequence: Synthetic oligonucleotide
  Sense strand starting at position 1740 of SEQ ID NO: 1564491
gaguguaaaguaggaaauu

SEQ ID NO: 1878906 - RNA, 19 nt, Artificial Sequence
  Description of Artificial Sequence: Synthetic oligonucleotide
  Antisense strand to SEQ ID NO: 1878905
aauuuccuacuuuacacuc

SEQ ID NO: 1878907 - RNA, 19 nt, Artificial Sequence
  Description of Artificial Sequence: Synthetic oligonucleotide
  Sense strand starting at position 1769 of SEQ ID NO: 1564491
auaggaggugaaugcaaua

SEQ ID NO: 1878908 - RNA, 19 nt, Artificial Sequence
  Description of Artificial Sequence: Synthetic oligonucleotide
  Antisense strand to SEQ ID NO: 1878907
uauugcauucaccuccuau

SEQ ID NO: 1878909 - RNA, 19 nt, Artificial Sequence
  Description of Artificial Sequence: Synthetic oligonucleotide
  Sense strand starting at position 1832 of SEQ ID NO: 1564491
agcuguggaguucaaguaa

SEQ ID NO: 1878910 - RNA, 19 nt, Artificial Sequence
  Description of Artificial Sequence: Synthetic oligonucleotide
  Antisense strand to SEQ ID NO: 1878909
uuacuugaacuccacagcu

SEQ ID NO: 1878911 - RNA, 19 nt, Artificial Sequence
  Description of Artificial Sequence: Synthetic oligonucleotide
  Sense strand starting at position 1877 of SEQ ID NO: 1564491
ugcugugugauggaauaca

SEQ ID NO: 1878912 - RNA, 19 nt, Artificial Sequence
  Description of Artificial Sequence: Synthetic oligonucleotide
  Antisense strand to SEQ ID NO: 1878911
uguauuccaucacacagca

SEQ ID NO: 1878913 - RNA, 19 nt, Artificial Sequence
  Description of Artificial Sequence: Synthetic oligonucleotide
  Sense strand starting at position 1936 of SEQ ID NO: 1564491
aagugauuugugugggcau

SEQ ID NO: 1878914 - RNA, 19 nt, Artificial Sequence
  Description of Artificial Sequence: Synthetic oligonucleotide
  Antisense strand to SEQ ID NO: 1878913
augcccacacaaaucacuu

SEQ ID NO: 1878915 - RNA, 19 nt, Artificial Sequence
  Description of Artificial Sequence: Synthetic oligonucleotide
  Sense strand starting at position 1938 of SEQ ID NO: 1564491
gugauuugugugggcaugu

SEQ ID NO: 1878916 - RNA, 19 nt, Artificial Sequence
  Description of Artificial Sequence: Synthetic oligonucleotide
  Antisense strand to SEQ ID NO: 1878915
acaugcccacacaaaucac

SEQ ID NO: 1878917 - RNA, 19 nt, Artificial Sequence
  Description of Artificial Sequence: Synthetic oligonucleotide
  Sense strand starting at position 1939 of SEQ ID NO: 1564491
ugauuugugugggcauguu

SEQ ID NO: 1878918 - RNA, 19 nt, Artificial Sequence
  Description of Artificial Sequence: Synthetic oligonucleotide
  Antisense strand to SEQ ID NO: 1878917
aacaugcccacacaaauca

SEQ ID NO: 1878919 - RNA, 19 nt, Artificial Sequence
  Description of Artificial Sequence: Synthetic oligonucleotide
  Sense strand starting at position 1965 of SEQ ID NO: 1564491
guguguacuuagguaauuu

SEQ ID NO: 1878920 - RNA, 19 nt, Artificial Sequence
  Description of Artificial Sequence: Synthetic oligonucleotide
  Antisense strand to SEQ ID NO: 1878919
aaauuaccuaaguacacac

SEQ ID NO: 1878921 - RNA, 19 nt, Artificial Sequence
  Description of Artificial Sequence: Synthetic oligonucleotide
  Sense strand starting at position 2077 of SEQ ID NO: 1564491
guaguagcuguauaaucag

SEQ ID NO: 1878922 - RNA, 19 nt, Artificial Sequence
  Description of Artificial Sequence: Synthetic oligonucleotide
  Antisense strand to SEQ ID NO: 1878921
cugauuauacagcuacuac

SEQ ID NO: 1878923 - RNA, 19 nt, Artificial Sequence
  Description of Artificial Sequence: Synthetic oligonucleotide
  Sense strand starting at position 2342 of SEQ ID NO: 1564491
cugcauuuaugagaaauaa

SEQ ID NO: 1878924 - RNA, 19 nt, Artificial Sequence
  Description of Artificial Sequence: Synthetic oligonucleotide
  Antisense strand to SEQ ID NO: 1878923
uuauuucucauaaaugcag

SEQ ID NO: 1878925 - RNA, 19 nt, Artificial Sequence
  Description of Artificial Sequence: Synthetic oligonucleotide
  Sense strand starting at position 2710 of SEQ ID NO: 1564491
cuaugaucuccgcagaaug

SEQ ID NO: 1878926 - RNA, 19 nt, Artificial Sequence
  Description of Artificial Sequence: Synthetic oligonucleotide
  Antisense strand to SEQ ID NO: 1878925
cauucugcggagaucauag

SEQ ID NO: 1878927 - RNA, 19 nt, Artificial Sequence
  Description of Artificial Sequence: Synthetic oligonucleotide
  Sense strand starting at position 2732 of SEQ ID NO: 1564491
cugaguucccgucaauauu

SEQ ID NO: 1878928 - RNA, 19 nt, Artificial Sequence
  Description of Artificial Sequence: Synthetic oligonucleotide
  Antisense strand to SEQ ID NO: 1878927
aauauugacgggaacucag

SEQ ID NO: 1878929 - RNA, 19 nt, Artificial Sequence
  Description of Artificial Sequence: Synthetic oligonucleotide
  Sense strand starting at position 2892 of SEQ ID NO: 1564491
uuacuccagccaugaaagu

SEQ ID NO: 1878930 - RNA, 19 nt, Artificial Sequence
  Description of Artificial Sequence: Synthetic oligonucleotide
  Antisense strand to SEQ ID NO: 1878929
acuuucauggcuggaguaa

SEQ ID NO: 1878931 - RNA, 19 nt, Artificial Sequence
  Description of Artificial Sequence: Synthetic oligonucleotide
  Sense strand starting at position 2903 of SEQ ID NO: 1564491
augaaagucugcucauuaa

SEQ ID NO: 1878932 - RNA, 19 nt, Artificial Sequence
  Description of Artificial Sequence: Synthetic oligonucleotide
  Antisense strand to SEQ ID NO: 1878931
uuaaugagcagacuuucau

SEQ ID NO: 1878933 - RNA, 19 nt, Artificial Sequence
  Description of Artificial Sequence: Synthetic oligonucleotide
  Sense strand starting at position 3003 of SEQ ID NO: 1564491
acagccuuacuguggaaga

SEQ ID NO: 1878934 - RNA, 19 nt, Artificial Sequence
  Description of Artificial Sequence: Synthetic oligonucleotide
  Antisense strand to SEQ ID NO: 1878933
ucuuccacaguaaggcugu

SEQ ID NO: 1878935 - RNA, 19 nt, Artificial Sequence
  Description of Artificial Sequence: Synthetic oligonucleotide
  Sense strand starting at position 3264 of SEQ ID NO: 1564491
ugaaauuuaucagagaagc

SEQ ID NO: 1878936 - RNA, 19 nt, Artificial Sequence
  Description of Artificial Sequence: Synthetic oligonucleotide
  Antisense strand to SEQ ID NO: 1878935
gcuucucugauaaauuuca

SEQ ID NO: 1878937 - RNA, 19 nt, Artificial Sequence
  Description of Artificial Sequence: Synthetic oligonucleotide
  Sense strand starting at position 3361 of SEQ ID NO: 1564491
aauugacagcagugacaau

SEQ ID NO: 1878938 - RNA, 19 nt, Artificial Sequence
  Description of Artificial Sequence: Synthetic oligonucleotide
  Antisense strand to SEQ ID NO: 1878937
auugucacugcugucaauu

SEQ ID NO: 1878939 - RNA, 19 nt, Artificial Sequence
  Description of Artificial Sequence: Synthetic oligonucleotide
  Sense strand starting at position 3373 of SEQ ID NO: 1564491
ugacaauagaaguggucaa

SEQ ID NO: 1878940 - RNA, 19 nt, Artificial Sequence
  Description of Artificial Sequence: Synthetic oligonucleotide
  Antisense strand to SEQ ID NO: 1878939
uugaccacuucuauuguca

SEQ ID NO: 1878941 - RNA, 19 nt, Artificial Sequence
  Description of Artificial Sequence: Synthetic oligonucleotide
  Sense strand starting at position 3582 of SEQ ID NO: 1564491
gaucauauguugucaggag

SEQ ID NO: 1878942 - RNA, 19 nt, Artificial Sequence
  Description of Artificial Sequence: Synthetic oligonucleotide
  Antisense strand to SEQ ID NO: 1878941
cuccugacaacauaugauc

SEQ ID NO: 1878943 - RNA, 19 nt, Artificial Sequence
  Description of Artificial Sequence: Synthetic oligonucleotide
  Sense strand starting at position 3604 of SEQ ID NO: 1564491
gagaguagcccggacaaua

SEQ ID NO: 1878944 - RNA, 19 nt, Artificial Sequence
  Description of Artificial Sequence: Synthetic oligonucleotide
  Antisense strand to SEQ ID NO: 1878943
uauuguccgggcuacucuc

SEQ ID NO: 1878945 - RNA, 19 nt, Artificial Sequence
  Description of Artificial Sequence: Synthetic oligonucleotide
  Sense strand starting at position 3624 of SEQ ID NO: 1564491
ggugaaaugguuuaucuau

SEQ ID NO: 1878946 - RNA, 19 nt, Artificial Sequence
  Description of Artificial Sequence: Synthetic oligonucleotide
  Antisense strand to SEQ ID NO: 1878945
auagauaaaccauuucacc

SEQ ID NO: 1878947 - RNA, 19 nt, Artificial Sequence
  Description of Artificial Sequence: Synthetic oligonucleotide
  Sense strand starting at position 3663 of SEQ ID NO: 1564491
gguguauugguggacaucu

SEQ ID NO: 1878948 - RNA, 19 nt, Artificial Sequence
  Description of Artificial Sequence: Synthetic oligonucleotide
  Antisense strand to SEQ ID NO: 1878947
agauguccaccaauacacc

SEQ ID NO: 1878949 - RNA, 19 nt, Artificial Sequence
  Description of Artificial Sequence: Synthetic oligonucleotide
  Sense strand starting at position 21 of SEQ ID NO: 1564492
uauauccuuugaguacgua

SEQ ID NO: 1878950 - RNA, 19 nt, Artificial Sequence
  Description of Artificial Sequence: Synthetic oligonucleotide
  Antisense strand to SEQ ID NO: 1878949
uacguacucaaaggauaua

SEQ ID NO: 1878951 - RNA, 19 nt, Artificial Sequence
  Description of Artificial Sequence: Synthetic oligonucleotide
  Sense strand starting at position 22 of SEQ ID NO: 1564492
auauccuuugaguacguau

SEQ ID NO: 1878952 - RNA, 19 nt, Artificial Sequence
  Description of Artificial Sequence: Synthetic oligonucleotide
  Antisense strand to SEQ ID NO: 1878951
auacguacucaaaggauau

SEQ ID NO: 1878953 - RNA, 19 nt, Artificial Sequence
  Description of Artificial Sequence: Synthetic oligonucleotide
  Sense strand starting at position 30 of SEQ ID NO: 1564492
ugaguacguaucuggaagu

SEQ ID NO: 1878954 - RNA, 19 nt, Artificial Sequence
  Description of Artificial Sequence: Synthetic oligonucleotide
  Antisense strand to SEQ ID NO: 1878953
acuuccagauacguacuca

SEQ ID NO: 1878955 - RNA, 19 nt, Artificial Sequence
  Description of Artificial Sequence: Synthetic oligonucleotide
  Sense strand starting at position 36 of SEQ ID NO: 1564492
cguaucuggaaguagagua

SEQ ID NO: 1878956 - RNA, 19 nt, Artificial Sequence
  Description of Artificial Sequence: Synthetic oligonucleotide
  Antisense strand to SEQ ID NO: 1878955
uacucuacuuccagauacg

SEQ ID NO: 1878957 - RNA, 19 nt, Artificial Sequence
  Description of Artificial Sequence: Synthetic oligonucleotide
  Sense strand starting at position 46 of SEQ ID NO: 1564492
aguagaguagcuggauuau

SEQ ID NO: 1878958 - RNA, 19 nt, Artificial Sequence
  Description of Artificial Sequence: Synthetic oligonucleotide
  Antisense strand to SEQ ID NO: 1878957
auaauccagcuacucuacu

SEQ ID NO: 1878959 - RNA, 19 nt, Artificial Sequence
  Description of Artificial Sequence: Synthetic oligonucleotide
  Sense strand starting at position 226 of SEQ ID NO: 1564492
acugauaguguauaugcua

SEQ ID NO: 1878960 - RNA, 19 nt, Artificial Sequence
  Description of Artificial Sequence: Synthetic oligonucleotide
  Antisense strand to SEQ ID NO: 1878959
uagcauauacacuaucagu

SEQ ID NO: 1878961 - RNA, 19 nt, Artificial Sequence
  Description of Artificial Sequence: Synthetic oligonucleotide
  Sense strand starting at position 229 of SEQ ID NO: 1564492
gauaguguauaugcuauau

SEQ ID NO: 1878962 - RNA, 19 nt, Artificial Sequence
  Description of Artificial Sequence: Synthetic oligonucleotide
  Antisense strand to SEQ ID NO: 1878961
auauagcauauacacuauc

SEQ ID NO: 1878963 - RNA, 19 nt, Artificial Sequence
  Description of Artificial Sequence: Synthetic oligonucleotide
  Sense strand starting at position 233 of SEQ ID NO: 1564492
guguauaugcuauauuaca

SEQ ID NO: 1878964 - RNA, 19 nt, Artificial Sequence
  Description of Artificial Sequence: Synthetic oligonucleotide
  Antisense strand to SEQ ID NO: 1878963
uguaauauagcauauacac

SEQ ID NO: 1878965 - RNA, 19 nt, Artificial Sequence
  Description of Artificial Sequence: Synthetic oligonucleotide
  Sense strand starting at position 2074 of SEQ ID NO: 1564492
uuauguaguagcuguauaa

SEQ ID NO: 1878966 - RNA, 19 nt, Artificial Sequence
  Description of Artificial Sequence: Synthetic oligonucleotide
  Antisense strand to SEQ ID NO: 1878965
uuauacagcuacuacauaa

SEQ ID NO: 1878967 - RNA, 19 nt, Artificial Sequence
  Description of Artificial Sequence: Synthetic oligonucleotide
  Sense strand starting at position 2084 of SEQ ID NO: 1564492
gcuguauaaucaguuuaaa

SEQ ID NO: 1878968 - RNA, 19 nt, Artificial Sequence
  Description of Artificial Sequence: Synthetic oligonucleotide
  Antisense strand to SEQ ID NO: 1878967
uuuaaacugauuauacagc

SEQ ID NO: 1878969 - RNA, 19 nt, Artificial Sequence
  Description of Artificial Sequence: Synthetic oligonucleotide
  Sense strand starting at position 2343 of SEQ ID NO: 1564492
cugcauuuaugagaaauaa

SEQ ID NO: 1878970 - RNA, 19 nt, Artificial Sequence
  Description of Artificial Sequence: Synthetic oligonucleotide
  Antisense strand to SEQ ID NO: 1878969
uuauuucucauaaaugcag

SEQ ID NO: 1878971 - RNA, 19 nt, Artificial Sequence
  Description of Artificial Sequence: Synthetic oligonucleotide
  Sense strand starting at position 2695 of SEQ ID NO: 1564492
ggcaacagauuagaaacua

SEQ ID NO: 1878972 - RNA, 19 nt, Artificial Sequence
  Description of Artificial Sequence: Synthetic oligonucleotide
  Antisense strand to SEQ ID NO: 1878971
uaguuucuaaucuguugcc

SEQ ID NO: 1878973 - RNA, 19 nt, Artificial Sequence
  Description of Artificial Sequence: Synthetic oligonucleotide
  Sense strand starting at position 2711 of SEQ ID NO: 1564492
cuaugaucuccgcagaaug

SEQ ID NO: 1878974 - RNA, 19 nt, Artificial Sequence
  Description of Artificial Sequence: Synthetic oligonucleotide
  Antisense strand to SEQ ID NO: 1878973
cauucugcggagaucauag

SEQ ID NO: 1878975 - RNA, 19 nt, Artificial Sequence
  Description of Artificial Sequence: Synthetic oligonucleotide
  Sense strand starting at position 2722 of SEQ ID NO: 1564492
gcagaauggagcugaguuc

SEQ ID NO: 1878976 - RNA, 19 nt, Artificial Sequence
  Description of Artificial Sequence: Synthetic oligonucleotide
  Antisense strand to SEQ ID NO: 1878975
gaacucagcuccauucugc

SEQ ID NO: 1878977 - RNA, 19 nt, Artificial Sequence
  Description of Artificial Sequence: Synthetic oligonucleotide
  Sense strand starting at position 2729 of SEQ ID NO: 1564492
ggagcugaguucccgucaa

SEQ ID NO: 1878978 - RNA, 19 nt, Artificial Sequence
  Description of Artificial Sequence: Synthetic oligonucleotide
  Antisense strand to SEQ ID NO: 1878977
uugacgggaacucagcucc

SEQ ID NO: 1878979 - RNA, 19 nt, Artificial Sequence
  Description of Artificial Sequence: Synthetic oligonucleotide
  Sense strand starting at position 2733 of SEQ ID NO: 1564492
cugaguucccgucaauauu

SEQ ID NO: 1878980 - RNA, 19 nt, Artificial Sequence
  Description of Artificial Sequence: Synthetic oligonucleotide
  Antisense strand to SEQ ID NO: 1878979
aauauugacgggaacucag

SEQ ID NO: 1878981 - RNA, 19 nt, Artificial Sequence
  Description of Artificial Sequence: Synthetic oligonucleotide
  Sense strand starting at position 2741 of SEQ ID NO: 1564492
ccgucaauauucccacuga

SEQ ID NO: 1878982 - RNA, 19 nt, Artificial Sequence
  Description of Artificial Sequence: Synthetic oligonucleotide
  Antisense strand to SEQ ID NO: 1878981
ucagugggaauauugacgg

SEQ ID NO: 1878983 - RNA, 19 nt, Artificial Sequence
  Description of Artificial Sequence: Synthetic oligonucleotide
  Sense strand starting at position 2742 of SEQ ID NO: 1564492
cgucaauauucccacugau

SEQ ID NO: 1878984 - RNA, 19 nt, Artificial Sequence
  Description of Artificial Sequence: Synthetic oligonucleotide
  Antisense strand to SEQ ID NO: 1878983
aucagugggaauauugacg

SEQ ID NO: 1878985 - RNA, 19 nt, Artificial Sequence
  Description of Artificial Sequence: Synthetic oligonucleotide
  Sense strand starting at position 2825 of SEQ ID NO: 1564492
gagugcauccagugcucaa

SEQ ID NO: 1878986 - RNA, 19 nt, Artificial Sequence
  Description of Artificial Sequence: Synthetic oligonucleotide
  Antisense strand to SEQ ID NO: 1878985
uugagcacuggaugcacuc

SEQ ID NO: 1878987 - RNA, 19 nt, Artificial Sequence
  Description of Artificial Sequence: Synthetic oligonucleotide
  Sense strand starting at position 2835 of SEQ ID NO: 1564492
agugcucaacugugugaua

SEQ ID NO: 1878988 - RNA, 19 nt, Artificial Sequence
  Description of Artificial Sequence: Synthetic oligonucleotide
  Antisense strand to SEQ ID NO: 1878987
uaucacacaguugagcacu

SEQ ID NO: 1878989 - RNA, 19 nt, Artificial Sequence
  Description of Artificial Sequence: Synthetic oligonucleotide
  Sense strand starting at position 2837 of SEQ ID NO: 1564492
ugcucaacugugugauaca

SEQ ID NO: 1878990 - RNA, 19 nt, Artificial Sequence
  Description of Artificial Sequence: Synthetic oligonucleotide
  Antisense strand to SEQ ID NO: 1878989
uguaucacacaguugagca

SEQ ID NO: 1878991 - RNA, 19 nt, Artificial Sequence
  Description of Artificial Sequence: Synthetic oligonucleotide
  Sense strand starting at position 2844 of SEQ ID NO: 1564492
cugugugauacaggugcaa

SEQ ID NO: 1878992 - RNA, 19 nt, Artificial Sequence
  Description of Artificial Sequence: Synthetic oligonucleotide
  Antisense strand to SEQ ID NO: 1878991
uugcaccuguaucacacag

SEQ ID NO: 1878993 - RNA, 19 nt, Artificial Sequence
  Description of Artificial Sequence: Synthetic oligonucleotide
  Sense strand starting at position 2870 of SEQ ID NO: 1564492
cugagucgacuuugucagu

SEQ ID NO: 1878994 - RNA, 19 nt, Artificial Sequence
  Description of Artificial Sequence: Synthetic oligonucleotide
  Antisense strand to SEQ ID NO: 1878993
acugacaaagucgacucag

SEQ ID NO: 1878995 - RNA, 19 nt, Artificial Sequence
  Description of Artificial Sequence: Synthetic oligonucleotide
  Sense strand starting at position 2893 of SEQ ID NO: 1564492
uuacuccagccaugaaagu

SEQ ID NO: 1878996 - RNA, 19 nt, Artificial Sequence
  Description of Artificial Sequence: Synthetic oligonucleotide
  Antisense strand to SEQ ID NO: 1878995
acuuucauggcuggaguaa

SEQ ID NO: 1878997 - RNA, 19 nt, Artificial Sequence
  Description of Artificial Sequence: Synthetic oligonucleotide
  Sense strand starting at position 2904 of SEQ ID NO: 1564492
augaaagucugcucauuaa

SEQ ID NO: 1878998 - RNA, 19 nt, Artificial Sequence
  Description of Artificial Sequence: Synthetic oligonucleotide
  Antisense strand to SEQ ID NO: 1878997
uuaaugagcagacuuucau

SEQ ID NO: 1878999 - RNA, 19 nt, Artificial Sequence
  Description of Artificial Sequence: Synthetic oligonucleotide
  Sense strand starting at position 3004 of SEQ ID NO: 1564492
acagccuuacuguggaaga

SEQ ID NO: 1879000 - RNA, 19 nt, Artificial Sequence
  Description of Artificial Sequence: Synthetic oligonucleotide
  Antisense strand to SEQ ID NO: 1878999
ucuuccacaguaaggcugu

SEQ ID NO: 1879001 - RNA, 19 nt, Artificial Sequence
  Description of Artificial Sequence: Synthetic oligonucleotide
  Sense strand starting at position 3087 of SEQ ID NO: 1564492
gaugcauagucacaagcau

SEQ ID NO: 1879002 - RNA, 19 nt, Artificial Sequence
  Description of Artificial Sequence: Synthetic oligonucleotide
  Antisense strand to SEQ ID NO: 1879001
augcuugugacuaugcauc

SEQ ID NO: 1879003 - RNA, 19 nt, Artificial Sequence
  Description of Artificial Sequence: Synthetic oligonucleotide
  Sense strand starting at position 3128 of SEQ ID NO: 1564492
acggcaucaaguggucaaa

SEQ ID NO: 1879004 - RNA, 19 nt, Artificial Sequence
  Description of Artificial Sequence: Synthetic oligonucleotide
  Antisense strand to SEQ ID NO: 1879003
uuugaccacuugaugccgu

SEQ ID NO: 1879005 - RNA, 19 nt, Artificial Sequence
  Description of Artificial Sequence: Synthetic oligonucleotide
  Sense strand starting at position 3265 of SEQ ID NO: 1564492
ugaaauuuaucagagaagc

SEQ ID NO: 1879006 - RNA, 19 nt, Artificial Sequence
  Description of Artificial Sequence: Synthetic oligonucleotide
  Antisense strand to SEQ ID NO: 1879005
gcuucucugauaaauuuca

SEQ ID NO: 1879007 - RNA, 19 nt, Artificial Sequence
  Description of Artificial Sequence: Synthetic oligonucleotide
  Sense strand starting at position 3275 of SEQ ID NO: 1564492
cagagaagcuuacagaaga

SEQ ID NO: 1879008 - RNA, 19 nt, Artificial Sequence
  Description of Artificial Sequence: Synthetic oligonucleotide
  Antisense strand to SEQ ID NO: 1879007
ucuucuguaagcuucucug

SEQ ID NO: 1879009 - RNA, 19 nt, Artificial Sequence
  Description of Artificial Sequence: Synthetic oligonucleotide
  Sense strand starting at position 3362 of SEQ ID NO: 1564492
aauugacagcagugacaau

SEQ ID NO: 1879010 - RNA, 19 nt, Artificial Sequence
  Description of Artificial Sequence: Synthetic oligonucleotide
  Antisense strand to SEQ ID NO: 1879009
auugucacugcugucaauu

SEQ ID NO: 1879011 - RNA, 19 nt, Artificial Sequence
  Description of Artificial Sequence: Synthetic oligonucleotide
  Sense strand starting at position 3374 of SEQ ID NO: 1564492
ugacaauagaaguggucaa

SEQ ID NO: 1879012 - RNA, 19 nt, Artificial Sequence
  Description of Artificial Sequence: Synthetic oligonucleotide
  Antisense strand to SEQ ID NO: 1879011
uugaccacuucuauuguca

SEQ ID NO: 1879013 - RNA, 19 nt, Artificial Sequence
  Description of Artificial Sequence: Synthetic oligonucleotide
  Sense strand starting at position 3583 of SEQ ID NO: 1564492
gaucauauguugucaggag

SEQ ID NO: 1879014 - RNA, 19 nt, Artificial Sequence
  Description of Artificial Sequence: Synthetic oligonucleotide
  Antisense strand to SEQ ID NO: 1879013
cuccugacaacauaugauc

SEQ ID NO: 1879015 - RNA, 19 nt, Artificial Sequence
  Description of Artificial Sequence: Synthetic oligonucleotide
  Sense strand starting at position 3592 of SEQ ID NO: 1564492
uugucaggagcuugagagu

SEQ ID NO: 1879016 - RNA, 19 nt, Artificial Sequence
  Description of Artificial Sequence: Synthetic oligonucleotide
  Antisense strand to SEQ ID NO: 1879015
acucucaagcuccugacaa

SEQ ID NO: 1879017 - RNA, 19 nt, Artificial Sequence
  Description of Artificial Sequence: Synthetic oligonucleotide
  Sense strand starting at position 3605 of SEQ ID NO: 1564492
gagaguagcccggacaaua

SEQ ID NO: 1879018 - RNA, 19 nt, Artificial Sequence
  Description of Artificial Sequence: Synthetic oligonucleotide
  Antisense strand to SEQ ID NO: 1879017
uauuguccgggcuacucuc

SEQ ID NO: 1879019 - RNA, 19 nt, Artificial Sequence
  Description of Artificial Sequence: Synthetic oligonucleotide
  Sense strand starting at position 3615 of SEQ ID NO: 1564492
cggacaauauggugaaaug

SEQ ID NO: 1879020 - RNA, 19 nt, Artificial Sequence
  Description of Artificial Sequence: Synthetic oligonucleotide
  Antisense strand to SEQ ID NO: 1879019
cauuucaccauauuguccg

SEQ ID NO: 1879021 - RNA, 19 nt, Artificial Sequence
  Description of Artificial Sequence: Synthetic oligonucleotide
  Sense strand starting at position 3625 of SEQ ID NO: 1564492
ggugaaaugguuuaucuau

SEQ ID NO: 1879022 - RNA, 19 nt, Artificial Sequence
  Description of Artificial Sequence: Synthetic oligonucleotide
  Antisense strand to SEQ ID NO: 1879021
auagauaaaccauuucacc

SEQ ID NO: 1879023 - RNA, 19 nt, Artificial Sequence
  Description of Artificial Sequence: Synthetic oligonucleotide
  Sense strand starting at position 3663 of SEQ ID NO: 1564492
ggguguauugguggacauc

SEQ ID NO: 1879024 - RNA, 19 nt, Artificial Sequence
  Description of Artificial Sequence: Synthetic oligonucleotide
  Antisense strand to SEQ ID NO: 1879023
gauguccaccaauacaccc

SEQ ID NO: 1879025 - RNA, 19 nt, Artificial Sequence
  Description of Artificial Sequence: Synthetic oligonucleotide
  Sense strand starting at position 3664 of SEQ ID NO: 1564492
gguguauugguggacaucu

SEQ ID NO: 1879026 - RNA, 19 nt, Artificial Sequence
  Description of Artificial Sequence: Synthetic oligonucleotide
  Antisense strand to SEQ ID NO: 1879025
agauguccaccaauacacc

SEQ ID NO: 1879027 - RNA, 19 nt, Artificial Sequence
  Description of Artificial Sequence: Synthetic oligonucleotide
  Sense strand starting at position 3701 of SEQ ID NO: 1564492
aaaccugagucaggagaau

SEQ ID NO: 1879028 - RNA, 19 nt, Artificial Sequence
  Description of Artificial Sequence: Synthetic oligonucleotide
  Antisense strand to SEQ ID NO: 1879027
auucuccugacucagguuu

SEQ ID NO: 1879029 - RNA, 19 nt, Artificial Sequence
  Description of Artificial Sequence: Synthetic oligonucleotide
  Sense strand starting at position 91 of SEQ ID NO: 1564495
ccgucaugccuugcuaguu

SEQ ID NO: 1879030 - RNA, 19 nt, Artificial Sequence
  Description of Artificial Sequence: Synthetic oligonucleotide
  Antisense strand to SEQ ID NO: 1879029
aacuagcaaggcaugacgg

SEQ ID NO: 1879031 - RNA, 19 nt, Artificial Sequence
  Description of Artificial Sequence: Synthetic oligonucleotide
  Sense strand starting at position 277 of SEQ ID NO: 1564495
ucauccauccaguaacgaa

SEQ ID NO: 1879032 - RNA, 19 nt, Artificial Sequence
  Description of Artificial Sequence: Synthetic oligonucleotide
  Antisense strand to SEQ ID NO: 1879031
uucguuacuggauggauga

SEQ ID NO: 1879033 - RNA, 19 nt, Artificial Sequence
  Description of Artificial Sequence: Synthetic oligonucleotide
  Sense strand starting at position 360 of SEQ ID NO: 1564495
gccagagcucagcauaaac

SEQ ID NO: 1879034 - RNA, 19 nt, Artificial Sequence
  Description of Artificial Sequence: Synthetic oligonucleotide
  Antisense strand to SEQ ID NO: 1879033
guuuaugcugagcucuggc

SEQ ID NO: 1879035 - RNA, 19 nt, Artificial Sequence
  Description of Artificial Sequence: Synthetic oligonucleotide
  Sense strand starting at position 383 of SEQ ID NO: 1564495
gugugccaccaauguauuu

SEQ ID NO: 1879036 - RNA, 19 nt, Artificial Sequence
  Description of Artificial Sequence: Synthetic oligonucleotide
  Antisense strand to SEQ ID NO: 1879035
aaauacauugguggcacac

SEQ ID NO: 1879037 - RNA, 19 nt, Artificial Sequence
  Description of Artificial Sequence: Synthetic oligonucleotide
  Sense strand starting at position 468 of SEQ ID NO: 1564495
ccguaaauauuugcaucuu

SEQ ID NO: 1879038 - RNA, 19 nt, Artificial Sequence
  Description of Artificial Sequence: Synthetic oligonucleotide
  Antisense strand to SEQ ID NO: 1879037
aagaugcaaauauuuacgg

SEQ ID NO: 1879039 - RNA, 19 nt, Artificial Sequence
  Description of Artificial Sequence: Synthetic oligonucleotide
  Sense strand starting at position 778 of SEQ ID NO: 1564495
ucucaaugucaucaugggu

SEQ ID NO: 1879040 - RNA, 19 nt, Artificial Sequence
  Description of Artificial Sequence: Synthetic oligonucleotide
  Antisense strand to SEQ ID NO: 1879039
acccaugaugacauugaga

SEQ ID NO: 1879041 - RNA, 19 nt, Artificial Sequence
  Description of Artificial Sequence: Synthetic oligonucleotide
  Sense strand starting at position 781 of SEQ ID NO: 1564495
caaugucaucauggguaua

SEQ ID NO: 1879042 - RNA, 19 nt, Artificial Sequence
  Description of Artificial Sequence: Synthetic oligonucleotide
  Antisense strand to SEQ ID NO: 1879041
uauacccaugaugacauug

SEQ ID NO: 1879043 - RNA, 19 nt, Artificial Sequence
  Description of Artificial Sequence: Synthetic oligonucleotide
  Sense strand starting at position 783 of SEQ ID NO: 1564495
augucaucauggguauaug

SEQ ID NO: 1879044 - RNA, 19 nt, Artificial Sequence
  Description of Artificial Sequence: Synthetic oligonucleotide
  Antisense strand to SEQ ID NO: 1879043
cauauacccaugaugacau

SEQ ID NO: 1879045 - RNA, 19 nt, Artificial Sequence
  Description of Artificial Sequence: Synthetic oligonucleotide
  Sense strand starting at position 784 of SEQ ID NO: 1564495
ugucaucauggguauauga

SEQ ID NO: 1879046 - RNA, 19 nt, Artificial Sequence
  Description of Artificial Sequence: Synthetic oligonucleotide
  Antisense strand to SEQ ID NO: 1879045
ucauauacccaugaugaca

SEQ ID NO: 1879047 - RNA, 19 nt, Artificial Sequence
  Description of Artificial Sequence: Synthetic oligonucleotide
  Sense strand starting at position 807 of SEQ ID NO: 1564495
acaaguaaugcaugaauug

SEQ ID NO: 1879048 - RNA, 19 nt, Artificial Sequence
  Description of Artificial Sequence: Synthetic oligonucleotide
  Antisense strand to SEQ ID NO: 1879047
caauucaugcauuacuugu

SEQ ID NO: 1879049 - RNA, 19 nt, Artificial Sequence
  Description of Artificial Sequence: Synthetic oligonucleotide
  Sense strand starting at position 808 of SEQ ID NO: 1564495
caaguaaugcaugaauugu

SEQ ID NO: 1879050 - RNA, 19 nt, Artificial Sequence
  Description of Artificial Sequence: Synthetic oligonucleotide
  Antisense strand to SEQ ID NO: 1879049
acaauucaugcauuacuug

SEQ ID NO: 1879051 - RNA, 19 nt, Artificial Sequence
  Description of Artificial Sequence: Synthetic oligonucleotide
  Sense strand starting at position 982 of SEQ ID NO: 1564495
ugcccucgugcuguauaau

SEQ ID NO: 1879052 - RNA, 19 nt, Artificial Sequence
  Description of Artificial Sequence: Synthetic oligonucleotide
  Antisense strand to SEQ ID NO: 1879051
auuauacagcacgagggca

SEQ ID NO: 1879053 - RNA, 19 nt, Artificial Sequence
  Description of Artificial Sequence: Synthetic oligonucleotide
  Sense strand starting at position 991 of SEQ ID NO: 1564495
gcuguauaauuuguacugu

SEQ ID NO: 1879054 - RNA, 19 nt, Artificial Sequence
  Description of Artificial Sequence: Synthetic oligonucleotide
  Antisense strand to SEQ ID NO: 1879053
acaguacaaauuauacagc

SEQ ID NO: 1879055 - RNA, 19 nt, Artificial Sequence
  Description of Artificial Sequence: Synthetic oligonucleotide
  Sense strand starting at position 1004 of SEQ ID NO: 1564495
uacuguacugucuauugga

SEQ ID NO: 1879056 - RNA, 19 nt, Artificial Sequence
  Description of Artificial Sequence: Synthetic oligonucleotide
  Antisense strand to SEQ ID NO: 1879055
uccaauagacaguacagua

SEQ ID NO: 1879057 - RNA, 19 nt, Artificial Sequence
  Description of Artificial Sequence: Synthetic oligonucleotide
  Sense strand starting at position 1018 of SEQ ID NO: 1564495
uuggacgagugccuaauaa

SEQ ID NO: 1879058 - RNA, 19 nt, Artificial Sequence
  Description of Artificial Sequence: Synthetic oligonucleotide
  Antisense strand to SEQ ID NO: 1879057
uuauuaggcacucguccaa

SEQ ID NO: 1879059 - RNA, 19 nt, Artificial Sequence
  Description of Artificial Sequence: Synthetic oligonucleotide
  Sense strand starting at position 1167 of SEQ ID NO: 1564495
gaauuuaugugcucucgug

SEQ ID NO: 1879060 - RNA, 19 nt, Artificial Sequence
  Description of Artificial Sequence: Synthetic oligonucleotide
  Antisense strand to SEQ ID NO: 1879059
cacgagagcacauaaauuc

SEQ ID NO: 1879061 - RNA, 19 nt, Artificial Sequence
  Description of Artificial Sequence: Synthetic oligonucleotide
  Sense strand starting at position 2494 of SEQ ID NO: 1564495
ugggauuccuaaucuccca

SEQ ID NO: 1879062 - RNA, 19 nt, Artificial Sequence
  Description of Artificial Sequence: Synthetic oligonucleotide
  Antisense strand to SEQ ID NO: 1879061
ugggagauuaggaauccca

SEQ ID NO: 1879063 - RNA, 19 nt, Artificial Sequence
  Description of Artificial Sequence: Synthetic oligonucleotide
  Sense strand starting at position 2572 of SEQ ID NO: 1564495
gacagaucucauuguugca

SEQ ID NO: 1879064 - RNA, 19 nt, Artificial Sequence
  Description of Artificial Sequence: Synthetic oligonucleotide
  Antisense strand to SEQ ID NO: 1879063
ugcaacaaugagaucuguc

SEQ ID NO: 1879065 - RNA, 19 nt, Artificial Sequence
  Description of Artificial Sequence: Synthetic oligonucleotide
  Sense strand starting at position 2612 of SEQ ID NO: 1564495
aguaaacguguuuacuuua

SEQ ID NO: 1879066 - RNA, 19 nt, Artificial Sequence
  Description of Artificial Sequence: Synthetic oligonucleotide
  Antisense strand to SEQ ID NO: 1879065
uaaaguaaacacguuuacu

SEQ ID NO: 1879067 - RNA, 19 nt, Artificial Sequence
  Description of Artificial Sequence: Synthetic oligonucleotide
  Sense strand starting at position 2625 of SEQ ID NO: 1564495
acuuuauuccuaggguuga

SEQ ID NO: 1879068 - RNA, 19 nt, Artificial Sequence
  Description of Artificial Sequence: Synthetic oligonucleotide
  Antisense strand to SEQ ID NO: 1879067
ucaacccuaggaauaaagu

SEQ ID NO: 1879069 - RNA, 19 nt, Artificial Sequence
  Description of Artificial Sequence: Synthetic oligonucleotide
  Sense strand starting at position 2800 of SEQ ID NO: 1564495
ugcguuaacguagguauuu

SEQ ID NO: 1879070 - RNA, 19 nt, Artificial Sequence
  Description of Artificial Sequence: Synthetic oligonucleotide
  Antisense strand to SEQ ID NO: 1879069
aaauaccuacguuaacgca

SEQ ID NO: 1879071 - RNA, 19 nt, Artificial Sequence
  Description of Artificial Sequence: Synthetic oligonucleotide
  Sense strand starting at position 2820 of SEQ ID NO: 1564495
gaccaagauuuguaauguc

SEQ ID NO: 1879072 - RNA, 19 nt, Artificial Sequence
  Description of Artificial Sequence: Synthetic oligonucleotide
  Antisense strand to SEQ ID NO: 1879071
gacauuacaaaucuugguc

SEQ ID NO: 1879073 - RNA, 19 nt, Artificial Sequence
  Description of Artificial Sequence: Synthetic oligonucleotide
  Sense strand starting at position 2871 of SEQ ID NO: 1564495
uuuggcauccuugaaaugu

SEQ ID NO: 1879074 - RNA, 19 nt, Artificial Sequence
  Description of Artificial Sequence: Synthetic oligonucleotide
  Antisense strand to SEQ ID NO: 1879073
acauuucaaggaugccaaa

SEQ ID NO: 1879075 - RNA, 19 nt, Artificial Sequence
  Description of Artificial Sequence: Synthetic oligonucleotide
  Sense strand starting at position 2895 of SEQ ID NO: 1564495
uuguguaauugucucauga

SEQ ID NO: 1879076 - RNA, 19 nt, Artificial Sequence
  Description of Artificial Sequence: Synthetic oligonucleotide
  Antisense strand to SEQ ID NO: 1879075
ucaugagacaauuacacaa

SEQ ID NO: 1879077 - RNA, 19 nt, Artificial Sequence
  Description of Artificial Sequence: Synthetic oligonucleotide
  Sense strand starting at position 2962 of SEQ ID NO: 1564495
uugggauugucuucuuaca

SEQ ID NO: 1879078 - RNA, 19 nt, Artificial Sequence
  Description of Artificial Sequence: Synthetic oligonucleotide
  Antisense strand to SEQ ID NO: 1879077
uguaagaagacaaucccaa

SEQ ID NO: 1879079 - RNA, 19 nt, Artificial Sequence
  Description of Artificial Sequence: Synthetic oligonucleotide
  Sense strand starting at position 2964 of SEQ ID NO: 1564495
gggauugucuucuuacaaa

SEQ ID NO: 1879080 - RNA, 19 nt, Artificial Sequence
  Description of Artificial Sequence: Synthetic oligonucleotide
  Antisense strand to SEQ ID NO: 1879079
uuuguaagaagacaauccc

SEQ ID NO: 1879081 - RNA, 19 nt, Artificial Sequence
  Description of Artificial Sequence: Synthetic oligonucleotide
  Sense strand starting at position 3134 of SEQ ID NO: 1564495
guacccaaacuguguuuaa

SEQ ID NO: 1879082 - RNA, 19 nt, Artificial Sequence
  Description of Artificial Sequence: Synthetic oligonucleotide
  Antisense strand to SEQ ID NO: 1879081
uuaaacacaguuuggguac

SEQ ID NO: 1879083 - RNA, 19 nt, Artificial Sequence
  Description of Artificial Sequence: Synthetic oligonucleotide
  Sense strand starting at position 3299 of SEQ ID NO: 1564495
gccgguaaucucuaaaugu

SEQ ID NO: 1879084 - RNA, 19 nt, Artificial Sequence
  Description of Artificial Sequence: Synthetic oligonucleotide
  Antisense strand to SEQ ID NO: 1879083
acauuuagagauuaccggc

SEQ ID NO: 1879085 - RNA, 19 nt, Artificial Sequence
  Description of Artificial Sequence: Synthetic oligonucleotide
  Sense strand starting at position 3372 of SEQ ID NO: 1564495
ucuuguccuuaacugagaa

SEQ ID NO: 1879086 - RNA, 19 nt, Artificial Sequence
  Description of Artificial Sequence: Synthetic oligonucleotide
  Antisense strand to SEQ ID NO: 1879085
uucucaguuaaggacaaga

SEQ ID NO: 1879087 - RNA, 19 nt, Artificial Sequence
  Description of Artificial Sequence: Synthetic oligonucleotide
  Sense strand starting at position 3428 of SEQ ID NO: 1564495
agugguacauaguugauau

SEQ ID NO: 1879088 - RNA, 19 nt, Artificial Sequence
  Description of Artificial Sequence: Synthetic oligonucleotide
  Antisense strand to SEQ ID NO: 1879087
auaucaacuauguaccacu

SEQ ID NO: 1879089 - RNA, 19 nt, Artificial Sequence
  Description of Artificial Sequence: Synthetic oligonucleotide
  Sense strand starting at position 3429 of SEQ ID NO: 1564495
gugguacauaguugauaua

SEQ ID NO: 1879090 - RNA, 19 nt, Artificial Sequence
  Description of Artificial Sequence: Synthetic oligonucleotide
  Antisense strand to SEQ ID NO: 1879089
uauaucaacuauguaccac

SEQ ID NO: 1879091 - RNA, 19 nt, Artificial Sequence
  Description of Artificial Sequence: Synthetic oligonucleotide
  Sense strand starting at position 3451 of SEQ ID NO: 1564495
aguuaagugcuggauagca

SEQ ID NO: 1879092 - RNA, 19 nt, Artificial Sequence
  Description of Artificial Sequence: Synthetic oligonucleotide
  Antisense strand to SEQ ID NO: 1879091
ugcuauccagcacuuaacu

SEQ ID NO: 1879093 - RNA, 19 nt, Artificial Sequence
  Description of Artificial Sequence: Synthetic oligonucleotide
  Sense strand starting at position 3453 of SEQ ID NO: 1564495
uuaagugcuggauagcaau

SEQ ID NO: 1879094 - RNA, 19 nt, Artificial Sequence
  Description of Artificial Sequence: Synthetic oligonucleotide
  Antisense strand to SEQ ID NO: 1879093
auugcuauccagcacuuaa

SEQ ID NO: 1879095 - RNA, 19 nt, Artificial Sequence
  Description of Artificial Sequence: Synthetic oligonucleotide
  Sense strand starting at position 3503 of SEQ ID NO: 1564495
uucucaagucguuaccuuu

SEQ ID NO: 1879096 - RNA, 19 nt, Artificial Sequence
  Description of Artificial Sequence: Synthetic oligonucleotide
  Antisense strand to SEQ ID NO: 1879095
aaagguaacgacuugagaa

SEQ ID NO: 1879097 - RNA, 19 nt, Artificial Sequence
  Description of Artificial Sequence: Synthetic oligonucleotide
  Sense strand starting at position 3594 of SEQ ID NO: 1564495
ucagcuugugcucaacuga

SEQ ID NO: 1879098 - RNA, 19 nt, Artificial Sequence
  Description of Artificial Sequence: Synthetic oligonucleotide
  Antisense strand to SEQ ID NO: 1879097
ucaguugagcacaagcuga

SEQ ID NO: 1879099 - RNA, 19 nt, Artificial Sequence
  Description of Artificial Sequence: Synthetic oligonucleotide
  Sense strand starting at position 3638 of SEQ ID NO: 1564495
gggcgauccaucuguacaa

SEQ ID NO: 1879100 - RNA, 19 nt, Artificial Sequence
  Description of Artificial Sequence: Synthetic oligonucleotide
  Antisense strand to SEQ ID NO: 1879099
uuguacagauggaucgccc

SEQ ID NO: 1879101 - RNA, 19 nt, Artificial Sequence
  Description of Artificial Sequence: Synthetic oligonucleotide
  Sense strand starting at position 3639 of SEQ ID NO: 1564495
ggcgauccaucuguacaaa

SEQ ID NO: 1879102 - RNA, 19 nt, Artificial Sequence
  Description of Artificial Sequence: Synthetic oligonucleotide
  Antisense strand to SEQ ID NO: 1879101
uuuguacagauggaucgcc

SEQ ID NO: 1879103 - RNA, 19 nt, Artificial Sequence
  Description of Artificial Sequence: Synthetic oligonucleotide
  Sense strand starting at position 3700 of SEQ ID NO: 1564495
ccagcuaugggaggcuuaa

SEQ ID NO: 1879104 - RNA, 19 nt, Artificial Sequence
  Description of Artificial Sequence: Synthetic oligonucleotide
  Antisense strand to SEQ ID NO: 1879103
uuaagccucccauagcugg

SEQ ID NO: 1879105 - RNA, 19 nt, Artificial Sequence
  Description of Artificial Sequence: Synthetic oligonucleotide
  Sense strand starting at position 3718 of SEQ ID NO: 1564495
agcccauuuguuugggcua

SEQ ID NO: 1879106 - RNA, 19 nt, Artificial Sequence
  Description of Artificial Sequence: Synthetic oligonucleotide
  Antisense strand to SEQ ID NO: 1879105
uagcccaaacaaaugggcu

SEQ ID NO: 1879107 - RNA, 19 nt, Artificial Sequence
  Description of Artificial Sequence: Synthetic oligonucleotide
  Sense strand starting at position 3729 of SEQ ID NO: 1564495
uugggcuaugauugugaua

SEQ ID NO: 1879108 - RNA, 19 nt, Artificial Sequence
  Description of Artificial Sequence: Synthetic oligonucleotide
  Antisense strand to SEQ ID NO: 1879107
uaucacaaucauagcccaa

SEQ ID NO: 1879109 - RNA, 19 nt, Artificial Sequence
  Description of Artificial Sequence: Synthetic oligonucleotide
  Sense strand starting at position 62 of SEQ ID NO: 1564496
ccguaaauauuugcaucuu

SEQ ID NO: 1879110 - RNA, 19 nt, Artificial Sequence
  Description of Artificial Sequence: Synthetic oligonucleotide
  Antisense strand to SEQ ID NO: 1879109
aagaugcaaauauuuacgg

SEQ ID NO: 1879111 - RNA, 19 nt, Artificial Sequence
  Description of Artificial Sequence: Synthetic oligonucleotide
  Sense strand starting at position 372 of SEQ ID NO: 1564496
ucucaaugucaucaugggu

SEQ ID NO: 1879112 - RNA, 19 nt, Artificial Sequence
  Description of Artificial Sequence: Synthetic oligonucleotide
  Antisense strand to SEQ ID NO: 1879111
acccaugaugacauugaga

SEQ ID NO: 1879113 - RNA, 19 nt, Artificial Sequence
  Description of Artificial Sequence: Synthetic oligonucleotide
  Sense strand starting at position 375 of SEQ ID NO: 1564496
caaugucaucauggguaua

SEQ ID NO: 1879114 - RNA, 19 nt, Artificial Sequence
  Description of Artificial Sequence: Synthetic oligonucleotide
  Antisense strand to SEQ ID NO: 1879113
uauacccaugaugacauug

SEQ ID NO: 1879115 - RNA, 19 nt, Artificial Sequence
  Description of Artificial Sequence: Synthetic oligonucleotide
  Sense strand starting at position 377 of SEQ ID NO: 1564496
augucaucauggguauaug

SEQ ID NO: 1879116 - RNA, 19 nt, Artificial Sequence
  Description of Artificial Sequence: Synthetic oligonucleotide
  Antisense strand to SEQ ID NO: 1879115
cauauacccaugaugacau

SEQ ID NO: 1879117 - RNA, 19 nt, Artificial Sequence
  Description of Artificial Sequence: Synthetic oligonucleotide
  Sense strand starting at position 378 of SEQ ID NO: 1564496
ugucaucauggguauauga

SEQ ID NO: 1879118 - RNA, 19 nt, Artificial Sequence
  Description of Artificial Sequence: Synthetic oligonucleotide
  Antisense strand to SEQ ID NO: 1879117
ucauauacccaugaugaca

SEQ ID NO: 1879119 - RNA, 19 nt, Artificial Sequence
  Description of Artificial Sequence: Synthetic oligonucleotide
  Sense strand starting at position 401 of SEQ ID NO: 1564496
acaaguaaugcaugaauug

SEQ ID NO: 1879120 - RNA, 19 nt, Artificial Sequence
  Description of Artificial Sequence: Synthetic oligonucleotide
  Antisense strand to SEQ ID NO: 1879119
caauucaugcauuacuugu

SEQ ID NO: 1879121 - RNA, 19 nt, Artificial Sequence
  Description of Artificial Sequence: Synthetic oligonucleotide
  Sense strand starting at position 402 of SEQ ID NO: 1564496
caaguaaugcaugaauugu

SEQ ID NO: 1879122 - RNA, 19 nt, Artificial Sequence
  Description of Artificial Sequence: Synthetic oligonucleotide
  Antisense strand to SEQ ID NO: 1879121
acaauucaugcauuacuug

SEQ ID NO: 1879123 - RNA, 19 nt, Artificial Sequence
  Description of Artificial Sequence: Synthetic oligonucleotide
  Sense strand starting at position 576 of SEQ ID NO: 1564496
ugcccucgugcuguauaau

SEQ ID NO: 1879124 - RNA, 19 nt, Artificial Sequence
  Description of Artificial Sequence: Synthetic oligonucleotide
  Antisense strand to SEQ ID NO: 1879123
auuauacagcacgagggca

SEQ ID NO: 1879125 - RNA, 19 nt, Artificial Sequence
  Description of Artificial Sequence: Synthetic oligonucleotide
  Sense strand starting at position 585 of SEQ ID NO: 1564496
gcuguauaauuuguacugu

SEQ ID NO: 1879126 - RNA, 19 nt, Artificial Sequence
  Description of Artificial Sequence: Synthetic oligonucleotide
  Antisense strand to SEQ ID NO: 1879125
acaguacaaauuauacagc

SEQ ID NO: 1879127 - RNA, 19 nt, Artificial Sequence
  Description of Artificial Sequence: Synthetic oligonucleotide
  Sense strand starting at position 598 of SEQ ID NO: 1564496
uacuguacugucuauugga

SEQ ID NO: 1879128 - RNA, 19 nt, Artificial Sequence
  Description of Artificial Sequence: Synthetic oligonucleotide
  Antisense strand to SEQ ID NO: 1879127
uccaauagacaguacagua

SEQ ID NO: 1879129 - RNA, 19 nt, Artificial Sequence
  Description of Artificial Sequence: Synthetic oligonucleotide
  Sense strand starting at position 612 of SEQ ID NO: 1564496
uuggacgagugccuaauaa

SEQ ID NO: 1879130 - RNA, 19 nt, Artificial Sequence
  Description of Artificial Sequence: Synthetic oligonucleotide
  Antisense strand to SEQ ID NO: 1879129
uuauuaggcacucguccaa

SEQ ID NO: 1879131 - RNA, 19 nt, Artificial Sequence
  Description of Artificial Sequence: Synthetic oligonucleotide
  Sense strand starting at position 761 of SEQ ID NO: 1564496
gaauuuaugugcucucgug

SEQ ID NO: 1879132 - RNA, 19 nt, Artificial Sequence
  Description of Artificial Sequence: Synthetic oligonucleotide
  Antisense strand to SEQ ID NO: 1879131
cacgagagcacauaaauuc

SEQ ID NO: 1879133 - RNA, 19 nt, Artificial Sequence
  Description of Artificial Sequence: Synthetic oligonucleotide
  Sense strand starting at position 2088 of SEQ ID NO: 1564496
ugggauuccuaaucuccca

SEQ ID NO: 1879134 - RNA, 19 nt, Artificial Sequence
  Description of Artificial Sequence: Synthetic oligonucleotide
  Antisense strand to SEQ ID NO: 1879133
ugggagauuaggaauccca

SEQ ID NO: 1879135 - RNA, 19 nt, Artificial Sequence
  Description of Artificial Sequence: Synthetic oligonucleotide
  Sense strand starting at position 2166 of SEQ ID NO: 1564496
gacagaucucauuguugca

SEQ ID NO: 1879136 - RNA, 19 nt, Artificial Sequence
  Description of Artificial Sequence: Synthetic oligonucleotide
  Antisense strand to SEQ ID NO: 1879135
ugcaacaaugagaucuguc

SEQ ID NO: 1879137 - RNA, 19 nt, Artificial Sequence
  Description of Artificial Sequence: Synthetic oligonucleotide
  Sense strand starting at position 2206 of SEQ ID NO: 1564496
aguaaacguguuuacuuua

SEQ ID NO: 1879138 - RNA, 19 nt, Artificial Sequence
  Description of Artificial Sequence: Synthetic oligonucleotide
  Antisense strand to SEQ ID NO: 1879137
uaaaguaaacacguuuacu

SEQ ID NO: 1879139 - RNA, 19 nt, Artificial Sequence
  Description of Artificial Sequence: Synthetic oligonucleotide
  Sense strand starting at position 2219 of SEQ ID NO: 1564496
acuuuauuccuaggguuga

SEQ ID NO: 1879140 - RNA, 19 nt, Artificial Sequence
  Description of Artificial Sequence: Synthetic oligonucleotide
  Antisense strand to SEQ ID NO: 1879139
ucaacccuaggaauaaagu

SEQ ID NO: 1879141 - RNA, 19 nt, Artificial Sequence
  Description of Artificial Sequence: Synthetic oligonucleotide
  Sense strand starting at position 2394 of SEQ ID NO: 1564496
ugcguuaacguagguauuu

SEQ ID NO: 1879142 - RNA, 19 nt, Artificial Sequence
  Description of Artificial Sequence: Synthetic oligonucleotide
  Antisense strand to SEQ ID NO: 1879141
aaauaccuacguuaacgca

SEQ ID NO: 1879143 - RNA, 19 nt, Artificial Sequence
  Description of Artificial Sequence: Synthetic oligonucleotide
  Sense strand starting at position 2414 of SEQ ID NO: 1564496
gaccaagauuuguaauguc

SEQ ID NO: 1879144 - RNA, 19 nt, Artificial Sequence
  Description of Artificial Sequence: Synthetic oligonucleotide
  Antisense strand to SEQ ID NO: 1879143
gacauuacaaaucuugguc

SEQ ID NO: 1879145 - RNA, 19 nt, Artificial Sequence
  Description of Artificial Sequence: Synthetic oligonucleotide
  Sense strand starting at position 2465 of SEQ ID NO: 1564496
uuuggcauccuugaaaugu

SEQ ID NO: 1879146 - RNA, 19 nt, Artificial Sequence
  Description of Artificial Sequence: Synthetic oligonucleotide
  Antisense strand to SEQ ID NO: 1879145
acauuucaaggaugccaaa

SEQ ID NO: 1879147 - RNA, 19 nt, Artificial Sequence
  Description of Artificial Sequence: Synthetic oligonucleotide
  Sense strand starting at position 2556 of SEQ ID NO: 1564496
uugggauugucuucuuaca

SEQ ID NO: 1879148 - RNA, 19 nt, Artificial Sequence
  Description of Artificial Sequence: Synthetic oligonucleotide
  Antisense strand to SEQ ID NO: 1879147
uguaagaagacaaucccaa

SEQ ID NO: 1879149 - RNA, 19 nt, Artificial Sequence
  Description of Artificial Sequence: Synthetic oligonucleotide
  Sense strand starting at position 2558 of SEQ ID NO: 1564496
gggauugucuucuuacaaa

SEQ ID NO: 1879150 - RNA, 19 nt, Artificial Sequence
  Description of Artificial Sequence: Synthetic oligonucleotide
  Antisense strand to SEQ ID NO: 1879149
uuuguaagaagacaauccc

SEQ ID NO: 1879151 - RNA, 19 nt, Artificial Sequence
  Description of Artificial Sequence: Synthetic oligonucleotide
  Sense strand starting at position 2728 of SEQ ID NO: 1564496
guacccaaacuguguuuaa

SEQ ID NO: 1879152 - RNA, 19 nt, Artificial Sequence
  Description of Artificial Sequence: Synthetic oligonucleotide
  Antisense strand to SEQ ID NO: 1879151
uuaaacacaguuuggguac

SEQ ID NO: 1879153 - RNA, 19 nt, Artificial Sequence
  Description of Artificial Sequence: Synthetic oligonucleotide
  Sense strand starting at position 2893 of SEQ ID NO: 1564496
gccgguaaucucuaaaugu

SEQ ID NO: 1879154 - RNA, 19 nt, Artificial Sequence
  Description of Artificial Sequence: Synthetic oligonucleotide
  Antisense strand to SEQ ID NO: 1879153
acauuuagagauuaccggc

SEQ ID NO: 1879155 - RNA, 19 nt, Artificial Sequence
  Description of Artificial Sequence: Synthetic oligonucleotide
  Sense strand starting at position 2966 of SEQ ID NO: 1564496
ucuuguccuuaacugagaa

SEQ ID NO: 1879156 - RNA, 19 nt, Artificial Sequence
  Description of Artificial Sequence: Synthetic oligonucleotide
  Antisense strand to SEQ ID NO: 1879155
uucucaguuaaggacaaga

SEQ ID NO: 1879157 - RNA, 19 nt, Artificial Sequence
  Description of Artificial Sequence: Synthetic oligonucleotide
  Sense strand starting at position 3022 of SEQ ID NO: 1564496
agugguacauaguugauau

SEQ ID NO: 1879158 - RNA, 19 nt, Artificial Sequence
  Description of Artificial Sequence: Synthetic oligonucleotide
  Antisense strand to SEQ ID NO: 1879157
auaucaacuauguaccacu

SEQ ID NO: 1879159 - RNA, 19 nt, Artificial Sequence
  Description of Artificial Sequence: Synthetic oligonucleotide
  Sense strand starting at position 3023 of SEQ ID NO: 1564496
gugguacauaguugauaua

SEQ ID NO: 1879160 - RNA, 19 nt, Artificial Sequence
  Description of Artificial Sequence: Synthetic oligonucleotide
  Antisense strand to SEQ ID NO: 1879159
uauaucaacuauguaccac

SEQ ID NO: 1879161 - RNA, 19 nt, Artificial Sequence
  Description of Artificial Sequence: Synthetic oligonucleotide
  Sense strand starting at position 3045 of SEQ ID NO: 1564496
aguuaagugcuggauagca

SEQ ID NO: 1879162 - RNA, 19 nt, Artificial Sequence
  Description of Artificial Sequence: Synthetic oligonucleotide
  Antisense strand to SEQ ID NO: 1879161
ugcuauccagcacuuaacu

SEQ ID NO: 1879163 - RNA, 19 nt, Artificial Sequence
  Description of Artificial Sequence: Synthetic oligonucleotide
  Sense strand starting at position 3047 of SEQ ID NO: 1564496
uuaagugcuggauagcaau

SEQ ID NO: 1879164 - RNA, 19 nt, Artificial Sequence
  Description of Artificial Sequence: Synthetic oligonucleotide
  Antisense strand to SEQ ID NO: 1879163
auugcuauccagcacuuaa

SEQ ID NO: 1879165 - RNA, 19 nt, Artificial Sequence
  Description of Artificial Sequence: Synthetic oligonucleotide
  Sense strand starting at position 3097 of SEQ ID NO: 1564496
uucucaagucguuaccuuu

SEQ ID NO: 1879166 - RNA, 19 nt, Artificial Sequence
  Description of Artificial Sequence: Synthetic oligonucleotide
  Antisense strand to SEQ ID NO: 1879165
aaagguaacgacuugagaa

SEQ ID NO: 1879167 - RNA, 19 nt, Artificial Sequence
  Description of Artificial Sequence: Synthetic oligonucleotide
  Sense strand starting at position 3188 of SEQ ID NO: 1564496
ucagcuugugcucaacuga

SEQ ID NO: 1879168 - RNA, 19 nt, Artificial Sequence
  Description of Artificial Sequence: Synthetic oligonucleotide
  Antisense strand to SEQ ID NO: 1879167
ucaguugagcacaagcuga

SEQ ID NO: 1879169 - RNA, 19 nt, Artificial Sequence
  Description of Artificial Sequence: Synthetic oligonucleotide
  Sense strand starting at position 3232 of SEQ ID NO: 1564496
gggcgauccaucuguacaa

SEQ ID NO: 1879170 - RNA, 19 nt, Artificial Sequence
  Description of Artificial Sequence: Synthetic oligonucleotide
  Antisense strand to SEQ ID NO: 1879169
uuguacagauggaucgccc

SEQ ID NO: 1879171 - RNA, 19 nt, Artificial Sequence
  Description of Artificial Sequence: Synthetic oligonucleotide
  Sense strand starting at position 3233 of SEQ ID NO: 1564496
ggcgauccaucuguacaaa

SEQ ID NO: 1879172 - RNA, 19 nt, Artificial Sequence
  Description of Artificial Sequence: Synthetic oligonucleotide
  Antisense strand to SEQ ID NO: 1879171
uuuguacagauggaucgcc

SEQ ID NO: 1879173 - RNA, 19 nt, Artificial Sequence
  Description of Artificial Sequence: Synthetic oligonucleotide
  Sense strand starting at position 3294 of SEQ ID NO: 1564496
ccagcuaugggaggcuuaa

SEQ ID NO: 1879174 - RNA, 19 nt, Artificial Sequence
  Description of Artificial Sequence: Synthetic oligonucleotide
  Antisense strand to SEQ ID NO: 1879173
uuaagccucccauagcugg

SEQ ID NO: 1879175 - RNA, 19 nt, Artificial Sequence
  Description of Artificial Sequence: Synthetic oligonucleotide
  Sense strand starting at position 3312 of SEQ ID NO: 1564496
agcccauuuguuugggcua

SEQ ID NO: 1879176 - RNA, 19 nt, Artificial Sequence
  Description of Artificial Sequence: Synthetic oligonucleotide
  Antisense strand to SEQ ID NO: 1879175
uagcccaaacaaaugggcu

SEQ ID NO: 1879177 - RNA, 19 nt, Artificial Sequence
  Description of Artificial Sequence: Synthetic oligonucleotide
  Sense strand starting at position 3323 of SEQ ID NO: 1564496
uugggcuaugauugugaua

SEQ ID NO: 1879178 - RNA, 19 nt, Artificial Sequence
  Description of Artificial Sequence: Synthetic oligonucleotide
  Antisense strand to SEQ ID NO: 1879177
uaucacaaucauagcccaa

SEQ ID NO: 1879179 - RNA, 19 nt, Artificial Sequence
  Description of Artificial Sequence: Synthetic oligonucleotide
  Sense strand starting at position 3651 of SEQ ID NO: 1564496
ugggauuacagcuguaaau

SEQ ID NO: 1879180 - RNA, 19 nt, Artificial Sequence
  Description of Artificial Sequence: Synthetic oligonucleotide
  Antisense strand to SEQ ID NO: 1879179
auuuacagcuguaauccca

SEQ ID NO: 1879181 - RNA, 19 nt, Artificial Sequence
  Description of Artificial Sequence: Synthetic oligonucleotide
  Sense strand starting at position 3653 of SEQ ID NO: 1564496
ggauuacagcuguaaauca

SEQ ID NO: 1879182 - RNA, 19 nt, Artificial Sequence
  Description of Artificial Sequence: Synthetic oligonucleotide
  Antisense strand to SEQ ID NO: 1879181
ugauuuacagcuguaaucc

SEQ ID NO: 1879183 - RNA, 19 nt, Artificial Sequence
  Description of Artificial Sequence: Synthetic oligonucleotide
  Sense strand starting at position 3699 of SEQ ID NO: 1564496
guccuuaugguaugucaag

SEQ ID NO: 1879184 - RNA, 19 nt, Artificial Sequence
  Description of Artificial Sequence: Synthetic oligonucleotide
  Antisense strand to SEQ ID NO: 1879183
cuugacauaccauaaggac

SEQ ID NO: 1879185 - RNA, 19 nt, Artificial Sequence
  Description of Artificial Sequence: Synthetic oligonucleotide
  Sense strand starting at position 3700 of SEQ ID NO: 1564496
uccuuaugguaugucaaga

SEQ ID NO: 1879186 - RNA, 19 nt, Artificial Sequence
  Description of Artificial Sequence: Synthetic oligonucleotide
  Antisense strand to SEQ ID NO: 1879185
ucuugacauaccauaagga

SEQ ID NO: 1879187 - RNA, 19 nt, Artificial Sequence
  Description of Artificial Sequence: Synthetic oligonucleotide
  Sense strand starting at position 3727 of SEQ ID NO: 1564496
ucaugucaacuguaagcaa

SEQ ID NO: 1879188 - RNA, 19 nt, Artificial Sequence
  Description of Artificial Sequence: Synthetic oligonucleotide
  Antisense strand to SEQ ID NO: 1879187
uugcuuacaguugacauga

SEQ ID NO: 1879189 - DNA, 4001 bp, Homo sapiens; identical to SEQ ID NO: 2

SEQ ID NO: 1879190 - DNA, 4001 bp, Homo sapiens
ttagaaattaatgtttttttggttctggcagcacttttatttttccatacacaatgatatattgctggggcctaatgttctcacgtaacagtagaaaaccaaaatttgttgtcatctctttaaagatcgagaattgcatacaaaaaaactttacataaattaaaaggatgaatacatttataggtataaatgcaaaccgcttccaactcaaggcgagtaacagcccatggtgttctggcagacaacagaagctaagaaaggaaactgggtcctatggcttggactttccaaccctgacagaccgacaggacagaaacaactggttaaggagcccttaccagcctgtagacaaatcccagaacactcagtcctgacacattaataccctgcacagatcagagactgctggccatgcagactcaccaagccagacttgtcttccacaagtacgtttttagccatgaagtgaccaagccacatgtactaaagactgaaatcaaagatatgtacagataccaaggggaacagttaacttgaatacaatgtcaaaatcaggaacaagttctacaatccagtgctgatatcagatacaagctttaaagacaacttattttctaaggcttattccagtttggtgaggctagcatgaggtgtatgcatttgccaggggcaaatttttacttctgaattaacccatgaagcaattgctagccatctgctcacagtccatttagaagcatttgcggtggacgatggagggggccaagtcattgtactattgcttgctaatccacatctgctggaaggctgacagtgaggccaggatggagccgctgatccacacggagtacttgtgctctggggatgcgatcatcttgatcttcatggtgctaggtgcccgggtggtgatctccttctgcatcctgtcggtgatgcctgggtacatgttgccaccagatagcaccgtgttggcctacaggtctttgcggatgtccacgtcacacttcatgatggagttgaagatggtctgggtggatgccacaagattccatgtccaggaaggaaggctggaacagcgtctcgggacactgcaacctcattgccgatggtgatgacatggccatcaggcagctcatatctcttctccagggaggaggaggatgtggcagtggccatctactgctcaaagtccagggcaacatagcacagtttctccttgacgtagtgtctgatctcccgctcggcagtggtgctgaagctatagccaaccttggtaaggatcttcatgaggtagttggtcaggtcctggccagccaggtccagatgcagaatggtgtcagggagggcgtagcccttatagatgggcaccatgtgggtgaccccatctccaaagcccatgacaatgccagtgtgcaaccacaggtgtagagggacagcctagcctggatggccacgtacatggccagggtgttgaaggtatcaaacatgatctgagtcatcttctctctgttggccttgaggttcagggggtcctcggtcagcagcaccaggtgctcctccaaggccatgtgcagtcccttgtagaaggtgtgatgccagatcttctctatgtcatcccagttggtcatgataccatgcttaatgggggtacttcagggtcaggatactgtgcttgctctcagccatgtagcccacataggagtccctctggcccatgcccaccatcatgccctggtgccgggggcaccgatgatggaaggaaacatggctgggggttgtcgtccccagcaaagccagctttgcacatgctggagccattgtcaatcaccagtacggcaatctcttcttccattgcgactggtggaggagtgggacagtggagcggcaggacaacatggtgcatgggctggcagaggtgactggttttttcttactgataaaatcttaacctttttaaacctctggcagtgtacacacacacacacacacacacacacacacacacacaaacccacataaataaggacagtaaatatatatttaaacacataaggactgtatttatatatatatatacacaaacacacacatatctacacagtccttatgtgtgtgtgtgtatgtatatatagactctgtgtgtgtgtgcgtgtgtgtatatatgtatatatgtatggtttggctgtgtccccacccaaatctcatcttgaatgtagttcccataacccccatgtgttatgagagggacctggtaggaggtaactgaaattgaatcatgggggcggtaatcccatacagatgttttcatgatagtgagtgagttctcccaagacctcatggttgcataaggggcttttcccccttttgctcagaatttctccttcctgccatcaagtgaagaaggatgggtttgcttccccttccaccatgattgtacatttcctgaggcttcctcagtcatgtggaactgtgagtggattgaatctttttcctttatatattactcagtcttggacacttctttatagcagcatgagaacaaacatatatatatacacacacatacatacaaacatatatatatacacaaacatatatatattccatatatatataatgcagtgtatatatatatagtctatatagtctttatatatgtgtgtatatatataaatcctaataacaaataaggactgtcttttgtttgtgatatccgtcactaatagaaaataacaattgaagccaactgaattctcaaaatatttaactattttcaaatttttgtcatgtttccatttcaaacagacatattatgtgatatttccatttttaaaatcagccctgtttcccatccttaattcaaagttttggttatttaaatttctccattaatgatttaagaaaacgtttaaaatctcaaagcccatgaattggagaaactaacttttttccccttgatcaactcatgtgcttaatatagtgcatatagtagtaggattggtggtggtggtggttttctccctgtaggcaaatatttcttgtacctgacaaaatgctaaataaataaatttgtgtaatttttccttcttaatgtaatgtaagtgaaatgctatgaaagggagtaatagtacaggtaggaaaaacttcatccatccattcaacaagtgttaagtgtgtgtctgctttttgctaagcactgtaggtgatgttcaggagacaattatgaaaaagacaggtttctgttctcagagaacttacattctagtggaaagaaaagaaaatatattagtaaataacagtaatagcaacagtactaacagtgatgataaaaataatttcagatagcaataagaactagtataaaatcataaaatagaaagtgacttttccatcagggtattatagactggatggtaagggaagacatcccttaaaagagtgactttatgatgtgatttgaaggattagaagtgtccagtcatttagagatcagagaaagagcaacagatagaggaaagagcaagagtaatgtcccaagaaaggaaaaagctagtacataagacacattaaaaagaaatcagtgtggctagagcacatgtgataaagggtgggataaaatgagatgagatcagagaggtaggccagatcatgtagaaccttgtagaacatgaagaaagagagagctgttaaggctgtgacatggggaactgaaagactaataaactttaaaagaaaatcaccctgcttctgggaagaaaccagattataggaggataagagtggaaaggggtagatgttagaagacttttacagtggtccaggaaagaggtgagtggcttggactagggcatagacaaggtatatttcagaggtaaacaggcagtagatttatgaatagattagagctgaaggatgaggaaaaatattaaagatataggtatttggggatgataccattttttaacatgagacaaaatgaggaagtaccagctttgacgaag

SEQ ID NO: 1879191 - DNA, 4001 bp, Homo sapiens; identical to SEQ ID NO: 25

SEQ ID NO: 1879192 - DNA, 4001 bp, Homo sapiens
tcctgcctcagcctcccaaagtgctgggattacaggcctgagccacagcgcccgacccggagagctgtttcttaatctgcctggaggaaaatccccagcccccaactttccacatacttcacatagataacactgtaacaactttgaaactaagagggagagaattaagttttcaaatttgaaattgagaagcctttgaagagtggcagcgttctagaaagttccatgattgaacaagtgaagcaaaaaactaggatagactcaactgaccatctgaactccaggaattaatagccagtgctttgggcatctggctggagccatggtacgcaccagttgtacaagttatttcattttaattttgtaaaaaaaaaaaaaaaaatccttcggctgtcacaactgttttaaataaaaattttgtgaaaaaacagtatgaagacgttgctctagatacagaacaggaactgagaaagtctggttgtgtcaaataaagcaaagtgttgataattctgactactgattaaggttacccagttactattaaatccaagcttttaaggtgctgagcaaaggaacactgtaccagaaacggcttcacatcatagcacgtcaatgggagcaatagcactaacttaactcaggccaagacttgggcttgggtcctctgtggctgctactctcctaccacacctttgcttgggagtgcacttacacagctttctttgtaatgatacaaaaagttgctgccttttggtagttaggctccagaaaggggcttccaaaccaaaatgcacttttaaatagaaatgcaactgactgcagggaggcacagaatcctgattgcctgattagcatatggtgctcagggcttaaaaccaagtatgcaaacctcacatttgcacatttccatggtgattcagctcactttcaaggtagctgaaaataaaagcaggataggggtttttgaaattgactggcttctttttacctccttttggaaagcagaaggggaaaagcactgctgccaagaacttcatcaaaactctttaactttaggtattatttaggtgttatgatagagtaactgctgtacagtaccctcttacctcaagatcaaggctgggcgcagtggctcaggtctgtaatcgcagcacttcggctgaggcgagtggatcactgaggtcaggacttcaagaccagcctgaccaacacggcaaaaccccgtctctaccaaaaatagaaaaattagccgggcatggtggcgggcacctgtaatcccagctactcgggaggctgaggttgcagtgagccgagattgccccactgcactctagcctgggcaaaagagtgagactgtgcctcaaaacaaaacaaaacaaaacataccaacacctggtgattcaaaaaaatcaagacagaggctgggtgcgatggctcacgcctgtaatcctggcactctgggaggcagaggtgggcagatcacctgaggtcgggagttcaagaccagcctgaccaacacggagaaaccccatctctactaaaaatacaaaattatctgggtgtggtggcgcatgcctgtattcccagctactcaggaggctgaggcaggagaatcatttgaacctgggaggcggaggttgcggtgagcggagatcgtgccattgcactccagcctggacaacaagagcaaaactccatctcaaaaaaaaaataataaataaataaatcaagacagaaattttgattttaaagaggtttttgattttacttggaggtttaagaactcctctaagtacagcagtaatatatttaattaaaaacccaacacctctaattagaattgaagaaaggaactgtcctttgctctaaggcaaatcaactttgtgaggcttttgctttgaattcacctgtacatatttgctcagctgacttctctaaaaggtttgcctaagagagggaaggaaaaagaggcgtcgatgagaaaagacccatatcacaccctgtatttgaataaaagatttatttttttttctcaggaaaaacagaaagttagggaaacacactacatttgacaaccaacattaatttgtagttggtcctaacccttcctggcacagctatcaaaagtacagctgtttaaccagaaccaaggtgttcaccccccacagaatgtacatgaaacactagaggactgcatgtttttccctgagagaagcgtaagacaaacagaagtcaaaaagtagtcactgggagcgccatccttctaagcaaatcctccctttcccttttggaggatttgcccgaactacgtagccagtcagcacttagaccacctgcctcctcctccccctataaacccaccactcccctcctcctttcccaaaccacttggggtgtcctaagccctcactgccccaagcccaaaatatcaactaagatccttgtctgtatttccacagtcatacctaatgaattgggaagtggggcccctaaaaaccaattcacatctatgcacttgtttccactggatttggcagacaggcttttttagttaccgtaaccagatcttaagattaattaaaaactacataaagtgcttttaggtccttagagatacatgatataaataagcggcttatgatcaagaacgataaatacataggtaaaaatagctctagcaaagatgaccttatggctctgagatgggcaggcagggcagttcttccccattacattcttagtcatcttattcatacctatttttaaatggagtccacagactaaaggtcatgttccgagactgaagctttcaaatgaccctagttccaatatagacactttcttcagtttatcagtagcttttaaactctgaggtttaacacagctcacctctttctgtaaatttaagtgagcatactcctatacaaaggaaactttagagaaagcctcataaaatgttctttcctctgaaaattcctgaggggacttttgacacattgcccccaaagacaggataaaacaatagttgaaaagataccagtccaaggaaaagggacttcctcccacctctcaatgactgttagtgtcacagcacccatggtattaccacctgctaacaggatcaagttcgtgaaagatgaaaggtctgtggactcttggtggggagggagggtcactcaggtttccagcaggggtttcacagtgccaaaatctaaaagggctagaaagagttcagggatggcaggggaaagctgtaggaattgatataaatatctgtagagggagcagaacaatcagcaatttcaaggaaggacaggaaataaaaggttaagtctgatagaacaaacatcaagactgaaatccaaagatgccaatgcaaaaacttgcaacaaggtttgggaatcattaatagaaacaaaacagtaagtatttgctttattgacatactaggcttagacctgtgtgtgtaacaagcaagcctaataatagcaccatggttagactagcctgcttttccaagccatcattttataatttattaagcaaacaagggatcaaatgtctctccatccacctgatgtgatctttttatatgcacacagctaatgagttccattcagctgaaaatcttttagtaaaagctttaaagatgagcccatgaattcactttaaatttcaccagttaaattaggtcaaatggaaggaactcaaatgagtattgcccaatcagagcccattatttgtaagtcatcagtaaccttaaaactccacttagacctaattattgaaaacttgcatataatgaagtgaaagaatttccattcatcaacctctcaatcccaggttttcaaagaaaaacctaaggaatacttaccaaaatcagataagaaaatttaaacctgcatagttatcagatttgttccactacaaccagtctgcatacagttacacatcaattcgttctgtatacactctagaactgaacagaacaaagtttagca

SEQ ID NO: 1879193 - DNA, 4001 bp, Homo sapiens
aatgtctaaaatgtagtaggtattctaaaatgtattttcttctcactgtaccccatctataacatcatccacagatgaaacacttttccagaaaacagaatttatttaatcaggaaattttgtcttagatataatagtattaaaacaatatctatatcaaatgtatactatagatttcttgaaataatatgtcagattatactcgctccatacattcatcaaaaagacttagaagttccaggcaatgctacccttgtaaaatattcctataagatatgcactatttgagagagagaataggagaaactaatttactatccgtttctctatatctttgacctctaaacaataagatagataccaaaacataatatacttaggttttattagcttaactactattagaagtgtcattaccaaataggttatgtgttagcaggtggaacttgactctggaggcagagctaggacaccagaccaaattgaggactagctaaaacagggaatgggtggaagtagctttccataagacatgcccaccactatgccctgtcagtttaccattgccatggcaacacccaaaagttactaccccttcccatggcaataatctgacgacctggaagttatcaccctatttcaataaatttcggcataatctgccccttaatttgcatacaattgaagtgggtataaatatgactgcagacatgcctttgagctgctactctaggcaactgcttatggggcagccttgctctgcaaggagcaatacctctgctgctgctgtacctgcggcttcaataaaagttgctgtctaacactaccggctcactcttaaattccttcctgggcaaaaccaaaaaccctcttcagctaagctccaatgtgggggcttgcctgccctgccttagttaagattttagcttttatagatgctctgtgtaagaaatgctcacctataagaaataatctaatatctttgaaaaatctcagcttaaagatatcatgaatttaaccaaagcctctctctacaaggaatacacataacaatctctcctaaaatgtagatccaggaaaaactttctagtcaacagatttgcttccttttatgaaacaaaagcaataatataagtcattatgttatttttgctttggtatcaaggaagcttaaaggtatatctagtgttttatttaaacactagatttttgtccccatgagtaccttcacaatctcatttacactgcattcagaatcttccaaaaatttgtttttgtttttgttttcagtcttaacttctcaaatattcaggagcctgcttctaggaagatggagcacatgtatgtttccctaattctcttgcagggtaaaactaaaactcttggactttatacacaacaacgaacataataagactcctaaaggtggagggaagcagcagactaactagggaccttgggacccagagaatgacatggtggtcagttccatgggttttctttttgcctcaaagatgcaagaatgggtactacagaagccaaaactcctgaaatgccagtaggtacaaacaaacaaaagccaacaaaaatctgttccctagacaaaggatcaggaaagaggcagcccaacaagacaagaaactcttagaaaataaattttctactatagccaacaccacagaaaaaaaactgtgaccctattatactcacaggaacaaaagctagtgagttgtctagactttcaccctctccatactgtaacaatgtgtcccaaccccaccatcagagtggtgtcagagatggccaagtaagaagctgagaccttcattcctgctgggtagcaatgagcctccacctacaccactatggtgtcagtagaggaaatgtggggtaccagaacttttactcacctcagaagaaatgaggatcccctccttgcttgtgtagtgtcagaatagtcttgtggaaaatcgtaatttttaccacagcccagaaccctgcccagcagtaacaagggaccccttctgttgcagctgtcaagtgaggaacttgtaattctactcccatctgcaataaggtggcaacatcctctttctttcagagtatttattgtctgcagaagtcaatcaagacatattatttaagtctgatgtggagtctcataatctaatacacaaaatggtcaagttttactaggaaaccacatataccaagaactaggaatatcttaaatgaaatgagaaaaatgtaattagtagatacgaacacagatatggcagatatttagaattatctggcaacgattttaaagtagccatcatcaaaatgctttatcgagcaaatataaacaagcttgaaacaaaaaaataaagaatcccctcagaaaaattaagtctcagaaaagaatatgaaaagggacagctcctgtagaaaacagtattgtggctcctcgaaaagttaaaaatagaaataccagattatccagcaattccacttctcagtatatactgaaaataattcaaagttgagtcctgaagaatatgtgttttgctttgttttgtttagtttttggattattattttcattaattttattttagattcaggggtacatgtgcaggtttgttacatgggtatattgtgtgatgctgagtattgggtttctaacaattctgtcacccaagtagtgaacatagtacccagtaggtagtttttcagccaatgcctcacgcctttcctccctccttctggaatccccagtgtttattgttcccatctttgtgtccatgtgtaccgtatgttttactcccatttataagtgagaacatatggtatttggttttctgttcctgcattaattcgcttaggatagtggcctccaggtgcatccatgttgcggcaaagaacattatttcaccctctttatggctgttgtatatgtatcctattttctttatccaatccaccattgataagcatctaggttgattccatgtcattgctatggtgaatagtgctgagataatcatgcaaatgcatgtattttttggtaaaatgatttattttcctttgggtatatacccagtaatgagattcctaagtcgaatgactgttctcttttaagaaatctccaaactgcttcccacaggggctgaactaatttacattcatgccaacggtgtataagtgttccttttcttcacaacctcaccaacatctgttatgttttgactttttaataatagccattctgactggtatgagatggtacctcattgtggttttgatttgtatctgtttgatgattagtgaggttgagcattttttcatgtttgttgactacttgtatgtcttcttctgagaagtgtctgctcatgtcctttgcctattttttaatagagatgtttggtttttgcttgttgatttaagttccttatagattctggatactagacctctgtcagtttgcaaataaaatttttcttattctgtaggttgtctgtttgctctcttgatagtttattttgctgtgaagacactgtttagtttaattaggtcccacttgtcaatttttgtctttgttgctattgcttttaaggatttagtcatattctttgcatagatcaatgtctagaagagtatttcctggattttcttctagtatttttatagttttaggttttacacattagtctttaatccatttttagttaatttttgtatgtagtgaaaggcaagggtccaatttcactctgctgtatgtggttagccagttttcccagaagcacttgctgaatagggtatcctttcccagttgtttatttttgtaaactttgttgaatatcagttggctgtatgtgggcaggtttatttcagaggtctctattcagttatgttgatctgtgtctacatttgtaccagtaccatgtcattttgtttactgcagccttgtagcatagtttgaagtcaggtaacatgatgattccagctttattcttttt

SEQ ID NO: 1879194 - DNA, 4001 bp, Homo sapiens; identical to SEQ ID NO: 62

SEQ ID NO: 1879195 - DNA, 4001 bp, Homo sapiens
cccaaagttatcctcatgctttctttacattttcaggagctcattgccaaacgccatacccttcttgtatagaaaggaaagatactttgttggccaaattcccacttttaaaatataattaattaaaactgataaaatttgaattttgctctggctctcaagaaaaagaaaaaaagtccaggcacagtggctcatgcctgtaatctcagcactttgggatgccaaaacagaaggattccttgaggacaggagtttgagaacagcttgggcaacaaagcaagaccctgtctctacaaagaaaaaaaaaattaaaaattagccagcagtggtggtatatgcctgtagtcccagcaacttgggaggctgagatggaggatcagttgagcccaggaggtcaaggctgcagtgagcagagatcatgccactgcactccagcctgggtgacagagcaagaccctgtctctctctctctctctcacacacacataaacacacacacacaaacacacacacagacaaagaaagaaagaaaggaaaagaaaaggagtgagataccattaagataaaccagaaacctgaggaacactctcattacatacaggaaaacagcttctgttgttattattttttgcatgtgtgcatgcaaaatatcaagaggattttttctggaaaaggacaatccatacccttagcaaggtaatgagcttctttgagataactggaggaactggagcatcttcccatgtcaacacttggctcaatcttgaaatccaaaggcatatccaaagaggttccactcagaatccaacagaacctttctgtagaatccaaattgattttctgaagtcaggtgactacatttggggccacgcctgcttatgcagctatcttgaccattatgtgctcagcaatacctcacaagtcactctgagatgaacactttgagcaaacagggccaggacatcacagtgacccaggctgtgaaaacacttcaggccagtccctgagtaggaatggacaacaaggtggtcaccatgctgacagctattccctgtgtgatttactttattatgaagtctaaatttgatgctgaagtgctagcctaagctcactaacctgccaacttagagaagaaggtaaccatggctaggatgactgggaatctgatggactcaattaagaatttctacagatgggaaaaccaaaactccttagtggcaagaggccaaagatggtcagcgaattgttgtttccggctggtaggtgacatttcttctattcgctaagcccattttgtgataacacagttttccatattgacaggattgttttcatcaccaaaggaaaaccgtgggtccatgttcctgtgacaatctctttgtctcattcccaacaccctctgttctgtgtttaaacctctacaaaccaggcaaactggggactatgtgtaggacccagacatggaggagaaagcaggcattgtttctacttaccttatctgcccctccactaaggtaccagttagtacaaccacgtaacactcacaagtcctacacttctaagatcagccctactgactttgtcacggtaagagttggctgttggaggcaatgattcaacaatctaaattctgattattcctttttgtatctgtcatttagaatgtgaatagtgtacatctaaaagctttaagtacattatccatcaatttttactacacaaagcagtatgctgctctgtcttcaaacagcacaatgctacagtcaacacaaagggcaaaaccatggcaatatggcaattgcaatagaaactcaccaacatcttggagtctctggatatcacaggtgaacaagttgaagggccttgcgacacagacaagcaaccctttaattctaaatcatctttttttcaacagttggaagttgactgcagttgaataacagaacaaaaacggagcttcaaaatcatggcgtgcctgcttcttctgggttcttttaactgcaagcaatcagctttgaagagcacgtagggaacttctgatgtgatacaaacttttgtctttttttttttttttgtcttttaagagcattcaaaaacacttggtctggctgtttcaattttctctttctctcctattcctagctcaagaataacatttacatatgaaagaaaataggagatggctcagaataatatgtccaaggccacgcccaggcgtcagggattcatgaattttgtatacagtgtatgatgtttctagattaaaatattttcaaaggtaacatgatataggctccctctgtaatgactgcatttgattatgctctggtaattctatcagctaactttatctcagaaatgtggggtacccacaatgcagtgcctcaactgtaaccatataccattcagtgaggctgtctagcttcaccctgtcattgtggggtggcagaagggagacactgtgatgggcaacaagtcaatccaatactcctacaagagccagatggatgtattatttatagtcagtcttagggctgtcgtccttttgggagtgcgcatgaatttgatgaccagctgttacaaatttgttatcctgaaactattttagaagttggggggaagggaggaaagccttttaaaagtgcgagtaaagcagtatttggagaaacttcctgcctgtgttttaccagaaaactttgctggttttccttgctctttggtgaggttagccctgtctttttatccaattttcccattgatgtagcctagtgtgtgctgtaaaccacggacctttgctgtgctttgggaacatttagaaaactcttaccaattaattttctgaaagtaattccagtgataaactttaaaacacattgatttaaagaagtataatgtctttttttttttttttttttttttttgagagagagtctcactctgtcaccaggctggagtacagtggcgcaatcttggctcactgcaacatccgccacccaggttcacgccatctcccacctcagcctcccgagtagctgggagtacaggcacgtgccaccaagcccagctaatttttgtatttttagtagaggcagcatttcaccatgttggccaggatggtcttgatctcttgacctcataacccacctgcctcggcctcccaaagtgctgggattacaggcatgagccaccacacccagccaaagaagtataatttttaaattttatttatttatttattttgtaaagatagagtcttgttgtgtcccaggctggagtacagtggcatgattatggctcaccacagcctctacctcctgggttcaagcaatcctcctgtctcagcctcccgagtagctgggaccacaggcatataccaccacacctggctaattttttttttctttttttcttttttttttttttttgtagagacaggatcatgctaggttgcccaggctcatctcgaactcctgggttcaagcgatcctcctcctcagcctcccaaagtgatgtgattacaggcatgagccaccatacccagcctcgaataagtataatttgtttttaatcttgtccctgaaacgtctctgcccttccctaaactttcaaacttaagttttgcaacctcctcctggagataagaagggccagaatattttaggaaaacccttcctcccttaaccaaagacttatgcttctctcctccgccctcctccccctgcctaaaggaagaacattgacttgtaattataattttttaaaataatgaatacaaggttaaatatattgcacattgatacctaatctatgctcctcaaaatgatttcaaaaagttaagattttgattaaaagtctattttcatattagaagaaatatctatagaatgaatctcaaaacatgtggtaggattacaggtaacttttattttcccgttagaactgttccttcatttattaaacaaatatgtattgaatgtacctgttaggcacacagtaccatg

SEQ ID NO: 1879196 - DNA, 4001 bp, Homo sapiens
caaaaactgatacataggtcagtcatggtggcttacacctataatcccagcacttttggaggcagtggtggcagtatcacttgagcctaggaggttgggtctgcagtgagctgtgattgcgctactgcactccagccacagagggagactggtcgcaaaaaactgatacatgaaatgcataaaatattttcttgtttcttataatgcttttcatttggttccttttctcacatactagaaatgctgatttttatatgcatatagttagctgaggaaatgtctggttttcttggataatactatttcctattctcttgagttgttacacccacgttgtgttgactgttatctgatttaatcttatcctgcaagcattttttttcacaattgtactaccatgaaacttaataatataggcatggaaccaagtaattctgaaggatatatttgggtgggttttttttgtttgtttgttttttgagacagaacctcactctgttgcccaggcacgatctcatctcactgcaacttctgcctcccaggttcaagtgattcttcgcctcagcctcccgagtagctgggactacaggcatgcaccaccaccatacctggcccctgaaagatatatttggtttagtacctgaatttggatgtaactaggaactttttcttttttaatcaagattacctaattgcaacactacttaaacttggaaaaaatgatcatgcatttttgtcttttttcttttttttgttgttgttgtttttgtttgtttgttttctttataaatgacccggtctcaggtattcttttatagcaatgcaaacagactaacacacagcaccccaggaggtttcattcttcatttggtggtgactttactgttaggtttttgtccaaatacttccatccctaagaatttactgaggcacttctaaattaaagaaagtgtgagaaacaaaagaggttacagaagagccttgggcaacctgagaaacgatgggcctagtggaagtagttgggacattcgtgagcaaccaattgccaggcttgattaaaggcctccacaacatctggctccaggggcccttcctctgccgctgccaagttctgctccaactgctccaagctggacatgcccaggatgactgcgtccccgtgggcaccctgcagctgtgagtggtggtacatccaccagagggcagccgaggtcatgctgggggcgctggcgccatacgcggcctgcagggccttctctaccagggcaatgccatcgaagtggtgcttcttccagaagcgattcctgtagatctctgcccattgagtcccaaagaagcggcccatgggctgtttcctgtccttgtccttatacttgtacttgccagtcagcaggtccccagccagagggttgaaggcatagaacctcagtccagagtgcctgaggcaggggaagagctccgttttcacctgctgggtggtggcgttgtacatgccctggtacacagtgggcagggtccagccattgctcttgcagaggttacagatcttggccacttcccaggtggcatagttggagaggccaagatccaggaacttgccctcctggtgcagctggtggcaggcactcagtgtctcttccaccggggtgctgtggtctggcctgagcaggtagaagaggtccactcggggacactgcagccacttcagtgacgtctccagctggaaccggagactgtcaggtttcagggagttcccaaacaatggattggccttggtatcaattttcaggccacccaggatggtcttggactggctgtcgctgtacacgaaggccgtgtctatcttggtgtggccgtgctccaggaaggcgcgggtgactacggcgccccatctccatggcacccaacaccgtggagggccgggacatgatggcggcaacaggagactgcgacagcccgggagcaacgtgcagtggttggaagcatcagctccctggagttggcggccgcgtggctttagggattgctgtttgtttgtttttgagacggagtttcactcttgttgcccaggctggagtgcaatggctcaccgcaacctccacctcctggattcaaatgattcttctgcctcagcctcctgagtagctgggattacaggcatgcgccaccacgcccagctaattttgtatttttagtagtgatgaggtttctccatgtcggtcaggctggtcttgaactcctgacctcaggtgatccatccacctcccaaagtgctgggattacaggcatgagccaccacgcccaccctgtctttcaggaggctgaggcaagagaatggcatgaacccgggaggcggagcttacagtaagcgagatcaggccactgcactccagcttgggtgacagagtgagactccgtctcaaaaaaaacacaacaccacaaaccacatttatgataatatacaagtactctaaaatctagatgcatttatacgtctcctatcactgcgtgtgtctgaaatttaaaacagaacatactttctactaacatgtttttgttttgtttgtttgttttttgagacagagtctcactctattgcccaggctggagtgcagtggcgcaatcttggctcactgcaacctccacctcccaggttcaagccattctcctgcctcagccttcggagtagctgggattacaggcacgcgccaaccacgcctggctaatttttgtatttttagtcgagacggggtttcgccatgttggccaggctggtcttgaactcctgacctcgggtgatccacctgccccagcctcccaaagtgctgggattacaggcgtgagctactgcgcccagccactttctacatacatgttaatcgtatcctagatacatcaagaaccttgtgaacatccattaccaaggtgttttcagcctgccctgccataaaagagaaagattaaggataacttcaggtcttttgtattttagtaaaattccatccagtatttttagatttagaacctgcacaattaattatgttttctaacatctttattttagtacacatgtgactcagaagtaattatagaaaacaatattcttatcattgctgcttgtttattttggaggatttgtcattcattgtcattcatacttgtgtagatgtgagggagcagtttcctttatattactacatttttggttgtcttttaggtcctatcagcagtatcctggtgaataaatatggaagtcgtatagtcatgattgttggtggctgcttgtcaggctgtggcttgattgcagcttctttctgtaacaccgtacagcaactatacgtctgtattggagtcattggaggtgagttactactgattcatttggaagcattagtttatggctggctattttgtatttacctgcattcatctttcagatctctggagtgaaattcttttcttatagaaatgacttgattatcattttgaagaactagagataaaagtactagaaaagcaaacttttaaagaaattgccattatataatggatatttattgtttgtcgaatgagtgaatgaattgaaagaatgattgcattccttgtcctaagaatagccagtagtggtagatacaatgtgtgtggcaacttggtgcgagagtggcaatttgatagaatgtccacataacatttctgaggggtagaggatacgcttcataattcctccccccattttaaaaatcactaaattaagataatgaactgttgatgagcataatgaataaaagttacccataacctcacaatccaaagaatatcattaacatttctatgtatatccttccatgtgtttttctatgcacagatacacctttttttgagcaaaaaaggatcaaattatgtctaatattttataaccagatttttgtcagtattaagttgaaagttttgtgaacatgaatatattcttcgtataaatttgtagaaagggaactgctgtg

SEQ ID NO: 1879197 - DNA, 4001 bp, Homo sapiens
cctatttcaaaataaaaataaaaataaaaaatcctagatcctagtgggctggaataacaggtgagtggagagtcctcttcccacttttcacacttagaaagtcacttaggctggcaagagggcagtcactagagcccttgagacctgggagggagcaggtttgatgaattattcatttggaatttttccattccaccaccacccctctgcttctcaatgtgaacttaacttcagatctgagatctgaggactttcaccagccaaccttggactcaaagacagaagacaaggattaaaaaagtaaacaaaaaaaaaatcagaaataagggccaggcagagggtgcagatctgtggtggctcacacctgtaatctcagcactttgggaggccagggcaggaggatcacttgagcccatgagtttgagaccagcctgggcaacaaagtgagactctggtttcgatgaataatacaaaaaattagccaggtgtggtggcacaggcctgtagtagtcccagctactaaggaggctgaggtgggaggatcgcttgagccctgagaggccaaagctgcaatgagccatgattgcactccagcctgggtaaaagagcaagaccctgtatcaaaaaaaaaaaaaaaaaaagaccggaaataagatcagagctctcaccgagtggcagccaggtgatctagaaagagtgtggcactgaaatgcacgcacaggcctcttttgtttgggatgtaccatgtggtgaatcagaggagaaatggacaagactccactcagacactcagagtggaaggaggcaaatggtgctaatattaagaacaaagaaacagctaacatttcccagccctcactatgtgcctgccaggcatcggcctaagcactgcaaatggcatcagactgagggcggctcctcctgcccctttacacacatcttcccctcgggctacacctgcttcccccagcaccggcggcattgccaagtcgcatttgcctttccacacccatgcccactgccctgacgcccttgccccttgtactcttcctggcaaactcctatcctatctttcttcacggggtccctcccaagaagggctcactcggctccccagccatcgctagaattggagattcctggagtgggttagtgtccatttctctccaatagcctcagacagagcatcccacagagagggcagcgagaccctgtaccacacccaattccccatctcactgagggagctgccaaggctcccaggcattgtcaccctggtgagttaccagagcaaagtccagggacccgagcagtctggcatgagcgtaggaggaagcagatagtgtgctgggtccaaactctgattttggactgtgccaggcgataagaacagaatttctgcagatcaggcccgtcaagggcacctgaagggcacaggtggggacaggagctgcacaatgctagattccaatgtttttcgtgctccagagaggggctagccaagtcattccaggcaagaccaagtcatccaggcgtcagtgagggtgctgggctacctcccggaagagaagacgacagaaaaggagtccggacaaagcaccatccagttgtccagagctagatgtgcctgaggaactggcggttcccagagttgcggtgtggacagggatggggtgggggacgaagccgtgggtgctgcccggggccagggagagcggggcagcgcacggctggtgacaggctcagctctgcaccgtgcagagggaggatcaggggccactgttacctctgcagtcgctgctgcccattcggagccccaggccgccaaggatggtctcggactggccgtcgctgtacaggaaggccgtgtctatctcggtgtggccgcgctccaggaaggcgcgcgtgactgcggcgctggtgggcgcgtccatgcggcgccccatctccatggcgcccagcaccgtggctggccgggcccgcgacagctgccgggacatgacggcggcaacgggagactgtgacagcccaggagccgcgcgcagcggtcggaagcaccaggctcggagcgggcggcctcgtggctttagggactggctcgggccgcgcccaccggtggtggagcggagggcgcggccaaaggtgcccaacgccgcccacgcgctggactccgctctcaaccacgaggaccgtctgcacttgcaccgagcaagcagcgaaatggctgtggcttcgtaccggtgactcgcgtcttggagattttaacactcctcaagtccgcaagggtgagggggtccaagggtggcgaagatcccaaaggtctgggactcctccctgccccgtcgtcccccatccctcggcctcgcccgccccggagctgtcccaggtctctgtctcctccaggagggagcttaacgggtgtggtggacctaagtaagggctgtcctgcctgcctgccgtgtggtcctggaggatgaggcttaccaaaggctcaaaacagcgtccccgtggagtgacatggttaaagtcttgaaagaaaagaactgttggcattgaattctgtacctaagtgaaacaaacaaacaaactgactgactgtggtggtttacgcctgtaatcccaacactttgggagatcaaggcaggacgatcgcctgagcccaggagtttgaatccagcctgggcaacatagggaggccctgtctcaaaagaaaaaaaaaaagaagaagaagatagaaaaatggaccaacgcccagctgcagtgtgctgtgatagctccactgcactccgccctgggtgacagagggcaaatctgtctctaaatacaaaaaaaaaaaaaaaagaccaatagacagatggaacaaatgaaaaaccaatagcaagattaatttaaacccaaccatatcaataattacattaaatataaatgaaaaaatgcttacaagtaaaaggcagagattgttagaatggataaaaaagcaaaacacaagtatatagtaaatattagaaagctattgaaatatataaacagagataagttaaaagtaaaaagatgcgccaggcggagtggttcatgcctgtaatcccagcactttgggaggccgaggggggtggatcacctgaggtcaagagttggagaccaagcctgactaacatggagaaaccccatctctactaaaaatacaaaattagccaggtggggtggcacatgcccgtaatcccagctacttgggaggctgaggcaggagaatcgctggaaccttggaggcggaggttgcagtgagccaagatcgcaccattgcactccagccgaggcaacaagagcgaaattccatctcaaaaaaaaaaagtaaaaaggtgggaaaagacataccttgacaaaactaaattttaaaaagttggaatggctacatcaatatcagacaaagtaggtttcaaaacaaaaaatactggcccgtatagtggttgacacctgtaatctcagcactttgggaggctgaaaagggaggattgagcccaggagtttgagaccagcctgggcaacacagagagatgttatctctacaaaaagttttaaaaagattatcaaaatgtggtagcatgtgcctgtggtcccagttactcaggaggttgaggtgggaggatcacctgagcctaggaggtcaaggctgcagtgagctgtgatcataccactacactccaacctgggcagcagattgagaccctgtctcaaatcaacaacaaaaacaacaacaagaaaaactaccaaagacaaagagggacctatcataatgacagaggtcaattaacaaagaaaatataatcgtcaatgtatatgcaaataaaaatagagcatcaaatacatgaaaaacaataatagaacttaagaagaaatagacaaatacaaaattatagttggaggtttcaacacaccactctcaacagttgtagaacagttgtcagtcataatttacagaaactcggtaaaggtatagaagactt

SEQ ID NO: 1879198 - DNA, 4001 bp, Homo sapiens; identical to SEQ ID NO: 102

SEQ ID NO: 1879199 - DNA, 4001 bp, Homo sapiens
aagcattgctaagaaaaattaagacctaagtaaatatcttgttgataggttgagagactcaacattgttgatgttaattctttcccatattaatctatagatataatgcagtccccatccaaagccaagcaggcttttttttttttttttttgtagaaattaaaaactggttttaagattcacatggcatgcagatgatctagaagatccacagtaactctcctgctgtgcagctggttcctaacaggtcatggacctgtccatggcctgtaggttgggaacctctgctacagaggatccagatttaaattcagaagaagcttcatctatttctgtagtttcattttcttgcaataactgctgcatcaaacttgaacttcgcaggattttctgaagctgctcaatttggccatcttgctttttaattgtatttcttaacactagaattttctatttcaagtttttgtacgtggccttgcgtctccttagtacattttatagtcgctgtaagttgattccatttttcttgaaattgaattctcatctgacctaatttcttccttgaatcctacatctcactttctcaatggacgcagtgacgcaatgaagcatccagcaaagcttttgttgttgattgtttaggacgtcaccctgtttttgttgaagttgtctcacaactacttctctttctgctttctctctttcatattgacattgtttttctttcaaatgattaactttattgatcatcctcttgttcttctagcaaaagacggtgctttatgcactcagcttgaagattttgtgctgtagcatcacatttggcttgactatcaattactgttttttcttgattgtcagctttgttgtgaacatcatccagttgctgttgaagcaacatattttgtcttcgtagttgacataatcttacttgcttttctgtgcatttttctactttatcttggccacttgtgtacattttttcaatgtccttcatttgacaccgtttggtttagctctctttgtatgtgttcaaaaaccaaagcgttttctttcagagcctctcttgtgttatggagctcagttttgaggcacctggacttactctcagctttagaaagttgctgagaaagaatcagaacatgagaattcaaattttcctgtaaatgacgcaatttatctactgtgccctggaaatcaagctcttggtctctttctgttgagtgactttgatcatgatcatgtagagcaacattcagtctacgatggtatgattccatttcgtcagtctttgcctgctttgtttttccttctccagtttagaacggagcattgtgttctcatctgtcagagcagtaagctgtccactataatgggctatcgtttttgttgatttttccccattctgttttagagccttttgaaggtcttcatgctttctttttataatttcaatgtcttttaagtatttcttttccaggatttgattttttattgtgtgtatttccagcctgagcctggcaatttcatcttgcatcaaatggtttttatgcaacaggtcttcttctttttcatgactatcagaaatctcaaactgcagagttcttgttcccattcaagtttttgatattctgtgatatttcttttttttcagatagtctcttttgtagtacactagtctttttcattttttaatttttactgtaagtcactcagtgattatctttaagttccactgatcttttacataaataaactgcatttttaattttctttttttatatgagattctggaaatacttctttttttaaattatactttaagttctggggtacatgtgcagaacatgcgggtttgttacataggtatacatgtaatgttatccctcccctagcccccacccccggacaggccccggtatgtgatgttcccctcccttttccatgtgttctcattgttcaactcccacttatgagtgagaacatgtggtgtttggttttctgttcttgtgttagtttgctgagaatgatggtttccagcttcatccatgtccctacaaaggacatgaactcatcctttttttatggctgaatactattccatgggtgtatatatgccacattttctttatccagtctataattgatggacatttgggttggttccaagtctttgctgttgtgaacaatgctgcagtaaacatacatgtgcatgtgtctttatagtagaatgatttataaccctttgggtatatacccagtaatgagattgctgggttaaatggtatttctagttctagatccttgaggaatcgccacactgtctttcacaatggttgaactaatttacactcccaccaacagtgtaaaagtattcctatttctccctgtcctttccagcatctgtggccaccatgccactttttaatgattgccattctaactggcatgagatggcatctgatggtggttttgatttgcatttccctaatgaccagtgatgatgagcattttttcatatgtttgttggctgcataaatatcttcttttgagaagtgtctatccttcgcccacttttcgatggggttgttttgctcttataaatttgtttaagttctatgtagattctggatcttagccctttgtcagatggatagattgcaaaaattttctcccattctgtaggttgcctgttcactctgatgatagtttcttttgctgtgcagaagctctttggtttaattagatctcattttgtctattttggcttttgttgccattgcttttggtgttttagtcgtgaagtctttgcctatgcctatgtcctgaatggtattgcctaggttttcttctagggtttttatggttttgggtcttacgtttaagacttcctcttttcctaattgaataccctttatttctttctcttgcctgattgccctggccagaacttccagtactatgttgagtaggaatggtgagagagggcatccttgtcttgtgctggttttccaagggaatgcctctagtttttgcccattcagtatgatattggctgtgggtttgtcataaatagctcttcttattttgagatgcgttccatcaatacctggtttattgagagtttttagcatgaagggctgttgaattttgttgaatgccttttctgcatctattgagttagggaggattccctctttttctattgtttggaatagtttcagaaggaatggtaccagctcccttttgtacctctggtagaattcggctgtgaatccatctggtcctggactttttatggttggtaggctattaattactgcctcaatttcagaacttgttattggtctattcaggaactcgacttcttcctggtttagtcttgggagggtgtatatgtccaggaatttatccatttcttctagattttctactttatttgcgtagagttgtttatagtattctctaatggtagtttgtatttctgtggtatcggtggtgatatcccctgtatcattttttattgcatttatttgattcttctctcttttcttctttattagtctggctagcagtctatctattttgttgatcttttcaaaaaaccagctcctggattcattgtttttttcgtggtctctatctccttcagtcctgctctaatcttagttatttcttgtcttctgctagcttttgaatttgtttgctcttgcttctctaggtcttttaattgtgatgttagggtgttgattttagatctttcctgctttctcttgtgggcatttagtgctataaatttccctctacacactgctttaattttgaaatggagttttgctcagtttcccaggctagagtgcggtggcatgatctcagctcactgcaacctctgccttctgggttcaagtgattcttgtgcctcagcctcccaagaaactgggactacaggcatgtgccaccacacccggctaatttttgtatttttagtagaaacagggttt

SEQ ID NO: 1879200 - DNA, 4001 bp, Homo sapiens
tatttttattttcttttacttttctacataaacataaacttcaaaaggtttgtaagatttggatctcaactaatttctacattgccagaatatactataaaaagttaaaaaaaaaacttactttgtgggttgcaatacaaactgctcttgacaatgactattccctgacagttatttttgcctaaatggagtataccttgtaaatcttcccaaatgttgtggaaaactggaatattaagaaaatgagaaattatatttattagaataaaatgtgcaaataatgacaattatttgaatgtaacaaggaattcaactgaaatcctgataagttttaaccaaagtcattaaattaccaattctagaaaagtaatcaatgaaatataatagctatcttttggtagcaaaagatataaattgtatatgtttatacaggatctttcagatcatgtgcaatttttatctaaccaatcagaaatactagtttaaaatgaatttctatatgaatatggatctgccataagaaaatctagttcaactctaattttatgtagtaaataaattggcaggtaattgtttttacaaagaatccacctgacttcccctaatgcattaaaaatatttttatttaaataactttatttataacttttagaaacatgtagtattgtttaaacatcatttgttcttcagtatttttcatttggaagtccaatagggcaaattgaatgaagtattattatctgtctcttgtagtacaatgtatccaacagacactcaataaactttttggttgttaaactgacttcattgcagtagtgtttaggtaatacttctccagaaactagtgaaatcaaaccacagtaattttatctgctgagtatatatcattgtaatcaattacttccaaatgtctttatcaataaacaaatatactaaaagaattctaggtaaccatgagttacttagggcaccatgagtgcatctgtagacccagctactcattccttgagcccaggagttggaggccagcctggtcaacagagcgagaccttgtctcttttttttaagagtcagggtctagatctgtcacccaggccagagtgcagtggtgcgaccactcctcccaccttagcctcacgagtacctgggactacaggcgcgtgtcacgacacccagataatttaaaaaatacttttgtagggacagaggctcactatgttaccaacgctgatctggaactcctggcctcatgcaatcctcccgcctcggcctcccaaagctctgggattaccggcctgagacaccgagccccgccccgcccgtctctaaataaatacttaaaagaaccccaggtaaaagctaaagcgaggatgaaattctaaatgaatttctgagcaacaactatccgtagtgagcagtgatgatttttggtgtgttctccggtaggcacacttttcaaatttatgcaatcttatccttaagatttgaaaaaaaaaaacttataaaaaatcttaaacgtggttttccatctacaatttttcgcaactgtagggatatattcaaaataaatgctggacatttccaggcattagaggggatgtggccggatggcgaggaggggccgtcctcaccaggactccaagcagttctcgcacctgacttcgtaggcctgtagttgtaaccatagcaatgccccagatgcttgaaaacatttctgaattgcggccctatcatatttttacagcaaaaccacccttattttacatattactaaatcctcttttcaccttcatttcatccctcgtcaaagttaaaaggatgaagattcttttatctcacaaaggttatgagagaaatattaaatttaaaatcactgtggagaccacctcctccgtgtaaaatgaggaagggtcacaggaagatgataatgggaacgcgccgccagactctgaaagccattaacattgtttcggccgttagggcggttggcggcaactcaccgcccagcggcggttgcgtcgcagccagaagcgtgacttcgcgcacgctccctttccactcctccactcagagccggggacgcggcgggggcgcggcggaactacagctcccatgacgctttgcgcggcatagggtgctttacaatagaagctcggttggagaggcctgcggagaaaagctgggaacggccgcttccggcatgttcatctctggacgaagaacggccgacaagtggagggcggaggagagactccaatgcccagcgggcagtgcgcgggcggcgcttgcgcgatgcgcggacgggggggcggtcgggccatttaaatgtgtgtttgtgggtgaaatggctgcgcaggtcggagcggtgcgcgtagtacgggcggtggcggcgcaggaggagccggacaaagaggggaaggagaaacctcatgctggggtctccccgcggggagttaaacggcagcgccgatctagcagtggggggtctcaggagaagcgggggcggccgagccaggagccccctctcgctccccctcaccggcggcgtcgcagccgccaacatcctgggccgctgccgccaacgaatgcagccccaactgtcccaggccctgttgagcctcttctcctgccgcctccgccgccaccttcgctggcacccgccgggcccgctgtcgctgcccctctcccggccccaagcacctcggccctcttcaccttctcgcctctgacggtgagcgcggccgggcccaagcataagggccacaaggagcggcacaagcaccatcaccaccgcggccccgatggtgatcccagctcctgcggaaccgatctcaagcacaaggacaagcaggaaaacggcgagaggactggaggggtgcctctgatcaaagcccccaagagaggtgagagcaggcaaactgcccggcttgggttctaggtctctctcagttccgatatcccgcatctttaggactgaaagacgccaaacccctgcttaccttctgctgctgtacttctctaagctcactggggtggaccctggatttcagatcgttgacacggtttgatctaactacttgaggcttctcgctccgaggccgagctgtcagttgctaatccctttaccggtcccccggagcctctcagcatttgttttcaaattctgcaaggtttccgcgccgcgttagattagtaggtggggtactaaaaaatgcctttccaaagaaaaggcatgttcctaaaatcccttctccttgttttgcttgctggagagctttagttatctgctctcccttgctccagaatagtcaggggtatggttccagtctttcaggagggaattcatataaaggttacacgactcactggttgacttagcttctgcaaggtaaaatatcagacgcagtttatcttggttctttttaatctagaggtaaaaatcattttaaagttttcatattagctatttaaattcttagaataggcatgtggaaggttttctctaccctttgatactaggaaataggaccaacagtgcctctgaaaagtgggaatttgtgcagtagatagtagaggccggaatttcagttgcatttgattctgtctagcacactttgtggatctgttaattccaatagccctcaagaatattttactagaaaatgtcagagtatccaattaaatgtggattctagaaaaattagattggccagaactgatgtcttcctgttcccaagtacctgtagcatttatttatattctttgtggaagaaatgtgatgcttttgattatgccgtatgtttgtactttatatattattttatataatttactagttgtttttcctcaggaatatttgaaatacttgtttcttagtactggaccagttaggttattacatgttaatgagacaatctttcaacctaaagttttgtgagtcttgcattctttccacgtattgagtcttaaggctaatcattttttttggtggtgctatttcc

SEQ ID NO: 1879201 - DNA, 4001 bp, Homo sapiens
aggactaggtgagaacagggtattatttgtagtcaccccgtgtaatttctgttcccctttagggagtttatggacccaaggcttatattgccacccagggtcctttatctacaaccctcctggacttctggaggatgatttgggaatatagtgtccttgtaagtatggtgttgcttttgttactttattctctactttattaaaaacagtgcttttaaaaaattggtcagtggaacttcagggttcaggcatcttttagtcagaatcacaatgccattcttgtccaaggaaatgaaagttctcagccaggtgtactctgggaggccaagaggggtggatagcttgagcctaggggttctagaccagcctgggcaacattgcaaaaccctgtctctacaaaaaatacaaaaattagctgggagtggtggtgtgtgcctgtagtcccagctactggggaagctgatatgggagaatcgcttgagcccatgaggttgagactgcagtaagctgagattgtgccacagcactccagcctgggtgacagaatgagaccctgtctcaaaaataaataagttttaaaaaataataaaaataaatttaaaaatgagaaagttcttaccttgacaggctcatttggtaacaagattactggtctgaacagagaaaggggaagtattgtcagaatgaaggaagagtagcagcaatattttataagtcaccaggatttattttttggttaaaaaaaaacgacaaaacagaaaaaagaacggttaatactttctgagtctgggatccatgtattaactgctctttctaactatatatgaatgtttaagtttctatctatttcatcccccagatcattgttatggcatgcatggagtatgaaatgggaaaggtaagttactttctagtacctgctgaccttaaaacaaaggaaagaagaaaaaggagagggaaattggcagcagaacttacctgagtgtacctagataaaacttatgtcatcttcatagttttcagtttgggaatgccacgtgattctcagaggattttttttttctcctaagaatcctatttgtttgttttctcagtagaccctatgttttacagttaaaaacaaggtatgcttttaagattaacaaatcacttgcccatttctattaattagatatctttaactgccagccagagcttttaatcctgtgccgtccaatattgcatccaccagccacatacagctattgagcatttaaaatatggctaatgtgactggggaactcaattattttaattgatttaaacttaaaaactgacatgcaattcagttatcagaaagctgtttgagtatgtgaaaatttttcaaatgtaagttttattaaatctaaatggaaataaaatatttccaaaatttggcatcctaattgagattagctataaatataaaatatacactggattttgaagacttagtaaaaaatgccaaatatctgataattattttatattggttacatgtcagaatgttttgatatattgggctaagatatgttattaaaattaatttcacctcttttcattttttaatatgtctgtttgaaaatttaaaattacatttgtggttcacattatatttttactggatatcactgttctactgttgccattctgagttgacaattctaatcaaaagcaagggaactaggtatttcacttagcttgtgcagctgttttagtagacatatgatttctgttagttcttgtgaaatactaaaaataggtcaaagatttctatttctactttttcagactcccaggaagtctgtaatttatatatcctttaatgtttgttttcccatctttggagattccaataatgtaggggttgaagcccaaaggggttagacgcacctaacctaaggtgaaggacatagagctgaatttgcttccaaatgagagagtggaaaagactagaatatatggagggaaatcactgtattctgctttgtgcaacagaaaaagtgtgagcgctactgggctgagccaggagagatgcagctggaatttggccctttctctgtatcctgtgtaagtgtaatgtctgttctcatgtctgagtaaagcctccagggtctaccttatagagagcttgtctttgcaatcactaatacttgagtcttctttttctttttaggaagctgaaaaaaggaaatctgattatataatcaggactctaaaagttaagttcaatagtgtaagtataaaataagaatgataaactcaaaagcctatagagatcaggcaagtaaatatagatgtgtgtagctcaggctgggcataagacaatgggaagtggtagggtctttgatgtcatgaatgagtcttcatattcaagagaactttgagcctggccgacatggcaaaaacctgtctctactaaaaacacacaaaaaattagctgggcgtggtggtgcatgcctgtggttccagctagtcaagaggcttaggcaggagaaatcatttaagccctggaggtggaggttgcagtgaaccgagatggtgccactgtactgcagcctgggtgacagagcaagactgtgtctcaaagaagaagaaaaaaagaagagaccattgttataatatgtcttcaatctattctataccatggcacacatataaaatgataatatttgtagggtgaacagaagctgaacagtgcatagagactggggaccagtttgagagcttaggctgccctaggccctgcccagcttctctaaggcaaaaagatttaatatatcagcatgattgtgacacattggaggcataccagttgggaaacactggtttgaactattttcatatctagctatttcctcttgtgaatggggcagatggggacaaaccaatagtaagtgacctgaaatcacttttaatggttttcagaaagcatctggtcacctgagatctatagagaagaaaccggaataaatttcaaaaaggatatagatacaacttagtatgccggactgttgtcttggtataatgaggtggagttctaaccacaagttgtcttattatcctggctatttttaaaataatttcaacttttttttttttttttttttttttgagacagagtctcgctctgtcacccagtctggagtgtggagtgtgcagtggtgcaatcttggcttactgcaacctgagcctcctgggtccaagcaactcttgtgccgtggcctccccagtagctgggactacaggtgctcaccaccttgcctggctaacttttgtatttttagtagagacagggtttccccatgttggccaggttggtcttgaactcctgacctcaagtaatctgcctgcttcggcctcccaaagtgctaggattacaggcgtaagccaccacacccagcctcaactttaatcttatgaatataagacacaagggcgtaaatgtgcaggtttgttgcatgcatgccactgaataatcccatcacccaggtagtgagcataatacccaataggtggtttttcagcccttgcccctcttcccctcccatctggctactttttataggaaactcgaactatctaccagtttcattacaagaattggccagaccatgatgtaccttcatctatagaccctattcttgagctcatctgggatgtacgttgttaccaagaggatgacagtgttcccatatgcattcactgcaggtatgacactatatataaaccttctacccaaaatgaaccaaatgtcagagtctggccaggactgtgtaattgaaaggggaaaaggttaatagcaaaaacaaacgataataaattcaacctaagcattaaattcatgtttttctgataagttacttgtgagtagtacagttctagagactcttgctctgagatgttgcctaggacctcttgcatgacaaatgggctctgggaaatggtggggtttggaaagtttaattgtccccaggtatctt

SEQ ID NO: 1879202 - DNA, 4001 bp, Homo sapiens; identical to SEQ ID NO: 118

SEQ ID NO: 1879203 - DNA, 4001 bp, Homo sapiens; identical to SEQ ID NO: 120

SEQ ID NO: 1879204 - DNA, 4001 bp, Homo sapiens; identical to SEQ ID NO: 120

SEQ ID NO: 1879205 - DNA, 4001 bp, Homo sapiens; identical to SEQ ID NO: 145

SEQ ID NO: 1879206 - DNA, 4001 bp, Homo sapiens
aaacaaatattcagtagccacagaaacctaacaggcctatgtttgctttgttttattaactccttggagggacagaacactaccaattacacccacaaacgttatcgacatcaacagaactgtaaatgacaacacggcaatattctgcactttccctatgcctaggagctaattccactttacatatattatcttattatttcacacattaaccctggaggcatgtttggagttgcctaatttttatgtacactttttgataaggaactaacaaaaataacttgctgaaggaagaaaagggagactaagtccagaactgaatgaaaagcacatggtttcttcatcctccatcaccaggctgtctaacgaggctgaagaagtaccatccatgagtaagtgcgtcaagggcaaacaaacatcatcgcatatggacagtggtgtgaaattcgagaaatccgaggagggttaacaacaacaaaaagcacaccaccacgccgatcttcctcgggtcccaggttggcaactcaacgcccgggaggaatccccccggaggcgcgccggtcctactggcctcactccctacctcctggaggtccggagtcccgctcctttccctcagcggtacaatacccgtgtcggtccattccctcaccgtgagtcgaggactagttctcctgactaggcgaccggcacacaccgcctgcgaccagctccacagcagcggtcctgctactgcgaagtaggctcaggtcaaccggcaggaaacgactcaacgcgcagccgccgcggcctccaaccaccggtgggcagaggggcgctaggcagtcctcgatccgctcgccgcgatccggcggaggaggaggagcagagggaggcgagccgcagcgctgcggcgaggagcccagggaggtaggttgtcgtggggctcggtccgccattctggcaattccagtcaaacggcaagccccgacccgctcggcccgtcccttcctctcctgcccctgcagccgacaggaatggaacagtcccgcgggggggattgtgggaggcgcacgcgcgaggggtggagggtggtagggggggctggcggcggcggcggcggccgtggcggcggttggtggccgtgggggcggggaaggggggggaggagagaagaggaggtggaggaggaggaggaggaggcttgggcttgcgccgttgaaggtacgcgtgagggcctgcgccggcgccggcttgacagggcctgaggggtagtgagggactggacgagggggttcctgtgggtgagcgcgtacgggctggctggcgcgcggggcggccgaaggtggtggttggtgggagcagccagcgacgagcccgtagacactcgtacgcgtgcgggcgggcgtgcgcgctacgcggacggagtcgggcggagcgggggacggtgggaaagaacgcaaggaggaaggagtggaaggttgaggggggcgctaggcgcccttcgctccctccctctggaggagctgccgccgccaccgccgccactctgctgctgccgccgccgccgccgccgctcccgccgccattttgggttcgctttgcggaggggagacgatcccagtctcggttgcgggacccgcctcccctcagtttgccccctttagccttccacctttcccttctcctctctcgcatttccgccagtcagcttacccgctggccgcctcctgacaagcgggagggatccgccgtggacccagggaagcggaggagcctggcggccaccccctcttccccacttccctgcactctcatcgctctcggcctcggcctcggcctccgacacggtgagtagaacgatttgggccggcattcgggcctaagcactctctcagcgattgaatcctgggctttctgggagccactgtcatctcccggacctggatctctgagagagcagtggtgaagatgggggaggggagagcagggagggggatcctgagcctaccgggaagtccctccaggcggggtgaaggggtgtccctgacaggcagactcccggagggggctgggaagtaagcgagtggaggcggagtcggctgtgcccctgacaggttagtttgtgtttgtaggcatgatcggagcctcccccatagtccagtttgtgtgtgtttaattaagggataagagtggtcgaggacacgatcttgagaggggattttacctgtgtgacaaggtctgtggtgtccctgccgcgttgaacggtatgtgggaacgacaggatgatctcagtgttgtaagtttaataaatgtcactggttagtttgtacatggaaagagatgtttttggtctagcagacagatggtctgttggtgtgtagcggctgtgttggtgtgtgtatgtgaggatggcaagtgtttccgtaagagtttgcctttatttgtgtaagtgtaatggagttccccttataagttagcttatttcttgaataaatgttgggaggttccttgcaggttgatatgtgtgtgtattttagggattgggagcccctagttacttgttgggaaagagcggcaatggtagtgttctgtacagcatgtgtctgtgaggtcagggaggggagaaacttggcatagccagttgtggtcttaagaatagtttgtgcctttggttagagtgagttgtgtaaatgtgaagggccaaaatatctttaacagaatcattactacaaagttgtaaagaatgggtggccttatttgttgtcgcgggtttatagtaatagtttacaatacaataagaaagctctttcagtttttttgtgatactgaatctctgtgaaaatggtaggatgctttcttccattttacaaaataggaaatttaggcataaggagagaacttctccaaggccgcatgttaaattggtgacaaagttggaactgtaactcccatattttcactactactgcagcagtatattcagcataccatggtgcctcaggaagtctttgtcggcaaatctgagtatgctggaaagataggagcacataagactggttggcttgtatttgggggagaccgattgtgtcagatatgtatgtggaacgtagctgtccttgccgagtctgacctgtatgaaatgcatatccatgactatattattttggatttatggaggaagcagagcatttctgacacttgaggttgtatgtgtgagggagagaaggctttcacagcttaacttgtaccagagcagctgcatgggtgctgacagcttaacttgaaatctgtgggaggaaggatcctttttcattcattcaacaaatatttgttgactgcctgttcaataaatggtccatgccttggcgtgaggataatcaaggtgtctctgtaaatagcctgggtacaacgtgaggggagttgttttgacagtggtgggtattaagttgagggaggcggtgtggaattaaaaccagagaactgtttttgggttctggtaattgttaatacatgtgcctgtggatgttggaacttcttggctgggctgaaggaatcctttgaaagactcatttcatatagtaagaatcccctctatgaatatgaagaaagaatgcataaactaagccacttaaccgtattcttctgaaaaatgggatgtttcttgataggctagatgagtggttcttaaaattttttggggtcacttatccttttgagaatctgatgaaagacactgggccctcaagttagaagatgagcataagcacaatcacatgatttatatatatgattttaggaacttaaaatgtaataaaatagagccaatttatatttaggtctcatttgaaaacctttcattttcattgttcgggtgtgtggatgttagtatgagtttaagatgaaagagtctatggtatttgaacatgttgacaggagaactttagggtccatgttttttattctttttatcatctgcaaacttatttctgcagtattagtaaaggactctgaatttggtg

SEQ ID NO: 1879207 - DNA, 4001 bp, Homo sapiens
atctggagccacataagggtgaaagcataggacattttgtcccagtaactgtggggatagaaaggcctctgaggcaggacacaaaggccatatcagggccactgcagggccagaggtcctagcacccctggctttggctctgagggtttggttgcttgcagctgaattccctaaccaaagcctgtcatgtgtggtgccaagctcacaaattcagcatgcatctactatgtgtttgcaatgactaaaaggttacagaaggcagcctggattgcggggatcggggatacttagaaaatacgttctgcaaaatgttgtattagaggttctgaaaattaagatacagaaaacattttacttaatgaagaaaatagggtaaatatgttcaaaggagtatagttgttaaaagcaaactgtttagagtcaagatcaacccagattcactttctggttctctgcagcttactagctgtgaccttcaacaagtctctcttaacctgagtcttagctttccaatatgtaaaatggacacagcattgtgagggtggttgggaggattaaatgagatcagagaatttagcaccatgactgtaaagagaaagggctctacaaatgtagctggtactacaattcacttttttttttttgagacaggacctgactgtcacccaggctggagtgcactggcatgattacagctcactgcagcctcgacctgccaggctcaagccatcctcccacctcagcctccagagtaactgggactacaggcatgcgccaccacatcctgctaatttttatattttttgtagagatggggtttttgcatgttgccaggctgatttcaaacttctgagctcaagccatctgcctgccttggcctcctaaagtgttgggattataggcaaatgagccaccacgccagcccacaattcactttaaacacaagtgaaacacatttcattagacagtggaatagacttatgtcaattttcttttctctcttattttacacagtctgatttcctgaagacaggaggcgggagtaagctaatcaggccctgagttagctgtttccaagaagcttagagtgtcccacttacctacgggttgcagggcccgcattgccagtagggctggcttttagggatgctgctgttggtgtgtgctgtacttgttttctaggattgggacaagcttccttgagctcctgactttagagaccaggtttgggaactgatgggtgcagcaaatgcaaacagacagcaaacaggccaaagaggagattcattcactgaagagggccctggtacagtactgtcgaggttttgcggtggcctggacacggctggctccttcgacttacacaatatatcttctctctctcttacctgcacttataagaatcggtgctaagggtatgtgcctaccacagtgcagcttgtagattaatgaagaaagaattgctgccacttcccaaatattaaacgccaggttctgcctatgcatattctctcaaccttcacaacacacctactaactccagcttacaaatgaggagacgaaccagcaggctgttccaggcgtctggttgtaagagcagtggcagtagagaaaatgatttattttagcaccagccactgtgctaatccctttagatatcatctcatttaatccttttaacaaccctgaagcaccatccttattctaaagggacttcggacctctctgcggtccacactgtcccctgctcggtgcaggagtgtagactgggactgttccgtctggtggtctccccgacaagggttcacctggaaactggcctttgggctgggattgggactctgtacttaggctggcagcccatattaggactgggcaccgtgataagcactttcttaccgcaaatgcacgatttcactcggccctcacacaccccacgaggtgggcaccgtcacagtgccatctcacaggcaaggaggccaggcccaggccctgaggatgcgccgctcaggtgggagcttccggggagctcgcgcgacagcctgggggagcgcggattcgtctctgcgctacggcggctgcagagggtcaacccgcggaggcggcgcttcgcggcgggtcctcggcctgaggctgtgggatgcctccaaacccggcgcggcctccgtctgcaaggagagcagagggtccccgccgggagcgcgcccggctgcggccccaggcggccctgcccgcagccgccacctgagcttgggcgcggctcctatctcccacccgcgcgtcggccagtgaagggctccgtgcttaaacatcattcgttacagaagtattgcggccatcacacggcattttaaaaacacgaatgatgataaataactttaacactgcttccaattctgcctccaagcacagcatcattaccatttgcatgcgtttcacttcattcgatttccatgtgtatggatttgtttctacatagctgtggtaaaacgcacatactaaactgaatccagggttgttttccactttgtaacatgaacattttcaccgtgttagtactgacgcttcctacctataatttttaatggcaggactttaaaaaattgggttgatacgctgtcacttctctgagcatctcgcaaatgttcaacattcaagtggcttccaaagcttcacgattataaattattcattcttttttgttttgtttggttgtttgtttgtttgtttgtttgttttttgagacgatgtctcgctcttgtcgcccaggctggagtgcagtggcgcgatctcagctcactgcaaccttcgccttccaggttcaagagattctcctgcctcagcctcctgagtagctgagattacgggcatctgccaccacgcccacctaatttttgtactttcagtagagacggggtttcatcatgttggccaggctggtctcgaacttctgacctcaggtgcttctccctcgacccggcctcggcctcccaaagtgctgggattacagcactttgctgcccagcccattcttgtgtataaagtcctttcagtattgagatcagtttccttaggttatattcacaggagtgaaactgctaagtcagaatgtgagcatttaaaagctttcagtattattgccaaatggcttttcacagatgactcagggaggttttggtacttggaacactgctacttatatcccactcccccccccccccaccaggaaaacatctaaagtgcactttttttttttttttttttttttttgtgagacggtatctcgctctgtcgcccaggctggagtgcagtggcgcgatctccgttcactgcaagctccgcctcccaggttcacgccattctcctgcctcagcctcctgagtagctgggactacaggcgcccgccaccacgcccggctaatttttgtgtttttagtagagacggggtttcaccgtgttagccaggatggtctggatctctgaccttgtgatccgcccgcctcggcctcccaaagtgctgggattacaggcgtgagccaccgcgcccggctaaaatgcagtttcattaagagatagtgaccctttctgagagtgtctacatttaattgggatcagagcttgaagttgaaaattttgtgccctgggacttcagacatcagaaaacagggtaggaagattctcacgggttaggatttttctggtgaccctgagtgggggagccacttattctgccttcacttaaggctaaactagactcccggccctgcgtagagttctgagggacaccagggtcacaaggctagtgagacagagttcatttggaagaagtgaaataatttaggaattcacagaatattgatgatgatatccttcctcctccagatgacaaggtaataaagaataatgagatgtgatcatgggaaatagccaccatgagcagcagccaccaaggcacataaatactgtggaattgactctgctgtcagcttgtgggtttctgg

SEQ ID NO: 1879208 - DNA, 4001 bp, Homo sapiens
gggtgaaagcataggacattttgtcccagtaactgtggggatagaaaggcctctgaggcaggacacaaaggccatatcagggccactgcagggccagaggtcctagcacccctggctttggctctgagggtttggttgcttgcagctgaattccctaaccaaagcctgtcatgtgtggtgccaagctcacaaattcagcatgcatctactatgtgtttgcaatgactaaaaggttacagaaggcagcctggattgcggggatcggggatacttagaaaatacgttctgcaaaatgttgtattagaggttctgaaaattaagatacagaaaacattttacttaatgaagaaaatagggtaaatatgttcaaaggagtatagttgttaaaagcaaactgtttagagtcaagatcaacccagattcactttctggttctctgcagcttactagctgtgaccttcaacaagtctctcttaacctgagtcttagctttccaatatgtaaaatggacacagcattgtgagggtggttgggaggattaaatgagatcagagaatttagcaccatgactgtaaagagaaagggctctacaaatgtagctggtactacaattcacttttttttttttgagacaggacctgactgtcacccaggctggagtgcactggcatgattacagctcactgcagcctcgacctgccaggctcaagccatcctcccacctcagcctccagagtaactgggactacaggcatgcgccaccacatcctgctaatttttatattttttgtagagatggggtttttgcatgttgccaggctgatttcaaacttctgagctcaagccatctgcctgccttggcctcctaaagtgttgggattataggcaaatgagccaccacgccagcccacaattcactttaaacacaagtgaaacacatttcattagacagtggaatagacttatgtcaattttcttttctctcttattttacacagtctgatttcctgaagacaggaggcgggagtaagctaatcaggccctgagttagctgtttccaagaagcttagagtgtcccacttacctacgggttgcagggcccgcattgccagtagggctggcttttagggatgctgctgttggtgtgtgctgtacttgttttctaggattgggacaagcttccttgagctcctgactttagagaccaggtttgggaactgatgggtgcagcaaatgcaaacagacagcaaacaggccaaagaggagattcattcactgaagagggccctggtacagtactgtcgaggttttgcggtggcctggacacggctggctccttcgacttacacaatatatcttctctctctcttacctgcacttataagaatcggtgctaagggtatgtgcctaccacagtgcagcttgtagattaatgaagaaagaattgctgccacttcccaaatattaaacgccaggttctgcctatgcatattctctcaaccttcacaacacacctactaactccagcttacaaatgaggagacgaaccagcaggctgttccaggcgtctggttgtaagagcagtggcagtagagaaaatgatttattttagcaccagccactgtgctaatccctttagatatcatctcatttaatccttttaacaaccctgaagcaccatccttattctaaagggacttcggacctctctgcggtccacactgtcccctgctcggtgcaggagtgtagactgggactgttccgtctggtggtctccccgacaagggttcacctggaaactggcctttgggctgggattgggactctgtacttaggctggcagcccatattaggactgggcaccgtgataagcactttcttaccgcaaatgcacgatttcactcggccctcacacaccccacgaggtgggcaccgtcacagtgccatctcacaggcaaggaggccaggcccaggccctgaggatgcgccgctcaggtgggagcttccggggagctcgcgcgacagcctgggggagcgcggattcgtctctgcgctacggcggctgcagagggtcaacccgcggaggcggcgcttcgcggcgggtcctcggcctgaggctgtgggatgcctccaaacccggcgcggcctccgtctgcaaggagagcagagggtccccgccgggagcgcgcccggctgcggccccaggcggccctgcccgcagccgccacctgagcttgggcgcggctcctatctcccacccgcgcgtcggccagtgaagggctccgtgcttaaacatcattcgttacagaagtattgcggccatcacacggcattttaaaaacacgaatgatgataaataactttaacactgcttccaattctgcctccaagcacagcatcattaccatttgcatgcgtttcacttcattcgatttccatgtgtatggatttgtttctacatagctgtggtaaaacgcacatactaaactgaatccagggttgttttccactttgtaacatgaacattttcaccgtgttagtactgacgcttcctacctataatttttaatggcaggactttaaaaaattgggttgatacgctgtcacttctctgagcatctcgcaaatgttcaacattcaagtggcttccaaagcttcacgattataaattattcattcttttttgttttgtttggttgtttgtttgtttgtttgtttgttttttgagacgatgtctcgctcttgtcgcccaggctggagtgcagtggcgcgatctcagctcactgcaaccttcgccttccaggttcaagagattctcctgcctcagcctcctgagtagctgagattacgggcatctgccaccacgcccacctaatttttgtactttcagtagagacggggtttcatcatgttggccaggctggtctcgaacttctgacctcaggtgcttctccctcgacccggcctcggcctcccaaagtgctgggattacagcactttgctgcccagcccattcttgtgtataaagtcctttcagtattgagatcagtttccttaggttatattcacaggagtgaaactgctaagtcagaatgtgagcatttaaaagctttcagtattattgccaaatggcttttcacagatgactcagggaggttttggtacttggaacactgctacttatatcccactcccccccccccccaccaggaaaacatctaaagtgcactttttttttttttttttttttttttgtgagacggtatctcgctctgtcgcccaggctggagtgcagtggcgcgatctccgttcactgcaagctccgcctcccaggttcacgccattctcctgcctcagcctcctgagtagctgggactacaggcgcccgccaccacgcccggctaatttttgtgtttttagtagagacggggtttcaccgtgttagccaggatggtctggatctctgaccttgtgatccgcccgcctcggcctcccaaagtgctgggattacaggcgtgagccaccgcgcccggctaaaatgcagtttcattaagagatagtgaccctttctgagagtgtctacatttaattgggatcagagcttgaagttgaaaattttgtgccctgggacttcagacatcagaaaacagggtaggaagattctcacgggttaggatttttctggtgaccctgagtgggggagccacttattctgccttcacttaaggctaaactagactcccggccctgcgtagagttctgagggacaccagggtcacaaggctagtgagacagagttcatttggaagaagtgaaataatttaggaattcacagaatattgatgatgatatccttcctcctccagatgacaaggtaataaagaataatgagatgtgatcatgggaaatagccaccatgagcagcagccaccaaggcacataaatactgtggaattgactctgctgtcagcttgtgggtttctggagtgacagattaaacc

SEQ ID NO: 1879209 - DNA, 4001 bp, Homo sapiens
gcataggacattttgtcccagtaactgtggggatagaaaggcctctgaggcaggacacaaaggccatatcagggccactgcagggccagaggtcctagcacccctggctttggctctgagggtttggttgcttgcagctgaattccctaaccaaagcctgtcatgtgtggtgccaagctcacaaattcagcatgcatctactatgtgtttgcaatgactaaaaggttacagaaggcagcctggattgcggggatcggggatacttagaaaatacgttctgcaaaatgttgtattagaggttctgaaaattaagatacagaaaacattttacttaatgaagaaaatagggtaaatatgttcaaaggagtatagttgttaaaagcaaactgtttagagtcaagatcaacccagattcactttctggttctctgcagcttactagctgtgaccttcaacaagtctctcttaacctgagtcttagctttccaatatgtaaaatggacacagcattgtgagggtggttgggaggattaaatgagatcagagaatttagcaccatgactgtaaagagaaagggctctacaaatgtagctggtactacaattcacttttttttttttgagacaggacctgactgtcacccaggctggagtgcactggcatgattacagctcactgcagcctcgacctgccaggctcaagccatcctcccacctcagcctccagagtaactgggactacaggcatgcgccaccacatcctgctaatttttatattttttgtagagatggggtttttgcatgttgccaggctgatttcaaacttctgagctcaagccatctgcctgccttggcctcctaaagtgttgggattataggcaaatgagccaccacgccagcccacaattcactttaaacacaagtgaaacacatttcattagacagtggaatagacttatgtcaattttcttttctctcttattttacacagtctgatttcctgaagacaggaggcgggagtaagctaatcaggccctgagttagctgtttccaagaagcttagagtgtcccacttacctacgggttgcagggcccgcattgccagtagggctggcttttagggatgctgctgttggtgtgtgctgtacttgttttctaggattgggacaagcttccttgagctcctgactttagagaccaggtttgggaactgatgggtgcagcaaatgcaaacagacagcaaacaggccaaagaggagattcattcactgaagagggccctggtacagtactgtcgaggttttgcggtggcctggacacggctggctccttcgacttacacaatatatcttctctctctcttacctgcacttataagaatcggtgctaagggtatgtgcctaccacagtgcagcttgtagattaatgaagaaagaattgctgccacttcccaaatattaaacgccaggttctgcctatgcatattctctcaaccttcacaacacacctactaactccagcttacaaatgaggagacgaaccagcaggctgttccaggcgtctggttgtaagagcagtggcagtagagaaaatgatttattttagcaccagccactgtgctaatccctttagatatcatctcatttaatccttttaacaaccctgaagcaccatccttattctaaagggacttcggacctctctgcggtccacactgtcccctgctcggtgcaggagtgtagactgggactgttccgtctggtggtctccccgacaagggttcacctggaaactggcctttgggctgggattgggactctgtacttaggctggcagcccatattaggactgggcaccgtgataagcactttcttaccgcaaatgcacgatttcactcggccctcacacaccccacgaggtgggcaccgtcacagtgccatctcacaggcaaggaggccaggcccaggccctgaggatgcgccgctcaggtgggagcttccggggagctcgcgcgacagcctgggggagcgcggattcgtctctgcgctacggcggctgcagagggtcaacccgcggaggcggcgcttcgcggcgggtcctcggcctgaggctgtgggatgcctccaaacccggcgcggcctccgtctgcaaggagagcagagggtccccgccgggagcgcgcccggctgcggccccaggcggccctgcccgcagccgccacctgagcttgggcgcggctcctatctcccacccgcgcgtcggccagtgaagggctccgtgcttaaacatcattcgttacagaagtattgcggccatcacacggcattttaaaaacacgaatgatgataaataactttaacactgcttccaattctgcctccaagcacagcatcattaccatttgcatgcgtttcacttcattcgatttccatgtgtatggatttgtttctacatagctgtggtaaaacgcacatactaaactgaatccagggttgttttccactttgtaacatgaacattttcaccgtgttagtactgacgcttcctacctataatttttaatggcaggactttaaaaaattgggttgatacgctgtcacttctctgagcatctcgcaaatgttcaacattcaagtggcttccaaagcttcacgattataaattattcattcttttttgttttgtttggttgtttgtttgtttgtttgtttgttttttgagacgatgtctcgctcttgtcgcccaggctggagtgcagtggcgcgatctcagctcactgcaaccttcgccttccaggttcaagagattctcctgcctcagcctcctgagtagctgagattacgggcatctgccaccacgcccacctaatttttgtactttcagtagagacggggtttcatcatgttggccaggctggtctcgaacttctgacctcaggtgcttctccctcgacccggcctcggcctcccaaagtgctgggattacagcactttgctgcccagcccattcttgtgtataaagtcctttcagtattgagatcagtttccttaggttatattcacaggagtgaaactgctaagtcagaatgtgagcatttaaaagctttcagtattattgccaaatggcttttcacagatgactcagggaggttttggtacttggaacactgctacttatatcccactcccccccccccccaccaggaaaacatctaaagtgcactttttttttttttttttttttttttgtgagacggtatctcgctctgtcgcccaggctggagtgcagtggcgcgatctccgttcactgcaagctccgcctcccaggttcacgccattctcctgcctcagcctcctgagtagctgggactacaggcgcccgccaccacgcccggctaatttttgtgtttttagtagagacggggtttcaccgtgttagccaggatggtctggatctctgaccttgtgatccgcccgcctcggcctcccaaagtgctgggattacaggcgtgagccaccgcgcccggctaaaatgcagtttcattaagagatagtgaccctttctgagagtgtctacatttaattgggatcagagcttgaagttgaaaattttgtgccctgggacttcagacatcagaaaacagggtaggaagattctcacgggttaggatttttctggtgaccctgagtgggggagccacttattctgccttcacttaaggctaaactagactcccggccctgcgtagagttctgagggacaccagggtcacaaggctagtgagacagagttcatttggaagaagtgaaataatttaggaattcacagaatattgatgatgatatccttcctcctccagatgacaaggtaataaagaataatgagatgtgatcatgggaaatagccaccatgagcagcagccaccaaggcacataaatactgtggaattgactctgctgtcagcttgtgggtttctggagtgacagattaaaccaaactcag

SEQ ID NO: 1879210 - DNA, 4001 bp, Homo sapiens
ggcctctgaggcaggacacaaaggccatatcagggccactgcagggccagaggtcctagcacccctggctttggctctgagggtttggttgcttgcagctgaattccctaaccaaagcctgtcatgtgtggtgccaagctcacaaattcagcatgcatctactatgtgtttgcaatgactaaaaggttacagaaggcagcctggattgcggggatcggggatacttagaaaatacgttctgcaaaatgttgtattagaggttctgaaaattaagatacagaaaacattttacttaatgaagaaaatagggtaaatatgttcaaaggagtatagttgttaaaagcaaactgtttagagtcaagatcaacccagattcactttctggttctctgcagcttactagctgtgaccttcaacaagtctctcttaacctgagtcttagctttccaatatgtaaaatggacacagcattgtgagggtggttgggaggattaaatgagatcagagaatttagcaccatgactgtaaagagaaagggctctacaaatgtagctggtactacaattcacttttttttttttgagacaggacctgactgtcacccaggctggagtgcactggcatgattacagctcactgcagcctcgacctgccaggctcaagccatcctcccacctcagcctccagagtaactgggactacaggcatgcgccaccacatcctgctaatttttatattttttgtagagatggggtttttgcatgttgccaggctgatttcaaacttctgagctcaagccatctgcctgccttggcctcctaaagtgttgggattataggcaaatgagccaccacgccagcccacaattcactttaaacacaagtgaaacacatttcattagacagtggaatagacttatgtcaattttcttttctctcttattttacacagtctgatttcctgaagacaggaggcgggagtaagctaatcaggccctgagttagctgtttccaagaagcttagagtgtcccacttacctacgggttgcagggcccgcattgccagtagggctggcttttagggatgctgctgttggtgtgtgctgtacttgttttctaggattgggacaagcttccttgagctcctgactttagagaccaggtttgggaactgatgggtgcagcaaatgcaaacagacagcaaacaggccaaagaggagattcattcactgaagagggccctggtacagtactgtcgaggttttgcggtggcctggacacggctggctccttcgacttacacaatatatcttctctctctcttacctgcacttataagaatcggtgctaagggtatgtgcctaccacagtgcagcttgtagattaatgaagaaagaattgctgccacttcccaaatattaaacgccaggttctgcctatgcatattctctcaaccttcacaacacacctactaactccagcttacaaatgaggagacgaaccagcaggctgttccaggcgtctggttgtaagagcagtggcagtagagaaaatgatttattttagcaccagccactgtgctaatccctttagatatcatctcatttaatccttttaacaaccctgaagcaccatccttattctaaagggacttcggacctctctgcggtccacactgtcccctgctcggtgcaggagtgtagactgggactgttccgtctggtggtctccccgacaagggttcacctggaaactggcctttgggctgggattgggactctgtacttaggctggcagcccatattaggactgggcaccgtgataagcactttcttaccgcaaatgcacgatttcactcggccctcacacaccccacgaggtgggcaccgtcacagtgccatctcacaggcaaggaggccaggcccaggccctgaggatgcgccgctcaggtgggagcttccggggagctcgcgcgacagcctgggggagcgcggattcgtctctgcgctacggcggctgcagagggtcaacccgcggaggcggcgcttcgcggcgggtcctcggcctgaggctgtgggatgcctccaaacccggcgcggcctccgtctgcaaggagagcagagggtccccgccgggagcgcgcccggctgcggccccaggcggccctgcccgcagccgccacctgagcttgggcgcggctcctatctcccacccgcgcgtcggccagtgaagggctccgtgcttaaacatcattcgttacagaagtattgcggccatcacacggcattttaaaaacacgaatgatgataaataactttaacactgcttccaattctgcctccaagcacagcatcattaccatttgcatgcgtttcacttcattcgatttccatgtgtatggatttgtttctacatagctgtggtaaaacgcacatactaaactgaatccagggttgttttccactttgtaacatgaacattttcaccgtgttagtactgacgcttcctacctataatttttaatggcaggactttaaaaaattgggttgatacgctgtcacttctctgagcatctcgcaaatgttcaacattcaagtggcttccaaagcttcacgattataaattattcattcttttttgttttgtttggttgtttgtttgtttgtttgtttgttttttgagacgatgtctcgctcttgtcgcccaggctggagtgcagtggcgcgatctcagctcactgcaaccttcgccttccaggttcaagagattctcctgcctcagcctcctgagtagctgagattacgggcatctgccaccacgcccacctaatttttgtactttcagtagagacggggtttcatcatgttggccaggctggtctcgaacttctgacctcaggtgcttctccctcgacccggcctcggcctcccaaagtgctgggattacagcactttgctgcccagcccattcttgtgtataaagtcctttcagtattgagatcagtttccttaggttatattcacaggagtgaaactgctaagtcagaatgtgagcatttaaaagctttcagtattattgccaaatggcttttcacagatgactcagggaggttttggtacttggaacactgctacttatatcccactcccccccccccccaccaggaaaacatctaaagtgcactttttttttttttttttttttttttgtgagacggtatctcgctctgtcgcccaggctggagtgcagtggcgcgatctccgttcactgcaagctccgcctcccaggttcacgccattctcctgcctcagcctcctgagtagctgggactacaggcgcccgccaccacgcccggctaatttttgtgtttttagtagagacggggtttcaccgtgttagccaggatggtctggatctctgaccttgtgatccgcccgcctcggcctcccaaagtgctgggattacaggcgtgagccaccgcgcccggctaaaatgcagtttcattaagagatagtgaccctttctgagagtgtctacatttaattgggatcagagcttgaagttgaaaattttgtgccctgggacttcagacatcagaaaacagggtaggaagattctcacgggttaggatttttctggtgaccctgagtgggggagccacttattctgccttcacttaaggctaaactagactcccggccctgcgtagagttctgagggacaccagggtcacaaggctagtgagacagagttcatttggaagaagtgaaataatttaggaattcacagaatattgatgatgatatccttcctcctccagatgacaaggtaataaagaataatgagatgtgatcatgggaaatagccaccatgagcagcagccaccaaggcacataaatactgtggaattgactctgctgtcagcttgtgggtttctggagtgacagattaaaccaaactcagtccagcttcttgtttactctgtgtaaatctactcactgt

SEQ ID NO: 1879211 - DNA, 4001 bp, Homo sapiens
ggagttcaagacctgcttgggcaacacagcaagaccctatctcaacaaaaaccaaaaaaattatctgggcatggtgctgcatacttgtagtcctagcaacacaggagactgaggtgggaggatcccttgaatccaggagtttaaggctgcagtgagctatgatcatgccactgcactctggcctgggtgacagagtgaggccctgtctctaaaaaacaaaaacaaaacaaacaaaaaagccacaaagcagtaagaccagacttcatgtcttaagtagatagtatttactttataaaaacaaaatttaacagttgtcattaatgtaaacattgggaaagggtagggttcagcatcttttaaagctacagaggacagtcttcttttgtaattaaatatacaaagtaacataaagtcatactttgataattcaaatatagaagagagtggtatcactatatctctagcagctgtccacagtaaaataaaagtacttttttttctgtacaaatatctttattttcctacttaaaaagaatcacgtactcagtccaacagctttaccaggcttggccaacccaataagttacacactcactcaggtacttggaaggttattggacagctccttaaccgatcgagtcagcacaaagtggtcactttccccatagccagactctggatttgcctcctgggaggacaccatgcctggcacagactgatggggtggctgcagtcgaaccttgcctccagattatgaaccagtataagtagcacaattctcgtggctactttcacttcagagtgtcatgtttattgatgtggagctttctgagtagggaggttaaggcacacctgctcagtaaaacaaatatttcttttagtgttctagattgagggcagcagtcaatggtaaaataaattttggtagcatgttcctgagaggttatacagcagccctggctcaaggatttctccccctgcacgattcctaagaatacttgctagttgattctttgttttggcaatttgatggttttgatgaatttgctgtgatccaggggtattcaagtacttctctgagcattggcctctggctgggaacatgcttcaacagtcttgaaatgaggtccctggctccctctgttacaaagtcagggaatgtgaattctcaacccgtgatattcttttgtaggtctcttggtatgtatttgcctcaaaaggaggcttcccaactaaaaattcacagcaaagaactccaaggctccagagatccaccttctcatcatgcatccgaccttcaatcatttcggggggcaggtagtccagggtgccacagagagtggtcctcctggaagatggagcatgttctgaccacccaaaatttgcaatttcaagctctccagctgatccaagaagtaagttctctggcttaatgtctctatgaataactgtttttgaatgacagtaagacagggcacttgccaattctgtgatataagtagcagttctctgctcatcaaactttgaaagtttctgaagttctgtattgactgtttcaagtggtgtatattccagaattaggtagactctggtggcatcatggaaataaccatacagtctgattatattaggatgttggaggtgggactgtatttctacttctcttctgagttgatgctccactcctgctttctccagctgagctttaaataacaccctaagagccagaataaacttgctttgtttttctcttgccaaataaacattaccaaactttcctttacccggagggcgaccaatttcaaggtcttccaaagcccattgcctctttttgattcttcatttttctgttttgatgccagttcctcctcaggattattttcaggtgccgacagcggggactgcttgctgttttgggtgttattcagtggcctggaggcaggatgaggtacactggttgcctgcaattgcttctgcttctgattctgaactggcttgtgactggagacaagcttttgtgcttgcaaaggaacacgctgcgaagaatttgaaggacacaagacccactgagcctggccactatttgcaggtaatggattctgacaaggaaattgctgagtcacgagaacatgttctggacctccaactggagttttagcctcaacaggccctgaaatgcagttttcttcagattggtccgtgatgcctatgacccaaggacctgagtcttccaagagctcagcccaataaaagcacttttaaaccaactgatacacctctataattcacaagtaattgaggtgttttatgtttttacatatcctctagagatgagctaggttaagaaattacaactatatcagctaaaaaaatttaagatgatctcatgatttctgcttcccaataaacatttataacattaataaataaagtgaagaaaagcaaaggcaaataccatcagcagtttaagtcaggtcctatttacctgctctgctaatgtcattttttctctgtaaaatttcactgtacaaaagtttacgttcaaaactctttatattacggcttggcctagactatcttaaaagtgctcagaacacttacattagcctatagttgggcaaaatcttctaacacaaagtctattttatcatgaagggttgaaaatatctcatgtaatttcttgaatacagtacttcttgaataccgtagagtacagtctctcatatttgctgctgctacccaccatcacaaaagagtatcttacccattgtatcactagctctggaaaagatcaaagtgcaaaatttgaagtatggtttctacaaagtacacattgctttcacattactgtaaagctaaaaaattggaagccaaaccatcataagtctgagatcatctgtacaggttttacaaaggggctcactggtgaagaggtccattctgttcattttctacatgaactgatcatagccacaataatatcaacatacataaactcaagaatttgatttagaagagaaatacattaaaccatatttataaatctataggtatagtgcaaattaatctagatgtttggggtgtatttatatccccaactgcctatgtaacttggacaagtattcaatctgtatgtacctgagttttagcacctataactgtgccatactatattataggcattagccactttggctacttaaatttaaattaattaaaattaacttgaattttaaaaattcagttcctcagttgcactggccacatttcacaggctcaataaccacatgtgcctagaggttaccatactggacagtagaaatataatgatgaaaataaacaggatgatatgattgagaacaacaagtaggaacaagggggttgtattgactactttagatctagatcaggtggtcagaaaaggctgccctgagttgacatttgagctgagacttgaatgacaagatgcaactagcatgcaaagatctgcaaaaagcatccaaggcatagacaacagtgagggcaaaaaccttagccacaaatgtggttggctggtttaacaacaaaaaagagcgtctgaagcataagaaataaggggagaggtgtataaggtccaagaaatggcaggaagcagagtctcaagggccttatacaccatttaagaactttggattttacgttaagtgcaatcaaaaaccattgagtgttattaaaagggcaatgttaggctgggtgtggtggctcatgactgtaatcccagcactttgggaggccaaggcaggtggatcgcaaggtcaggagttcaagaccagcctggccaacatagtgaaaccccatctctactaaaaatacaaacattagccgggcatggtggcgcatgcctgtagtcccagctactcaggaggctgaggcagaagaattacttgaacccaggaggtggaggttgtagtaagctgagatcatgccactgcactccagcttgggcaacagagtgagacttc

SEQ ID NO: 1879212 - DNA, 4001 bp, Homo sapiens
agttgggtggggcttggggttttagtacaaggtgcaggtgagatgggaaaagctttaacagaaccgggtaaggataacactagctgactctagtacagatccgcatatgaacgaaaatcttaaggaattgctctcatttagaaaaattactaaaagctaatacaaattggcacattgtactaaattgagtttctcttatctctgctattactttttgtttctttatttacttatttgagaccaagtctacctctgttgcccaggctagagtgcagtggcaagatcttggctcactgcaacctctgcctcccgggttcaagtgattctcctgcctcagcctgccgagtagctgggattacaggcgagtgccaccacaccaggctaaattttgtatttttagtagagaccgggtttcaccacgttggtcaggctggtctcaaactcctgacctcgtgatttgagacggagtctcgttctgtcgccaggctggagtgcagtggcgcaatctcggctcactgcaacctccacctcccgggttcaagcgattctcctgcctcagcctcctgagtagctgggactacaggcacgagccaccacgccccccctaatttttgtatttttagtagacagagtttctccatgttggccagaatggtctcaatctcttgacctcgtgatccgccagcctcagcctcccaaatgggattacaggtgtgagccactgtgcccggcctatttatttatttattttgagatggggtcttgctcttgtctcccagactggaatgcaatggctcgatcctggctcactgcaacctcacctcctgggttcaagcgattctcttgcctcagcctccagagtaagctgggactacaggcgcgagccaccatgcccggctaatttttgtatttctagtagagacgggatttcatcatatttggccaggctggtctcgaactcctgacctcaagtgatccgcccacctcggcctcccaaagtgctgggattacaggcgtgagccaccgcgccctgcctcactattactttttccaaagttccttaaagccaaagaccaggaaccaaaaaatacgtaactattgatatttaaaataggttgaatttaaaatcatatataaatcaacatttgaaaaaaagtataaactgtatttagatggagtagtgaaacagtactctgactcaaaatactgtaaaaggaatgacttcttgctttatttaagcaagtgtgttagaaaaatgtagccaatcaaggtattctgaatatcagatttaaaaaaccggtgaatggaaggtgatttctgtcttacggccatgactgtttatgacttcagaatcaacgaagtttacctcttgtcccttccttggctacagacacttttaactttttgctctcagatgttgatgtagagtttagcggggtggagggcgttttcgggagagacataataaacaatgcctcctatctctttagtaatttgaaatagtcctccggaaagctaatttagacacaaatcagcgccgcactgggacttgcaggctgccacatagtcctgcaggcagaggaaaaaagatttaaaaaaaaaaaaaaagatgacaactattgagtacttaggttcagatcgcagtttagaattcatctagcatggttctccttcttcggggcgacctctatgttctggggttatgtgtagcgactaagaagccttagtggaccgtcaggtcggggtcaaggagcagggcaggaaggacccgctcggcggaccccgcagaccgccggcacccctggtgggggacactcgctgcaggcggctcggctggggaccataccttccccacaggcagcgctctcgcgcgccagttccacaaactcgcgagttgggcaggcctcgcactgcttcttggtttaaaatgacgggaaagggacacccgcgatcctacccacacattgcgtacccgcccagcatccgctcacttcctcctttgctggaacgcctgtttgtcgtcatagaaacccagggccccgaggtttagcgccctccataggggctgccttcagcggtgccggcggaggagggagacagctaagacaatccctacaccctcttggagtttcttatgttctaagtcacagcataggttcagtagcaaaggagaagaaaaacgtttaatcccgccgttgtcacggaatccgaaagtgtctcacgccggggcttcctgccgcgggccaggccagtgcgcaggcgccggtgggggttagctcgaggggccgacccctgtagcccgtgacgcacgcgggttaagcaagggtcttctgagttgtttccatctttctagctctcttttttgttgctttgcatatttttctttctctttcttcctctttttctttctttctctttttttcccctgagacggaatttccctcttgtcgcccaggctggagtttaatggtgcgatctcggctcactgcaacctccacctcctgggttcaagcaattctcctgcctcagcctcccaagcagctgggactacaggcagacgccaccatgcccggctaattttgtagtttgttttttgttttgttttgtttgagacggagtctcgttctgtcgcgctggctggagtgcaatggtgcgatctcagctcactgccacctccgcctcccaggttcaagcgattctcctgcctcagcctcccgagggactacaggcgggggccaccatgcccggctaatttttgtatttttagtagagacggggtttcaccatattggccaggctggtctcaaactcctgaccgcgcccgcctcggccttccaaagtgctgggatcataggcgtgagccactgcgcccggacgctttgcatatttttctaaaagccagactcagggggatgttgggtaataagaaacgctgggtcccttattgggtaagccgtccagtgctttacatttcggtcacgtcttccttggacccttaaatgcctccccccagagcacaaggaaggcctcctgggcccagatttttcacccccttggggcagggaaggaggattgagcttaggtggaaccagctcaggtataattgtcggggcttctggcgtgaaaatctgccctcaggaaagaataccatcagcggccggtggctcacgcctgtaatcccagcactttcttaggccgaggcgggtggatcacgaggtcaggagttcgagaccagcctgaccaacatggtgaaaccccgtctctactaaaaacacaaaaattagccaagagaggtggcgcgcgcctgtaatcccagctactcaggaggttgaagcaggagattcgcttgaaccggggaggaaagggttgcggtgagccgagatggcgccaccgcactccagcctgggcaacagaacgagactccgtctcaaaaaaaaaaagagtatcatcagagccttcgcactgaactgaggctcggttcggtgagggatcatttcttttcttttcttttttgagacggagtttcactcttgttgcccaggctggagtgcaatggctcgatctcggctcaccgcaacctccgcctcccaggttcaagcgattctcctgcctcagcctccctagtagctgggattacaggcatgcgccaccacgcccagctaaatttgtgtttttagtagagacggggtttctccatgttggtcaggctggtctcgaactcccgacctcaggtgatccacccgccgcggcctcccaaagtgccgggattacaggcatgagccggatcgtttcatattaaggcagagatttagtgccaaataatgaatcgctgggagaagcccagcgtctagttgcttccagacagggaggaaactttatcttattcaatcaccatattccttagcaccaagtagagtgcctggacaaacatgaaaatcagttggacagttctcttctgtgttgacagaattacggctattttctggttttgagtgtaatag

SEQ ID NO: 1879213 - DNA, 4001 bp, Homo sapiens; identical to SEQ ID NO: 184

SEQ ID NO: 1879214 - DNA, 4001 bp, Homo sapiens
ggtggggagaatggcttcagggacaccactcatttatcaaatatgcaccgagcacagacagtgggatgggcaccgtgctaggcaccaggagacagcactcagggaggcccagcaggcagtccagtgggaagacaggcccatatgcatatgactgcaattcagagcagtcacgtcagcaggactgtggtctcccctgccacccagtcttcatgtcacctcttccagggttacactgaatttgatcctccctagttgagggtctctccttcctcttcatgcctttaggatggtagtccccagctctgagactcctggatgttctctttgtgtgtgtggggtgcgtgggatgggggtggggggtggtggtgtatgggcaatgggaggggccctgagtctcagagagtgcccaatactacttggaggaagtgttatctggtgtgagtgtgtgtgtgtgtgtgtgtgtgagagagagagagagagatcctcttttcctgcctctgtggcagccccagtggagcaatggaaagccggcattgaatgactgagagatagaagttgtttgcagccccaggcctccgttgtgtcctcctggagggcataagccaccaaaattacccctaaagggggtttcttagaggacaatccctttcccctcaattcagagctctttcaccaggggttcccatcccagcctcaaaagagctgacttttcctccaaagttagcccttcttaaggctcaagttgagaaaagttgttcactggcagattaaggtatgtaaaaaaaaaaaaatcgtcaggaaagattaaatcagaccaaaagaagaatttgttaatgagggttgaggaaaggaaggcagtatacaagcacttccaaacggaggctgtggaatgttggtcggaagggagggctctcccttgggcccccagacgccctctcctgaccagctcagcactggcagggctggccagctcttgttccccgggggcaccctgttatggaccctttctcaggaaagggagcacctatccttgtctagctgccttcctgggcccctacccggccagagctcctcctccaggtgggctcctagctccggcctttcttaggcatgcaagggccccagggatggggaggcagtgggaggcaggcttatggccaagaggtctggccagacctagaccccacagacacaatggctaggaaggactctgatgtgtgtggggagtagctggtgtctcctctaagcctgggaccatgtttgcctccacatatactggagttggtggtttggcccacggacatggcttctcccaggccccaaactggggtctcctggggccctctgttccaagggtaccagacaaacatatgcacaggtgtcacaaacccctgatccctaacccctttacagccccttcctcataccactccataccatggggtataaaggaaacggaggaggcactccaagcgggtttcactcagcggggacaggaggatcggctacctccggagccaaggctccctctcacactccccccaatcccaccagcggcaaaatcctttaaaaggaacaaaggcaatgggggcggggagggggcttcctctttggtcgacctagggcggcggctgacgcagcccgccgccggtcagctttcaggtgagtgcctgaacccgcatcccgcccatgccttagggacccctcttcgcccagccaagcccggggcggggaggaaagtccccctcagccgcactcgggcccccaacccggccaaggggtcgccaactcgcggcactttctgcctgtttgttttcgctcagtactcacagtttagatgctaagccggctcctcttgcactcacttcctttgtgtctctctctctctttctctctctctccccctcaccaatctctttcttccctccttgtccgattctctgctgtagcttccagtggagaaaaataattattcttcaatgggttagcacggggcgcacgcacacacgcgcgcgcacacacaccccgccgaggtacccaatcaatgcacaaatcttcggggtccctttaacctctgcggatgactccgggagttaattatgaagcctatttcggcgcggcataaatatgcattaaggtaggaaataatcgatacgctgaacttctgggaactggcatttagacggactccgtctcgccgccccccactccctccatggccccacgagccacctccacagcctcgcgccttcccggggtcgcaacgcctatcacaagcttctacccgggtttcagggggcccctgtagtggcgtgggcgccgcgccggtgccgggagaccccctcgtgcgccctctgcggtcggggcagaccctcagccggagcttcttcctcccccacccctgcaggccgggcccaagctgcgacacccccagcacgggctcagcctgtgaacaaactccgagctcagtactcggaggaactggcgagagcgggacggctacctgcccgcacgcccgatttccgggcacagctagaaagaccgggacgcgattcaactcccaatccggtgaatccgcctagcgccttcgggtcctgccgcccccggccagtcccgacccgcacacatatgcaggcatttgcacacacgcgcgcacacacatgcacgcacatgcacacacacatatgcacaccctcgcgcacacagacactcccgcgcgcgctcacgcccgcacacactcagggttataacaaaggaagaggggccagcgctgccttacttttgtctctcttctctcttttgcagccccccagccccggggccggcgtgcccggcccaccccgccctccgcgccccccgacggccgcggtcagccggcattccggagcagcgcgtcggagctgcaacttcgcgcctaagcgcccgcacctcgcagcccggcgggcgggagacaaaagctgcggcgccgccgccggaggccgcgcggccaaggtgtgttcgctaattgtcaggaaatgtgtgtgtgtgcggccgggagcccgcaggggcgggggaggggacggaggaagaggagacccacccctcctacccccgccactcgccagcgccgggtacccgaaccgggattagagaataaattatctgctctcttctcattgggctgtggctgaggacgccgtcggcggcgccgggctgggagctctcccggctctttgcattcaccgcacagctccggctcgcctcgcttcgtggaggccgagagcccggggcctcggctccagacatcaggggacaccagccggctggccgcgccgccccgcccctcccctcccccgccacccggcttggcctcagccccctcccctcccaattctggcttgggtcttggggacgaagatactaggggaaaaggcctagaggccgaagatcccagtatctttcctcctctcccgccacgcccccttcccaaggaggcggaagtgggggggggggggcagcaggggttggtcacctgagcccaacccgcttcagtcagagagggcttttagagccctcgagaggatcccttcagtgaccacggcccatgtcctgccccacacacaatgacaaagaagagatggcactaaggatctttgcttttctcctctctccagccccctcaactgcagtccaatattgttactaatttctttcctttggcccaccttggcagacagctcattaactgcctggaaggaaatgccctctggttcaaagcagcttcctgccaagaattcattcatttagcaagaaatatgcaggatcctccccccaccgccccccaccacccgtgccatgacacgggctgggtgccaggaatgcaaaagaagaagatccagatgagacaatcatgtttttaaaaagcaacaaatactggagtcagaggtgttatcccagtgtgagaggtgctaaaccaaggtacaggcaaagtttgaacccaaaaggcaggattgagtaacttc

SEQ ID NO: 1879215 - DNA, 4001 bp, Homo sapiens; identical to SEQ ID NO: 219

SEQ ID NO: 1879216 - DNA, 4001 bp, Homo sapiens; identical to SEQ ID NO: 221

SEQ ID NO: 1879217 - DNA, 4001 bp, Homo sapiens
aggaagtcgatgtcaagtatttggataaacagctaagatttgagaaccagctctccagcaatgggggaggttttctctaatatgtcctaaggctggtgtgctacaggtttgtagcaattatttctttttttaaaaagcattttcttctcattagggaaaagacttcttgaatgaactaaaggggacagatggagacttggaacattgtcatcacccttgagcctctgtaactatgatttctagggcactcaggtagtttattgggcagtcatccgaggggaaactaaacacatgttaacatggactggcagcccctagtctaaattctttcagccagtggtccccaacctttttggtaccagggatcgattttattgaagacaattttttccatggatgaggttgggtgggggatggtttcgggatgaaactgttccacctcaggtcctcaggcattagagtctcgtaagaagcacgtgacctagatccctggcatgcgcagttcacaatagggttcgcgttcttacgaaaatctaatgccgtggctgatctgacaggaggcgaacctcaggcggtaatgtttcctcgccttccactcacctcctctgtatggcccgattcctaacaggctactgactggtacaggtctgtggcatttggggacggggactcctgctttaagccatagggtagcaatgcttcatttccatccagaaaagaggagaaagcgcaagggatggttgttgcaaaatcatgttccccatcaagggagtctcttggagacagtggagtcacataaccagcatggtgacagcaggaatcaagccagctcctgaacccaagtaggaaagcaggtgactgaatggcaaaaactgccagatacaaatattttcttttgtgcttctctgtttttgaagcagctcatgccctgggaagatgaggatgtcttacaattgtttccatttagtgatgcagaaactgtcacaacaatgagtcactgttctgtacaaaagagacctttggtggtggaaaactggtgtgtgtgtgtgtgtgtgtctgtgtgtgtgtgtgtgagagagagagagagagattgctcaaattgccattgcctaatcagccagtagtgattgaatggagaaagcctttgaaccagatctcagattcagggtgctttcatggagcaaagagaaaaagactgagaaattcactatggtgagtattgaggttgtactgcagctcagtctggagaattgaaggctccttcctgaaagggtatggggacatagagaaagatagcatcagtggatcaaagctaccacatttttgcggttagatggagattacagtagggagtgacagagataaaatgttaaaaacctccaacattccagtttagacacagcccctcccctttctggccatagtgaccgctctctggcaagcactgcccagggaagataaatcagttagccagtggcctaagggttaggactttaaaaaacaacaacaataaaaaaaccaagaagttataaaccgtgagtccacaagtggccccaggagacttgccttctgcattctctctgtctgcgcaggactgtgaggcatctctgggaagccatcagctctcaggggcaggcacaggaaacagctcttcttgttggcaaaatccagttcggtggtttggaacagggtagacagagaaacaaacaagtgtttgttcataggctgagacctagggggtgtataaggagtaatgatcctatcacctaaggaggatgaattctgggtcattttatgaactgtcttccttagaaaagcctccgaagcaactggcagatgaaaactggaaactattttgagctgggatcagggagtccagggagctcagcagaccaggttactgccactgccactcactaattaagcacatggacaaattgctgccttttcttggcctcttttcctcctcataaacagatgaatccaaaacttttctaaatccaaaactcaccagttacttttcctcttgtctgctgatctttactttttttttttttctatgacactgcatttttcccccctgatgtcaggatccaagagaaagtgaaaacctttctcctgatacggtcaatactggagaactgggaacaatgtcagaatgaccggccaccctgagccagccccttcaatggcactgcccctgggggctgttcaacatataaactggggccatttaacatataaactgaattcaaaagttacttcatgttctacaaaaagaatatgttttatttttaatttaccttcattttcaaaaaaatcaagattctctctttaaggtgccccgggccctatgtgtcatgcagtacccatttgcagaaacatcttctgtcaccaagagtttcggagacagtttttgtagagttccaggcctcagtttctctctctgttgcagggaaataatcagacttacctgccatcagctgctctgaggttttttgtgagcttctcagctgacagttttaaaaagtaaaaactatccttatatgtgattacgtatcttctcaaataagactttcttacatctgcagagactgtttagtctcttagtcttttctagaattctgggttacgtttaaaacaagcactacgttttatattaataccaaagctttgaaaccaccgtggttaatgactctaccagctgctttttgtcgtctttaatagtgacctctttttaggaataactgccacctaataccttcctctcaaagactaggtcaacagagagtcatttggctgatttttccatcaacaagctagggggctgggggttagcacaaactggttgtaaccattttattcttcagcctctctctgtgcctgtgcctcaatatttctccaatgaatgctagtagcctcaggatgcagtacaatgatgatactatcctgccctccgaagaaaaggcactgttttcctgcctgcttccctccaaagcataaacacacaaaccgtatgctgatagcatcattgttacaaatacaagcttgagatatttaaatatttgtgtttagattccatctttatccatcactcttttgcctttgtacaattatgaaatgcagatattttcattcaatatcaaagcatccatccagcctcttaggagaaatgctggcttagttagtgaagtcaaagcttttatgccttgagtattaagcttgctgggatcaatacatgggagcagatcgtggcaattctggaatctgggacaagcatcatcagagtgtgatcccatcttgagtgctcagtggaagtaactccaagccaggggaagtcccaccagaagaaaaggctgactctaaataaggtgcatgtttccaaactattggtgccttttgctcctctggcttgtgtccttcccagggttttatactcagatactggaagtgaaactccttcatgtccagctcacagctggctgccatcatggactcatggaactaaatggatcgtggggcccttgacacaactacaactcagccctcctctcacttctattttttgttgtttgtatgttatgtacaattgactgtaagtcattagcaaacacatttattggtggaaccatgtagtatttaagaacataggctttgaggttcaaaatttgtgcattaaattttacctcttgttatttgctagccttgtggccacaacaaagtctcttaacagcctaatttttctcatctgtaagatgctgctaattatgtttactttattgatttagtatgaagattcaaagagataatgtatgtaaaaatgaaagcatgatatttggagaattttaagcattcataataatgtttctcattgttaataatactgatattttatggttacataaaagtattagatttagaaggtgttccagcccatatgataatgtcttttctttttttgtctgaggctgagaaactaagatatataataataccaataa

SEQ ID NO: 1879218 - DNA, 4001 bp, Homo sapiens; identical to SEQ ID NO: 245

SEQ ID NO: 1879219 - DNA, 4001 bp, Homo sapiens
gggggaaataggatgtgtggaggtgttgaactgggttcctcaggcggcacggtggggtgcacccgggcctcattccaatccccactaaggccatccccacctacttgcaggtccccgccgccaccctcatggatcagccacagttcagcggggcgccccgctttctcacccggcccaaggccttcgtggtgtcggtgggcaaggacgccaccctcagctgccagatcgtgggtaatcccacgccacaggtgagctgggagaaggaccagcagccggtggcggccggcgcgcgcttccgtctggcccaggacggcgacctctaccgcctcactatcctggacctggcgctgggcgacagtgggcaatacgtgtgccgcgcgcgcaatgccataggcgaggccttcgctgctgtgggcctgcaggtggacgcggaggccgcgtgcgccgagcaggcgccgcacttcctgctgcggcccacgtccatccgcgtgcgcgagggctcagaggccaccttccgctgccgcgtgggtggctccccgaggccggcagtgagctggtccaaggacgggcggcgcctgggtgagcccgacggcccccgcgtgcgcgtggaggagctcggcgaggcaagtgcgctgcgcattcgggcggcgcggccgcgcgacggcggcacttacgaggtccgcgccgagaacccgctgggcgctgccagcgccgccgcggcgctagtggtggactcggacgccgcggacacggccagccggcccgggacctccacggccgcgctcctggcgcacctgcagcggcggcgcgaggctatgcgcgccgagggcgcccccgcctcaccgcccagcaccggcacgcgcacctgcacggtgactgaaggcaagcacgcgcgcctcagctgctacgtgaccggcgagcccaagcccgagacggtgtggaagaaggacggccagctggtgaccgagggccggcgccacgtggtgtacgaggacgcgcaggagaacttcgtgctcaagatcctcttctgcaagcagtcggaccgcggcctctacacctgcacggcgtccaacctcgtgggccagacctacagctctgtgctggtcgtagtgcgcggtgagctcctgggtgcggggcgcgcgggcccaggctcctccgcaacccgtgcacctgggtcctttcgcccttgcggtctgccgtttcccacccgcgtctgtccggtcgtggaatccagggttgcaggtgtccgttcctggtgcgcaaaatgcgggcgacgccccacgacctattctaaacacccgcaacccgctttccccacccagtcccctgcccgccccgccccctttgcatgccgcgcccccaacccgccaccgctggcccacagacaggggcgagaggtgtgagaggggcggggccgcaggggatcccacctcctcagccccgccctctccctcccgctgctcccaacccaacctccaccactctgccttctgctcttctactcccccgccccccaacttcctgtctcctcccctgcgcccttcccaacccttagcccctctgcctcctgctcgctcctctccccagcccactcctctaccctgcaccctctcctttccagcctcccagcccctctgctcctgtcccctattccttcccacaccctcacctctgcatcctccagtctcctttcccgcccacaatcccccaatttcccccttcccaccccgccgtcgtcctgcaccctccggccccgcccctctcaccagtcttctctcctggcagagcccgcggttcccttcaaaaagcggctgcaagatctggaggtgcgggagaaggagtcggccacgttcctatgtgaggtgccccagccgtccactgaggccgcgtggttcaaggaggagacgcggttgtgggcgagcgccaagtacggcatcgaggaggagggcaccgagcgccgcctgaccgtgcgcaatgtctcggccgacgacgacgcggtgtacatctgcgagacgccagagggcagccgcacggtggcggagctcgcagtccaaggcaggcggggcggggcacggggcggggcacagggcggcttcggggaggtagcgggggcaaggaggcaccgagaagggagccgggggcgggggaggggggagccaggccgcacgggctgggcgggcacgggggcgggcagggtgcagacggactgggcttgcgaggtacgagttgggactggggcaggcaggggcgggactggggcgggaagggcaggtaaggtgggggcggaggagcaagctcgggccgggcacggggtggtgattagggggaaggggagacggagtgggcaggggtcttgtgggaccgagctgggacttgggccggcgggacaggtaaggggttgcgcgggggagtgaatcggaggcagttgggaaccgggagacagggggcaagcggaggagcgagtctggagcggggcgtgcaggggctggtctgactggcccggctccctccaccccaggaaacctcctccgaaagctccctcggaagacggcggtgcgcgtgggcgacacggctatgttttgcgtggagctggcggtcccggtgggccccgtccactggctgcggaaccaggaggaagtggtggcggggggccgcgtggccatctccgcggagggcacgcgccacacactaaccatctcccagtgctgcctggaggatgtgggccaggtggcctttatggctggcgactgccagacgtccacccagttctgcgtgtcgggtgagggcctgagggtgctcccaggatggcatcgcttccctgctgtctccctggtcccagtcccctgccctccattacctcagctctctgggcttcagcctgctgtaccgagggccgccgggcaagaccatagccctggccctccaacgttaggctccctgagcccccgcgcagtctttcagctgcaaccagagaagtggctgcaggtctggggctggaggttgtggccagtggtccaggtccccagagcagccccaagagagctggggatcctgtgacacccctccaggtgattccagacccagggctcaggaagaggctcccagtagttgacctctgcccaccctctacacagcccccaggaagcctcccctgcaaccccctgtggatcctgtggtaaaggccaggatggagagttccgtgattctcagctggtccccaccaccccatggggaacgccctgtcactatcgacggctacctggtagagaagaagaagcttggcacctacacctggatcaggtgccacgaggctgaatgggtggctacacctgagctgaccgtggctgatgtggcggaggaggggaacttccagttccgagtgtccgctctcaacagctttggtcagagtccctacctcgagttcccggggactgtccacctgggtaagtgggacctccctgttacaacctacggggctgctcacctgccccggaatcccccaggtccagcttcaggggaggccagagtggcctcatggggaccttctgtggggaggggggctgccaaggccttgccctggtgcagtgtccgtggtgggaaggataggtgaccccactacagggcccctgggagcctgcctgtctccagcagacccaggggacggggctccagggctgccccactctggtggggcttgtaggatgctggaggggtctcagggcagctgtaccttgtccttgttccttcatgagcctgactcatgctatggtcgctctgtgtgttggctgggcttcctggaggaggaacatttaggtctaggctctgtaggaagagaaggggaaggcagagacctcctcagcactccccactcctcctcggcccctttctgacgctgcccgccccacagcccccaagctggccgtgaggacaccgctgaaggcggtgcaggcggtagagggtggcgaggtcactttctccgtggacctcacggtggcctcagc

SEQ ID NO: 1879220 - DNA, 4001 bp, Homo sapiens
aggatgtgtggaggtgttgaactgggttcctcaggcggcacggtggggtgcacccgggcctcattccaatccccactaaggccatccccacctacttgcaggtccccgccgccaccctcatggatcagccacagttcagcggggcgccccgctttctcacccggcccaaggccttcgtggtgtcggtgggcaaggacgccaccctcagctgccagatcgtgggtaatcccacgccacaggtgagctgggagaaggaccagcagccggtggcggccggcgcgcgcttccgtctggcccaggacggcgacctctaccgcctcactatcctggacctggcgctgggcgacagtgggcaatacgtgtgccgcgcgcgcaatgccataggcgaggccttcgctgctgtgggcctgcaggtggacgcggaggccgcgtgcgccgagcaggcgccgcacttcctgctgcggcccacgtccatccgcgtgcgcgagggctcagaggccaccttccgctgccgcgtgggtggctccccgaggccggcagtgagctggtccaaggacgggcggcgcctgggtgagcccgacggcccccgcgtgcgcgtggaggagctcggcgaggcaagtgcgctgcgcattcgggcggcgcggccgcgcgacggcggcacttacgaggtccgcgccgagaacccgctgggcgctgccagcgccgccgcggcgctagtggtggactcggacgccgcggacacggccagccggcccgggacctccacggccgcgctcctggcgcacctgcagcggcggcgcgaggctatgcgcgccgagggcgcccccgcctcaccgcccagcaccggcacgcgcacctgcacggtgactgaaggcaagcacgcgcgcctcagctgctacgtgaccggcgagcccaagcccgagacggtgtggaagaaggacggccagctggtgaccgagggccggcgccacgtggtgtacgaggacgcgcaggagaacttcgtgctcaagatcctcttctgcaagcagtcggaccgcggcctctacacctgcacggcgtccaacctcgtgggccagacctacagctctgtgctggtcgtagtgcgcggtgagctcctgggtgcggggcgcgcgggcccaggctcctccgcaacccgtgcacctgggtcctttcgcccttgcggtctgccgtttcccacccgcgtctgtccggtcgtggaatccagggttgcaggtgtccgttcctggtgcgcaaaatgcgggcgacgccccacgacctattctaaacacccgcaacccgctttccccacccagtcccctgcccgccccgccccctttgcatgccgcgcccccaacccgccaccgctggcccacagacaggggcgagaggtgtgagaggggcggggccgcaggggatcccacctcctcagccccgccctctccctcccgctgctcccaacccaacctccaccactctgccttctgctcttctactcccccgccccccaacttcctgtctcctcccctgcgcccttcccaacccttagcccctctgcctcctgctcgctcctctccccagcccactcctctaccctgcaccctctcctttccagcctcccagcccctctgctcctgtcccctattccttcccacaccctcacctctgcatcctccagtctcctttcccgcccacaatcccccaatttcccccttcccaccccgccgtcgtcctgcaccctccggccccgcccctctcaccagtcttctctcctggcagagcccgcggttcccttcaaaaagcggctgcaagatctggaggtgcgggagaaggagtcggccacgttcctatgtgaggtgccccagccgtccactgaggccgcgtggttcaaggaggagacgcggttgtgggcgagcgccaagtacggcatcgaggaggagggcaccgagcgccgcctgaccgtgcgcaatgtctcggccgacgacgacgcggtgtacatctgcgagacgccagagggcagccgcacggtggcggagctcgcagtccaaggcaggcggggcggggcacggggcggggcacagggcggcttcggggaggtagcgggggcaaggaggcaccgagaagggagccgggggcgggggaggggggagccaggccgcacgggctgggcgggcacgggggcgggcagggtgcagacggactgggcttgcgaggtacgagttgggactggggcaggcaggggcgggactggggcgggaagggcaggtaaggtgggggcggaggagcaagctcgggccgggcacggggtggtgattagggggaaggggagacggagtgggcaggggtcttgtgggaccgagctgggacttgggccggcgggacaggtaaggggttgcgcgggggagtgaatcggaggcagttgggaaccgggagacagggggcaagcggaggagcgagtctggagcggggcgtgcaggggctggtctgactggcccggctccctccaccccaggaaacctcctccgaaagctccctcggaagacggcggtgcgcgtgggcgacacggctatgttttgcgtggagctggcggtcccggtgggccccgtccactggctgcggaaccaggaggaagtggtggcggggggccgcgtggccatctccgcggagggcacgcgccacacactaaccatctcccagtgctgcctggaggatgtgggccaggtggcctttatggctggcgactgccagacgtccacccagttctgcgtgtcgggtgagggcctgagggtgctcccaggatggcatcgcttccctgctgtctccctggtcccagtcccctgccctccattacctcagctctctgggcttcagcctgctgtaccgagggccgccgggcaagaccatagccctggccctccaacgttaggctccctgagcccccgcgcagtctttcagctgcaaccagagaagtggctgcaggtctggggctggaggttgtggccagtggtccaggtccccagagcagccccaagagagctggggatcctgtgacacccctccaggtgattccagacccagggctcaggaagaggctcccagtagttgacctctgcccaccctctacacagcccccaggaagcctcccctgcaaccccctgtggatcctgtggtaaaggccaggatggagagttccgtgattctcagctggtccccaccaccccatggggaacgccctgtcactatcgacggctacctggtagagaagaagaagcttggcacctacacctggatcaggtgccacgaggctgaatgggtggctacacctgagctgaccgtggctgatgtggcggaggaggggaacttccagttccgagtgtccgctctcaacagctttggtcagagtccctacctcgagttcccggggactgtccacctgggtaagtgggacctccctgttacaacctacggggctgctcacctgccccggaatcccccaggtccagcttcaggggaggccagagtggcctcatggggaccttctgtggggaggggggctgccaaggccttgccctggtgcagtgtccgtggtgggaaggataggtgaccccactacagggcccctgggagcctgcctgtctccagcagacccaggggacggggctccagggctgccccactctggtggggcttgtaggatgctggaggggtctcagggcagctgtaccttgtccttgttccttcatgagcctgactcatgctatggtcgctctgtgtgttggctgggcttcctggaggaggaacatttaggtctaggctctgtaggaagagaaggggaaggcagagacctcctcagcactccccactcctcctcggcccctttctgacgctgcccgccccacagcccccaagctggccgtgaggacaccgctgaaggcggtgcaggcggtagagggtggcgaggtcactttctccgtggacctcacggtggcctcagcgggtgagtg

SEQ ID NO: 1879221 - DNA, 4001 bp, Homo sapiens
cactgctttctgtctctgaagtgttccaggcgccagaaccagccttcctccttattaacgttccatgatgattccttccaggtgctggggatccagcccgtggggttattagagggcagacaccaacagggaaggtgttgttgactcaccctcacaaatatcattccttacattgtcagggcaattacaaaacacgactttaaaaatactataataaaatatccaactgaagactttcagtataattaatccgccaaccttatattttgagaaggttgagagccgtgagggaaaataaaccctagagaaatacattgtttttaagttctttcaataaagacatgtaggcattttctaatgtttttcccaaaaagaaagaacatctactcctctaattccacaagagatataaagaattaaagaaattgtgattaacagccctgtgtctggagctcatgaagctcagaggattgggaatggaagtggcaggtttaggcttgaatcagaacttctggatttaggaaaacaaaacaggccaggcgcggtggctcacacctgtaatcccagcactctgggaggccaaggcgggcagatcaggagcttgagaccagcctgcccaacgtgagaaaccctgtctctactaagaataaaaaatttagccaggcatggtggtggcacgcctgttaatccccgctacttgggagattgaggcaggagaatcgcttgaacctgggaagcagaggttgcagtgagtcgagatggcgccactgcactccagcctgggccacagagcgagactccgtctcaaacaaacaaacgacaacaacaaaatgcaaactctggccaggcgcggtggctcatgcctgtaatcccagcacgttgggaggccaaggtgggcgtatcacttgaggtcaggagttcaagaccagcctggcgaacatggtgaaaccccatctctactaaaaatacaaaaattagccaggtgtggtgtcatgcacctgtagtcccagctactcagaaggctgaggcaggataatcgcttgaacctggaagacaggttgcggtgagcacagatcgcgccactgcaccccaacctgagcgacagaacaagacttcataaaaaaaaaaaaaaccccacgcagattgcagattcctgggccccatcttcgcctttctgaattgcagcctttcaccctttaagaatgagagggtgaaatctgcacgtcatacaaatagcccaggggctattaatctgatgttgctccccagctccctccaacaccgtcagagggtgcacggattaggcctctgctgcgtgcagagaagcatcctaggtgctgcgtggctgtgccaaagcagcagaaaccggtggtgtgccttaagatgcatgctccaaagctgtccacaaggcctctggtacaggcttccaggtctacgtctcggcttccccgacagtgtccatgcgacactgtcaccagtttctcctctcacaagcagaaaatcaaattcggattgggcaaatgattccctgcccgggtgtggaataagggtcaagtcctaagtatggagagagagcgccggctcccgccaggatatgcgaagctctggaggggaggccaagccaccaggcacccggcgggagaagaggaggctggagagcgccgcccagtgcctgcaggccgggcgctccacgcctcccctccctcctgcacaccccattcccctccggttgccccgcctgggaagccccctccccacacctcccggcccagcatctgcacgagagccgcgagccctggcccagagctctgggtgggcctctcaccccagacggcggccgcagcccgtccctgatcaccggccgcctgagccctccgttcgctcggcgcgagcgccgccacccgtccttacccccatccagtccgaggccagccccgtaggctccgagcctgctccgtgaaaagccttttccccaggaggagagttactgtaaagcaagaggaagccgagaagaggcggtggctgcagcgcgcggggcccggcgggggcgcgggggcgtcggggtactgactgggcagcgcggtttcccctcatcccgggacacggtgcggcgctagcgccacccagcgggcgcggtgggaattgcgctcccttcctgcgctggggctctggacacacaggcgaccaagaatgacgcctgcagccggataaacgctcggggcaaggccgctatcatccctctgccgggagtgagtcaagtctcagcaaaagaagaagccactttggccaaaattccaagagtgctgatgaagacggtgacatctgacatttcaatggcactttccatttcccccggggtgcgcattccgggccagtggagcgctgcgtcgcctgtgcaggacctggaggtctgcaggactgtgaccagtcggagtctcggagtcgtgggttaaacattagtcgggagcactcgttcattccctgagctccccttgcccttcacccttcggtcccggaagccggaagggagactgccccgccccttgcctgccgcccagtggctctcccggggccctcttggcccctctctcccagccctccatacagtgaagggttgtttccgctggtgacttccacctgtgggagcagagaaaggaagcggggcagaggagaaggggaaggtgtcaggcgattcccctccttgcgctgcaagccgggtgggaatagaacacctgcagccctccccggcgccctgcgaatgaggtgggagtgggaacgccatcagggcagagcccctccagctggctggggtctgcacctcctcgccagcccggccacctcaaaacggtgcttgcctccctgcgggggtgtagaagcctcttggagcagcacttgtagaaaatcaagtccctggaaagaagcaaaattaatccgtttgtttctctatttatttttgcttccccacaccaggtattcacttcatccaaggctgcccaatgtcaccttccacccagaggaatctcccctctccaccccaggccaacagcctctgccttcagctgtggcctccactctggcattactctgggcagagggctcaggagggctcaaggaggaccagtgacattcagagtggccagagtaaagggagggagggggagtggtgggagaggcgtgcagaaggcacaggtgaggtggcggaggggggcaggtggtggggggagcgggctggggtgggatgggcctgtcagcatagcaagggctgtgatgggcttgagtctgacagggggcaatgacctgacctacggttttgtaagatcactctggctgccacctggagagctggtgtggggatgatggccatggtagacacaaggggagcagttaggagaccaccacaagtgaccatgcggcccaggcgagtagggtagcaacagagatggggagaggaggtcagatttgtgatctgtatctgaaggtggaatggacaggaattgctgatgagcttgggtgtggtgcatgagggaaagagagaaataagcatcattcttaggatttgtcctgagcaactggaagaaaaagaatgacagtggctaatacggttagccaggcgctcctctaaacccttcacatagtttaacctgtctagatttcataacactcctatgaattaggaattagttcttcccacattttacagaagaggcaatcgaggcccagagagttgaatcagtttgcataaagtcccaccattagcaaatggaaaagctggaatttggacccagcacttcaccactgcacacttccccggctttacagaaagagaaatgccgtgaactgagctagatgagcccgggggaggaatggggtttttccgtgggggtgtgaatcaagagttctagttggaatgaattcaggctgaggtgccttttaaacatccaagtagagatatttagctcagcagatggatgtatgactcaggccctgggtggcaaggagga

SEQ ID NO: 1879222 - DNA, 4001 bp, Homo sapiens; identical to SEQ ID NO: 276

SEQ ID NO: 1879223 - DNA, 4001 bp, Homo sapiens; identical to SEQ ID NO: 277

SEQ ID NO: 1879224 - DNA, 4001 bp, Homo sapiens; identical to SEQ ID NO: 288

SEQ ID NO: 1879225 - DNA, 4001 bp, Homo sapiens
tctcaattgctttgctcatgaagctgacatagcagatcccccgtcaccaagttgcgtgcacacgcatgcatacacacacacacgcatgcgtgcaagcacacacacacacacacacacacacacacacacacacttctctttcttgctttgtattatagatgagattctacttaggggtaggattcattattcatgaagggtgtggtcaggtgaggcatgttggaagcaaaatgcgaattaggtaaggtggagtagaagagagctattggcaagagaaaaattacttgagcagtgtgtgagtgggtgggtgagaaagtgggcagggtggactcagaggttgggaagctgctcctgagaggagaagcctctgtctctacacaggaacctacctgacacatgaggcaaaaggctccgacgatgctccagacgcggacacggccatcatcaatgcagaaggcgggcagtcaggaggggacgacaagaaggaatatttcatctagaggcgcctgcccacttcctgcgccccccaggggccctgtggggactgctggggccgtcaccaacccggacttgtacagagcaaccgcagggccgcccctcccgcttgctccccagcccacccacccccctgtacagaatgtctgctttgggtgcggttttgtactcggtttggaatggggagggaggagggcggggggaggggagggttgccctcagccctttccgtggcttctctgcatttgggttattattatttttgtaacaatcccaaatcaaatctgtctccaggctggagaggcaggagccctggggtgagaaaagcaaaaaacaaacaaaaaacaaaaccctggagtgttaggaggagagtgaaggtagaggggtgaggaagggtaaggggcagggctggtttcagctgggggctctcaccagccctcctttcagcctctacaacagagcagcttcccagacttctccaggaacccagaaacgggatggttgtcggcaaaggttgggagtggcttttcctctggtagccacacacctgagcactacggacagggaggcaggtgccaccttgacacctctcttccatagcaatgggaaagtgatgagtgcgggagtcctgaggagatgtggcctgcagacaacatgcagccatgcagggacccaggactgtaacctggggaggacgcgggtccctgcaaggaagagtagatttggagaggaaggatggaggtggactctcaccccattccccccggaaatgaacaaagccgggccctttccataggaactgcccttggagatagcagagtgtggctgcccctccttgctccagcagcagtgggagaggcactgctctggggcctgaactgcctctgcttccccccctgaggggcccctcactcttacccaagactctggattgttgcacggcaaccactcctcccatggcattgctcagcaactacttctcccttcccggccaccctgtgcccccttcctggtcccaacgccagcccttcatccttcctccctcagcagccaggcagacataacaacaaaactactaaaaggagcttcactgcagtgagctgtttcctgcccaaactaagggaataatgtgaactgtgtgcatgtgtgtggtgtgtatgcatgtgtgcatgtgtgtgtgtgtgtgtgcatgtgtgtgagtgagtgagaggcagagcgaggaactgaggaggagggctaagagccaggggtcctgggcaagtggacagggctgtgggacatgttggggaggctttgggaatggggtattcctagtcagggttcacacctcacctgggatgttgttccatgctggtatttcctctgccacccccaatgcccatcggtcttggagaaaggagtccccgggtgtgtgtttgcccagctgtccattctatctctcccttaaacacagagcattcagcccttccctggatttccctcctctgagccatggagtcagtgccacagcctttgctatgcacctctcaggcctctccttggcgttgaccctggaaagacctaccaccacctattttttcccatagtctgtacccagtgagttgaaggctgggtccccacccttccttttgatttcctgtcttccttctcgtggccccagctggttgctgtggagatgaggttcctggtcctccctgtcctggctggactgccccgcctcagatccaggatgcccttggcatcgctcccaccctcccccagcttttcctccctggtctgacaatgggcatgcaaaaaggggcagctgcaatctagcaggcctgcccacccccttcagttcaggtaatacagttgtgaatcttccagccgctggttagggccttgggcaccacaggcagcccctcacctaagccggggcctactcctcttacaacagcaagagagccctggggccccaggcctgttgagcttcttgtctcccagcacccgcttttgggaaaatgacttttcctcttcaagctgaaccactctgtccatattacacagaagccatatttgtacgggggggtgggagggagaggggctgttgtgctgtgtgtgtctgtccaggggtgggggggtgggggaagggagcagggaggggaccgtgtatctttataatctttctaactctcctgtgctaatctcagaggggtcaccctcaatatatctggattatccgtgtcattcagctgcctcctttctggtcctcttgctgctgctgggatgtgtgtatgtgagggtcttcttcccataccccttgcacctggtgcctggtgcctcaaaaggtggtgtgtcccttgccaggccactctcaagaatatctatgtacagcaacaatataactctacaagggagagaagtgtgttcacttccttttgctaagcccttcctttccagagagtgtcttggggggcatctgactgcttccccccaccctctgccaggcattgctggagaatgttaagacggcgatggagatgccatcaaccccaccctgcagagcatcaccagacaccaccagaccaaattcactttccagccccttcatgttgaacctgaaacttgagctagtgtcttgggagaaaagggggaaatctctacgaggtacccatccttctgcaccttaggtctgaggtgcttggccccctaggaagccctacatgaatgggacagaaggtccttaacaacactggagatgaagcagccgatgctgttttggacaaatgaaacagcgtcccctaaccagccctttctatctcattgttctgacttggacacgccatggctcaccgctcccaaagtccccactatgtctccctagctgaggaaataaaagcagagaggggtgatgaaacagtgacgatcctggggaaacagctgaggaggggagggagggggaagaagccactaaaaaagtgaaatgtgcttgggagaatcggcctgcctgcagggtagatgccctttctctctgctggccagctctgcccctcagtgagaaactttacatattgctaagatgcctggccaatgaaacagttccagagactttatgtcccccagtagaaatatgaatagaaatcaccctgtgggcaatggtcccattttaaaatatgctgtcccattgtcccctagagcctactttaacttgtcagaccatgtattccacttcatatgcaagaggcatgcactgagcccataggtggctaggcaaacacccaatagctccctgaaatggcttcattatgcagcctcgacagccaccccaaccctcccactctcacactgaaacacccagacctagagatagctagacacacccagacacccgccaagcccctcacatacagatatgtgcacaatgatacacagcaaacgtacacagagttcagtacacacaaagagctcacgcccacgtgcacacacccctcagttgggacagagttgaccaccaccacctttctccc

SEQ ID NO: 1879226 - DNA, 4001 bp, Homo sapiens; identical to SEQ ID NO: 319

SEQ ID NO: 1879227 - DNA, 4001 bp, Homo sapiens; identical to SEQ ID NO: 330

SEQ ID NO: 1879228 - DNA, 4001 bp, Homo sapiens
cccccaaccctgtgctctctgaaacatgtgctgtgtccactcagagttaaatggattaagggcggtgcaagatgtgctttgttaaacagatgcttgaaggcagtatgctcattaagagtcatcaccactccctaatctcaagtacccagggacacaaacactgccgaaggccgcagggtcctctgcctaggaaaaccagagacctttgttcacttgtttatctgctgaccttccctccactattgtcctatgaccctgccaaatccccctctgtgagaaacacccaagaatgatcaataaaagaaaaacaaacccaaaaaaaaaaaaaaaaaaaaagaaggcaaggtcttgactatcccttactcagtctgcagctcctgaggaaggccattggtagtactgcattctcctggtcctgtttgcatctgggcttgggcttgggcttgggtttgctcccacacctggctctgaaggccctgcagttcctttctcagctcctccaggcattgctccaggagaaaagcactcccctttggggccccctgcagcaaccttagtgatgctgtagtgggacaagttagggatcatcctctctaagagtttcacaagaccctagatactctacttgcaaaacaagacacatgtgcacacacaacaggtgtgtggcaaaattgtgtgcatacatatgaagctgtgtatatgaagaaaataactggccagataccttccaggacactgatctggtacttctgctgctctcgctcttctagcaggccctgcactgcctgccttagtgcctgtcacctccccaggcagaaaaaagcacatgaactactgtataacagcttttcccgacccctagtatcctcatcttacacaaacatcacatatacacaccaaggattccaagcctcacctgagcctgacattgaaattaggatcagagaatagcaacctcaccccagagagaggatgggctctaggactcagggcagctcagcctttgtggaactatgggagtctctaaagcccaaggctgttgagcttggactcctgactgcagaggcaagtgatgagaggaaatccaggtcccagccaggtccccggctgaggaaataaggaagggttaagtgcagggtctgtgtggggaaacagagttcaggaaaggacagagttggaatttggaaggaataatggatgatacgggcactggaggaaggcacagaaagagaaagggcttggaagtagaaagagacattacttacctgcggtggagaccccaagaagatacagccactgctacagaagaaacagatgcacaggccaatgagctctgtggagaccccaagaggatacagccactgctacaaaagaaacagatgcacaggccaatgaactctgagagtcccttagcctccccacgcaaactggggacctccaccaacccctcaccttattccggaccacatttccatcagtagcgttgagaagcacatccagctgctcaaaccagctgaggctcgtattcatatcctgtggcaggggagcggcaggggtctggctccctggtgtcttgtgcttgctctcctagcgggggatacccaaggtatccccaggaaaggccaccacgttagatggaaagagggaagtggggatgcaacactggggtaggtggatgcactatcagaccaaaactgcgatcctgtgactagggaaaggaaggacgctcttggggaactgggggaaaagcgggataccgtgatgatacgcagatatcaggtggggattgaaggtgccagaacctggttgagacctccccagaagtagtacactggcgccaccacgccaaacctgtgccagtgacaactgccgccgccgggttcaaaacttcgggttggttttgaaagtccgactttggactggctgccgcagcgccacctgggaaactgaggtcgcctcttgcgaacacaaccggcgatggaggcggtggaactacctttctctagaagagacacgtacatgcacacccccaccgtgtagcttgccgggaaactgagtcttcctgatttcgtgtggctgtctccaaggaggaaacgaactacgcatcccaagatgcatcgcgcataggcaatatggtcccgctactggacccatttcctacctgggaaatggagtcgaagctgactcaaaacgtaacggcccaattgtccttgagacttcattccccagcaagctcagcgtgtaacgtgcgctatggagccgaaagtcgcagagctgaagcagaagatcgaggacacgctatgtccttttggcttcgaggtttaccccttccaggttagtttatccctcctgctgttctagggcgaaatatatgattggcttcgttgcaactggcgtgaggcctcgggagcctctgatcctcctgggttcctgcagcccagtgtccatgtgacaacagggacagagtttcagtgggggcttgggttaaaaaggtagtggtcgaggccgggcatggtggctcacgcctgtaatcccagcactttgggaggccgaggcgggcggatcacctgaggtgaggagttcgagaccagcctggccaacatggtgaaaccccatctctactaaaaatataaaattagccgggcgtggtggtgcatgcctgtaatcccagctactcgggaggctgaggcaggacaattgcttgaacccatgagacggaggttgcagtgagccgagattgcgccattgcagtccagcctgagcaacaaagagcgaaactccgtgtcaaaaaaaaaaaaaaaaaaaaaagttgtcgcatgtttaaccttttgccaccatataatgccggattcgttaacgggagacaccatatgacctgtagcgtgtgtggctcagattgtcacctatataatttacaagaagaaagggacctgtgaggcaaagtcaccttggaacttcctaaaggatttaggagagggcaaagcctagaaggtttgcatagctatcatttaggtcagctgaggaaggaagggcattcctggtgatgaacaggcaaacaattggctggtttgttccctctaccaacagaaggataattcatgatatttccagtcatcagtgctgggctgggtaatgaaactttgtacacttgcctggcacagcagtctcagcaccgcaccccgacccccatttacacggttacatttccccacatcagtgccctgtgcactgagcagttaagttacaaagctaaatcagctcagcttgagccctttgcctgatgcttaagagactacccacttcccattccttctgctgagtggctcacagcagtcctgggagaggatatagagggagaagtaggttgggtctagcttgagactggtcttgccagaaaaaatggaattgagctatatatgaaaagatagattggaaggaaggagggttatgtacatcccaaatatcagaaaaagcttgagtaaaggtgtggagatagtggtgtggtgttaccaagtaaaagggcttgatgcctgatgtgctggaagctaatattatgacactgggtttttgagaaaacaaaagctatttgttgcagatcgacctttaactctttgagacaccgtttcagtggatggcaggtgtgtgggagagtgagaatgcctatctggcaagttgagtagacctgggtattaggagcttttgtactgaacaaagccaactgcagccctgccagtcaccctaggctcctacctctcacctccctacccccacatccaatcagccaccaagacctataagactgtctactgaatctcccaaatccattcccttgtattccacccatctatgctgtggtccaggccaccatttctcacttggattactgtaataacctccttgctgtaattttacctccagtccctcctccacactgcagccagtgtgatctaaaaatgatcatgctagtttactccttaaatcttcagtggctcttcactgtc

SEQ ID NO: 1879229 - DNA, 4001 bp, Homo sapiens; identical to SEQ ID NO: 349

SEQ ID NO: 1879230 - DNA, 4001 bp, Homo sapiens; identical to SEQ ID NO: 351

SEQ ID NO: 1879231 - DNA, 4001 bp, Homo sapiens; identical to SEQ ID NO: 367

SEQ ID NO: 1879232 - DNA, 4001 bp, Homo sapiens; identical to SEQ ID NO: 368

SEQ ID NO: 1879233 - DNA, 4001 bp, Homo sapiens; identical to SEQ ID NO: 416

SEQ ID NO: 1879234 - DNA, 4001 bp, Homo sapiens
caccttagagtaaaatcaacctaggaagtcatcaccaaaaagaacttacggagcagtgccaaagttccagccaccaatagccaagagagttttcagttgactatttctgagggaaaagaaacaaagtgttttaccagaacaaatgaaaagaaagggaagccatttcaacatttagctgcaatagtgagcaagaagccaggaaagtgtcatgcagcctctcatcctggtttatctttgttcttatccttatttcctacttatgaatgttggagtaggtgactatgattggtatgtttcaatgtctccacagttttttttttaaatatactttaagttccagggtacatgtgcacaatgtgcaggtttgttacataggtatacatgtgccatgttggtttgctgtaccccaatgtctccacagttccaattatttccctaggagtgaatctcctgaccaaggagactgaatgctttatcaatgccagctttggattgcttctaagtggaagattgttctcaactgagtccaccagtagttggacttataagcttcccttggcaactgagctgggctttagttagcagctagcttctgtgagccagccattccccttaaaattagagtcattcttgcacttgaaataataagaaagctgaatttacctgcttgttggcctgtttggaatttcagcctgaagtctgctgtggaagatcttgtttaaactgtccttaaaggttaaaagatttgaaactcaggttttccgtcatttacttgtttttcaggccattgaaagcttggtagagagtcatgtcatcccattcgatggtggtgatctcgttgttctgcattccagcaaaggcgtagatcaagtgggtacagaggcaggggtcgatgtcatcaggcttgaagcaccccaggcctggctggttctgggcccagttggtgaagtaacatgtcagctggtaggcagagcctgttacccagagaaagaaggtgagagacaagctccctagtgagtcacagatttctttaaaaaccacagatttccaaatgatttccctatttgaagtctcaaaggaaaggggaaaagtcaatgtaagaactttatgttgcagcaaacctataattatataatttgcaggcaataatgagcaggcaattcagggctgaagatatctcttagagatagctctgttcctccaagagagaattaaataaccttagaaaccagtgcctttagctgaaatagaattttaaagcttagtgaactatgatttagatgtattctagctcccttatgtggcagcttacgtaccaagcattgctctgagaaatttacttatatttactcatgaatcctcaccaaaaccctttgagagaggtattattattttctcattttaacccatttggaaactgagacacagaaaggatgatagtataagcctatttagcccttttggatatctccctgagtaattccacccagggggaaatgagtcttccaccaagagacaagggccctggctactggttcagattctgccatgaactctctgtattacctaggtcaggtcatatgtcttatctctgccctggttaactggtctgtgagatggagtggtaatgcctttcctgtacacctctcaaagaagagttgttttaaaactcagtaagatgacagattttaaaatgttttaagagcagaggacactgtgtagctgcctcaccgcattagtttttattgttagcacgtattctttaagactgccatctagttggtttctgctttgggatttttaggccaatggtatcaatcctttaaacttggttagggaatttcaaactctgtagagagtagttaatattctttgtctgatgtggaaggacacagggcagtactgagtttccaaattatgaataagcaaaagaggaacaatatagtggttcatcccaagaaatatacctacctatttcagctgtcagcacaaggagcagaccttaaagcaacagagagaataatgaactggaggaatgtgagtagagtagcctttatacattagtcacctcacttaagcagtaggaagctttttctatttttcattctcttaagatcctctgtagatgaccaacctactgaggctggcaaagcctttggatttgtcctggaaacccactcccctctatttccattcaaaagaccattaaagtaccatgagcctttgaggcttggtgaagggagggggacagcagggcagtgagaaacctatcaccaggcaatttggggctgtccccctgttcagtacatccccatacttttgccgaaagcaaaaatctcagttgatctggtttaaatttgaaggtaaaagagttttaaaggggcagaaaaacaagatggagagagtcattcagaggtacagagatgagacgatctcttaccagtgagaagggtgagcttggccatgttgcctcagtggtagtgtccctcatccaacctgccatttataccctctttgccctctcttgtgccttatcagattctcctttatcaagattgcctctaaagtaagtgttgatattggcagtgctcacaaagctcaagcccatttaagaacccattattgacagggaaacaatactatcttgatttcgtttcacaagaagaaaagattgggctcaagcccgggaaccacactaataagctccattatggagtagcttatataattcaaaatggcttatgtatagtgggctatattctccatttggatagtgaagcaactgattggctatttcacgcactctttgtcagatggaagcattgagtaactttgcattcatttattctttgcagtcattcattcactcattgtaagaacaaagtttcctccttaagcaaagtctatagagggtcattacctactctgtctttttgaccccaaattcattacctcttttccttctgttgatttttctactcctatttctcctaccctttcccagccctctacccctgaagtggccttcacttggttcttctcttctcaggaagctcctttcctttgtgatacttcctcggattcagcctgccccagggcccccggtgtaacatacctgaccacagaccctgtgtggctgacactttccaggtggttctttcccctaagccagcacctcttcctgttgcccacatttccgtgtgtggttccaaagttctcttgatcacccaggctctcaccactatagtttttgtgattcatacatttcttctactctccaaaacccattggtcactgaaatctatagtcctcttctctttggtcttagagttccccttctccttggaatcatcaattccattccccgccaccacttctgtcagagttcagcactgtgacagtgcactgtagctcccttctttttcttctagatcttttctgtatatggctccaaatccctggagttggggggcagagtttaacagctccttattgcctcatagagttctttctccttcgcctgtcatcgactctgcaatcttgcctcaatttaactttccgccttgccttctgctagcctctcaatataaatcttgcatattaagttatactgttctccacactcaaaaatggtctcatcttcaccctcctgctgaggccattccctctgtctagaatatagaatattgtcctcctgtacccacctcccactccattaaaggcccacctcagtggctttcccccatgaccccttccccaatcatcacacctggaagtgactaccttcctcacctctacttctctggtattttgtttgtaccatttggaaaactcactacttctttttatgaaccattggtagggaagaaatgtggaaccagtggaaaaagccacacatattggagttcaaattctttctaccattgaggttcaaattctttccattgttcatttggtttgagaaattgggacagttccttaatctcagtttcctaatttgt

SEQ ID NO: 1879235 - DNA, 4001 bp, Homo sapiens; identical to SEQ ID NO: 422

SEQ ID NO: 1879236 - DNA, 4001 bp, Homo sapiens
taagaggtcctgatgcaaatccttttccaagcaccctgcattgttgttgtcaaggtccatatttatcaaatcaagtaaaaacccatgaaaagtggcaaccgagggaggaggcagcaagataaatcaactttctaaaaaaaaaattcccctttttaaatagaattttattccggttttggtgttcagagatgttttgttcacaataagagccattgctccatattaggtaacatcttttcccccttgcagcttcaaatgaatatcaagagccaggttcacaagttggattccctttaaagacacgtttgattgcaaagctttgttgactctgtttgatatcctccgcgaactgcatgactgagctaagctgaagttcctggtcaccagcatggggaacgggtagctgcttcagcgcctgctggcagagaggtcgttctccgagtctgctttgccacctagtggtttgatgtggtattgccattcaccaggtagttttaaaagtcattttagccgttgaatgctatagtgaattatgacagaaaacagagacactctaagcaaagaaggcagtcagagacccaaaacaagccctgaaaaatgacgcagactggattacaaatagggaagaggcactaaatagttggtctgagaaaaaacgcacggctgtatgttgcaaagatattttgggtttttcccatatcatcacttaaaaaaataattattattatagacgtagaattaatttagacttctagaaaaatttatacgcttttaattggttcagcaggtttaaaaatcgagagccctcaaacatttttcccaagtaggtactgcccggttggctcagaggacatgaaatgagtttatctccttggaattcattataaccagaagcctcacatgtatattggccttgtccgtttctgtaagcaatctcacatgtatttcacactggatatttacacatttttaaattttttaaatttacctatatatttcacagacttataaccccagaaaagttattttttgccataactagggggaagaaggcaaatttcctagaactaaccttcaatttctcctaaattcagtactgtcaaacttttttgtcttttttcacattttttgtttcaccctcttcttttaaatattaataaaagatgtcaaaatatccactgcagtggctttccaacattattcaacacaaaatacattgtacgtacatcatgactatagacataattttatacgtgtgtgtatgtcgagcaaaaatttaatgaagtgatattgattgtcattatgtggtatgcattctgatacgtcctattcaatttgctgtacatttttttcttttttaattctcatattggcccactaattggctcttgcattttgaactcagtgtgtgtgtgtgtgtgtgtgtgtgtgtgtgtatatacacacacgcatatatatctattgaatttagtgtgtgtgtatatatacataaatacatatatacatatataaacacatatacatatacacacatatacatatatacacacatatctatacacatgtatgtatatgatatgtatatacatacgtatatatgtgtgtatatatactcacacacatgtatatatacacacataccaagttcaaaatgcaacagccaattagcggaccaattagtgtgtgtgtgtagtgtgtgtgtatatatatagtaagttcaacatgcaatgtatatatacactaagtatatgtacattgtatataagtaagtatactaagtacatagtatatatacacgatataagtacactaagtatatcgtatatatatactaagtatatatacatacacacagatgtaacttccccacaaaggcactgatggtacccacgtgcaggatcttgcgcagttttccacttcttgcctgagctctggtgcctggaacacttcagtaaccattccctgaatgttgcacccacaacctggcagggagggagcctgctctgaccccagagaggagccaggcacctgcccctggtctgcccctatctgaccatgccctgagccctcatgcaggctgcattcctagaactcttgcctgggattacttataaagtgcgaaggtcactgggctgacaaggatctctgttcccaccacctgtttattcctgagcattacaaggaaagacttcctgtaggtcccctcaccaatatcattcaattcaatgagtgtagactgtgaacttccttgactcaaaatatcctaatgctatggaatagctgttgagtcaggatgaggaaggaatattaaacataggaatgataccttctactcagaaaatcaccgtaaactgagggctcttagcccggggttatcactgcttcatttgggtctgacctacagtcttgattctcaggaagttacatattacctatgaaataatagatatacctgaagtaaaacatttggtgactctcatttctaataagtacttttagatattcttttttttttttttttttgaaatccttatgaccggctgatcactttctcctgttgtcatcctgggtaccgataggacctccgttgctgagcctccagagaacagtccttttaatgaggccgtggccccaaggcctcggagaagttcatagaaaatgtctgaaagaaggtgggagggatcttgtttcctggccctatagggacattgtcttccttgataaagctgggtacagccttgatatgaatagattggggagcaccaggaatgtacctcacctgggctgtcgagaaaagacagtgtgctcagaagaggtatggcaggtgctgaatattcccttggagggacgaaggcaagaaaggcccctacagcaatgaggggagaaaatccacaacccaagtagaactaggatttcttatgtgtgagacaatacattgctcatttacatgtaaagtgtgtataatatttttaatccatcgtattcaggcgagcaagatcagtcatttcatttttgtataacttgcctcgaagctgcctgttgtggccccattctgcatagcaaatcaccacaaacttagcagcttacaacaaggttccctgttcagggtctcaacactgaaatcaaggtgttcgcccagctgagtttacgtcttaggcaagactaaggaagaattcattaccacaggcattcaggtcatcggtgcttctgccatggtgacctagtgacctctgagcagctgccacctctgggcaccagacaggagggcatgaggcacgcatcttctttgagtctgatcaatattatcagatgcgacctctttttcctccaaccttctccgcatttaaaagcaacagcagagtgtaaggcaagattccaagccctccttggcaaccatcaccaatatctgcccccttttaactctcttcttcacttccttctggcttcggaaactttgggatttttttttttttcctcattcgggacattacagattgagctgaagtcttctttgtccatcaccctcaatcctaattttatcttcctcctccaaaataccactgctaatatatgatttgcatgtaaatctttctatccttctatgacaattttaattatattaatatactaaaggtggtatctgtctatatgtctgtatacaacctttagtatacaggcatgtacaatctttagtatactattgctgtgttttattgtaaactaaattttatcgtgttgtatttgtcatcccacaacttgcctttcttacttaacaaagtatttttagatggttctaagttaatatatatctagttgattgcttttatctgctgcatagtattcccttttatgaatgacctcatttttgaattcatttcaaaacgaatggtcttatagattttcctcatttttgtcataaaaataaatgcttcagttaatagccttgggcgtgtctccttgtgtacatacgaatgcaataatttctagagggtagataccta

SEQ ID NO: 1879237 - DNA, 4001 bp, Homo sapiens
gttgaattgtgagcttctctaacggtgttcttggattcatttttcaactgcaaaagattgagatcctgaataaggcttatgggtgtattaaaactgtgcccttgcagaggaagtagccttgaatagttattggctttgaaagcaaccagttttgttgacttaattatgctggtaccaggaaagcatagaatagatcctgttgataacaagagccatgctggacattaacagtttcacagagagtagtggggaccatttctttggaataaagttgaaacatgtttcttaatagacaactctctcagcattataaaatcctgatacagaactcaaggaaagacacacacgcacacacacacacacacatgatttttatcgttgttatcttagtaaataatgactaatgtggtttttggttgttatcagttggttacggattggagttaacatttcatcagatctgagcaataacctatgtggtaaagtcctagtgtggcaggaatttgggattcaaggggggtgcttatataatctgctttcttaaggtaaggtttgctcttttatgctacctgtcatttctgccttaaacaatgtccgggaaattcagccacacacaacaaagaaccagatccctcatttcggttctatccttcctcctctagaactgacattccttggggccgtgtcctcaagtgacgtgtcctgctctagctaaatggcagtaatctgtgtttgactccagcagtttatcaagctatgtcattttatgccatgtcagtttatagagagtggcacaagatacaacaggatagggaagctgagttttctatttgtctacttcattgaaaacatgattttgtttactgacaagtaaatggtataggtgtaaggaaagagtagcaactaccatattattttgccagaatcctcatgttaccgtttcaaaaaatgccaagaaagatgacagtgcatgttataacatcccttacaaataatagcaaagctttaatcagctgctacacagacacactcaggattgaaatgcaacctactagggtgaaacatgacaagcggttcattgaacactgcgcagaaggtaaatgaagtgtatattttccaatcacaactggaattttaagtgagtgaaatggaataaactcagtttggaatttgaaataaattcaccatggaatgtgtcttagagaccaaggtttacactagcgctatacaaactcctcagcgtgaaacatgacacaaggtgaaattttcctggcatcttagagtcagatactgacttctgaaggaccagggcacagacatttcatcaagagctatttgtttctaattggggaagaaaatacagatgtttatataatactctgggtcaggagtaatattccacctggtacatggagttttgtacactttttcagaggtggtatttctagctgagtgttagcagtaaaacattttcatcaaatttccattcttttttttttgaagcctacttgcatagttctaaggagtgtcatagctcacacatagtgacactgattagtaaaaataagaagtgattgaagaaaacacaaggaaagaatcaacttgaagtcattcagaagtaaccactagtagcaatttaactaccctgttgccaaagctcttttcttaaattacagatcctcatgagctagtaagtttgaaggggagtcataaagaggaacaggcattatacgcaaggctgaagaagcagttggtaactaacagtacatctttttctaaggtaagtttaaggtcacaaaaagacttaatgtacagagttgaaaaacttacatatttcttagaagcttagaagttatgagtttagttggggctccaggaagatgcaagatgctagactccaaaaaataagagagaggtccagtgtagaataacactctatagattaaaggaggactcaagagtagaggaaaaacttagcaaaatacagggctatgagttaggtgttcctagttagagtctgagtgtccggaaatgatgaaatgggtgagctccaagaatgcaggatatgtgaaattggtaatcagatctactggtttgcttgttctgagtgtatcgttagggtttttggggactggtgttagtggtgttggcagaattagtcccctgctcttggttatacctgtccactttaaacagtagcttgtagttatttagcccttaattgcattcaggtaaaaccaatatagcaccctataattcagcaaatatttgttttcctggcagtattacagtttcagggggcagttctaaggtgattacagtttccactgcttggagctttctgtatatttatccttggattagactcaaagtaagctgattttatcaagccaccgggtaattctgaccatttcatctggcgattttagtacggtattgttgcagctgacctgtatacgtaaggaattactgggtcatcagctctggggaatgtcttttgattatgaacacattttcagcatgtgtccactgaaggtaaggggcaaagaattgcacgatctacttgaatgcctgtttaaatagataaaagtgggattttgggcacggcctggttatatcttcttaaacgtaggtagtagagccgcaactcagcgtagcaacaagagatcttttgaacaactgaacattcagatgaagcaactatgtccttcaaaccacatccttcctgctgcctgtgggaaaggggtgatatttgtgttgagctctgagcacatgcagaatagatctgtgtgtatttccacaaataaaaggacattgtgtgtgtgtttggcacctgggatggcaaaagcagttaattgcttccgaaagctttgttccaacccagggatcggcaggatttttaagcactgaactaggaactgggcactaaaaatacttatgcagaagacctatgatagcagtaagtttacagagcagagctaagacttgcaaaccgtgttgtatctgtgtctttacttactatggttgagaggaaaggatttacacgctgcgtttgcaacctgcaaagtaatgagccgtgttgtagtaacattttgagatattgtatgttgtgttgtttatatgaggatcattcagaatatatagaatataagtatatgtttttctaaaacaaaaaactttgccctagtttctttgcatatattgttcacatcatgttcatatagtcactggcagttaatgatttttgtcatttagtcagaaacaaagtagtgctctgcctctgaaaccccaaaaaaacctaaattaaagtaaaattaaaagatgtattaaaattaaacttggattatcaaaatgaaacagtaatgctctcgtgccactcaacgccagacttttcatgttgcagatagcaagtgaacagaaagctaagcatgaacatattttaaatgctcctgatattttcaaatgcttaatcctaagccttaaagggttttatctatagagatttggggaatttcagtgtttctttttcttattttagatttcctgttaagttattctccagagtttttatataaaatgcacgaataagcatgatttaacgagaagacaaagtcttaagtgctgtaattcatgttggaaatcatgagtatttttaagtcttcttacttataatcaaagtggtcatctcctgaatataatgaaaataagagcaagtgatagccccttatctttatttaaatatgctttatctgcaggagtttgaacaactcaggcaaggaaatattttgttgagaggcaagatgcatttttaaatttatttttgcttaatatgtgctcaacttaaattgatttgagaacatatatttaagcaaggtcttcataaattattataaaatgagaattgtatattgtgacatgtttaataatcatgattttattccagtgatccaataaaaggagtgctcaattgaaggaatggaaatgtgtcaaaaagcccaaac

SEQ ID NO: 1879238 - DNA, 4001 bp, Homo sapiens; identical to SEQ ID NO: 430

SEQ ID NO: 1879239 - DNA, 4001 bp, Homo sapiens
tatctcctgggctcaagtgatcctcccacctcagcctcctaagttgttgggatgacaagtgtcagtcactgtgcctggcttctttaaaatttttttttaaatgccattaaacatagagttatttttttccaccagtggaaataagaacagaagtacatcatagatatctctacctcgaggcccataggtagccaagttattagtcaacaagaagtttggagtaaaatgtatatattgtcctttatctccacattgtccatattgaagtgtatagggatcatctccgtatttcaggtaaagatcagcaactatgacatctgcctaaaaagaaaaagaacaaacaaaaacaaattttgaaaacaatagaaacaagagattttagaaacaaggactttttttcatatacattaagaaaagttatattactaatttaattactacattagtgattagtaattattaaataattacagatattaagtttttaaaagcacaggaggaaagaagcagtttaggagttagaagaaatagcctacctggtcatatgattcttgttttgggattaagtactcagattttgatttgtaggtcattggaattaaaatgcttacattcctgaaataagctctttgtttggtggcatgaaacaggtaagtagatgcttcagttaccatttcctgacaaaatttaaaataccttgtggtaataatttcatagtgaaatgaacataacagtacatatataactagatgaagcaaatctaagcctcctttccccaaacattttgggaaaactaattgaaaaatagattgaatttttctacaactcttcagtctgtaaactccttattttcatatgctcaaaccaccttttaaaattttttacctgcattcagcatgatgggttggagatggaaatgagggtgctgggtgagattaaggtgattaagactgggaggctgttggtaaagttgttcatttgatcaaacagaatggcttctggttgtttagattaattgggagtttaaagtctggtagattattataattgatgtcaattgaaaaaaaaattttgctagatttattttgagttatcttctcatatggagtgtgttcataaaaggcaaagttttaccaagtggaaatgaaaatagaaatacataggtctcattggcttcagatcccagttttggcacttattgtgagatttgacaaatcacttcatttatacaagggtaataattcttgtttttgaattcctcatggggatattgggaggatcaaagaagatagtatatattaaagtgatatataaagtgttttttattatactgaataatgcaaataaagaaggtacatcaatttaaaatgtgtaattttttctttaagataagatacatatgatttttttacttttccagagtttgaacaagtatgaacaactgaaaaaatgtataggataaaacgctagagcttaagtgtagactagttagctaaactttataaaagtaactttatgaagataaaatttgagaataattttctacttgctgtaatgtctttctgttagcttaactagttgaaaaaatattagttcagccttttaataattcactggggaatggccaatagtattaacatataataaaacacatttaaactcagcaggtattaatctgacagtttagataaatgctatataaatggtaaatactgttgaagaaattttggaaagttatcactcaatgaatgtgtatacctaggcaccatgagttgaaaatacatattgaaataaaaatatgtggataataaaattttcccttacctttatgttttgaatgagtttttcatcttctggtacactgggattaattgcaatgacaatgccatcatatccattgttattcaaagttaccagtgagcttttcaatacaggcgagagaagcaaggataggaagagaatcaccttcagactgaacaccatttttgcatgttaaacaaaccttttggaaatgtaccaaaggtatttatgtatctgcttaacttaggaatttgaatcaagaccaaaatatttgcataaagtttgtatagtaaattgctaaaatatcttggagttgctaagtagcaatggggattatgctgaacacatttatcatactttctaagacagctgaggcattaatattcattggattgggggggtggttccaagatggccgaataggaacagctccagtctacagctcccagtgtgagcgacgcagaagatggatgatttctgcatttccaactgaggtactgggttcatctcactagggattgttggacaatgggtgaaggatagtgggtgcagtgcactgagtgtgagctgaagcagggcaaggcatcgcctcacctgggaagagcaaggggtcagggaattccctttcctagccaaggaaaggggtgacagatggcacctggaaaattgggtcactcccaccctaatactgagcttttccaatggcctcagcaaatggcacaccagaagattatatcccgtgcctggctcagagggtcctacacccatggaacctcactcattgctagcacagcagtctgagatcaaactgcaaggcagcagcgaggctgggggaggggcacctgccattgctgaggcttgagtaggtaaacaaagcagccaggaagctcgaactgggtggagcccactgcagctcaaggaggcctgcctgcctctgtagactccacctctgggggcagggcatagctgaacaaaaggcagcagaaacctctgacagcttggaagacagtagtggtactcccagcacggagcttgagatctgagaacgggcagactgcctcttcaagtgggtccctgaccccgagtagcctaactgggaggcaccccccagtaggggcagactgacacctcacatggctgggtacccctctgagacgaaacttccagagaaacgatcaggcagcaacgtttgctgttcacgaatattcgctgttctgcagcctctgctgctgatacccaggcaaacagggtctggagtggacctccaggaaactccaacagacctgcagctgagggtcctgttagaaggaaaactaacaaacagaaaggacatccacaccaaaaccccatctgtatgtcaccatcatcaaagaccaaaggtagataaaacaacaaagatggggaaaaaacagagcagaaaaactgaaaattctaaaaatcgagtgcctcttctcctccaaaggaactcagctcctcactagcaatggaacaaagctggatggagaatgactttgatgagttgagagaagaaggcttcagatgatcaaacttcttcgagctaaaggaggaagtttgaacccatggcaaagaagttaaaaaccttgaaaaaagattacacgaatggctaactagaataaccaatgcagagaagtccttaaaggacctcagggagctgaaaaccatggcacgagaactatgtgatgaatgcacaagcttcagtagccgatttgatcaactggaagaaagggtatcagtgatggaagatcaaatgaatgaaatgaggcgagaagagaagtttagagaaaaaagaataaaaagaaatgaacaaagcctccaagaaatatgggactatgtgaaaagaccaaatctacgtctgactggtgtacctgaaagtgacggggagaatggaaccaagttggaaaacactctgcaggatattatccaggagaacttccccaatctagcaaggcaggccaacatttaaattgaggaaatacagagaacaccacaaagatactcctcgagaagagcaaccccaagacacataattgtcatatccaccaaagttgaaatgagggaaacaatgttaatgacaggcagaaaggtcgggttacccacaaagggaagcctatcagactaacagcagatctctcagcagaaactctacaagccagaagagagtgggggccaatattcaacat

SEQ ID NO: 1879240 - DNA, 4001 bp, Homo sapiens; identical to SEQ ID NO: 433

SEQ ID NO: 1879241 - DNA, 4001 bp, Homo sapiens; identical to SEQ ID NO: 436

SEQ ID NO: 1879242 - DNA, 4001 bp, Homo sapiens; identical to SEQ ID NO: 445

SEQ ID NO: 1879243 - DNA, 4001 bp, Homo sapiens; identical to SEQ ID NO: 447

SEQ ID NO: 1879244 - DNA, 4001 bp, Homo sapiens; identical to SEQ ID NO: 477

SEQ ID NO: 1879245 - DNA, 4001 bp, Homo sapiens; identical to SEQ ID NO: 480

SEQ ID NO: 1879246 - DNA, 4001 bp, Homo sapiens
acgtagaagaggccaggctaggctcctgggacacacaggcaattgtgccaccagttctgctaggccatgtgaccaggaaatgtcccctagaacaccccatgcccctcaattctgggaagcctgatagagctgagtctgcagatcccacagcttcctgctacacaggcacatggtggccacggcaggggagggaggagaagggaacaactaggaccccaaagacttgctgtgagctgccactttccccactggtggtaggtgcaaaaaacttcaagacgtgatttttttttttttttttttttgagatggagtctcgctctgttgcccaggctggagtgcagtggcacgatctctcctcactgcaagctccgccttctgggttcacgccattctcttgcctcagcctcccgagtatctgggaatacaggcgcccgccaccacgcctggctaatttttttttttttttttgagacggagtctcgctttgtcacgcaggctggagtgcagtggtgccatctcggctcactgcaacctctgcctcccgagttcatgccattctcctgcctcagcctcccgagtagccggaactacaggcactcgccacgatgcccggctaattttttatatttttagtacagatggggtttcaccgtgttagccaggttggtctcaatctcctgacctcgtgatccacccgcctcggcctcccaaagtgttgggattacaggcgtgggccaccgcgtccagcaatttttttgtttttacacacagtctcactcttgcctaggctggagtgcagtgacacaatctcactgcactccacacagcttgctgcaatctccacctccagagttcaagcgattctcctgcctcagcctcccgagtagctgggattacaagcgcctatcaccacgcccagctaatttttgcatttttatttagaagtggggtttcaccatgttggccaggctggtctcaaattcctgacctcaagtgatctgcacgcctcggcctcccaaagtgctgggattacaggcgttagccactgtgcctgggcaattttttaaatttttagtagagatggggtttcgccatgttggccagtgcctgcgggacaagaccgacggcgccacgcaggtgttcctctagggcccgccgctcactctcgctgtcgctaagctgcttccgcagggtgcccagcaggtcctggcttgcctcatagcgcccacgcatgttctggggcgtggggatcacagagtctagcgggggtcctttgaggcctccagagcccacctactctcttctggttccagggatacacactagcctacgctaggcggggtccagggcctggacctgccctggggcaggataggggcctaggcctgagagccaggcttccactcccctcctatgtgccctcaccaccctctgaaccctcatctccctggggtcccggacaactcctatcaaagcccccgggatgccagacaaactcccaggcacactcgtctcctgggttctgatcccacccccagggctcccaggctcctcccccttgcatcctggttccactctcacactcctccctaccctggctctgcccctagttcccaagctctcatcctaggctgtgatttcccttgctagaccttttcccagggtcctggctctgtatgaccagggacctgtctccctctctaccaggaccctaacactgtcgcagcctcctccctccaccggctgcccaagcacccacccccagctgcccaagcacccccacttctgggctggcttcagcgcagagccctcgaccacctccttgggggtcctgacaccctcagacactatttctcagggctctggctgcaccccagggcgctcagactcctcccccagacacgcccccacccccacctggagggcgcgagcccctccccctgggcctctggctgcgcccagaaaactcaagccccttcctacctggaccttcagctggcaaaagtgcagggcggagagaatcagggcaagcgagcgtggagtcttctgagcaggccggggaggggcctctgcggggcgaacggcctcggcccggcgaggagcgccgcggtggagacggggtccgctggcccgagagcccccgcaggctgcggtcggacgctgttggacgcaggctgccgctctcagcgtcagacaggacggcctgagggtaagggagggaagcaggaggccgcagagttaggaacttcggggttagctggcaaaaacgaccaggggaggctgggggccgcctcatcccaaatgctcccgcttacaagaagccttctgatttcacctcctccactagctcagtcctcagctcgccgctgaggcatcccatttattgcgaagacatcatttggcattgctcacaggtgggctccgagagggccgtgcctcccctctgagactgggggctccccagggcagaggccgggtgagctagcaggggtgctgagcagctacagcctgggtcccagggccccacccatctgcagttcaatccgaagccaccgaaaggcgaggcgggggagcccaggaccgcctggcagggccctgtcttcccgcctttctgggctcacacctgtgccaggtcccttaggctccgctgtagcccctctccatcctctgtctccagggccgcctgctcctgtagccgcagggattcctggagtgcggtgagggagacaaagagtggtcggggttctgtcttacctgaaacctcccctttccctccctccctggcccaccactgatcaggtggcctctgaagccatgtccataggccagccacctggtagaccccacagcaggcccgaggccctcaatgaacagaccaggcccagagaagagctgggttctgccccaggtcacacagtcgattgcaggagagctggacctagaacccaggccaggccccacacagaggggtgactaaaccaggctggaccctgggggagtgagtgtcccactggtgggggtggacagttgggattccaaaggcagcatctggacctggagagcgtggatgggagttcaagtcccaactctcctgcttactggctctgagactggacaagcatttcccctcttgggcctcagtttcccatccgtgtcattaggattactctacagggctgctgggagggagaaatgggatggaggaagtgagtgtgcttcccacaaagcctgcacacctgtgtgggctgaacctgagtgtgagtgggatgctgggggtggcccaggcagcccagccctaagcctgtgtccatggatctggccggtaccccatcccaccctgccccatctcaggggcagctgaagctcaccagggcctcaagcttctcggtgaggtccttgtcgacctgatccttctccagattctgcttctgtagacgcttcactgccaggcccagctctgtcactctggagttgggggagcaacagaggtgaatacgggaccaccccagcctctcaaatccactagctctgtgtccaccatgcttctccaaacccgaggcagggaccctaacatccacctccctggctgtgtgaccttaaacaagttgtggctcctctccagacctcacacttctcatctgtgaaatgggaatgaggttcccaccagctttatctcatgggaaagcactggaggacttacccaggtggcaggagtaaggggcacaagttgtttttttgtggttttcttttgagacagagtttcgctgtgtcgtccaggccggaatacagtgatgtgatcttggctcactgcaacctccacatcctgggttcaagcgattctcctgtctcagcctccctcgtagctgggattagaggcacacaccaccacacccgactaagttttgtatttttagtagagacagggtttcgcctattgggcaggctggtcttgagctcctgacctcaggtaatctcccaccttggcctcccaaagtgctggg

SEQ ID NO: 1879247 - DNA, 4001 bp, Homo sapiens
ctcactcagagcctggttggccgagcctgcctggtccagatgttctcggagcatggctttcacctgggccaggctggcactcctgaatagggcaaaggggatcagtaggcgcttgcccagggggccatgctgccagccctggccctccctgttgtgcccccacctctgcggctcctcctccagccggatgagggcactctgcaggtcttggctgtgctctgtgtcctgggtgggagagaggttaaagcatcaggcagggcaggtggagggcaggggcaggcctgcccctgccccaccctggcacccacccttagccgctgctgctccagctctccggatctctccagcagctgctgctccagctccgagtacctcttcttgtactggagaatgtggggatggggagctgatggtgacccccatgggtgggggcagggcaaaatgaacatgtgggagggcaggagcaggagtgggtggccctgaccttgccctgcagccgctgcacacaagctgggcctgccgctgctggccctccaggtaggcctgcagcttgcgctggtaggaggcctgctcctcctgtagctgcctctgcaactccaggctctggggtgggggctgaggagggaggggatggaaaaggacaggagaggagggaagcagaggtggggagccaaaggaagaggaaggatgaagagaggggaggagaagggagagaaagggagggaggagagagaagagggaatggggggaggaaaggaggggaggcagctggaggtcaggacctcacacactcttcaccctccgcaggttgttgggtcctagagccctccaagcccagggggtggggtcagtagccacgtagtgcgaaaggccagagtcctaagtatttgggatcatctttgctggcccagaacgggggtcacaaggttagctaagaatgagaggatttacgttttcccacaacaggtgtagggcaaagaatgcaggctgtgagatcagccaggccaggcttggcacttagttgggcatgagcggtccagcctggactgatgagcatttatgcaacacctgcagcattcctaggtctgacctagacagagtggtagagcctcgaactacaaatgccctagccttgcccttcaggcacttattgggaagcttctggccccttcacacccaccccagcccctactagctgggtgcaccagggacagtgactctgcctctctctgagactcagtgtcctcttacgtaagatgtgaataatattggtactcacctcacagagctgtccggggatgaaacagaatatcgtgtgtgcataaccagcacatgacacggtgccggggggacacacggtcaacactcaagaaatactcatttccttcatttgaaaatgcaaaaggcacagtcctgccaggcatgggcactcacacctgtaatctcagcattttgggaggccaaggcaggcggatcacctgaggtcaggagttcgagaccagcctgatcaatatggcgaaaccccatctccaccaaaaatacaaaaattagccgggtgtggtggcacatgcctgtaatcccagctacttgggaggctgaggcaggagaatcaattgaacctgggaggcggaggttgcagtgagctgagatcatgccattgcactccagcctgggcaacaagagcgaaactttgtctcaaaaaaaaaaaaaaaaaaaaggcacagtccctatatcccagggccctgagacccagaggtcacccacaacctcccattgttctttccctggggcaaggaggctatgtgctctagtgcttaggcgcacagctctggagtcagtatcaggtctgaggttgcatctgagacccagctctgtcacttgcaactatggtcttcaagacagttcatgaccttgaacaggttacctccctgagcctcagttttctcatctctaaaaggagactagaccaggccaggcgcagtggctcaagcctgtaattccagcactttgggaggctgaggcgggcagatcacttgaggtcaggagttcgagaccagcctggccaacatagtgaaactccatctctactaaaaatacaaaaattagtctgtaatcccagcactttgggaggccaaagtgggcagatcacgaggtcaagagattgagaccatcctggccaacatggtgaaaccccgtctctactaaaaatacaaaaattagctgggcatgttggtgcatgcctgtagtcccagctacttgtgaggctgagtcaggagaatcgcttgaaccttgaagctgactgtggcattaaagacatcagttagcttgtctgttgttcccagaataccagcccagtagtgggagggcctaccttgttcacctccctatcactcgcattttgagtgtcaccaacccatgcccacagttccctggaagatcgctatggttaccgagcagaggcacggaggaagccccaagaggccacactgcaatgagcggagatcacaccactgcactccagcctggcaacagagtaagactctgtctcaaaaaataaataaataaataaataaataaataaataaataaataaataaattagctggggcgtggtggcatgtgcatataatcccagctactcaggaggctgaggcaggggaatcacttgaacccaggaggaggaggttgcagtgagccaagattgtgccacagtactccagcctgggttacagagcaagactctgtctcaaaaaaataaaataaaataaaataaaatgatactagactgggtgtggtggttcaggtctgtaaccccagcactttgggaggccaaaatgggagaatcgcttgagcccaggagtttgagaccagcctgggcaacatagcgagactctgtcctaccaaaaacaacaaaaaaatgcgactgatagtacctaccacacctggcaggtggtgagctattagccaatggtggctgctgttcctattgtcattagcatcacgtgtctggcctcctgcccttagagttgtaagccctgaaaaaggacaggaattgctcactcgaggagctcggcttttaagacacaagtctcctgaagttcccggccgaataaagctccttccttctttaacctggtgactgaggagttttgcctgcggctcgtcctgctacactgctatgcctcagcccttgacctctgggtgcccgctgctccatgctgtgccccaaagggggcatattcacattatctcattaaatccttacttcaacccatttccagatgagaaaactgaggctcagagagattgggctctcacctattcaaggcgacatgcttcagggaagtggtgagcccaaagctcattccacttagaccagcagcctcccaatgagtgactgaagggcaaggccgaggcatttgtgctttgaggctctacttctgtatccaggtcagacccagaatgccacggtgctgtataaatgctcatcagtccaggctggaccgctcatgcccaactaaggaacctgccctgcaaatggaaaaccaagaaacagggccaaaaagataaatgttgccaagttgcaatggcaagcaagccagatttgggcaaaaccaaaccagccactggccaggtgcggtggctcatgcctgtaatcccaacactgggaggccaaggcaggtggatcgcttgaggtcaggaattctagaccagcctggccaatgtggtgaaaccccgtctctactaaaaatacagaaattagctgggcatggtggtgggtgcctgtagtcccaactactcgggaagctgaggcacaagaaccacttgaaactgggaggtagaggttttggtgagctgagatcgcaccactgcactccagcctgggtgacagagagagactctgtctcaaaaaaaaaaaaaaaaaagaaaactaatccagccagcagcatagagctgccactacaaaccccagggacgcccactcttctacctctaggcag

SEQ ID NO: 1879248 - DNA, 4001 bp, Homo sapiens
tcctcactgggtgttggccagaagccaccctctgttccttgccacatgagcctctccatagggcagctttcagcatgtcagtttgcttcaagtgagagagaagaggcagagagagcggtcacagcctttcatagcctaacatcagaagtgaaatcctatcactttggccaccaggtctagcccacactcaaagggaggggattacacagagtgtgaatttcaggagttggagatcactgggagccatttcagaaactgcctaccacggtgaatatcagggacagcacaactagcaatgccccagtggcctgattatgccatgtcagactcccataggtgatggacaaccactgaaatatttcaccgttgaaggggagacatagaaatgtcacccagcagcctgaacagagaaagcattggaaatgcagcactgggtagggagagctgttgcaatgcaactacctcaagggatggcctcataatgaaatgttcattgtgtcactggtaatccaacccagaggtcagggccaacctgaagggtcgtatcccctttgggccctgggccaagctttatctcctgcttgaagctatcttcttgtgtgctgctcttgccttttgaacccatcctttagagaccaaggcaggcaaccccattcctagggcactgcttatgcatcagatgccacttaacgatgatgtcccaggcatttcatttattccctagcacacctaaggggcaggtactgtttgatggaagtgtgacaagtggtcacatgataggacaaaggggcatcaatgcctttgtgacctcatcctggtgacctcaccccatccacagacctgacttcctatcttaaaggcccaggaattggacattttttgccctcaaataattgatattttagtggaagctaaaaccaagattcctatgctgctgtgtggcccggatgccagttgattgttttgcaactgataccaacttctctgttggaatttgagggaaacccaataaataaatatacttattcccctctcaagtgcagaatcaattggcagatgcaagagaaaaacagatgaggatcagcatgtcacctttattactgatgaactgattggagagctgtctgaatatgctctgcagctagggcgatggggagagagagaaagggagagtggggagggctaactgagcatggtctgctcctcctcccaaacccaccagccagatgagccatgcctcctacgcagagtgaatgaggggctacaagaaggagaatttgtctgtggtcctgggaccaggagcatcagtatcacctgggaactttcagaaatgcaaattatagatccaactcccagaaatactaaatcaaactctgggggtaaggcccggcaatctgtgttttaataagccctgcaggtgattctaacacaggcttaaagctgagaaccactggccttttgggagttgttccccacaaggcccaggaagaagtattcccctggaatattttgccacccgtgcccacccatttcctccatttcctgagaaaacatatcccagagataggattcacagttcccacatttggtttttagcttccagctgctccaaggaataccaagtggaggcttctcattatctcccttctttcctaagggaaaaaatgccatggatttggtgtcttctttcttgcaatcctttagaggggcagaggggtaatccccttgttggcacttgatagtctctgaagaccctagaatgatgagtaacacaaagtcagagatggaagcacgtggttctccactactgaaatctctctgtggctctcagttgcacttagatttccacataaaccccttgccaaggccttcacccttccaaacacatctcgcccatttgttcacacctccagttgctccggcctccctctgtccctctaatatgccaagctcgcttctgcaaggacctttgcacttgcttccctgctgcttggaggactcttctcttacaccttggcttgtctggctccttcttgccctttaaatccaaacccaaatgccagctccgcagaaaacttctgaccatccatttcaagtgccctctatcctatctatcatcatttatctcattacccacgtttattttctagtgagtactttaccctatcaaaaactgattcgatatatgtatttgtgttgtttgtttgtttgtttgtttgttaagatggagtctcactctgtcacccaggctggagtgcaatggtgcaatctgggctcgctgcaacctccacctcctgggttcaagcaattctcctgcctcagcctcctgagtagctgagattacaggcacgtgccaccacacctggctaatttttgtatttttagtagacatggggtttcaccatgttgatcaggctggtctcaaattcctgacctcatgaaacacccacctcggcctcccaaagtgctgggattacaggtatgagccaccgcgcctggcctatttgttgtttttttaattgtctgtctctcctcaccggaacgtgagagatgaggaaccttgttgtattcccagcaccagaatagttgctgttatattgcaggcataagatttatgtaaatatctgttgaatgaatgagtaagtaaattaatgactacatgaacacagaaaaacggttgaggagagaaggatcagagttgagtgattcagtcatcaagatggtgatgggcctgccttcctcttctcaaggacaggagcacctgaggccagctgagtgggcctggaatgctggcaccacaccagattgtccatctactttttctctcacccattatcttaggtccaggctcccccaacttctcctcctccttccctccctctctctccattgtcattacattacagtcattagaagccagcagattcagaccctcctattgtctttttcataaaggactgttaatggagttagttttcagcaggggaactgcaaactcttgtcaaaactctgacttggccacccacattcacataattaatcacacaggaaaccagaaaggggtggcatgagagctggggcctagctgtgtgggggccctcttcccagagaggagtgtggtacatcacacagctgctgcccaccaagagcccacatttcaggctggaaacaagacaacccaactggaactactactgggtaatacaaatcaggatctaattagcactggacggtgggaggtggccctccaccttcaagatgttggtaacaagagattggtaacaaaggaaaggaaattaaatggggaaggtagaggctggagatagaaacaagattaaagacagtctcttctagaattataaggaagagggcatttattgagtaatgtattctctattgctgtgtaacaaattaccacagacttagtggcttaaaacaaaatacactcatatggtttaaacatttatagttttaaacttacatttatacagtttctgtggggtcaggagtccagtaacagcttagctgtgtgcattgcttcaggccttggtcagccagggccaagttctcatctgctggcttgactggggaaggattcacctacccacttgtgtggctgctgcaatattaagttccttgtggttggtggactgagaacttctgtttctcactggctaatggtctgaggccaccctcagcttctagacatttcccacagttccttgtcattccttgccacatgggcttctcaaacttgaccacttacttcatcaagcagcaaggagaatccctagagcaaagtggctagcaatatatagtattatttatcatcacataatcacagaagtgacatcccatctcctttgccacattctatgggttagaagaaagtcacctgtccagcccacacttaataggaggggattatacaagggtgtgaacaccaagaaaggaggaaaggattatggaacagccaccctagagtatatccgctatattac

SEQ ID NO: 1879249 - DNA, 4001 bp, Homo sapiens; identical to SEQ ID NO: 498

SEQ ID NO: 1879250 - DNA, 4001 bp, Homo sapiens
acatataaaagtagggctacttcagttaatcagagataagggttccagaatgctagaagcaatgcttcccagtattgcttctagtctcacctcccattactccacctaaatacatcaggaaaatactgcttattatgtctcctttacagtataccttaacgtatgtaaagactgagatatcctccagtttatttttcttttttaataaaaaactagattttgggccggcacagtggctcacgcctgtaatcccagcactttgggaggcggaggtgggcggatcacgaggtcaggtgttcaagaccagcctgaccaatatggtgaaaccctgtctctactaaaaatacaaaaatcagccagtcatggtggtgcgcacctgtagtcccagctacttgagaggctgaggcagaagaattgcttgaacctgggaggcggaggttgcagtgagctgagatggtgccactgcactccagcctgggcgacagcaagattctgtctccaaaaaaaaaacaaaacaaaactagatttaaccaagcatttctaagttgcttaggagacaagacctttccctgcacattatacttccttcttctgaatacatagaagtggctttttgcttttgagtagatgtactcttaattgaaagtcaagatccaaaagaatcaaaaagggtagaattgtagccactgtaataagctagtagaagaatacatttggcctgggaccctcttggctctactcaaatcatttgcaaggtcatccatctgttcttcctaattttaaaattaaatcagtggctttattttttttccagtctgtgattttgtttttaattatcttaagtcttataatcatgcataatttttaaatttgtttatatttcctctacttaattccttttaaattggcaaaagcaccatttccaatcacaaatacacagcagttctacagtgttatgtttctgaatggctgtttagaggcaatcccaaattataacttagtctgaattagatggtaaagaattcaagagtgaagtttaacttgctactatttttaaagcatctgatcctatagatcacctataaaatgtgagaagtgttaaatctttatttgatattacacataaacccactaaaatgcctttcaataagtaaaagaaatcactttagatacagatttctaattaaattggctattattgttaaaaccaaaaatataaagtagacattgctgccttatcttcagcccttgcctttaagaggcaaatgaacataaaacactggtgaatcttgcttggttctaagacagtgaaggactttccccagtatttaaatatattcacataactagttatgtaaatctaaatataaaaccattctccattaagttttaagatggcattcatcatctttgtgaaaagttgaacattactaatgaagtccagtcatatatttagaaggggtaaacagtgatagatagcatttactaaatcggaattaccgttaaaattccaaaagccaaacatattcatctaatctcaagtcagtcttaattaaatcaggactgcccaacaaaaatctgtcagtcattcatgatctggattctggtttatgagatctgttaaattatggtacacataaaaaagtcatgaggcatttctgttttgcaataaataaggcagtgtccaattattatccattagtagcttttttgagataatctatcaagtctgcccttttctgccttaatgtcggcaaagatcatttttgttccaaggatgtacttcttgggattctccaaatactccatcggtatcctctccccaggtaatgcctttgttcttattggcatctgtgtaagagaatccagtggcctgacctgtcttccacccaaagagacatggagattaggcccagtctcgtgcttgcctcccttttccacagtgtggcactgggcacacttctgaacacaaatcttcttgcctttctcaatatcacccgtatttaattctctctttcatcactggcaatatgaaggttcctgctcggaagccagacgtcctgctctctaaatcagtggcttaaaaaaaaaaaagtcctgcagaacagttttctgtggaacattagtttgggaaatgaggctctggcatagtgttactcagtcccatgcacccagaaagctacagtcttacgaataccagcagactccagagtctgctagaccaagaggagaaggcaccagctgattgggagcaattcataaccatcccatatctgtgtaccttttttgtttccactcctagatcactatacttaaaattttgtttttttctatttttttcttctcctttgttctttcttcacctttgcctgagaaccctgctgacattattatagaaactgctgacacctccgaggaacccacaggtccctgagacttcagatggcatacctttttcatgtcttatcaggaggatcactggggaagttgagaactgtgagccactaaagttgatgggctgggcgcagtggctcacacctgtaatcccagcactttgggaggctgaagcaagtttatcgtttgaggccaggagttcgagatcagcctggccaacatggtgaaacccagtctctactaaaaataacaaaaattagccgggcatggtagcacacacctgtaatcccagctactccagaagctgaggcacaagaatcacttgaacccaggaggtggaggttgcattgagccaagatggtgccactgcactccagcctgggcaacagagtgaaaccctgtctcaaaaaaaaaaaaaaaaaaaaagttgacataagtagcacagtgtatgttatcacttagagctttacattttagtaagcaaacttggaagaaggaatagtaggtcctggattttctcccagcctccttaatgtttgaaagcaggttggagatggagatcattcagtagaatttgttagaggaatatagatttggagagattgaaaaatatttgaatctctgtgaagcagtgattgtatatcaggaatgataaaacacttggtaataagaacttaacaaatgtgtagcctttttaaaaattaaactgtttttactaaaacatggtcagtgtatgtgaggtatagggtctttgagttttatctttgagtttttaatgcattactttccatgcatgtcatttccagttttgttgatttgttttttggtttggtttgtttgctttttatatgcggcgaagcggtgcatccaggaatggggccttggcccaagcagagcttctctggaggtgcagtcagccagggcagctatgcccctccccacagtcagccagggcagctctgcccctccccacagtcagccagggcagctctgtccctccccacagtcagccagggcagctctgtccctccccacagtcagccagggcagctctgcccctccccacagtcagccagggcagctctgtccctccccacagtcagccagggcagctcttcccctccctacagtcagccagggcagctctgtccctccctacagtcagccagggcagctctgtccctccgcacagtcagccagggcagctctgcccctccgcacagtcagccagggcagctctgcccctccgcacagtcagccagagcagctctgcccctccctacagtcagccagggcagctctgtccctccccatatcccatctcgaaatatatctgtattccaacaaggaaaaatgggatagcatgtgggtagtctaggcagtgagtaaacatcagatgtcctcttgtagcaactatctatatgttgttattattttctatcttaaatgttctcgaatgtttatatttcagtaaacctctacctcgtcacacacacacacgaatatatatatatggccaaaattatggaaataagactatttgcagagctaaaaattgaaacaggtaatatatacacaatatttagagttgcagaggagaaggctct

SEQ ID NO: 1879251 - DNA, 4001 bp, Homo sapiens
atggggaagaatttgtaaggagggtgtgcatctcccgcaggctgcccagcctcccagaagtgggctccataaaccactcggtacactctgttcccagccagccttctgatcaatggcccactgaccccaggtcaagggctttcaaactttttttaaatcataactcaaagtaagaaatgtattttatatcggttcaaaaatcaatgcctatccttgctaactgcaatgcactctcatattttatattgctttctctttttctaatgctggtggagacccattagaggcattttgcaacccactaataagtttcgaaacccgtggtttgaaaagcactaagcacattatcactcattcagtcaccaaattcttgctgtgccagatactgtacagggcacaggggacacaacactggaaaggacaccgtctctgcccgccgggagcccactgtctgcagtgaaaaacggtgtctcccacaagctgacaaatgctacgacaatgatcctgccctctgtcaataccctttctccgctctctggatagctttttccctaagacgagtggaaaattctcaaacggtttctcagcacagagcctggtctcacaggggcctcctgagggagctcgagttttagatgatggaggcagatcaacagtgaagagatcaagagaggaaatgcagaaactggttctagacctggcactgccctgtctgtgtcaacttgggtggctccccaaagccctctgagtttcaactcccttaggttaaccccttcctttccagccattctcctggccctgcgtttgactagccctatggcttaacctctctggtccttagtttcctctcctatagacagaagtagaactcagtgattcccacagtcccttttacctctaagaatcacgtggtcctcctctgtgagactgttgagatgtgctttgagagccataaatggcagcagtgttaaaactcacagagagaatggattttcgcaggctgttcacatcccaagtgctggggcagatagcgcacctgggacctggaggaactttattttcaggactgccacaaagattccgggccagttgaaagcaccctgaccccttttctgggatccagctttcccagggagtaatcggggcttctctgtgctcagggcttgaccagactcaaacctgagcacctgtagattaccacgtgatgtgatggcaagagtgcaaatccacggaggccaagtcctagctcctccattactagccatgcagcctcggacagctcagggaccctccttaggaacccttcctaaacaacagtgtctcatctgtaaattgcaaatgataatatgtacttaatccatgaggattagtggcttagtggagtgcctagcacctaggagcaaacagctcaatcaatgtcagttattactttgggaggagaacctgagatcttcacccacaaaggattagtacaatagggaactttattttgtttaacaaatgcatacatagctcttacagtgtgcatcgtttgaagcattttttaaatattaactcctataatcctcacaacatccctatgagatggacactaccattattcaaattttatgaacagaggaggaaactgaggcacagagagttaagttagtgatggagctggggatcaaaccccaggtagtttgactccagagccatgccctatcctcccagttgcccatctggctccctgttcttttcaccacactgtgaagtgctggggtaaacagaagcaaaggtcccagcatgcaaaggcaagactgacagggagctgttaccctgggaacttgcagcacttctcccaagactccctgggggaccaatggctggaagaccaaggacagacctcccagagaggacgatgagatgcccttgccctcccctgggctctgacactcacctggtgatggcattgacctcagagagagcaaagactgcaaggaataccacaaggcccctcatcctggactgcagactggccactgctccagccagagcccactccacagcctttatagagggagccaggtgtcctgtggctggaagcccagacttcagagatagctcctgactgtaggtcactccacaaatacagtgagacaacactcaggatacctaagacccatgctgataaggaccactcacaccgagtgaggccatctgtggcccttatcagcatggggcttaggtatcctgagtgttgtctcagaatatctgtattccagggacttcaaagttgaaggatatacatgcctggtcttcagcctgagaaatgtcaacataggcctctctgacctgctccccacttgcagacgggacttctcgagccaacacaggggaggcactgccagaaatgtgttccatgttccaccttatgcactgtaagaggcctgttccccacagatcccactccaaccttatctgcctcccctcccgtgatctgactccactggaagctgatagcctgccctatccatgaatctgcccccagcccaattttctagtggcaggggtactcggtcttccctcaaagtggcatctgcggcagagaggaattgttcattctgtcatccccgtgagtggagcttggggtttagagcacagagcaggtgtgccctccactcctacagagcacagtctaagagagaaggcaggcccaaggcacatgcacccctagggacataggccctgttccacggtggaagggtgctgaggaggggaggggtaaatcgatgccagatcacactggcattggaagaacggggcagggctgaaccaggaaggcagacaagtgcccccacatagaagaagaagggaaatatggcagtgatacggtagggaacagcttaggccaggactcagcctctgagtcccattggagtgtacagagacagcgcctcagaagcacatgtgcaggggatgtgttgagtagaggcccctggagtctaggccagagattctctgaggcttgtagccagagagagagtcaggataagaaggaaaacaaaggatgtggccatgaagctggtggagaagatcatgttccaaggaccaggggaggctaacgctggcaaatcaggactgtgtaagggtaaggtgggcaaaataggaaggcaagggcttcaggtccatgggagagtgggagtgccagctgcccaatgcctggcaggacagatgtccacgtggagaaggaggcctggtggggatgtaagaaagggtaggcaggagcagccaaagaggctggcatgtggtggcagcagaaacaccggtgccatggagagggacaggctctggagttgcatacatttgatttgcaggggcctcaggagggaacctcaggagggagcctcagaaggccagtaaagagaactgatgttttgtaacagaatgaggaatgtggtgagatctgatccccaccatggcaatgcctcccaccctgccgcatcccttcacaaagccgaaggccaggtccccaaaaggccaggacactgccgctcctcatgccctgggaagtggccacaaacacatccagctgtcttgtggcacccaccctccccagatgccgggagcagaaatcaaagtcaacgctaaatagcacaacttgcttcctgatttcttccctgaggtggccgccctgccaggcgctgcgccctgccccatgctgatggccctgcctctgagcagtgcttcctgccacacagcaccaagcgtaatgcatagtaggtgctcaaggaatgtttggttaagcaaatgaatgagtgcatggccttgccactacttttgagaagcagccagagaagtagcaagtgacatccttatgatatcctgcagacaaggagatggaggctcagagaggtcaaagggttggcctgtaatgaagacagagcttggaactatcctgagactcctagtctaacacaatgcacactacaccacagggcccagttgtttacaaaatcagg

SEQ ID NO: 1879252 - DNA, 4001 bp, Homo sapiens
ctctgtgcagcactggcgttaagccaattgtaagcaaaccaccactgcatgcccaacccactgtatgttcacagtggtggtaagtggtagtcctgggggtctgaggtaagtaaatgtgatggaagcatcagaaaaaatttgtcatgtagggagagaagattgcttggaaatggatcagagaatcctctacaacaaccctcaatagagtcctgactatgatgttgaggaggacatggaatcttcccttcaacctatcaaatgttggatttcccttaaaaatgcttcaacctgtccttccctagtgccacagacaccctgagaccctcttttttgctgctgtgtactgtgagcccctcttggtttttaccttgtcttttcaggagaatcttgacatagtctgggtcatggatattgaagaacatcgtaaagggtccaacccacaagggaacggcacatgggtatttttccatcagctcaggatacacctcaaactcttttactgggtaagactgtcataagataagtcatgactggttagtaaaggttgtcatcccaggaggatccctttccctcagatggaccatgtgctaaattgagggtctgtggacaccaccccatcagacaggttcacatctgctgacggcaagttttcttctccatgtgactccggcacctccacggaatcttcctggcccagggcaagtgctcaggacctgttgctgagcgattggtcttctcactccagcgtcaactttggacatttaagttcaaatcccagttctgacacttttaaattatctacgtcattagggccatgatttcctcacagaaatatatattaggaaaaccaaatatatttcacaaagctgccatgaaaattaagtgagattataaacataaaattcctggcacaaggtaaaccgttagtaaccactgattccctacctcatctttgctctggatatacccgctcatgctttatctgtctccaaagcagcgaagtctcacatgccttttttttttttttttttttttttgaggtggagtcttgctctgtctcccaggctggagtgcagtggtgctatcttggctcactgcaagctccacctcctgggttcacaccattctcctgtctcagcctcccgagtagctgggactacaggtgcccgccaccacacccgactaattttttgtatttttagtagagacggggtttcaccatgttagccaggatggtgttgatctcctgacctcatgatctgcctgtttcagcctcccaaagtgctgggattacaggcgtgagccaccatgcctggcctctcacatgccttttactcctttgtggttgctgctcatctttcaactttcctttctaatttgtcaaatgttttcctatttccagcttcattagaagctgtagcatctttgcatatttcctgttaacaattggcttggtctatttctctgtagaacacccagagtcctgaaagtagtaaagaccttggccttgaagcaggagaccagggttcaagtttcatttctgtcatttatgagatgggtagcacaggaaagttgcatctctattttaggcttcagttttcttacctgtaaaataggaataacaatatgtttcctcccctatcatagaatttttgtaaatatcaaatgagattggtgtgaaagcattttgcatattacataatgccccaccaatatgtgctgttttttttaatacctcatctttctgttccttaacctccccaactaattttcccctcttacctccttgtggccatagaaccagtgcgcagggggtgcaggaaacaggtgcatggctctgatcgtccatctcctcctctggtacaacctgattacctgaaacagcagcagagacatgcagaggaggatcagcagcaagaaggggtgagccatgagttcctgaagccaggagggctccattcttctcagaggtcctgagctctggaaagcctgagagaactgggccagggagaatgcaggtctctcataaacccaaaggagatgccccctgggcaacactgggctttcaaaataccatattaagagagggtacataaggaagaggaagctaattaagtctgcagggtgaaaactgctgagatgttgcccagcagttccagattccagaagaactagattttcagataggagccatgtgcatgacagctcatacctgttgcgggaagtcagggaccctgaacagagggactggctggagctgaggcagaagaacataaattgtggagatttcatggatatttatcagttcccaaaattaatacttttataatttcttatgcctgtctttactgcagtctctgaacataaattgtgaagatttcatggacatttatcacttccccaattaatactcttataatttcttatgcttgtctttaacctcttaatcctgttatcttcataagctgagaatgtacatcacctcaggaccctctgatgattgtgttaactgtacaaattgtacaacatgtgtgtttgaacaatatgaaatcagtgcatcctgaaaaagaacagaataatggcgattttcagggaacaagggaagatagccctaaggtctgactgcctgtggggttgggcagaatagagccatatttttcttcttgcagagagcctatagatggacatgtgagtaggagaaatatcactgaattcttttcccagcaaggaatattaataattgataaccctggggaaggaatgcattcctgggggtaggtctataaacgaccactctgggagggtctgccttatgcagttgagataaggactgaaatatgccctggtctcctgcagtaccctcaggcttataggattggggaattccagcctggtaaattctagtcagactggttgtctgctctcgaatcttgtttcttgttaagatgtttatcaagacaatgtgtgcacagtgggacataggccctcatcagtaattctaattttgccttgccttgtgacctttattgccctttgaagcatgtgatctttgtgacttactccctgttggtacaccccctccccttttaaaatccctaatgaaaacttgctggttttgtggcttggggtcaccatcatggtcctaccaatatgtgatgacgctgccggaggcccagctgtaaaatttctctctttgtactctttctctttatttctcagactggccaacacttagggaaaatagaaagaacctacattgaaatactgggggctggttcccctgatatctagtgtgccaacatggtttttctttttcctaagtgcatgtgggaacccgattccctttggtaggtgcagagaaacgttcgttggttcagtccacagaaacacttgttcggctccgtgatgattgatgagtctgtctgtgtattgtctgggttaactatgggtcacacggagtctaaacattatgcttatctctgctatattaaactcctgttaaaacaggagggggttcaagtgtccatggaaaatatggtcactccattcagggcagtggaagaacactgtccttggtttcctgaaaaaggaatcttagatgtacaactatgggatcatgttggtgcaacattccaggaactgatccccacagggggttatgttctcatccctgtgtggggtgaatgggccttggcatgtgctgtcctaatgacatacctatcccattaccccctgcagttaccacaattttctgaatcttgtgactctctatctgttcctcagccttcctctcctgcatggccttcgttatctgatcagcctctccctttgcctactccttccccacctgatgatgttgagaattcaatatctaactccagtgactttggcttaaggtcactccctgatgatcttattttttttcatgaagagctggtacttgtagctcccgtggccccaactcagacagcctgggaccatatatatgctaattcttccct

SEQ ID NO: 1879253 - DNA, 4001 bp, Homo sapiens
attttcttccagcctgtgccttgccttttcaatttcctttccaagttccctaagcggagcagttttgtttcattctcccttcgtattcctagaaacaagaacacagcaatctttaacattgaaaacgttatgtaatttcagttcaatgatgagaaaagctctaactttaaatacttcatagccaagcacatgaaaggtgactgtttcctcaatttaccaatctgcaaaatcaagataatattgtctatttcatgaagttgttgtgaaaggtgactttgtttcctcaatttaccaatgtgcaaaatcaagataatactatctatttcatgaggctgttgtcagaatgaataatagtgaataaattacccagacccgtgcttagcatatagtaagatttcagtaagtaatagcttgattttattctgtaatcttagggaacagaagtgagaccaaagggtagaaatcttaaagattcagattgtttgaatttagtgaattattttccattgtagtcaattaatgaaataaaatgggcacccatagaagttgctgaacttcccatcacaaggagcatttaagcagagaaagcataaccatgtgagcaggttatagaagagattattgctaccttcagagaaatactggacttctcatgtctctcctattcctgaaaatggtttggttcttggtaggagataataatgacaatagcatatcttcatatttaatacatattatatattatagtatttataatacatattataaaatatacatatatactatgttatatataatactagtaattattgatgatataatattgtgtgaagcacttaaaaactattctattatttaatcataatgaccctttgagatagaggtaaatattagttctatttaatagattagaaaaatgagttcagaggtgttaggtagcttccctaatagtacatggcatggaaaaggagggccttgaatgcaggttggcaatggactgaaagtttctgtccttgtagaattcatatgttgaaatcttattcccagtgtgatggtatttagaggcagggcctttgccaggtaattaggtcatgagggtggagccctcatgactgggattagcacccttgtaagaagaggctagacaactagctgcaatctgtaacccagaagagggccctcatcagaatctgaccatgctggcaccctgatctcaggcttccagcctcctgaactgtaagaaatatatttctcttgtatgtaagccatccagtttatggtactttgttatagcaagcaagaaagtaccataaactaagacaaggtccgtctgagtaaagtccatgcttacagcccaggtgctctgtggccagtgagcccctgcttactcatagctatgggcgagtgctgctgaaacaaacttttctccaacacctgtgtccctatattctcttgcctcccccaccctcggctgtagcatgtctctgagtcagtgggaacgagtatttacatcttggtccacagctgcagaattccactgctgtttgctcaacaggtcaccccatgaagtggccaaaaaccaaggctgccatgcccgaggtcagctacccaactcactctccacctggcagtaccagctggatctcagcttcttgaagaaatgacattcaccatctccagttggaataggtctttcctgggcttttccttctggcatatggagtgttgatttgttttggaaggcctcaaaagtggcagctttctcatcacacagcaggatggaatgtccccatttggtgcctgtccatccagcccacaatatttatgctgttattgcaaagctgttggccccttagatcctaatcatccaaagacacttttgtggcttcttaaaaaactaggcctgttcttctgcaagcaagtgcctgcctcactgccatcctgattaccagctcctgttggcaaaagaaccattatgatgtgaaccagattgtaccaaacagacgttacctagcaaccagcgggagccatcaggattcatccttgtgttccaaacactgtgtggaattccttaagcatcttggacacaatggagactaaaagcatgccatgagggagccttaagagaatggctttggagtcaggcacactcttatgcagtcctgactctcagtgactaccgtgatcttgagcaagttacataactctctgagcatcagtttcctaacccaggaaatggagaacagtaatagcacttacttcatatgagtgtctcaaatgtaatatatgatggaaaggataatctttcatactaagtaggcattcaacatatgttagttcccttgaaaatacaattttttttctatgtgttacattcgtgaaatacacaaacccaagcatccaaaagaccaggatccagttacccatatcctgtattagtaattcactgtgtccttaaggaggtctcttaacctctctttggtttattttcctcatctataccatggggacaataataagtgttgttcaggagcccacatgaaattagggatatgaaaaagctctgaagatcagaacacaaatgcaagaagtgacctaagtctattgccgatagtattttcacttgagaggaagttagcaaaactgagaggtttattagaggtctttgtctaatagtagcttttaccttcatccaggtatagtcctggtattcacagtggtgcaagagatatttgagatacattgaagtccatgtgttcctcactcgcttattttttcccttcaatctctctgttgatttcaggaaatatattccatctcagataccaagagagcccattatcaggaaagatgaaaatgtttcagggaatgtagttaaactagttagtctggaaaaattaagggtagaacgagccaaaggatgaatgagaattagacagcattgtgcaaagttctcagattttgaagtgaagtaaagataggttcaagtcctcctggtctaccactttctagctctgaggaattgttaagcctcagccttttcatctgtaagatgagcatattatgatttatttttgcaaggttgttgaaaatatggggggtttcagtgaatataaagtgcctattacggcatctggcacatagactatctacaatataagatatatatttaaaaataattaataagagcaataataataacatatagtcagagggatacggagcccaaacaagaggaaaggttccaaatgtttggtctgagcagcaaatacgaatcactaataggaagtaaatgcaaaaggtcaagaggcagggagatgagaaacaagtcagcaggcagattgatggagacaaataatttggggtctaggttaggaaataggtttaggttttgtagccccagctgaaaggtacagaccagaaaagccatctcggctgcttagggaagttctgttctcatgcttttgtttatacaggccatagctttctccttcaggactcaaacgacaaccccctgcagaagtgcctgatggaaaaataggttcttagcaagaggagaggctgggatgctccgggcacagggttctgaccaatggcaagtctgcattccatacttggaatcgcagctcttgaatgtcagagagtgggatttcccttaagagttgcccatgtgactaagtacccctcaggttagtggactgaactgtttccccaacttcagtttctttgtaatcaggtaaaatctcagcccatctagaatgccttttggccattgtctcactgacttcttacctcagggagcccaatttgaaggagttgctggaagcaaagagagagagtttgaaatgaattcagacagtcagttgtcagccagaactttggtgggggatgtttccctgcttgctgactgtgctggctccctcagccaccccctaacaagcacctggcctggcagagttaggaggtggagttctgtgtctgttattaatatcaatgataat

SEQ ID NO: 1879254 - DNA, 4001 bp, Homo sapiens
agatattaggaattggccaggcctaccttccagtcacttagcttttctgtcacatgccatgagcctctagtctctgctaccagaaacctgaaagcctcacgaaaactgcatttataagtatgttctgactccctttttggcaccaacccatgctgctgaatgcccaggatgtttcttctgctaaccaagaattcttcagaccagctacaaaagaaagagcagccactattttttttttttttttacaaaaaatttcccactatatcctaaaaagtcggaattctgaaatagactggactcagacaccaactaaaggcagcatcactcatcactccccagcttttagtcacaagcagctaaatattctcctctaaataccaagggatgacaacccgaagctgtgagaggggaagagacctgatttgacaacaggatgaacagaactcaggcaaactaagttccagtttttaacaacgtaaaaaatatgatcgacacaaagacaaaatacaaggaaaatgaataaagaagaaaagaagacatggggcagggggcacacattcacttctaggcttaagtcatttggagatacacagcaatagtttaggacagaaagacaagaagcccacagacaattaaacttgtaaaagtaattcaaccagagctggaacaaagccaagaacaacactcaagctctttgggaaactggtaggaattttatgactttagtggtcagcagttgagcatcagcgcagtctgtcttgaactcaagaattttaatgcctccaactcccactcacctttcctccttttatcactgaagtaaggccaggctgagctcctgagaaaataggtctgtagattcactgaaggactgagaaaagttaaaatttacatggcaaaggtgtgtcttctactgaacataataaaaatatttatgaatacactttagtatttttaggccttctcaaaactacttaaaagcagaatactttatctaattctaattactgaacaaataacccacacacatatggaaataaaatgaaccaacatgaagattagaagccaggcaagtaatctcccagctccactaaaacgtaaagtcatttaaaaggataacctgaatcttttcaacgctaaaccataaccaaacaacctctcaacaagaagccacagagcagggggggaaatcccggagagaatgtgatagcgctagtgccggtttgtttacagagactccagtaacaatcatgagtcagaaattcaagccaccagatgctttccaactaacagggaccaaatgggaccgttctaagatatcctaaaagatttgggagttagaggaggtaaactaagataattatattacaaagggtacaagaccacaagacaacaaccgactccggaattcttggacctccgccttccgtacaaggtgctgggcctgggaacttgggatgggggagggggacacattgcgcggtggccctgaggtgacggggagacgcagggcgagccgtgtccctcaatctaaggggagaaataggagcgcacacatgggtcacccaacgaagcaaggcgtccctgtgaactgtgcggctggctcttgggggcaacaccagggctgacctgaggaaagggcaaccagtactcccagcgatgacttcgggtcggcggaaggaaaagacctgagcgctaagagcttgggatacgggtcaggcccatccttaggggaaaccggctgggaagcgagggggggcgcaggccgagccggaacgagacacagaccgggtaggtcaagggagggggggtgtccggctggggcagttacaagcacgggaatcggcgaggctcagcagcccgcttcccgtcttgggtcatccttctgctagcggctgctccgactgttccaggcccagccgccccgtccactgccaccaccaacgccgccgccatcttacactggccagcggccgccaccaccaccgcctccgctctctgcgcttgcgcctgcgctgccacgctttccggccccgtttgcgacgatgtgctcgagaagactgagggaagagtggtcgcgcgagctcacggctcgcaaccctcctcgaaggacgcacaaggggcggggcttaaggccaacggaaaacagagcgagaggcgcctgcgcattaccgaagaggcaaagttgtttttgtagtttcttcgggcttgcttatcttgtgatactctaaacaaatgcgagttaggggctacccagagttgtgatagaaataaactaaatttccagcggattggcaggccacttcctggatgatggccagttttgccgtttttgaacactggaacgagcaatgattgccacaaggatttcttctgaaaatccccgtttcctttcagggctttgtttccttaagtggtttctatactatcgaggcccattttcccctgagagtccccatttacgtatttttaaagaaggggctcagtagcttgaggtgtagctattccagaagctcttttctgaagagaggtggtgtgggtaaaggttcccaagagtgggccgggtgatgtggggtgacttttgtactctgtttcgttatgacacctacagtaaccctgcagaggattactcccagctgccaggctggggtattttttttttttttcttaccagaagcccagggtgcaaaaatctgaccctttctcacctcccctaccgctactctcctattccaagtcattacatattacttaagactaccgcaatagaaacttacctcgtttgtctacttccattattgccattacagttaaacataaggcagccagagtgctttttaaaaatgtaaggtctggccgggcgcggtggctcatgcctgtaatcctagcactttgggaggcggatgtgggcggatcacttgaggtcaggagttcgaaactcgtttgaaaccaggccaacatggtgaaacccgtctctacgaaaaatacaaaaaaaaaaaaaaattacccggcatggtggagcgcgcctgcaatcccagctacttgggaggctgaggcaggagaattgcttgaacccggaggcggaggttgcagtgagctgagatcgcaccactgcactccaggctgggcaatggaatgagactccgtctcaaaaaaaaagtaatgtcgtattatttccccagtccccaccctgctcaaaacctccaattcccatcacataataaaagtcaaaagtatgatagccttagaggccatcaaaaaatgaattgcctctaaggaggaccctacatgatctgatctagcacctgcctatttatctgattcatctcctcccacactgcctagctctgctctagcctcactagccttactgtcactccagtcaaagcatgtcccagccctagggtttttttccttttcttggaatgtccatctactagatatttactagacttgaggtgtctattgaaatcctacttcctaacacaggcagctcttgactattgtaactaaaatggaacctcatgtcatcctcctctatccccttactctgcactgtttttttaataacattttttacctataacatttaatctaaaattatgtttgtgatccagctatactactagaatataaattcttgagggcaaggactgtgtttttatcatctttgtaatctcaacacctagaagagggctacagcacaaagtagctatttaatgccccaccgtcctattcattctttcattcattcagtcaacaactattgaattcctgctctggaaggccctgttctatgtgctggggctgcaacagtgaatagaaccaagattcttgcattcatggaacttattagtgcaagggttgggagcataggaggaggggagagacacacagataataaagttataaagagtactgtaaaggaaaataaagcagaataaaaatgggttacctggatgggtgtgctcttttacataggggattcagagaaggcccct

SEQ ID NO: 1879255 - DNA, 4001 bp, Homo sapiens
cttttctgtcacatgccatgagcctctagtctctgctaccagaaacctgaaagcctcacgaaaactgcatttataagtatgttctgactccctttttggcaccaacccatgctgctgaatgcccaggatgtttcttctgctaaccaagaattcttcagaccagctacaaaagaaagagcagccactattttttttttttttttacaaaaaatttcccactatatcctaaaaagtcggaattctgaaatagactggactcagacaccaactaaaggcagcatcactcatcactccccagcttttagtcacaagcagctaaatattctcctctaaataccaagggatgacaacccgaagctgtgagaggggaagagacctgatttgacaacaggatgaacagaactcaggcaaactaagttccagtttttaacaacgtaaaaaatatgatcgacacaaagacaaaatacaaggaaaatgaataaagaagaaaagaagacatggggcagggggcacacattcacttctaggcttaagtcatttggagatacacagcaatagtttaggacagaaagacaagaagcccacagacaattaaacttgtaaaagtaattcaaccagagctggaacaaagccaagaacaacactcaagctctttgggaaactggtaggaattttatgactttagtggtcagcagttgagcatcagcgcagtctgtcttgaactcaagaattttaatgcctccaactcccactcacctttcctccttttatcactgaagtaaggccaggctgagctcctgagaaaataggtctgtagattcactgaaggactgagaaaagttaaaatttacatggcaaaggtgtgtcttctactgaacataataaaaatatttatgaatacactttagtatttttaggccttctcaaaactacttaaaagcagaatactttatctaattctaattactgaacaaataacccacacacatatggaaataaaatgaaccaacatgaagattagaagccaggcaagtaatctcccagctccactaaaacgtaaagtcatttaaaaggataacctgaatcttttcaacgctaaaccataaccaaacaacctctcaacaagaagccacagagcagggggggaaatcccggagagaatgtgatagcgctagtgccggtttgtttacagagactccagtaacaatcatgagtcagaaattcaagccaccagatgctttccaactaacagggaccaaatgggaccgttctaagatatcctaaaagatttgggagttagaggaggtaaactaagataattatattacaaagggtacaagaccacaagacaacaaccgactccggaattcttggacctccgccttccgtacaaggtgctgggcctgggaacttgggatgggggagggggacacattgcgcggtggccctgaggtgacggggagacgcagggcgagccgtgtccctcaatctaaggggagaaataggagcgcacacatgggtcacccaacgaagcaaggcgtccctgtgaactgtgcggctggctcttgggggcaacaccagggctgacctgaggaaagggcaaccagtactcccagcgatgacttcgggtcggcggaaggaaaagacctgagcgctaagagcttgggatacgggtcaggcccatccttaggggaaaccggctgggaagcgagggggggcgcaggccgagccggaacgagacacagaccgggtaggtcaagggagggggggtgtccggctggggcagttacaagcacgggaatcggcgaggctcagcagcccgcttcccgtcttgggtcatccttctgctagcggctgctccgactgttccaggcccagccgccccgtccactgccaccaccaacgccgccgccatcttacactggccagcggccgccaccaccaccgcctccgctctctgcgcttgcgcctgcgctgccacgctttccggccccgtttgcgacgatgtgctcgagaagactgagggaagagtggtcgcgcgagctcacggctcgcaaccctcctcgaaggacgcacaaggggcggggcttaaggccaacggaaaacagagcgagaggcgcctgcgcattaccgaagaggcaaagttgtttttgtagtttcttcgggcttgcttatcttgtgatactctaaacaaatgcgagttaggggctacccagagttgtgatagaaataaactaaatttccagcggattggcaggccacttcctggatgatggccagttttgccgtttttgaacactggaacgagcaatgattgccacaaggatttcttctgaaaatccccgtttcctttcagggctttgtttccttaagtggtttctatactatcgaggcccattttcccctgagagtccccatttacgtatttttaaagaaggggctcagtagcttgaggtgtagctattccagaagctcttttctgaagagaggtggtgtgggtaaaggttcccaagagtgggccgggtgatgtggggtgacttttgtactctgtttcgttatgacacctacagtaaccctgcagaggattactcccagctgccaggctggggtattttttttttttttcttaccagaagcccagggtgcaaaaatctgaccctttctcacctcccctaccgctactctcctattccaagtcattacatattacttaagactaccgcaatagaaacttacctcgtttgtctacttccattattgccattacagttaaacataaggcagccagagtgctttttaaaaatgtaaggtctggccgggcgcggtggctcatgcctgtaatcctagcactttgggaggcggatgtgggcggatcacttgaggtcaggagttcgaaactcgtttgaaaccaggccaacatggtgaaacccgtctctacgaaaaatacaaaaaaaaaaaaaaattacccggcatggtggagcgcgcctgcaatcccagctacttgggaggctgaggcaggagaattgcttgaacccggaggcggaggttgcagtgagctgagatcgcaccactgcactccaggctgggcaatggaatgagactccgtctcaaaaaaaaagtaatgtcgtattatttccccagtccccaccctgctcaaaacctccaattcccatcacataataaaagtcaaaagtatgatagccttagaggccatcaaaaaatgaattgcctctaaggaggaccctacatgatctgatctagcacctgcctatttatctgattcatctcctcccacactgcctagctctgctctagcctcactagccttactgtcactccagtcaaagcatgtcccagccctagggtttttttccttttcttggaatgtccatctactagatatttactagacttgaggtgtctattgaaatcctacttcctaacacaggcagctcttgactattgtaactaaaatggaacctcatgtcatcctcctctatccccttactctgcactgtttttttaataacattttttacctataacatttaatctaaaattatgtttgtgatccagctatactactagaatataaattcttgagggcaaggactgtgtttttatcatctttgtaatctcaacacctagaagagggctacagcacaaagtagctatttaatgccccaccgtcctattcattctttcattcattcagtcaacaactattgaattcctgctctggaaggccctgttctatgtgctggggctgcaacagtgaatagaaccaagattcttgcattcatggaacttattagtgcaagggttgggagcataggaggaggggagagacacacagataataaagttataaagagtactgtaaaggaaaataaagcagaataaaaatgggttacctggatgggtgtgctcttttacataggggattcagagaaggcccctctgctgaggtgacatctaaataaaggtttgaagtgagacaa

SEQ ID NO: 1879256 - DNA, 4001 bp, Homo sapiens
  modified_base (3875)..(4001): a, c, t, g, unknown or other
taactttagttattatagaaagggcagtagcagatgggtctgctccgtctcgcttctaagaaggtgggcaggacaaatggcagcctcctgcagaggcccagtgagaagcctggccctcggccacgcaggatggaagacagattggattccacagaggggagctgccctgggaagatctcacggatggccaggacccaccatttcttcgggattcccctgttttctccaacgggcactaatgcctgtgcctgggtcctggcaacactctggactccacactctcctgggtttcacctttgtagcaggatccctgcagaccaggcccatgacaaacaccgtctccagcgggcagagcaaaggaagggcacagcgccaggcagtggtgcagctgcctgtcaggaagaggcctacttctggtgaaactgggcagacaaaaggcagtgagaaatgtgatctcggggtggtggaggctctagggaaaggaaaaggcaggagtgaacttccacacagcagcaatggcagaaccaaaggtggctttgacctccaccagggctcagatccaggccaacagcgtgtccaggacagggtgccgggtgtatcactggtccaggagcactatgctggcagaatccctttggtgcctgatggccctgccttcgtgggaacagaggctaaggctttgagttacagctgcctccccaacagtgcatccccttctccttcctcagcctcaggtaggagacagggcaggcaacctcactttcctcttctccccttctccagcccctgtctgtcgacccagctggaggcagccaggcttgcctatggactggttgacagccttcatgcacaggttctccaccagagcctttcttgggggcccctggcctgggctctgagctgggagtgaaggggatgacccatgcagactgtttgctgcttgtagctttccctgggaaagactctgccaggccttggagccagactaggaggctttataggccaccgcaagcagcagggctccagatgacatcacagggaagatcaagagggtgtggaggggcatcgaagcctctccaggagacaggagacgccggccccgtagagccctaggggcgacgccactcccactcactgtctactctcctctcacctctgcaacactggggacactcacaagagtgtgatccaagtcggccgtcgtcttctgcagctctggagacctgatgctggggaagggcatgcctggcatcaccacacacctggggggagacaggagcctggggccggtgggcccacacatcaccagctgctccgttctaccatttcttcagccctcttggctgtgcctgcggctctgcccctcccgtctctgcacctaccacccagagagggcttgttgagctcagagatcccacctaggccaatccactgggttctgtggcagcgatggcctgcctgatcttccacctgctctcccagggccaaagccagacctgctgagcccctccctccagccggctggtctgagcagtcacagcccggctttgggctccgatggcagcagacggcaggtaggggtccagctgctggagcgagggccggccacgtatcacagccaaggagatgagcacaagcactacttactggcctaggttgtgagagaagttgatgctctcactcatctttcctccaatctttcccctatgcctggttgtggtattaagttacatgcagacaacaggggccagaagatgaacaatggcccatcccactctaggcatggctcctctccacaggaaaactccactccagtgctcagcttgcaccctggcacaggccagcagttgctggaagtcagacacctgcagatgaagaccacagcatcaagaccctgtgacctctcaaaggcccggtggaaaggacacgggaagtctgggctaagagacagcaaatacacatgaacagaaagaagaggtcaaagaaaaggctgacggcaagttaacgaaaagaaaaatggtgaatgatacccggtgctggcaatctcgtttaaactacatgcaggaacagcaaaggaaatccggcaaatttgcgcagtcattctcaacaccggccatgcagcaaaatcatcagtggaaatttaaaaaaatacacatggccaggccccagcccaaatcactaataagaatctccagggcttcacctgttagactggcaaaaatccaaaagtaaacactttgtggagaaacaggcattcctagacattgctggtgggatacagaacagtacaattctgatggtaatcagttcacaaattaaacatatttattttttacttttaaacccaggaatcccatatttaggagtctactgagaccaaacagcatatgctccgggtgtttccctataatccgccagtactgttggagcaagagggcccggcagtgtccccagctgccagcaggtgggcgtgctgccactacaccttgagcaagaggaccctgcaatgtccctagctgccagcaggcggcgtgccaccactatacagtaagcaagagggccctgcagtgccccggcgccagcagggggcgctggccaccactctaagcaagagagccctgcagttgccctagtcgccagcagggggcgccctggcacagcaccgtgagcaagcgggtcctgtagtgcccggctgcaagcaaggggcggtcgatcccggcttttcggattactgaggttctacccgtctctgcgccgcgccaccgtgacgtgagtttctgcgcgtgcacggcgccaccctccccccgccccagcccggcgccgtgcgactttgctcctgcaacacacgcccccccaacccccgcccgtaggcttgcgtctctgcgcctgcgccacgcctccacccctggacgcgctagcatgtgtctctgcgcctgcgccggcgcggtgcgcctctctgcgcctgcgccacgcctccacccctggacgcggtagcatgtgtctctgcgcctgcgccggcgcggcgcgcctctctgcgcctgcgccacgcctccaccccgacgcgctagcatgtgtctgcgcctgcgccggcgcggcgcgcctctctgcgcctgcgccggcgcggcgcgcctctctgcgcctgcgccggcgcggcgcgcctctctgcgcctgcgccggcgcggcgcgcctctctgcgcctgcgccggcgcggcgcgcctctctgcgcctgcgccggcgcggcgcgcctttgcaacggcggagttgcgttctcctcagcacagacccggagagcaccgcgagggcggagctgcgttgtcctctgcacagatttcggtggtactctgaaggcggagcacagttctcctcaggtcagacccgggcgggcgggccggctgagggtaccgcgagggttagggttagggttagggttaggggttagggttagggttagggttagggttagggttagggttaggggttaggggttagggttagggttagggttagggttagggttagggtagggttagggttagggttaggggttagggttggggttggggttggggttggggttggggttggggttagggttagggttagggttagggttagggtttagggtttagggttagggttaggggttagggttagggttagggttagggttagggttagggttagggttagggttaggttagggttagggttagggttagggttaggggttagggttagggttagggttagggttagggttagggttgggttagggttagggttagggttagggttagggttagggttagggttagggttagggttagggttagggttagggttagggttagggttagggttagggttagggttannnnnnnnnnnnnnnnnnnnnnnnnnnnnnnnnnnnnnnnnnnnnnnnnnnnnnnnnnnnnnnnnnnnnnnnnnnnnnnnnnnnnnnnnnnnnnnnnnnnnnnnnnnnnnnnnnnnnnnnnnnnnnn

SEQ ID NO: 1879257 - DNA, 4001 bp, Homo sapiens; identical to SEQ ID NO: 537

SEQ ID NO: 1879258 - DNA, 4001 bp, Homo sapiens
gtgactctcgcagaattggtaatgagaggaaataaaatgacttccaagatttaaactatgcaatcaatgaataattgttaagagcaaaggtatgtaaagttaccttaaagaaactcagaccactcacatttaacaaaaacctaacttttaaatattttatcatctaaagacactataaatgtgaaagtggatggtgcagagtgaatccacagccacagtggattattaaggtactattaagctgtggctacctatatcaaaggctgtatgtgagatgattttcaacttggggagctgggcaaaaataaattttggcttccacagtctcatctccatttccttctgaaaggaaaaagaaaagaaaaacgaaaatcctgggacaatgtatcataaagccaggtaagaaacagttaacattattttgtaacatcaatcattttacttttccttaacataagtggaaaattgagtagattgttcctgtttaccaagtatgtttttgaaaattcctacccactggtcctggtagaaaatagatgtgcttctgcccaaattaaggaaaactccacagacctacactaccactccctgaacatttttctttatctcttctttttactgcatcctatcctcttaaactgctatttaatttccaagtgaattcttccacagcttcaaatcactcaagcaatctcccactttactaagggattcttagcatcagatagtttcagactggtgacagggtatttattaaaagcatgaagtctgtgctttgccaaggagacctaagactgagtaagtctcttcaactctcggaatgtagtttttgtcatttgaaaattgacttctgttgaagatttattttctaagatcctagtgaaattttaagtgtataatcacgatccaaacataaccaacattcttatacagtggtagagtttaagggaagcaatttgacaagttgtacacaacctttcccaagccccacattgtatgtacttaagaaagactacctataatccattttattacccaactggggggttctgaatgatccattttactgcacaattagggggttctgaacctagattttagcacttcagagaatcatggcacctgctgagagagaggataggcagcagagagagaaactgcgacacatatccatcaggttgctttgccttctaagctaactgctgaagatcctgtagggccaggcagaaaaaccgtattttcttgtcttttcaaatttcaaattcccttaaaccaaaggctggactccaaataatttcgtttggaactaaagagctcatcccctctgagcacgaaaacaggactctgtgactccgcctcgccgtagaccgcaggagggagaaacagcgccagggaaacccgagcctgtcccatcgaggcggtcccaggccagcccagcccaccccagcccgcgccagctactggagccccaggacgcagccgagcggccctcgccgactccttcccgagcctggctgtggcgtcacgtgacccgcggcgcggccaatccgcgcagccctctatgctattcaaatcggcggcggggccaacggttgtgccgagactcgccactgccgcggccgctgggcctgagtgtcgccttcgccgccatggacgccaccgggcgctgacagacctatggagagtcagggtgtgcctcccgggccttatcgggccaccaagctggtaagacagctcggatagacgggaccggtcagcgggctgacggcagtcaccactgttcgcagttttacctcgaccgttcgcagttttacctcggtcggagggatgagtcccaggatccctaggttcagtgaaaaggctggcgaggagaagtagcgggtatgcaacccttgccagactcaccgctccctctattttgagggtctgggcctcaggtccgaaaggaagcgccgcgcgtaggccgcaccagactcgctatgaggagcgactcctgtgcctggtgtggccggcgtcccgtgggggcgtcttagaatattccgatttggccgctcacctcgcctgattttctacccgcctcagaattagggaacaattgggaatgaggtccaaagctttgtagggttaggtggggggcaagcccgaatgtggcaattttgtttattgaacccatagaatttaacgcaggatgtatcggccgaatagcactaggataacagctgcctgtttcaaaacggtatttctgagtacccatcagtaaccactgctggtggtccctgaattgcacgtacagcactcctaacgcgttttgtgcagttgggtcttcggttctataggatactgtggtgctggttatgtgacgttaggtgagtcccctaccttctgtgagcctgtttccacattggtaaaggttactaatacatgcttgccttaaggggtttcccaggaggatgctgttttttaaagtgtgttgtgatctgcagaataacaagcattttcctcttaggaatgcccttcagacgagcatgtattattagccctactttatcaggtgcacactgaggctcacagacgttaaatgccctctagagtcacatcaacagcaagtggcagagctagaattcagatcttcctggtatggcgatcttacatggattctgctacttagtaagttattggctatatttaccaatatgaaggatagaatttaggacaggaaggaacctcaatcagtagtcctgccacattatttaaaacccattagatgaaagtagtataagcacgctgaaaaagaaaacatgcactgaatgcttactagtacttcacatatattacatcattttatcattccaataagcccattcgttaggtccttttgtccctgttttgtggttaaggagattgaggcatagagattgaagataggcccaaaaagtcataaacaatagtggcagagctagagctgggaaaccagccctactagtctaactccagagcctgttcttaaagccactaccctgtactgcatctcaggaaagccgttctgtaatctcccttagtacagagtccctttctgtcatttttattactgtgtcctcaggccagtacagagtgagcagctcaatatcagtttctagagtcaatcacacctgggtttgaatgcctaggttcatcacttagctgtgtgaccttggtcattttattaatctctctgctttattttccttatgtgaaaaatgagaaattaatagtacctattcatagaattggggtaattaaagtgaaataatgaatgtgaagcacagtgctaccaacattaatattaattgaggtaaaaaacagggatgaatgttttctctattgattgtagttcttccttatttccagatttcttaaataagctcaggatcttaaataaggatcttagatcagccaatgaagttcttctaataaaaaagctattacataaaaatattactacagcactagaattaataaaaagaaagcagtgtaagatataatttttttttttttgagactgagttttgctcttgttgccaaggctagagtgcaatggtgcaatctcagctcaccgcaacctccgcctcccaggttcaagtgattctcctgactcagcctcctgagtagctgggattataggcatgcaccactatgcccagctaattttgtatttttagtagagacggagtttctccatattggtcaggctggtctcgaactcccgacctccggtgatccacccgcatcggcctcccaaagtgctgggattacaggcatgagccaccgtgcccggccagatataaaattttatatggcacaaataagatgaatgattcttcaagaatttttatgatataatcagatgtgaattaaagaattttctttacctaatgtacttcaaatcaatatgagatttaatttttcttcaattttttaaaaatattttccttctttttacagtggaatgaagttaccacatc

SEQ ID NO: 1879259 - DNA, 4001 bp, Homo sapiens; identical to SEQ ID NO: 543

SEQ ID NO: 1879260 - DNA, 4001 bp, Homo sapiens; identical to SEQ ID NO: 545

SEQ ID NO: 1879261 - DNA, 4001 bp, Homo sapiens; identical to SEQ ID NO: 549

SEQ ID NO: 1879262 - DNA, 4001 bp, Homo sapiens
ttgagcctgctccgaaaaggtcctgatcaagggggtccagcatttggaaactagttcgtgggctccttgcctatctcctttgttgcataaaaatccacgtgcctagctctcgtcgcattttatcagggccctttacttacttgtgtgtcctctccatcaatgacttccttcgtattccaagtacttggcatggttcctggcaaagcatggttacccataaatagaacacaatgaagggcaacccaggagcagggaatgttggcaaggtaggcaggtggatgaggggtttcagggaaggatggctttcacaaagagagaactacatgacacaggagagtaatatggagtccgcaattcttgaagcattgtacacattaccaaggcagaatttgataccagaacatgataaaggtccagctactccagctactctgggaagaaatgaggtcttgggaagttgaagcatcaggctatgcagaaatctacaaataacaaaaaataacctgatgatcctgctttttagtgttcttaacctagaaatgtgtgagagtgcctcatgctttgggtcaggattggtgttaggcttgtaagccaatacatggctataaatggaaattgcatggccacaggggtggaaacccaaacagggaatgagaatgctgagcctctccatcctctgtgactcaaagaaaaagggattcgcctttctagttggagagcaactagttggaaggacaatccctatactatcaccatccccaaaggctttgtgagtgggttacagaaaagcactgcagccaaaactctcaccacagtgaaagccacggtacctagaaagcatcattggactatctggaattctaagtaaaaattccaggaggccaatagccttctgagaaaaatacatgaagtgatgaagacaatgcttcctccccttgggaaaatctcattcctcaaatctggccttccttaaaggaggtcacaaagggagcatgagaagtgaattcacatttgagccctctctccacctaagcttttagtccttagatttagtggaggaataaatctctgcccttgcctttaaattcaaggagcttcccttctcttttgttccctgagcttgtcttctattgcttgtaaaagtgctattactgcctcatcctccctttcaggctgatctattaatatctggactcaaagtagccactgaaaatgtcaattcatccctgtagtggatcaggtacagatatgacagcctgggaccagtcaccaagtttatagaaatggtgagtcacaacagctacatctctagatccaaatgtcctgtgccttaagtacagcaagttgttctggtgaaagaatgcacaatgaagacaggcttctgggaagagcctttgttcctgccataactgacgttgcaatacttgatctggcattgtgagtcttcctttccagaattttgtatattatacaaaatattacacatggataacacactagttttttttacgtaaacccacttttgatagggttttgaactgtagacactctattgatcccaaaggtattaatttgcttattccataataagctttctgttctcttaagtctatccacaaatgggatatgtagaagagcttttactttttcaccaagttcattttcagtacgttaactgagagcaacaatcttgggttgaaaatattcatagaaatggaataactaattctcttcaggaacacatagttccatgctgataatcaccacagtggcagccaattgctagcactgagtgtttattatgggtgagatatggaattagttgcctaatgctgctatgacaaagtatcgaaaactgggtggcttaaaactacagaaacttactccgtcattgtcccagcagccagaaatccaaagtcaaggtgttagtccagtgggttccttctgaggctctgagggagaatcttttccgtgcctctctcccagcttctggtggttgtcagcaacccgtagcatgccttggcttgagatgcctcactactgtctccgcctccatcttcatatgtcattcccctctgtgtgtctgtgtctcatatctcccactcctttctcataaaaaatactaatcattggatttcagggcccatcctaaatcaaggatgatcttatctcaagatccataaatctgcaaagatcttataatccaagaatggtcacattcacaggtatcaggggttaggatttggacttatcattggtggggatacaatttaccccattacaggcttaataggaggcatgttacatgtgttgtcaccagtggaggggaagctctgaggtcatcttgtcccacactttcatgacctgtgaacatctgggtaatatccctggtagcagccattcagctgcacttgactctctgcagtacaagggaactctgaattctgtgacagaagccattccagccccagtccactctagtggttctaaaaccttcctgagtgcacagcatcaccatgcaggtggtagttctgtcatcatcgtcaccgtttttcagatgaagaaacgaaggtttggagtcagatgtgactttctaagatcatgcaagcagtgagcaagccttgaaatcctgtgttcgggttggggcccgtatttttaactgtatgccattctgatttagcaagaagaggataggggagcagccaaaagtttccagatgaattcttcagtccctcagtagcaccataaacacgaacctctaagtgcagaatcaccttgccacacccagtgcaattttgccctcaccttatccataagacaaatgctggtgctaggtcaataactggaacaaaagaatcatttaaaaaaaaaaaaaaaaaggccgggcgcagtgactcacgcctgtaatcccagcactttgggaggccaaggcaggcagatcacgaggtcaggagatcgagaccagcctggctaacatggtgaaaccccgtctctactaaaaatacaaaaaattagccaggcatggtggcaggcgcctgtaatcccagctactcaggaggctgaggcaggagaatggcgtgaacccgggaggtggaggttgcagtgagcagagatcatgccactgcactccagcctgggcgacagagtgagactccatctcaaaaaaaaaaaaaaaattgttgcaaatgtccatatgttgcaacatcatgggcagtaacttcactcttcagaatagccagagaactcctatctctaaaggagaatcaggattctcagtatcaccggatcttttcttgccttgaattgttcacatgaccacattatcctcatttcacccacacagatacattcacacccacccccaacacactctgctgaacatcgcacaaaggcttcaatagattttccaggagaaatatttttgtcccgtaactatggcactcatatgtgccttctttgacaagaaagccccttccacttccggttccaacatcatgaacaaacacacagcctcctttgtatgtacagctgttcgtgctcggccacaaagggcccaggagcaatacatggggactgtcctcccaagaacagatgggacccgcaaaggaggcaggctttaccctgtgcctttcttttccaggatgcattcctttgattgatggttgcctgtattcactggggaaaaagttcatctttttcactttagatgtatttatacgacaagctctttaaattctgtgattcaatcattactgagctttcagggaaaatatagcgatgttgaaataagcgacccttaagcccataatacagaagagaacaagtaaaggaacacagcaggacttgtcaaatgaatgcaaatgaatgctccgttgtacaacttcagaaaccgagcacatagcccctaagctcccatcacgcctcctctggtggaaacaattctctggcccaaaaacgaagctgttcagaagcagaattcttgtttctggttctcaggctac

SEQ ID NO: 1879263 - DNA, 4001 bp, Homo sapiens
tttttgtagaagctttatagttttaacttttacatgtaggcctgtgatccacctttaattaaatttttgtgtggtttgaggtatgaatcaaggttaatattttttccatgtagatagctagttgttccagcaccatttattgaaaatactttcttttcctcattgacttgctttggcactttggttggctgtatatgtgttaatccactcctggactgtttattctattccatcgatctgtttgtctatgtatattcaatgccatattaccttgatttatagtggctttagcattagtcttgaaaccaagactcactttttaaggattgctttggtcatcctcctcctcctcttccttcttcttctttcttcctattcttcttcattcttcttcgtcttctccttccttccctccctccctctttcacctcctcctcctccttcttcttctttctccctctccttctttgaggtggggacttgctatgttgcccagacaagagtgtagtgcctgttcaaaagtgcaatcatagtgcactacagcctcaaactcatgggctcattcttctagattttatttgtttagatatgaagtctcactctgttgctcaagctggagtgcagtggcaggatctcagctcgctgcaacctacacctcctgggtttaagtgattctcctgcctcagcctcttgagtagctgggattacaggtgcttaccactgtgccagattaatttttatatttttagtagagatagggtttcgccatgttggccaggctggtcttgaacacctgacctcaagggacccaccacctcggcctcccaaaatgctgggattacaggtgtgagccaccatgcccagctcactcttagacgttttagaataagcacataaatttctacaaaagaacctcataacattttgattggaattatattaaatcaatgaatcaatgtggggaaaattgaaatcttaccaatattgaacttccagtgtatgtatacagtgtatcttttaaattatttgtctttaatttgtctcagcagtttttgaaaaatagttttcactgtagagctcttgcacatatttaaagaaagtatccctcagtattatgagatttaaaatattttgtaaattgtattttttaaaaaatcatcttctagttttttgttatttagacataagattgatgtttgtacattgaccttgtatcctgcaatcttgctacatttaatttatcatatatttttctcagtgctttacagaatttcttgtttattcttgtaactacctatgagtcaggtgttattgcaattatattttataagaaatttgccccagatgtgctaattttcttgctccaggtcacacagtttgagtaacaggggaggaatttaatttaggtcaactctgattatatggcccagtccccttccacactgctataatatgtcatctctttgacatttgtatattattggaatggagtgacacattgtggtttctctggattccactgggacatttttgggtcatcatactttacgggagatggcttcaccaatggaactcctaaaatggacataacaagaataaggtgataaaaaagacggtgatttttccagtttaaggagagcaatatttttccaggttctttccccagaggactgctaaggaaattgtacataatctcaaagtgcagtttctttgcccatgctgtgaatgtacattagctgctgctagatcttccatgtgtgtggatgctgtaaagcttgttttcccttcttctctcccacaacgtgctgtaggaaaccatttctggacggctaaagacctcaccgaggagattagatcattaacatcagagagagaagggctggagggactcctcagcaagctgttggtgttgagttccaggaatgtcaaaaagctgggaagtgttaaagaagattacaacagactgagaagagaagtggagcaccaggagactgcctatggtaggtagtgcacaactgttccccggcaagatattgatgatatttgttgtgttttgtggccaggcagaatgttctgtgccttatgtgaacgtcactgtgaagagcgtcatggagcacatggcccttttccttggggacatttttggcaggtgccttggcaaaccgaatggaattacttgtcagcttttgttttcatattcacatgtgacatcttttctttttctgttccctgtctcaacctgtgtttgctaatagccttgttattatttagagcagtctctcccttggcaaggtcttgagcattttctttgtgtgacaattatcttccttttgtcccttggctccgtctccttgtctgcacaatcatagactaaatcaggctgatctgagaaaattgagggaagaccataaagtggctcttctatgtgtggacttttctgagagcttctttccccaggaaggatgatgtagaagatgtgaatgccgccttagccaaagtgtctgcttgtcagaggagttcaagtgttcctgtgttctttccttttccagtcgttaggagtaactgagcttactctgagatttgcacccagagggatggtctcagaagacgctggttcagtgcaaattgagatggtaaaaacttatttcttaaaaaatggttcctaaataaatgtcatttactaaaacaaatgaaagaaatatatatatgaataaatggctatattttacaaagtatgcttatttaagaagaaataagaaaaaacggggctgataggaaccagatttgaaatagggcttttgtaaatactccgtaaattgaagtaaatgaagagtagtatttataagctagattgagaaatataaaatcagctagctgaagttaagtgcatcaatttgggatgaataaattttcttttaaaatgtctatcaatttgtgtagagagaggtttcttcatagagatattagaatcaaagagtatgttcagtagttattctgtcttctttgtaatgaatacccttaagttggcttaacagctcagtacttatctttttttcttttcattcttaaaggtcaagccttgtttttgccgtatatgtaactagagacagtacgtttgaggctaaataactgtagtactagggaatgacaacacgctcacccaagacaccgcagcctggtttactctgtcatgataggaatgaggattgtacatttgaaataggtttctgctattgattttttaaatgtataaacgatggaaactacggaatttctcatgttttcaccacatagttttttgtcataaaatgaagaatatattatatccaagaatgaagaggaagtgaacaaatttgagcaaatttagtccagcaatattttcatttgaatagttgagcccctgaaagccattaatatctctttttaaaaaaagaaccatgcagtatttttgaatctcatcatcgtcacttcactaagtattttcacaatgatgaataaaacataaacaaatggaatgagagattgttaccatggatgattctaaattgcagatggctcattactgttgtgaagcctctctttatgtttttacacttggattttgctggatcagccaccctttccctatacattgatttacacgtgcttaattttttttaaccaatttgaggtgagttggctttaggtgaaccaaattaataatctagggttgagagtgtgggaaacaaataaataatgaattcctgaatacattgaagcttttatttattaaaatgtgataaaactggggcaaagtccatattcagctttttttgtgttttgagggttaaaaattcagagggagctctgtgttcaagtttaaatgtagagaaagtacaaaggagagtgtacttatgcacatacacatatgcatgcatgtaccatgactctttttagccttagagaatgaaaccatttaagaaatgagcaatatgtagtattcttaaaaaaagattttgatt

SEQ ID NO: 1879264 - DNA, 4001 bp, Homo sapiens
ttaacatttctacctagatttctatttccaaaactggacttccctagtctttttttaaaacgctgcccatctcagttaatggtaactcagtctttccagttgctcaggtcaaaaatcttggaatcttctttaactcttttcttttctcacataccaagaccaatccttaggaaatcctatggttctgccttcaaaatatacccagaatctctactaccccatctcccaccaacatcctggttcaaagcattgccagtcctcttctagaattctacaataatgtcccagctggattccttgctttctcctgcgtatccttccatctactttctttttttttttttaatgtttcaaatctatttttaatgttgcttgtcgaacattaacattttcacaattccagaaatgacattaataaaaatataaacaaattgatataaaaatctgtgtagactaagctagaatttacaaactcttaataaaaggtgtatctaagtttctcaattatgggacaacaaataatagacttcattgcttcatactaaaatggtatttttgactaatcacaaggaaacttaaactactgtatagttataatcataggtattcagtccaaagaggaaaaaagttttagtagtactatgagaacctgtatctctgaaaatgttagctccataagtgtaagcactcccaaagattataagataataaaatgtggaaacaggcaaactatggggcgatttaaagtttctaccacttcctaaagattttcttcaatagaatcattcgtgctaagtggataaaagttacaaattacaaaagaaagatacagaatacatccaataacaaattaatcagactaaggaatatttagtgtaaaactggcttaaaattttttgtcagaagaatttctcaacatctaaccctatagcaaataatacaaataacaaggaaattcttcaagcagttggcatttcttcaaaacacaagggtccaactataagaaaaatatcacattattcaaagtcctacagaattagaggagaatctgtactactcatgttttttgcataaattccatgatttataaataaataaacccaaaatataaattataaacatttaatttcagtataatgtagacaaaaacagcagctaacttgtcatctttcacagtaattttaacataaaaggtttaaatatttattttgccaatatatttttcattgcatataggcttaaaaaaaagacaatggaagttataagtaatcccttgacatgtgtaaaataaaattttttagtagatgggaatgtattgatgatagtctcttatttcttctcccagatatgcaagcgatatatctaaatacttactagagccaaatctgtctcaaaagtttaggtcatttttttttcctttttgatagtattcaacgagaaataacactttaaataaaactttttccatgaggaaggtacagtaattatccacctcctggatactctcctgtagtcctctgagtaagctccaaactcaatccatactccaagtaacagacttaagatgttcaatattggaactctttggcatcaactaaaaaagaaaccttggtaaaagcagaatttacaaacattttgttccttgcagtacacctttcaaaagacatcttcatcaaataggtaagaaaggtaagaattgctgaggtaagtagaggtctcttttattatggtcttcattctatcattattaaaccttaatctcatgtcctgttccaaagcattatgtgagtattcaatcaaagaagtgaggctgttctccagaattggttctctgctacaggtcaaaaccgactgcgccagccttggcgaagctccgcctactgccctttgctccaagtaatttttggcgatttttaaagtaatttttccggcggagtcatagtggcgctatactcttggataggttatcctgtctcttccgctagattgatgagatcaggtatcactcgaaaatggcgccgaaaagtgctgaggctcctcattcaaattcgttagagccaaccctgccttctacctactttcaatacagtaacctaactgctcttgttaaaatataaatcagattatgtcctgccttctactcaaaaccctctaatggagcagagttgggagaatattgctcctttcctaacaataagaaaaagttaatgaactacaaaatcataacttttcttgatcccatcagagctggggttacaggacaactataagcttaaaatccaaggaaagacagatctttcccaggagagacgagatgcaagcactggcttacctgtggtggagcagaacaggaagagatgtcaggtaccatacaagtggaagaagaagaaagagggcagaagaaatatttgaagaaataaggcagaggattttctaaaaataatgaaaggcaacaagccacatatccaagaagctcagagaaccccaagcaggattaataccaaaaaacaaaaaaacccaggcaacagcatcaacaacaaaaacaaaaactacctagacacacagtcaaactgctgaaaatgaaagattaagataaaatcttgaccttatatatggagaataaaactcacaaaaaacgagggggaaacctcatttctctgatcaaaagcccaagtcctaattatggcaaaaagaaacctcttcctgattttgtccttgtttctccctggtttcatctcctacaactctctcctcacttactccatttgagacactctagcctctgttcttttaacaccagtacactctcacagagcctctgcacagagtattctgtctacctggaatactctgccacctcctccactcttcacccatcccttccagcaccatacacccacaaggcttactcccttgccttctgtggaagacagcaaaaatggctgtccccctcagtatctacagccttttgcaatgtgactttgcagcttttccatcaagagatcaagtctatttccccagcctatgaatctggacttgccttgtgactttctgtgagcaacagaatataacgaagtaacattgtgctggttctgagcccaaacctcaggagatcctattgtgccaagagaacaggtccaggctagtttactgaaggattattaaagatcatatgaggctgagtcaagttgtcccagatgggacttcatacgtaagaaagaacccagccaagattagcaaagccagccaccagctaacctgtagctaaccataactgtgtgagcaagccctatagagaaaaaacaagcctggctcagactaagaactaacagatctactgattcatgagtgaacaaatgtttaattgttttaagccactgagttttggggtagttttttatgtagcagttggtaactcatacatctctttcaaagtctttattcatatgacaccttcttaatgaagcatatactaaccactccatttcaatggcaacccacattccctcagcactcactaaccccctttccctctgattttcccataacacttatcactttcctacataccatgtcatttactatttattatgtttattatgtattgtttccctcactaaaatttaagttgacgagggcagggatttttgtctttttttaactctaatgtatcctaaacacctaaactgatgtctggtatataaggccctcgataactatttgataaataaatgaataaaggaatcttgttaataagaatacagagaattaacaactacactgaatttgcagggctatcttgattcctctctctgaaaaataactattgttattgtcatttaaaagtatcatctgccaaacattatacgtatcccacaagagatgcagtgaaaactttcaaaatctctactttaggagggaaaaagaatggggaggtgggaatcctttagtaagaaaatgcttgtatgtaaacattataaaagaaaaataaatattgattt

SEQ ID NO: 1879265 - DNA, 4001 bp, Homo sapiens
aataactaaatgttgaagccatattacattttaatagtcaaaatattttctctgctagatcttgaagttggagattaattattttaataaataaaatgtaaatttttggagaataacaataaaagtcaatatttattagtgtttaattggtccggcaaaatttaaatgatgaggaagtattgcatcatttaaaccaaacagttctcagagtaccattattttcttcattctacactagagaaaactgaaaaaagatctagtaacttgactaagctagaaaatggtgtgaatagaatttgaacacaggccatatggttaacactcctctgtgctcaactattcttttatactagggaagaacaaatacattgtaaataaaaaaaaaattaaactcagatctaccacatagtactcataaccatgaaaaagttgcaatatttgcaccccccacctgggccccagccagttacattttccttaaattaaagtcctataggccttacagggttgctgtattttgtacaacttccacaaatgactaacatgatagtattataatgtatatgtttatctatttttaatataaaagcttgcattttattagcccatcattttatgagcctgaatttcatatattgaagacaatttccaccatacaaaataaattgtgatatataaaacagcaagaatacaatgttaaatcatttttgggattttcttgaggctcttctttcctgcttatgttcttataaatgaatatacatatgcagaaggaagagcaacaaaagggaagcttggaagcaatgtaaagggacacggcactcttctcatgctcatgtttttattatcacattctatgaagccattcagttcttcttcatgtttattcatattaaggtagctatattttatggtgacattttgatagacttcatcttattttagcaattcacttagtttgtgaaaatgtaagttgtatattctcaaaattttaagtattcactgaaacataaattttcagctgatgtccgcttttaaatgtcctacaatcatgtaattaaaattaggttgatttgtttttaaagattttaaaatttaatacctttttttcctaaaactaacttattttttgcattgtacccattaagatatagagtgctagacaatcttcaatagagtttctacagaagcaaaaatgatagaacaagccttttgaaatctaaaaactaccaaaatgttcatcttcattactaaaatatagtaattagatgcaaaattttaatccccatttcatgttgtcttgttcgttgatgccaagttgaggtttcattacagaataattatcattcatcatcatttaacttggaaagtctaacttctgaggaaatgagattgaaccagaacaactgagatctttccagggaagctagataaatagtttttacagacactgtttttaaaagttgaaaagtaagctataatttttattttgaaaacaaatcccctctaaggaaaagtatagcacttatttcaatcagacatgtatgtattaaagcttccactcatctcttaattttctcctatccaatcaatcctaaatacctttttaatataccattaatctttagcctttttcagacctttaaaaataaattttctgaactcttgccatagccacctaactttaccagatctattctccactcaaccacttgggttttctgactaaatcaaagaaacaaataaattttctcatgccactaccttgataaacacctttgctaactccctgttgccaatatgttgatgcacatatagcctatgaggctttccatctcttttcaacatctctgaacttatctgtaatcttcaccttcctatgcttcaaggacatgaaccttcttaccttcctctcaaacacaccaggttctctgagcttctgctttcactcctgcaaaactgccacccattctttaacgctcaactcagttaacacctctctaacatatttcataaatctttaactcaaagtgagtagctgactttgtgatcacacagtaataattcatttttctatgacaacgttcatcatattatgcactcataatgtgaccacttctctctgtggtacttaagttctatcacataagtagctaaaatacatatgttttaaataattttaatgtaaattctagtttcagtgtattttcaaagtatatcaatgcatatttatgtgcattctattttcaaagtatttaataatattataaatcatatttatatggtatcaaatatcaaaaattttaactcttttgatacaatttagattataaatatgatttgtttggtttggcttcgattttgttgtgcctgagtgacttatctatggagatgtttattgttaaattaaaatacatgaaagttctcaactgttttaggatttgtgtctattttagggtttgtgtctattgatagtctgtcaagctatcaattcttactgctgatgatgcatctttctgtggaagatgtcagctaaaccactcaatatttttacacaatttactatgagtaaattaactagtaaagtaaaactaaccttattataattttgtttacagtaaaagtgaatgatgacctgggggctttcttataaaacaaaatatttgaactttaatgtttagactgtgttttctctgttgggatctaaaaaaactttttttcaacacgcattttgttattctacttgagatttatagttaagtgacaataagtaaaatggtcttaaaacatattcattcctgtgtcagcacaaaagtacacttactgatttttgtcaagtatttagcattatactttcttgggattaaaaaaataaaattcctgctgtcaaggagtttggtaagggtgataaatataaaactaaactattaaaaaataaggtaactgcacagtgactgagtatgtacaagagttataaagtcaacatattactctgctctgtctaaatttcttactagaattagaaatacaggatcttttctttttttctttttttttctttttaaaaaaagagttataaagtcaagaatcaatgtttctgtgtagtgtcataggaaaaggaagtactggattttaaaggtagcttggaaaatttttatattatacattcttgcactcattcccacagcatgtggggaagaaaagccctcagcatatggatattttaaaaaagctctctaggtattataattctgacctttctgcctacacccccacaggaagccactgtgaaaaaaaaagacccccattatctcctaagtttgcttgaggccaggagttggagaaaccttctgagaggaaatgaattttgagtttaatttggatgtgttagtagaccattaacagtctgtaatatctaagggtacagaggcattagaaacgtagcaattgggatgtatgaggaagaagtagaacaagcagttggaaagctagacaaagattgaaaaggtgttatgaaaagttaggaatctcaaatactggtactgcaaggcaactgtgttgtctttagctaattcaaggtggatacttttatatccactagtcccagtgatagctgtggggaaaaatatgacaccagaagtcattgccatgcactgtagctaaaactgtctgggaacattatgagggagaaaggtgagcatgatgttattgatgaattatggaaaaattttaaggtaatgaacaacatcccttgagctactgatgtctcagagatttttttttcagctacaaagagatatatccacattatagggggaaggtgaagcaattattttgtaattaccaagtaaattttcacaattttccatcaactacatgctatctattgggactatttaacaaataaatatgatgggaatgttaatattgttaacagctaatatttttgaatagtgcattaatatatttctggcattacactaagcattttagctggtcaa

SEQ ID NO: 1879266 - DNA, 4001 bp, Homo sapiens; identical to SEQ ID NO: 564

SEQ ID NO: 1879267 - DNA, 4001 bp, Homo sapiens
tatttcttgaaaaaatgagctcctctaagttactttttttagttttcttatgtaaaagaaactatatagatttttaacatctcatttgttctactaaaaataattaatatggaactctccaagtcacaatagaaaatgaaaggataactttactatatcatctaagtgaaagtagctaaatttctccttgctgtttatattttaactaataatcatgaatatatgagaatacttaatgttttctttatacacattttggggtgatcagaagggtaatttttaaagtaagttgttttgacaaaagaaaacttagggaatcttttataataaaatattttgctaaagagaacttgagtcaatttttgaattgttgcaaaatgtataacttagaaaagaatttgttcaggaaccactgtaactttaaaggaggacaaaagagattatgtttatttttcacaaaccctgtagaagagatgttttcattatatagaattgtttcggaatagaaattaatgggggttaagaaaattagggatgaggcaataacatttttccagaactttctttaaggggccgacctctaaagttcagcacagatcacattgcaatccagacttgctctattattttctctattaggatttcattcagcttgagggttttcttccctcccaccttcctccccctctcccaccctctttcacctccaggacagctggaaactgaccaaagaaaacttctgccttcgtttacaaattccttttttatcagtgggtttctagacaaagtgccttattttaaatgctcagagaagtggaagcattgtaagctataggcaagagggctcagctgagcagcaattattaaccactctttgatttaaaaaaaatgtaaaacagatatttacaggggtatctaaagatagaggtttttattccctgatttactcagttgctgactcaataagttgtgggtcggtgctcttctctgggcaaatcccatctgcattgtctggtaggcaagacttggcaggttcttcttttattgttaggtactattattcctgttgtttatattacagaaggaaatcttcagaaaagcactatccatatagcatttaaaaaccagcaagtattctttactttggggaaaaatgacttcagtcctgggatgttaaaagttatacatacagccttcatccatataagtttttaaatctttgaattattattaaacaattcaaaagtagcctcattaaactattcttaagtgtctggaatgagttttttcatatttcattttgaagtgggaaaacctttaagaaaacacttgaattatcaatcttcagaaataaaaaaaaaaaaaacagtaaatcgctatataccacacacttttgctcttttaaaattaaatacatctctacccatcacacatgtacctctgtttcccttgcatgttaacacaaatcatgggctccccacctaggttcccttggtcacagaccaggtgagcagtcaagaaggccttacccgctggtcttcccttcggcagtcttttctcagcagtgtccccgagggcttcttggtccctagtgtgcaaaacctgtgaagaaaaacactggatatgagattcaaaaaaggagcaaacaaatgtcttctccttggaaacagcccattttgtccccagcggtccatggcgttgctctcccttgcccagtctaaccaatgtgcagactactgtacaacggcattgtcctgaacaggtagtctgaacactggggcgacggagcaggatctccagaagcttccttctatgtacttaaaatcctctcccggtcctcaggaaaagcctcccttcctgcaccaggggttgcattcagctttcccccctgaattctgctgcgctgactgagacacactcaagggctgtgatttccagtcttgacgtggcacatttgctgcagactggggaactggcaatgaatttaggaccaggaaaagggggagggctgggctggagagtccatatatgggatgatgtcaccctggggaggtttgggtatgcgctgtgccgctggagagaccgctagaatcgcctgctctcagacatgggtctgtgcataaaatggtaccagatgttttagtgtaacgttaagcagtcatttcatcttcaggccagatttttttcctcaactgggcaggaagtgggccccagtatggaaaagctgtaaaaaaaaaagagtcaagatgtacagttcggctgtggccaactgaaagtgagttagtgtagaagtacaaatttactgtctgacccaggctagagaagtaatttgaagatagagggtagatgaaatagtaaacagaaagttgaacactggaaggcagagctcatttggaaacctttttgagctttcctgtggcactttattttctggtatttcactcgtcaaaaagggcagataagtttctgtctgtctgtctgtctgtctgtctctctctctctctctctctccccctcttcccctctccctccctctctctccctccctccctccttccctcccgctctctctctctttctctccttctctctctccctccttctcctgtctgttgaatctgtcagcagcttgcaggctgctctagacttgaacagtaattatagcaacttcctgaaagtgaagcccccatgaaaagtctggagaaatgttctttgtcatggcctctacatgagtaattagttccacatgtggccttcctagtttccctcagctattttggctgggtctctgaatgctgtgctatagtttgacctaaagaaacgttacagtttttgtttgaagcatccactacgaaacaacgactcaggtcttctaacaaatcgcctctggtagatccatgctgttaggtatagcattgtttttcacttgtaattcctgattctgttttgatacttttgttttgttttcatggtattctgtggcttagttttatctctggttaactaaatctgttgaaatttgccaagtaccgcttgaccaaaggttataagatatcagcccactggcatctacttttctttccctgttgtggctgttttcaattatatatactcttgaatattctgaatatgtagttctctcactttccctccataggattctgatcaaagctagagtcgcctcaaacaagagcttgattaattgcccttctgaagatcaaaatgtgagaaaatttctaggtagcttccaaatttaatttgaccaaccagactaagaaacttagccttctttaaagaaagtacagccaaagcaattcatttccactggccttctgaaatactttttagaagtagaaaaatatatctcttttttatacgctgcattgtatatttcaaaaagcttcaagtgagtactgtcctaaagcatttgcttttcataaaatggcctcttttgaatcattaaatagcacactactgaagagttcaaaagttatgacaagcccttgttatcttgtgaggaagattaaataagataaacatgaattatctggcatcttaggatggaacagaggttagcactgggtacaccattcatagaaatatttatatcatcaataggagtcagaggaatgactttatatctctgtacttttgcttccatatttgtgtctttaggacctattcaatagtgcttgcacaagcccataagactcacctcccttttttccctgtcactgcttgcatattactggaaatgatctaagtgtgactaaatacaatctaatacttgtattatatgtggataccaactccattcttttcaaagtatctgtgtgtttactcacatgaagtcctcatagaggagccataaaccactgaaccagtagtcagccagtattccaggtgtagacctgcttctgccacagaaagtgaaagcctttttttctgcccactttcatttatgtccataagacatgccttggaaatttttgtcaaggcaa

SEQ ID NO: 1879268 - DNA, 4001 bp, Homo sapiens
atgtagattcacatgtagttgtaagaaataatacagagaggtcttgtgtaccctttatccagtttcacctgttttgcatgttgcaaaactatagtatgataacacaaccagcatactgacacagacacaatctaccaatcctattcaagtttttccagttttacttctatgtgtgtgttgtatttagttctgtacaattttgtcatgtatggaggttcatgtatccaccaccacagtcaagatgcaaaacagtgacatcaccaccaggattcctcaggtaacccttttgtaaccacgccttctttttttctgtcaccctcaagacagtattgtttccaagcagtcataatgagaaaaatggaggtgttactggatggcattctgtctgaaatcatcatcactaaaatgtagtttgcagttactgaaattcattcttctgtgtttgatgacactctactcctacatctccattttctgtttgaaatatcagctgaaaagcttgcttttatgtgttctcaagtagacctcactgaaattcatctttagcagtcaactggagactggaacccttaaaaattccttctacctatgaagaaaaaaaaaatgtatctcatgctaaaaacagtggtccagactcaatgttccaaaatttcagcaatacagagttccgaaagggcaaagggagtggctgaccacaaagcgtgccagcacttcaatgccatcattctaaataaaatgaacatttgggacttttaacagcataaaagccccaaatcgtctcttgagttgttcatgttaaattatttttgtgccactaaaagtatgaactgaacaaactgaacactaatggaatgcgaaggccagaacctacagcccttcacgagcctttttgccaatgtgtggctatgactactatatgatttggagatatagtgtgtctggaattggttcctgcccaggggttcatggtctcgctgacttcgagaatgaagccgtggaccttcgcagtgagtgttacagctcttaaatgtggcaaggacccaaagagtgagcagcagcaagatttattccgaagagcgaaagaacaaagcttccacagcatggaaagggaccccagcaggttgccactgctggttggggtggccagcttttattcccttattgtcccctcccatattctgtttttgtcctatcagagtgcccttttttcaatcctccctgtgattggctacttttaggaccctgctgattcgtgcgttttacagagcactgatttgtgcattttacagagtgctgattggtatgtttttacagagcactgattgatgcattttacaatcctagttacagagtgctgattggtgcattttacaatcctcttgtaagaaaagttctccaagtcccactggacccaggaagtccagctggcttcacctctcaataggaattctcccagctttctctctcttcttaatcaatttgaattaaatgtaaaatctccatctctaggcatcttttccttaggtgtaaaaatttctaaaggaagatattatttatatttgaaataaaagaagtgcaatatgattatgaaagcatttttaccttttctagccctcaaatctttcagagattgtatattaaatattgataacttagacaaaaaacaaaacagagcaaacaaaaaatctgtggttgcatgaaagcctgtagatcattaatcaaaaaaaaatcaaagtcagaattaaaccaaagaattgtgaagtcttggatgtagataaagatttctgaagtatcaaagaggaataaggcatcttattaaaaatagtgcaagtttatgttcctctcctaagttgtcttactttggaggttatccagagtgaaatgtccttggtgttacatgttacataagcctcaagacattgtagataccatcttaccagcatcttagaccttatcagtgtcaacatcttaatgggcagctgtggtagattttctcaatgtctggtggattttccactaccttggccttctccccagaatgtccatactcattccacctgttgtcatttctaggcagatgctgtgccctgtcaaaaaacaaaatagtagctgatagtggcgaggttttcggggaagcaagcattttcagtttttataaatgcagttatctctttagaaaattagagattaaatctgttataacaaataactgtattataaatataaaactgtgtatttatatttatattatactataaaactgtgtgtgtgtatatatgtatatatatacatatacatacacacacagaagctttaatttgtgtaatcatctctagcaaaggctcattttgtgatttttgccgtttgtttgcttaggttaaccttttctaccataagattatatcagtatttaccccatctagttgttttaggattttaatatttgtattttacttcaatttctctaaaatttgtttggctctaaagtatcatgtacagttataactttatttttttccaaatagacagttgttccaagacctcaatatttgcattttaaagggatccctttcatctctcaaattataattcagtgacaaaaatgtaccataaattgcatcatttactttatattcaaattttcaacctctcaaagttttccaaaacttttcaaggacaaatcaaaaatgaattagacaaggttctaataaggatggtcaatctctagaaaaaagttttatgccgtaagtaattatttgtgccataataaacaatttttaaatctttataaatgaaaacttctaattaaattcaaaattctgggttctaaactccttatttaattaataccaaacttaaaataccccttttacacttctacaaaacaaaattatttcttgtcctgtagctttgatcctttactttgaaatatgtttaatatgattcctttttccttctgatattaacctcatggaagaggtaggggaaggtgggccttgagaaaatcactgagttcagagagcagcgtgtagtctcatatgatggaagctgaagaacaggttggggaaagtagaaaaggattgaaagaacatgatgttggtgtctgtattcacctctctgcttccttctctctgtataatcttcctttatgataaatctaaacgtttcctacacaatgactcaactattctccatccgagacatcttttctatacttcagacttgtgtcaccatatcttggggtcacctccacctgcatcgtctgaccaaggaacccagtagccatcatacttagaactaaactgattcccattccttccaaacctgctcttcctcctgagtcctctgtctcaatgaaccccatcttacctaactcaaaaagctgcagttcagcctggatgtcatcttattactcatcctattcacaagctagtcagcaatgactattgttcttatctcttacatctccctcctcttacattctttacataatgctgaggcctcagtgtgttgcttacgtattctttcctggaattctaaaacattatattaactgtcctgctttcttttgtcctccttatctaatccattctccaactattatgaaggagtcttttaaaaatgtaggactgtttgttttatcccttgcttaaaattcccccattgtaaccgtaatcctaaggtaagctccttagcataaccttcagacccatcacattttagcttttcctgacccaagaagcagcttcaatggaatgatgagaagtagaatccaggaggtgataatttgaggaatgaatgaagactgagaaagtaacaacaaagtgtgcagaatacactttcagtaacttgagaaaggtcagtaggaaagggataagaagaggaatcgagtagaggaaaagattgttttgtttatatgagaacgatccaggcttgcatatgcttgcatatgtttgggagagaatagctgaagctgccagaaagggcatgattaaggaaac

SEQ ID NO: 1879269 - DNA, 4001 bp, Homo sapiens
cctgtctgcctgttacaatgcctattcttttttcaataccacctttattatctggtacatagatacttaacaaatgtttctgaacatatatgtgctctgtgatacagcagatgaaactttaaataactgaagtgaatacatttaaaaatactttagatgcatttattaaaagataacaataacaacaagctttattttgatcatttaatttttcaataatgtgttaaatactttgtatggattatcttatttattcttaataacaatcctgtgaggtaggtactattattatgcccatattgtacgtacatggacaaatatcttcacctcaatactgtgaggtaggtactattagtatactcattttataataacaaatattgaatatttaacaaatattgcaaatctatacttaaaatgggtagaataatagtacctgcctcacaggattgaggtgaagatatttgcccatggtcatacactgagtaagtgataaattcataatagcagaaactatttcactatttgcttgattgtcacagggaattctttgaaaccatgtttatatttgtggttattctgtgtatgactagatggttataaaagtttaaaaattaatttcatagttcacatttttaattttctataacaattcagagagactatccagacatatgaattaggagaataattctgaagaaatagatgacacagcaaaggactctacatataggttaggaccatattcttgttgggaagatggccaaaaaagaattttgaggatattttttcaattatttaacaaatattgaaaatctattatgttccacttggaaaagaaagaattggtgggtaggagccaactaagatccaataaacttttgtctgtgacttaactcttctgaagttgtcagaacgttatgttccccagagttagttgttttggttgacagaaatctatgatatgccaaataaagactttctagttactattaactttgccttgcatgtagaaagaaaatattactcatcagaacttatcataaatcttaggatgcagtcatatccctacatatattttgattatttcaaaatcaaatatatactttaaaaaaggcttactatgttttgaagggttcatattttttttctgaaaaatggcaaaatagtgctggcctcatgatgcttggtttagtacaggaacatacatactaatataaacagtatgcccagccaattcattatcatcctggaactatattcagcctggctactatcatgaaagatgagtagaagcagtgagctggcaaagctggcctctgcctctggttgttaagctgttggcagctcaggatgcatgacctttcaaatatacgcttctaattcaggacttcttatgatgtcatgtagttatgttcttcccttttagtgtattctctcttcaaaattctgtgctgaaaaaaggaaaaaaaagaaatgtaagctactatccttttggccaaatgttgaacttttccttctgtaactttgtaggtaggagacagcagagtaactgatcttcctactgaaatgaatttccttgagcaaaattatttcaaaaaatatgtctggtatctttgtttatacctcagggttgccgagctgtcagctgcatgcctgcttttcattgaagcatatgtatatttgtgtatatatgtgtttgtatggcttccaatagcatagtaataatttcaggggaggaaatagaaaagaaagcaagataaatgtattacatttttgtatttcctccttgcatttttttaaagataagactctgttgtaaaatataaactggcaatttgatcattacttgttattcatttgaactagttcagtcaacagataatggacagtgaacagagagacctcttttggtaagccatgtagtttttccaggggtgattgttatgctatgtgtatttagatagaagcttttccctgtgtaatcagcttgctgctgcccattttactgccaaacattccttctctatggtagcataatactgttaccaagggaacagcttatggccgacacatacagtagtgccacaaattaatttcacagttatcaggatataaggtgataacagtaacgtgagctactgtgaaattaccattgttcccacagagttagtgtaattattacttttgtggtaactaagcaaataattcacatcactactcctggatgtttgttctctcttctctgtctcaccctccttctttgtctttccctttccttcctatattttcctcttttgttgattcagactctctccctgagtctcttttcacaattaccaattaatgtagagtattttttatattggcattaagaaagagttttattgaagtggggtgaaggcatctcatatatgtaactcatgggcataattaggatgttcacttctatcaaagatataaaggactaaaacagtgtattgagaggatacattcaatttgtgatcaatgtagactcagagattccagttttattttcatagaatgttaacttcatgtgttgaatagaaggatcagtttaatgtgattaaaagcagtggagaaaaattaacttccctaattagctgtgttgcttaggacaaggaaaacaacttagctttttagtacttacatctataaaattgggataataataatgcctacctaacagaattggtatgtggattaaaagagatatgtgtgaaagtgaattttaaactgtacaataaaagttttaagctattatgatcattgtcatataaatggggatacatctgtaaaatggggttaagtatattcacctaacagaattggtatgtggatgaaaagagatatgtgtacaaatgaattttcagctgtacaatacaagttttaagctattaccatcattgttatattttaatggaggcatcttttgatgatagcctaccctcattatcagaaaatttataaggataattcaaaataacagcagtaacacagggaagaacactttttattgcattttattataataaaaagagtgtttcattatacctagggcacaacaaaatgagatgttatcattataaaataacagtaattttaataatgaaattttccagagaatgagtcatattttttattgtttttattgagtatatgtatatgttaattaaaatttcagcattgaaatataaaataatataggagtgtgtatagtatgtccattattttttaaaaagctacaatggtgagtacatgtgaaatatgagttgttcactatgtcaaaaagtgaagttgctaagacaaaggtaaaattatagaaatgagtttatgtaggaatgtttgtttttaattgcgtcaatgtgcattatgatctttagtctccattctatgttattttgcttttaaaacgtattttatgtattctgttagcaagatcagcatatagctaacagttagtatcagttactaaatgttgagtagttaattatgtatttatttatcattctaacactataaattatacacttttagcagttagaaaattgatacatgatagaataaaataatttgatgaaatttgtagctaggcatatttgttgaatgaatgaattaaatatggtgaatatgtagtaaactgcctcccattgctaaatgtctttttagagagggtaggaaattaaaaataattattttctcatgtaaatttttctgccacccattttgaagttacccaacactggtaactttacataaagaagtatgactttaactggactctgtgctcatcccattagttaagactgctttctcacattattattattttggaaataagtaaaattatttttatttcctactcttatttgttctctacaaagaaaatctaatgtgatctacaaaaagatactagaacaaacaagattaggtatattgcaagattgatatacaaaaatcaaatatattctaatcactaa

SEQ ID NO: 1879270 - DNA, 4001 bp, Homo sapiens
gcatgcttgtcaatgtctgtgtggttatgcagatccatgagggggtttcttaatgcagtttaatggaatccatttggggtgaaaggtgttattttgtctaaagaaatctccccctcgcagtccagctctcagacagactctgcaacagggtcaccatctggggatgtctgatagatctgggacatgcgatcgaaaggactctcctcctcctcatcgttgtccacctcccggtccccggggggaacggcgttgggcatcatgtggatgtaggcagctgcgatttccttgtggaagaccgtgtcttggttgtaggagatgagctcattgctgatgttcaccgtctccaccggcgtgcgggagcagacgtggctgcaccccagcagctgggcaaacaccttccggaagtcggcgttgaaggcatagtgactgggttgagtgaggagttggcccagcagaaccagatgaagacgtcgaatgtggtctcactgacgcaggggaagccggccggagggcctttggggtgtccactgcagaaagggaccatgcagttaaggatgaagaagggcagccagcaacacacgaagacccccatgatcaccgacagggtcttgagaacctcggtctccttcttgatggaaaaccgcaggctggtgtcgggcgcgcagcctgcgctgctccggcagctctgcacgtgctctgcggccctctccagggaggaaatcctgcggatctgcacctgggcgatgcggtagatgcgcgtgtaggtcacgatcatgatggccatggggatgtagaagctgatgagcgaggaagagatggcgtaggttcgattcaggctggagtcacagttctctgccctcacgtcgggctcccaaacggcctcctcccagggcgtccagttggccaggttgtttggcaggtccagcccacctcaagagaccgcctggtccctgtgccagttgagctggaccggaatgaaggagatgaggctggacaaggtccaggccgggcggaccatgaccaaggccatgcgctgggtcatcttgcgctcgtagcggaagggcctggagatggcccagtagcgggccacgctgatgacctgctgacgcacaggttcaggatggaggcggtggagcacatgatgtcgaaggccacccagacgtcgcagaacgcttcaaagggccagtaaccggccacctcggcgactgccttccaggacatgaccagcagcgccacgaagaggtctgacacaggtagagacacgatgaagacgttggtcatcttggcgcgcaggtggcggctccgcacgatggctgcggacaccagcacgttgcccagcaaggtccagatgatgagtagggtcagcaggcaggcggtgaccacctgcacgggccccagtggcggtgcccccgccgagccccccacggcattcccctgcgccagctgctggtacagcgctaactgccccgggtacgcggtgccgttgctccttggcggcagcatttcgggctgggccgcagagtcggtttgtgcgcgatcccaactacagccctgcgacccccaggcagccccatcgggcaccccgaggatgcgccccctcagccaagggaccctcgagccctagagggcgctcaccatgagctgcgccgggtcccggagcgcgcggggacttctcttgcttcctgaagcgcctctggctcggtggccgtggtgcgcccctccagtctacgcgatgggcacaggaagcggctggtgcccgctgacagccagggctgttctcgggagtctgcggcgcgccacatggcagcgacagcggctgtgtctggttcggagcgagagaagagagcaagccgccactgaggggctggggcaggcagtcgccagcgccgggctggcactgcggcgctgccgcggtccctggccgctccccggccccgcgtcccgccccccgcgcctccgcgctggactccagccccacctgtgccttggcgccctagctcaccgcgctcggcgcgccagagtgtagtggtgatcccgcaggtcccaggagcgccccagcgccagaccctagccccgggccggggaaaattcttcccgggaagaccgaagggtgcttggtgtagccctggagccctagccctagccacgcttggggaacaagaggtggggtagggatgaggacgcgagggcttccggagggggaaagagcatttgaagtgtaaaggggacggccttggattgcccacagacctgagtcccaatccggactttattcctggctctgcaactttaagggccctacattactttacccggccttggtttccttctccacagcgtgggataatgattcctactcctagaacagtgtcagaactcagggaagccttctaggatgaggtgtccagtagacagtgtctcctaggaacaggctcccgcttcccccagcccctccctcaacaccatgaggctggggcttcacctgacctcttgggagactgtccttttccccaccaccgcccccagtccttcagtgatttttcctttggggaataatttggaatgaacccagaagacaagaggaggaagagagccccccacccccccccacccccagagagttggaagcctcttctttgcagggcacttttacagtctttctctttttcaaccttgagaggggtggatacatagctcagtgttgaacagaaaaggaactgacggggcccaaaacccagactgaaaaaaaaaaatgatggaaaacaataaagagggaaaacagtgttcctgagctctgagtgcacctcccagctgacaagttgcatttgtgaagtgtttcggcctctgctggcgttaagctcagctgaaggcagctgggagagaaagggatgtgacagcagccagctgcacagctccggctgcgacctgctggcccagacacctgcagcatggtgaggtctagtaacagactagactttctcctcccttcctagtctcccccttcaccaaatgcacttgcaccctggaccaacacctgcaagtggcccagcttctcagacttaggctgctcagcctacacagtcccttcccccaacctctttccccttcagtgctttctgccgctggagaaggcaagaccatctgtccaggtgcctaaacctgaaactgaagagccatcctcaccttcggtctctcctcatcttctaggagctggatcactcctctggccatggacatccctgtccagaattgtgcctcctccaccctgtttgaaggtggcactctcctggcctccaggctctgccctgaccctctgtcttcccagaggcagtgatctttcctgaatgtgactatgctcctgtcacttccctgatgaaacaccctcagtgtgtttcatgatcagctccctgtggcccctgttcctctcctggagaggagaggaactaaaaacacaaaaatacaaaaaattagctgggcgtggtggtgggtgcctgtagtcccagctactccagaggctgaggcaagagaatggcgtgaacctgggaggcagagcttgcagtgagccgagattgcgccactacactccagcctggatgacaaagcaagactccatcaaaagaaatgaagaaaagagaagagaagagacgagacgaggacagaaagaaagacagaccggaagaaaagaaaagaaaagagaaaaagaccatatcacccaaatatgagaaattctcccatatatacatacttgtatctagatgactaatctctggaaagttataagaaaacactggttctttccaaggaagggatggccaaaaggtaggctaacttaacattgttcactctttttaagacctttgtatttcttgtatcatgcacaggtattgcctattcaaaaacaaacctacaaaacagggaaagactgaaagcttttcttcaatatctgctacaaggcaaggatgcctactcttaacacttatattcaccatagtcctagccag

SEQ ID NO: 1879271 - DNA, 4001 bp, Homo sapiens
tgcatgcttgtcaatgtctgtgtggttatgcagatccatgagggggtttcttaatgcagtttaatggaatccatttggggtgaaaggtgttattttgtctaaagaaatctccccctcgcagtccagctctcagacagactctgcaacagggtcaccatctggggatgtctgatagatctgggacatgcgatcgaaaggactctcctcctcctcatcgttgtccacctcccggtccccggggggaacggcgttgggcatcatgtggatgtaggcagctgcgatttccttgtggaagaccgtgtcttggttgtaggagatgagctcattgctgatgttcaccgtctccaccggcgtgcgggagcagacgtggctgcaccccagcagctgggcaaacaccttccggaagtcggcgttgaaggcatagtgactgggttgagtgaggagttggcccagcagaaccagatgaagacgtcgaatgtggtctcactgacgcaggggaagccggccggagggcctttggggtgtccactgcagaaagggaccatgcagttaaggatgaagaagggcagccagcaacacacgaagacccccatgatcaccgacagggtcttgagaacctcggtctccttcttgatggaaaaccgcaggctggtgtcgggcgcgcagcctgcgctgctccggcagctctgcacgtgctctgcggccctctccagggaggaaatcctgcggatctgcacctgggcgatgcggtagatgcgcgtgtaggtcacgatcatgatggccatggggatgtagaagctgatgagcgaggaagagatggcgtaggttcgattcaggctggagtcacagttctctgccctcacgtcgggctcccaaacggcctcctcccagggcgtccagttggccaggttgtttggcaggtccagcccacctcaagagaccgcctggtccctgtgccagttgagctggaccggaatgaaggagatgaggctggacaaggtccaggccgggcggaccatgaccaaggccatgcgctgggtcatcttgcgctcgtagcggaagggcctggagatggcccagtagcgggccacgctgatgacctgctgacgcacaggttcaggatggaggcggtggagcacatgatgtcgaaggccacccagacgtcgcagaacgcttcaaagggccagtaaccggccacctcggcgactgccttccaggacatgaccagcagcgccacgaagaggtctgacacaggtagagacacgatgaagacgttggtcatcttggcgcgcaggtggcggctccgcacgatggctgcggacaccagcacgttgcccagcaaggtccagatgatgagtagggtcagcaggcaggcggtgaccacctgcacgggccccagtggcggtgcccccgccgagccccccacggcattcccctgcgccagctgctggtacagcgctaactgccccgggtacgcggtgccgttgctccttggcggcagcatttcgggctgggccgcagagtcggtttgtgcgcgatcccaactacagccctgcgacccccaggcagccccatcgggcaccccgaggatgcgccccctcagccaagggaccctcgagccctagagggcgctcaccatgagctgcgccgggtcccggagcgcgcggggacttctcttgcttcctgaagcgcctctggctcggtggccgtggtgcgcccctccagtctacgcgatgggcacaggaagcggctggtgcccgctgacagccagggctgttctcgggagtctgcggcgcgccacatggcagcgacagcggctgtgtctggttcggagcgagagaagagagcaagccgccactgaggggctggggcaggcagtcgccagcgccgggctggcactgcggcgctgccgcggtccctggccgctccccggccccgcgtcccgccccccgcgcctccgcgctggactccagccccacctgtgccttggcgccctagctcaccgcgctcggcgcgccagagtgtagtggtgatcccgcaggtcccaggagcgccccagcgccagaccctagccccgggccggggaaaattcttcccgggaagaccgaagggtgcttggtgtagccctggagccctagccctagccacgcttggggaacaagaggtggggtagggatgaggacgcgagggcttccggagggggaaagagcatttgaagtgtaaaggggacggccttggattgcccacagacctgagtcccaatccggactttattcctggctctgcaactttaagggccctacattactttacccggccttggtttccttctccacagcgtgggataatgattcctactcctagaacagtgtcagaactcagggaagccttctaggatgaggtgtccagtagacagtgtctcctaggaacaggctcccgcttcccccagcccctccctcaacaccatgaggctggggcttcacctgacctcttgggagactgtccttttccccaccaccgcccccagtccttcagtgatttttcctttggggaataatttggaatgaacccagaagacaagaggaggaagagagccccccacccccccccacccccagagagttggaagcctcttctttgcagggcacttttacagtctttctctttttcaaccttgagaggggtggatacatagctcagtgttgaacagaaaaggaactgacggggcccaaaacccagactgaaaaaaaaaaatgatggaaaacaataaagagggaaaacagtgttcctgagctctgagtgcacctcccagctgacaagttgcatttgtgaagtgtttcggcctctgctggcgttaagctcagctgaaggcagctgggagagaaagggatgtgacagcagccagctgcacagctccggctgcgacctgctggcccagacacctgcagcatggtgaggtctagtaacagactagactttctcctcccttcctagtctcccccttcaccaaatgcacttgcaccctggaccaacacctgcaagtggcccagcttctcagacttaggctgctcagcctacacagtcccttcccccaacctctttccccttcagtgctttctgccgctggagaaggcaagaccatctgtccaggtgcctaaacctgaaactgaagagccatcctcaccttcggtctctcctcatcttctaggagctggatcactcctctggccatggacatccctgtccagaattgtgcctcctccaccctgtttgaaggtggcactctcctggcctccaggctctgccctgaccctctgtcttcccagaggcagtgatctttcctgaatgtgactatgctcctgtcacttccctgatgaaacaccctcagtgtgtttcatgatcagctccctgtggcccctgttcctctcctggagaggagaggaactaaaaacacaaaaatacaaaaaattagctgggcgtggtggtgggtgcctgtagtcccagctactccagaggctgaggcaagagaatggcgtgaacctgggaggcagagcttgcagtgagccgagattgcgccactacactccagcctggatgacaaagcaagactccatcaaaagaaatgaagaaaagagaagagaagagacgagacgaggacagaaagaaagacagaccggaagaaaagaaaagaaaagagaaaaagaccatatcacccaaatatgagaaattctcccatatatacatacttgtatctagatgactaatctctggaaagttataagaaaacactggttctttccaaggaagggatggccaaaaggtaggctaacttaacattgttcactctttttaagacctttgtatttcttgtatcatgcacaggtattgcctattcaaaaacaaacctacaaaacagggaaagactgaaagcttttcttcaatatctgctacaaggcaaggatgcctactcttaacacttatattcaccatagtcctagcca

SEQ ID NO: 1879272 - DNA, 4001 bp, Homo sapiens
ttcccttccccaccccacccccgaaaaaagggcagaaacagaatatttttcacaggtctctgatttctgagcctagccatccactttgtcatagaactctattgccaataagagtatatttcagaattcttttcaactagggaaaagtgtgcaatgtatggtgctcaattctaaggagtgatgaagttttatagtataaaggcctaactgcctgcatgatcaaatcctccccatggatcatccttttaaaccatttccctcttcttctcacattcccccagtaaaggcctttggtacagagcagtcctataaagattgtagcagttggtcattccttgttttacaacagcatagagcaagtagaggcatgggctctgacataccagggaggaagggggacacacagaccccaaggaggcacctggagccctcctactcccagggagggaagctcctctgtagacctgactgccagtcagtcacagagggattcgaagttgaaaagcacttaaaaatgggtacatgacactcaagtgtttacgagtgaaaatgttcatagtatactataaaatatttccagctttattgaatttgaaacattaatttacacattaaacatacttaaatacattaaaacattatctatatttttaaatatttcaacagaaaagagaaagcaaataggaaaaatataattgtttaatctggttgataggtgtatggatgttcattacacacttttctgcttttctatatgcttgaaaatgtttataataacatttttgaaggcatatactgtctttaagaaaaaggggcagtagactatttcttcctacctaagtaaatgacaaattatttccctggacccagctttactgaaaagaaagggagcctgaaaaactttatagcaaaaacggtagctctcgttatggatggtctagaattgttcaactttcttactcagtttgactagaaagcaagttttagttgattaaaaatcagctttgagtaaaacaatataattctttcaaagacctcacaaatccctaaatatttattcatttggatcattttcaccaggttgaagagaagcacaggtctgatgccatttattctttagaagatgagactaaaacatagattctagcataggtcacaacagggagggcactgtaaattagaacagtaacttaatcccaggggctgccatgcctctgatcggtttcttcccaacctgacacagcattactaaaatggcaagttagcagccgctctacttgacagacagcaccaaaaatggagagtatggcatggagacagggggacaaggatcttggacagggagggtagcaaccagtgtttacaaacataaaccagagcatcagatgggccagccataaattacccaagattgtactgaaatctctgaaaataaactaacaagcctttagaagtttcctccttatgttctaactatgcccccctcccaccaacttccctgcaaaaattactccttccgaaatggtaccactaccactcttgctgaaacacaatcttatcaccaagggaggggattactcaaataaatctgagaggagaagccagaccagaatggtctgcttgacccactcaagaatctgagagaagtctgctggtcatgcctttggggaatgcccaccccgtctttcaccacagtggtgctatggtattaatctctggtttaccaagttgaaaggataacgaagggcattctaatattgacccattcctttcccttcttttccatcttggtcccaattttaggccattctcccaaaagataccaaaatgataatgataattataaagtagaatatagaccccttcactcctgaactacatattttcaatgaaattcccagatatttgaagaaaaggcccccaaaactacaaataatctaacctctaccaccagagcatcttccaagtcgactgccgcggtgtctcaccaactcgaaaatgacgaggcctcgcagtggctgcccagggcgcccagtggtgaggtcagcagtgtgtcctgccccgccccattgaggcaatcttactctgacactgaggaagaagtctaggctgtccagaatctcagctgcatccacaggaaagggagagaggatcctcactttcacaagtagcacccaggagattcatttctcaatgactgatgggtcacccctatccacaactccacccactgcaaaatagagagtagggtctgcaactccttgtaatcatccccatgattaggaggtctaggatcatcttgatccgtgttgtttcctctcttcagatcatgaagacacaaaagacttgctttttatcatgaacacctgctctgcgtgagaaaagaggagatcatcatgatcattggctatcctcctctttgctccccaagacaaactattacaaatgggaaattcctcggtaggattttctcatttgtaagaggctagacacatcaagattatggtaagacaatagcagggtaaatatcctgggaatcactcaaagtcaaccatacaagaatacagaaacaataaaatacagagctatatggaggaaatctgaacatatttgtgacctcaagaaaacccaccacaaccaccacgaccaggaaatgtctagaagcttctggaactctctacatacaattctttcatgttctccttcccagcaaagcccaccagccctaaggagagatgtgcctttgtggtagtgtagccccatgagggcaagtttgaggagagcggagggtgggaagaggagattgtgtcagtggaattcagaactataattcccagaacactgcttaacaaaaggcagaatgccccactgggaagacaagaaggagaatggcaaagctgtcccatagagacaaaataactaacttgctcacccacatgtcctattgcaatttaaatatgcaatgtgttcaaactcagcaacacctttggtcaacacactttaggagactggttggagatgtgacccagaaactgcgtaccttggctcagaacacaagaggagagaagagagaagacgactatctctcactaccaccaccaggtaaaagatgccgaatgagagtgatgtacagtgccccaaaagtcagtatctgagggcaaagaggtgcaactaggctgggcacaggatgcaggctacttggaaaggttaggcaacacggtatggaaggtgctccgagaagagtggtgaataattccttctgccagagctcagttctgctaatctcagttattctgcattcagtatactggggcaagtgacccattactccatcttgggaggagccatgatgccaaccgttgtcaggtgaggccagaaaaaacaatgggttggggagtgtttcataaaaacgtctctgttcccttggagccttggcagaggaatggatgtaattggtgaacttatactttatatggggccttagaataagaagctctgcccttcttcaaggtcactttataaaccacataaaagtcaagctggtcagaaaggtgagaaagagaaagaatttcccacagtaagaactggtacctgtaggtttacttgtagttcaccatagttgctccttcctctgttccatcaacattggttaagtctgagagacaataactttccaactagtgattgattggaatagagctagcagaccaggcatgacttgagataccatctggtgtgtataaagcccctttttagaaagatgagaaaacagtcccagagaggtgaaatgacttgcacaatgcaaattagaacccaaatgaagggtagaacccagatcttctggcttccagttcagtgctgctgggtttttcttactaaaccaaaacaataaagagcatagaagggaagagaagaataaagtctattttggtctttggtagccagggtaaggagaatgctgtcactctacgagaaaacccaaagtgaacccggctaatcag

SEQ ID NO: 1879273 - DNA, 4001 bp, Homo sapiens; identical to SEQ ID NO: 585

SEQ ID NO: 1879274 - DNA, 4001 bp, Homo sapiens
tctcgatcgctgtctctctccctccctcggtttctatctctccatccatcttctccttgctctccttcaagccgtgtgtgtctgtgtttcaccgtgtgtgtgtgtgcgtgcgtctgcgcacccgtgctcgcgtgcgggttccggaacgagaacgaacgggtgtgtctgtgtgtgggggagtggatttgctcctggtggcggtggggtgtgtctgggtttctctcaggccctctcacccgagatcaggccgccgcctctagtgccagcccggggcaaaacagggccaccccccgacccgctacaccccacgccctcttgcccccccggccgggtcttggtcgggacaagcgaccgtggtgggggcgttgtgagagaaaggccccgcgcggctgggccggctgttcgccttcggccagccctgacggctctgggtgggtggggcaagagggggcctcgcaggagcccctgtgcggcgagggatccaaaacgctgcctccgcgacagggcggaggaccggagggcgtcccaggatcgtgggccctgggccctgacgcctcggagcactccctgctccgagcgggcccgatgtggtggaagctcgggagcgcgggagccgggggaaggccgcgggccagcggctcgggggtccccgatccgagccccgcggccccgggctggcggtgtcggctgcaatccggcgggcacggccgggccgggctgggctcttggggcagccaggcgcctccttcagcgtctacggccataccaccctgaacgcgcccgatctcgtctgatctcggaagctaagcagggtcgggcctggttagtacttggatgggagaccgcctgggaataccgggtgctgtaggctttttctttggctttttgctgtttctttccttttcttccagacggagtctcgccctgtcgcccaggctggagtgcagtggcgccatctcggctcactgcaagctccgcctcccgggttcacgccattccccggcctcagcctcccgagtagctgggcctacaggcgcccgccaccacgcccggctactttgttctatttttcctagagacgggctttcaccctgttagccgggatggtctggagctcctgacctcgtgatccacccgcctcggcctcccagagtgctgggattacaggcgcgagccaccgcgcccgcccggcctgctgtaggcttttgtggcttccccgctgcctcccttccccccacagtcgccatgcttcccaacctcccctgactctgctccccctttaccgcccacctacacccccgccgcagccgcagccggggtcctcctgctgggggtccgcccctactgcacgccggcccggcagcagcatcccaccgcttccgcctcgccgccgccccgccaggagcccggctccagcctgggagggcagggggccggaccccaaaggcgcagccgctgggttccctgccgttcgcggtgccttcccgctcccggaacgcccaggcgattcaattcacccatcgggcgccgtcgtcgcacccttccaaaccgggggaaggggcgggcaggggcagcgggtgccacagacgccagccaagacgtcggctccggaacgcatgggctgctttacccgggggaaggacattgcttcgccagccaccgggaaaacaggccctgtgcacccgggattcccaatgccccccgcttcgtgtcgacgactccagtcccgaggactcgccagagacccaggcctccgggcccgcccggtgccacggctcccgccaaacgggcgggcgcgctctgcaaatctcggggcccgccgcaaggcacccagagcacagggaggtgccaagaaaggcaggagcctacgaaacccacctccaaagcaagcaattcatccaagaaaacgcccgcctcagcgctccgttggtcctctcgcacggaccgcctggcccccgtgttctgggcgcagcccaagccccctccaccctatcccggcctgctcaagagggcgctgcctaacggagccgggcgcttcctctctaaggctctatcgctctcgctctctagctccctccgcctctctcttctgggtttccccctggacctcgcgctacttttgtcgttttccctctgtctctctgtctctctctctctctttctctgtgcctctctctttctcagcctctctgtctgtctccttccctctcgccctcccctgtctctctcgatcgctgtctctctccctccctcggtttctatctctccatccatctcgtccttgctctccttcaagccgcgtgtgtgtgtgcgtgcgtgtgcgcgtgcgtgtgtgcgtgtgtgtctgtgtgtgtgtgtgtgtccgcgcgcgcgggtgcgagcgcgcccgggtgtgtctgtgtgtgggggagtggatttgctcctggtggcggtggggtgtgtctgggtttctctcaggccctctcacccgagatcaggccgccgcctctagtgccagcccggggcaaaacagggccaccccccgacccgctacaccccacgccctcttgcccccccggccgggtcttggtcgggacaagcgaccgtggtgggggcgttgtgagagaaaggccccgcgcggctgggccggctgttcgccttcggccagccctgacggctctgggtgggtggggcaagagggggcctcgcaggagcccctgtgcggcgagggatccaaaacgctgcctccgcgacagggcggaggaccggagggcgtcccaggatcgtgggccctgggccctgacgcctcggagcactccctgctccgagcgggcccgatgtggtggaagctcgggagcgcgggagccgggggaaggccgcgggccagcggctcgggggtccccgatccgagccccgcggccccgggctggcggtgtcggctgcaatccggcgggcacggccgggccgggccgggctcttggggcagccaggcgcctccttcagcgtctacggccataccaccctgaacgcgcccgatctcgtctgatctcggaagctaagcagggtcgggcctggttagtacttggatgggagaccgcctgggaataccgggtgctgtaggctttttctttggctttttgctgtttctttccttttcttccagacggagtctcgccctgtcgcccaggctggagtgcagtggcgccatctcggctcactgcaagctccgcctcccaggttcacgccattccccggcctcagcctcccgagtagctgggcctacaggcgcccgccaccacgcccggctactttgttctatttttcctagagacgggctttcaccctgttagccgggatggtctggagctcctgacctcgtgatccacccgcctcggcctcccagagtgctgggattacaggcgcgagccaccgcgcccgcccggcctgctgtaggcttttgtggcttccccgctgcctcccttccccccacagtcgccatgctacccaacctcccctgactctgctccccctttaccgcccacctacacccccgccgcagccgcagccggggtcctcctgctgggggtccgcccctactgcacgccggccgggcagcagcatcccaccgcttccgcctcgccgccgccccgccaggagcccggctccagcctgggagggcagggggccggaccccaaaggcgcagccgctgggttccctgccgttcgcggtgccttcccgctcccggaacgcccaggcgattcaattcacccatcgggcgccgtcgtcgcacccttccaaaccgggggaaggggcgggcaggggcagcgggtgccacagacgccagccaagacgtcggctccggaacgcatgggctgctttacccgggggaaggacattgcttcgccagccaccgggaaaacaggccctgtgcacccgggattcccaatgccccccgcttcgtgtcgacgactccagtcccgaggactcgccagagacccaggcctccgggcccgcccggtgc

SEQ ID NO: 1879275 - DNA, 4001 bp, Homo sapiens; identical to SEQ ID NO: 603

SEQ ID NO: 1879276 - DNA, 4001 bp, Homo sapiens
cttgtatttagctgtagtcaagcctcaccagccatatctcatctctgagaggaagactggatagtgagtttggttttggttttggttttaaacccttttaccttttcagtctggcagctcctactgctgctttcctaagttactcaaagcactgcttcttggtccttgttttcttttgccttgtactatcttgtataatgtttactaaaagagcctccccataaatcagagaggcaaaaaggtagcatataaaaagaagaaccaaaagaagagaaaacctgacttctagatgactgtggtgtcatctaaaaggcagaggtgcctgaccctcaggaatgtgtatgatgcaacagagctgaagaatgggttcccttcacctactgctggccattgtcccttctgttggagattcctttctttatggttgctgttcataaccccttcaacacccccccttgctggtcctgccggtcacagttgaggattttggctgtgatgggctcatactcataatggcctgttgagttgtttttagtgacaggttttgtttgctgcacacctcattggcttgcttaccaacaccagctagaagtggtccctctttcatatccaaaccagaacacatttgggtattcctgagactttatagagcgtgtattgtttgttatacgaacctaacctaccttgttgttttctcatattaagaaatttaaatctactttgttttagtgaagctattttggtaatgtataagcaattttggttctgtttagggagaattcagggtttccatgacttgatttgagctttgcatatttcaaataagtaacacagccattttaatttagctaaataaaaaaatttcttttttctctcaatgtgtctgactaaagcctctctcactcccctgcgatttttaagggaaaaaaaaaatctgctttgatttctatatttatggacgccttacaccttttgaaagcaaggagtaacacatggtgggcccaaagtaattaagagtctgccttaaggactgcaatatttggcctgaagaagcaaaggctgcagggttcaggctttttgcatccagaggatgggaggggtgaggtgaggcaggagtgagccctgcccctgtgtctacccgagatgctccacttaggcctgttttattttttgagagtcaatataaaagcgtgtttgccataaatgtcccaccaccttaaaaaaaaaaaaaagcttaaaatccgttgctaaagaggggtcatacacaagctaaaactttttcacacacagaaaaaaataactctacatgtttgctagattctggatacctccccccctccccgcaacacagaatctggtgaccttccccctcagtcattatgtaaatgactatacataaagcttttgttatttacaaatataatgagaggatttgttcatttccaaaaggaaagggagaaacacatatcctgtgatagagctgggctttcttacctcaaaactgcagccaaatgggcagtattatctttgtctcaccttttagaaccatttccagaagtacaaaaattattaatattcccatgtggtggatcttaacttttgggagggggacatggattcctgtaggaaaggtaaaaactatggatatatgtctacgtataattttaggcagttcactgaccagcccttcctccaagccagttcatggaccaacttaatgacaccctacatacaatccgaagcattcaccaagtgttttctaacacgacatatcattagggaaggggcactatggcgtatggtgggaagatcagtacctttgatgccaagcaactgatgatcaataactttcataccagtaactttgatgcaaggcagatgtagatttgagaactggctctgcaactaagaaaggtatggcatatgcccttggaacctgtctcttcatccataagaggaggatcatgatatccatttggcagtgttcttgtgaattattagaaataatgtaaagaggcaaccacgtaagagctgcatacatcatagataataacaaagaatgcatttcagcccatagtgcagtgtggctcacagggctcgtgatgactcattttgcctgtgacatagcgactgtaaatcaacatagctcacgtaccctcagcagctatcactctggtggcagctgtgcttcacatcccacagaacaccagtgccttggggtacctaggccagggcctggcacacatttttgttttaaatactgaacagagggatattgagtccatccacaagtactggttcagtgtgtctccccacagccaaccaccagtgccagttcatattggtgagactcagcaaccaacttggtttgcaaagtgaccccatcagacaggaaggacattgccttcctaacagcaaatgagaaacgagggagccttggacttttttttttttcttttaatgtttcatagcatgacatccaggtgggtcctgacctctgtcaataccaccttcctgaggttagttccatttcctactctgcacctgattcctgcagctcccaccttcagtgagaggaggctacagttctgaaggaaaaggcttggcattgaagctatggtcttcctgggccagattcaggagggaatggaagagaacattcctttcaggacaggtggccaaaggataggagacagagtggttcagcagggggggtaggttgcacaagggtggggcaaagggcacctcctgaaagatgggaagtgggaatggggatctggcctggggctgctgtggagccagctgcagtgcaggttgcaggggagcaggggcttccgccttggggttgctgtcttggtcagcatggctcctgccttcggggatgtccaaatcccacagaacatctggattctggacctcagtctcagtcttggtgacagcaggggcagggcccgtgttgatggctgcattcatgccgtagcgccgtcgcttgttaatccagtacaacaatgggctgtaggtgaatgtggcagctctcatcacctccacccactgctgggcatgctcttcccgcctcaagttcttcctccagtgcagaaagataatgcaccctccagttatcacagaacacagccccaggattccaaagtacaatgagacccacactaaggcagcaagaaagaaaaagaggcatgctggctgatagctgtagcttggggcctgagctgtttctcattcctctttcacttaacccatgcatcaatcgctccatccacttaactactctcaccgttccttccctcccttattgacttgcctcatcattcccttattcagtcaaagctagatttccagggagcttaagcaccacctttaactctttacagatcacaaaagctaggtctagcgggggcatgtgctgcccaggctcagtcaagcctctgattcctaacccaggacccatccaatccatcagactgagaagtttcactatgggcaagtccatcaagaagcaaaagttcaccagcactttgtgaggcccaggtgggcagatcacttgaggtcaggacttcaagtccagcctggccaacatggtgaaaccccgtctctactaaaaattttaaaattagccaggtgtggtggtgcatgcctgcagtcccagctacttcagaggctgaggcaggagaatcacttgaatccaggaggtggaggttacagtgagcctagattgagccactgcactccagccggggcaacagagcaaaacttcatctcaaaaaaaaaaaaaaaagtgaaagttcatcagttgacagagacaccaatgtcccatcccattccattcagctgtgatagtcctgggctattgatagtatcttctctggttgatcagagcatggtctttgccttaaaataattcttagttttctagagtagactatctcctaactgcttagctctcctccaggcagccaggcactgtcccatccatgcaaagggccttc

SEQ ID NO: 1879277 - DNA, 4001 bp, Homo sapiens; identical to SEQ ID NO: 606

SEQ ID NO: 1879278 - DNA, 4001 bp, Homo sapiens; identical to SEQ ID NO: 627

SEQ ID NO: 1879279 - DNA, 4001 bp, Homo sapiens
ctggcaccatcatcatcatagctcactgcagcctcaaactttgggctgaagcaatctttctgccttggcgtcccaagcacctgggactacaggtgtacatcaccacaaccgcactttaaaaattttttttaaataaataagggaccttgctattttgcccagggtggtcttgaactcctggattccagccatcctcccacctcagcaccccaaagtgctgggattacaggcctggaccattctttataagtggtattatggaaaagagatatggcacaaggaaatttagaactgaagcaacccaagatgttctgtccaagttgttaacaactagaccttttaaaaggcatttataaaaattaatagtcttaccttttgattatccttctttctctatggtgtgttacaaaaattccacatattacaagcccatgaaaataaattcccatgagagtttgaaaactttttgcagaataatgtcccaattttagttactggtggccaatatttaccaacttgagaggtggtgttttattacccttactggctgttaacagttatgacacagaaacttgcaataggttggatggaatcctttcaatatgaaaagtaattataaacaggtgaaggtacaatggcaaatttcgtgttggctttggtaatgttttgcatataatccctctgtcaaagtgtcttaaataataaaacaagcaaaaatcacacacacacacgcacacacacattttgttttcaaagaccacggtgtaaaatgaagatacacacacgttatcctttaagttgtggatctttggttggctagttggttatgatgttttttcccccgctcagctctaaaaaaacatcctcggcaaggtgaggtggctcacacctgtaatcccagcactttgcgaggccgaagcgggcggatcacctgaggttgggagttagagaccagactgaccaatgtggagaaaccccgtctctactaaaaatgtaaaattagccgggcttggtggcgcatgcctgtaatcccagctactctggaggctgagagagaagaatcgcttgaactcgggaggaggaggttgcggtgagccgacatcacgccattgcactccagcctgagcaacaagagcaaaactccgtctcaaaaagaaaaaagaaaaaaaaaattcctcaaagccaacccacctgacaaaaggagggaaggagctgatactcgagcctcactctcgaatcaagaaaagggagtaggccttggggaaatgtggctttcaaaattcatgccacatttgcacaagccaaatcgctatctggtccctgcatccacccacacaccccactgccgtcttcctaggaaacaccagactctgccctgatacctacgcgcccgactcgcggggcgctgtttgtttaagactcgcccccaaagagcgcgggagcgcgagcggcaccagttccagggttcagctcaggtgacacaaacgtagccaatgggaggctgccgccgactctcgccacccgccctcaccagcatccccgcgcctctccccgccaaccctgcccggagcgccagcgatgccctctgcccgcggggacccgagcctcgcgcgccctccgccctccctaccctggcccctgtacccatcacacctggggcactgccgtccgccgagcttgggcgcgcggcggcgagaaggcactggaggaggagaagcagccggggcgtaggcgccctcgcccccagcaggccggggagggcgcgcatggcgccagagggtccgcctcagttctcgtggagactgctccctcagctcgccgccgcgggtgtccggaatccctccgcacactcgcaggtggcccggcacccgcagccagtgccgcgggcaggacgctgaagaaaaggcggaatgggaggggcccggccgccttgccctactccccgagacgctcttaccgcgcccggccttccatcagttatgcagccctcagcccgctgctggcgttcccggatgtgcggtgctactcccggctgcagcctctccggcctccgccctctaggctctagcaggtcgggagagagcttgggcaggtgatgtgtagcccatcgcgtggggagaggttgaaactatccctgcagactggcctttgcacttcatctgaggcagatttcactaattttcgttgatgggacagatgagagacactttcctcctccccgaccccggacatctttgggctttcttatgagggaggcttatttttgcgcaggtgtaaggttttatccagctgccagacaacttgtactgatctttctttgctttgcctactaatcacacacaccctctcttctagcctgtgaagacttaactgattttctacggatgaaggtttcagtgtcccaaggccccataccgtatctgattttactttatttttgtttgttaagcctaacagcttctgaggagccacgtagagctcaagaagcaaaagctactgagagtagatgctatgtaaactgcacaagacgttgacctttgttaaatccgaacactgtttaagataatgctatctcttacccacgaggctgtagcttggaatattcagtgctctgaaccaaattaaataaattagtgctttatccgggaggggaggagaaatctatgttgtaacattgaaacacattgatttgatttctctccaggatgttataacgcattaaaagatattttaaatatttttcacgagctttgtttcctctccctttattttttgaagttcagctttcacattcgtaaattcaaaatatatcagcgttaaaaaaaaaaaaaaggattggaaataacataagagacaaattttgaaaattgaactatttaacaaaacctatgcttattccaggcaggaatggttaatttgtaattggtacgtattactaaaacatgtccgtttttgttttagtattatatgcgcaaaactttggaaacagatgtagattcttcaagttggcagtgagagaatatgaataatacaattcattcaaccatattatctaccaggtgccagtcattgtgttcaaaaaaggctagataggcacgcatgcacgaatgcacgcatgcacacatgtacacacacacacacacaaattagacaactatttatctgtgaataacaaatcttagaaaagcctcttctcagaaaattatggtcacaatgattaaaatcttttgaatgaaactttaaaagatgccttcaaggactaaattgtatacactgttgaccctctgagggcattgactgggcttgctaaacccaaattgcctaatcaatggctgctacatcacgcctctttctttctaccctgcatctggtctcaggactaactgcacacgtttccctataattaggtagagtgtcaacactaagcacttctcacctcaaactaaactctgactgacttttcccagttagtctcataaaatccttagacacagtattcacccgtcttcaaatgagctgaacttacttaaacatttttttttcagttgaatcagcctatttatgacaagaaaaacttacttgcccaagttgatgctgatccccactgttgcttttgctgttagaacaaaaaagttgagaaagaaatataattctcattttgctaagcattttgaaagtcttttcatcattgttcctgttctatatttagatatttgatatttccagccttatgcacattccactttttcaaatgctccatatcctttaaaaccagcttatcaactgccttccctatataactttttctgacctttctggtccaaactgaccttttcctccttggtgaaataaatattgcaacaagcactttgatactctcatcatcatgaagtgtataaagggggaataagggtcctttgttttctccccttgagttgggtgggctctgtgactcccctaacctactgaatattgctgaagagatattgtgtgggctggcc

SEQ ID NO: 1879280 - DNA, 4001 bp, Homo sapiens
tatcacagggagaatcagtaatccaagcgagttacaggtcgtagcagattcactctcccttgatcccggccacctgcagacaccatgcatgtgttacctacagtgcttcaaggtgtggtattctgatagctttggacagttattccccacctgcccaccaccaataaaacttctcaacaagcttacagcaagtgagaaataataactaaatgcaatgccgttgtgctgactacaagcaaatgtgaaccccacagcctgctaacaaagcctaaggagctatggaaacagggagggcatttggcagcctgtgaattttgaaaaagatttcaggacatctctagtaatcattaacattttagctacaatgtgaggtcgaagtgctggctcagaatgtggcgctgcagcctccaagaatcttgcaacggcagcagtccgggatcatgttcggcctctgatttcctgctagatttactggttctggccacagcagagtatctttatctctctaaccatttttatgtaaaataagattgtttggagccctttcagggccacgccttagaattgctctgagagtaccaagtgcctgatttcttagagtccttaccagtaggagatgttggctgttgatttagctgctgagtcatggggctggggatagtggttttcagtagccaaaaacgttagtgtgttgctggtgaaatcacaaactctgcttgcaaaattttactctttttttttttctttttgctgaatttaatcctaaagttcttgcttcttactcactggaaagcaaatactatggtctcaataggccttaatttttaaccaacgccatggaaacctgtctgtagctaagaggataaaaatgctaggggttaaggaagaaaagcaggttttgcagctgaccagaagaaataattaaattcaagtacatatttgaacacctctttacaaggaaatgaggaaaatcagatgttttagttctcttacagaccagcagtaatgttgaaaaatataaaagtagccgtaacagaaaacgaagtgatcatctcagccctcccttggagtggggggatatattgcggagctgagttttaatggctatcagttcttgatcagaaaagtgaaatcactccaactccttccgtattccacggaatatgacccgtcttgaactttgagaaattccccgggtctgtgtgaaattccagttccaaataattcacatgaatggttcacaagaatccaggtaggtttgatctagttccctagatgggaatgagagggatgtaaaatttgagaggcaacatgacatggactagagagagaatgaattaacactggggaagcacgtgggggcgcgccggacacctagaaggcactcaaaaagtatgaggtagaattaaaggaaagtgaaccttcctttggctgtctcggcctgattctcaccgcagcaaggagaaagggacagggtcaccttggcgggtgccaggcggagcccggccagacgggcgcggctggagggcagcgcgcaggcgcaggcggcgcacgtggccccggacacgcagcgctgcggcggggccagcgccccaaccccggagtggggccgaggcgcgcagcctctcaacgactcgacgccaacggggtctctcggatcgcggcgcgaggcaggaggggcggggcaggagggccgcggcaggcccgggccgccaaagttgtcagcaaggtcgagggccggacgtggggccccagagcgacgctgagtgcgtgcgggactcggagtacgtgacggagccccgagctctcatgcccgccacgccgccccgggccatcccccggagccccggctccgcacaccccagttcggctcaccggtcctatctggggccagagtttcgcccgcaccactacagggccgctggggagtcggggccccccagatctgcccgcctcaagtccgcgggacgtcacccccctttccacgctactgcagccgtcgcagtcccacccctttccgggaggtgagggaatgagtgacggctctcccgacgaatggcgaggcggagctgagggggcgtgccccggaggcgggaagtgggtggggctcgccttagctaggcaggaagtcggcgcgggcggcgcggacagtatctgtgggtacccggagcacggagatctcgccggctttacgttcacctcggtgtctgcagcaccctccgcttcctctcctaggcgacgagacccagtggctaggtaatgattggggaagggctgagcaacgggcaggcggcgcagggcttttctgggcttgtggggctcttttccctccgagggaggcggcgcgcccgcaggcccagcgtggcggggtcgggggcacgtgcaagccgcctccctgggtgggaactggcgcccccgctcaccccgaggcccggggcgggggcgcaatgccaggcgcacgtgctgggcccccgatttctttggaggggaaagtgcagatcaacacgtgattaccgactgcggggccgagtcactgtcagggaaggtcgggagctgcacacgcgagctgcttagcacagcgggagttgggagtggaagttgcttttccatcgtagccaagtgtaaggtttttgggatagacgcagacttagcggcggtggccactcaggccaggcccttcctaaaatggaggagggcggcgatagtggagatggccacgaggctgcggccccctcccccaccggtagcccccgcctctcgcccgcgctcgcggcccgcgcttctgcctagtaagcggtgactcatttaactccgagaaggcacctcttgaggaacctacagcagagccgttagatcattggcaagtcctccaggcgacctcgcccaagttgggcaagagcggctccccggctggccaccaaaaatcgggcctgatctgatttggtttttttttttttttgagttttgctattgttgcccaggctggagtgcaattgcgcgatctcggatctcggttcaccgcaacctcggcctcctgggttcaagcgattctcctacctcagcctcccgagtagctgggattacaggcatgcgccaccacgcccggctaattttgttttttttttgttgttgttgttgttttagtagaggcggtgtttcaccatgttggccaggctggtcttgagctcccgacctcaggtgatccgcccgcctcggcctcccaaagtgctgggattacaggcgtgagccaccgcgctaggccaagaaggatgtattttaagaaagcttcctgttcaatgttcccctgctctgtgcgcttctctgggcggtagggtccattgcttcacttgcctttcaggcccacccgggccctgactgctccattcatttaccgtgtccctaattcggggttccatccaggcagctaaaaaagctgtgaatggtccgggcgcggtggctcacgcctgtaatccgagcactttgggatgccgaggtgggcctcctcaggatcacctgaggtcgggagttagagaccagcctgaccaacgtggtgaaaccccgtctctactgaaaatacaaaaatcgaccaggcgcggtggctcacgcctgtaatcctagcactttgggaggccgaggtgggtggctcacgaggtcaggagatcgagaccatcctactctactaaaccccatctctactaaaaatacaaaaaattagccgggtgtggtggtgggcgcctgtagtcccagctactctggaggcggagcctgcagtgagtcgagatcgtgtcactgcactctagcctgggcgaaagagcgcgactccgtctcaaaaaaaaaaaaaaatcacctgggcgtaatggcaggcgcctgtaatcccacctactcgggaggctgagacaggaggctgaggttgcagtgagccaaaatggcgccattgcactccagtctgggcgacaacagcgaaactccgtctcaaaaaataaaaaaaaaatcacacttta

SEQ ID NO: 1879281 - DNA, 4001 bp, Homo sapiens
ggtacctctctggaaggacatcaaggtctgtagaggcctcacatcaatgcatcaccactcaggtcatctgaagcccagaagacttcatgaatctcactgattctgaggctctctagttgagccagaaagtcccacatcctatcagatctaaatgctacctcctaaaccctcagccaaggtcctcacattcttccttgccttgagtgggggtcccccacaggaatggggacactgccaggctagatgtcatggagaaaggggatgggaggagaagactgcagctctgggaagcaagaaccctctgcagagaggtggacacggtcactctgtcaagggatgcagaggggcttgaggcttcccagaggtgcaaggccccctcccccaggccacagtggctctatcttggtaccaccccctttccttgcctatggtagcaggaatagggtgatcagaaggaactccctgctgggcaagacgggggctggcgtttggtgtgtgctaatcctgggcccgaggtcttcagagggacccgggaaacttcaaggagggaaggcaaagctgtactgcagacgagctcattagccagcaccccccgcacccccctcaacgaggaggagggcgggcagcccagtgagcgtggcggcagaggcggcagagaaaaggctgtcactgtcctttcttccttttggtacaagcgtctccctgagccgacgattctcccgcagtgacacctctcatgggcactaatgagatctgtgtcacagagctaatgcgttctgactggactcttgatagacaccccactccttcaggggagaccacaggccagcccactgcccccctggggcccaggcccccaccctgccacctgccagcccagctctcttgccaaacagttctgggtagcaagctcttgagagtccacttggtttctggccatgccacctgtaccacaagcctcagtgggatccttctccatcccagagcagaggggacaagctcctaggcaggaccacccagccgggcatcagggaaggttccagttactctcctagccagctgaaaccagcagtagtctgtgaggcctccaagttacaatagcaggtgagattttactgacatttcctgtgcagatttccaaaaaagaagggaaggaggtccaggccctgcccttagagaacccaagtgcgtagggccagatcattacctctgacaaattataatagggcccaagtgtgtgttttgaacactcatactgggagggccaggcgagactcccagaggaggtggcccctggaagattagcagaactttcctgggccatgaggtagagaactgaaatcacaaagaaccgtcagggccagaaggaggtcagatgccaacaattgcaggtccctggctcagggtgactgtagcagcagagagggagtggtgatgctgcctttgctttcttcctcagctgctgctaccgaaggtctgttcaggcctgcgtgtttcacttgacgctgagggaaatgagggaagcgagcttgttttcttccacatcgtctctattggtagcgcaaagcccaacaccaaaagggtgcttcatagttccacagtgataacaacacaggctctgcactcagatgggcttgggtttgaatcctggctcctcaaccaactggctatgtgaccttaggcagttcacttcactgagactcagtttcttcatctataaaatgggaatgatgatgcctgccttcattaagactgttgtgaaaactaaattagttaacataaagtgcttccaaataatatgagtgcttactgcccctttgctgaaatgaatgaaggaccactcagcagtcccctgtggaggctgccctccctcagagcctgtggtccaaactaaggatgctgacagagaccatcggcagccctggagtcagcagttctagatgcatgcaggccctactcaccacaacctgctctggcaccatgctgttcaccagtctcccaaggccaaatccgctaccccaggaggaagtgccctcccctgactatgatgtcacgctgacaagcctccagcagcctttctgtccagtgctgcatcacctccagaccctccttggccatccctaaacctgacttcaccctcagtccccagggccaagcccacaactccatttgtgagctctgtggtgacagagcactgtgtctgccattgttaccaatacatttctagcacctaccatggttcctgatatatggtaggtccaaggtagtgtgtactgaatgaaagaaagttttacctggtgtcctacctctatttccagggccgatgcactcttgcttaccttgctgcccctccccttcagcctccttgtctgcagtctctcctcactagtccttcccctacaaactatgagcatcctctgactgaagccaacactgaccatgtaactcccctgcccaaaacactcctacagctttcccacgcacaaccatcctagtagccccctcccctacagcctgagccccttccccacacccgtcaccccaagtctgcctccgtgttctctcagcacctccacaccacccatgccacacccctgtggcactgcaggaggactgagcagaccctggacatggctcagctgtgggatctgcagcacccttgcctggaagccacccaatgctgccttacccccccagccaatacacataccactccccactccaggctggcagctcctcacacagttaattagcaccatgtcactaaggaccagcctgagtggccagtgacaggagctgacctctgacccccagggctgggaagcagtccacgtcaaactcttacagcgcgacccttttagcacgcacagtaactcggggcatcgccagctgaagctcattaaagctgtctctttggtgcgagggccattaacctcactgctcaaaacccacgcctccccttccccgcctctcccagcccaattaatgccctgcatcctccctcccttccaagcaccctcacccacacctcagagccagcctggaggtggcagggcagccctcttcattcaaagactacaaagaccaagtgtcaagaagcccagtgtcctggggagccgctggtgctggcaacagagtagggagccccttcagccccatggtgtgctcagcactgcatgaacactttccccaggggactcactgagccttcccaataacccagagaagcaggtggcattgtccttcatctaaggtcacagggttctgggtggaagaaccagaactacttctggctccaaagcccttactccattgtcactcagagccttgggctgccccatagggcccagccagataaagaaaccttctctgaaaaaggaagggacacctcacaggtcctaacctagggtcaacaggtgaacagataacaggggcattgctgagtctcaagaagcacaaagagtgggaacgaggaaccccttctcacacacacaccctgggatagatgatagaaggggcacccagataaagtatatgtggggtgcattaacccaggctgtccctagcccccagccagttcttccttccctggaccaatgcaagtcttctcactggtcctctttggttcctccctttcccatcactctttcattgattcatttactcacctactcattcattcaaccacccatatgcatttattgagcacctactaagaactagttttgtgcaacacaaactgcctcattgattctgaatcagggctttgatcacgtcattctctcactcacaaacctcctatgtctcctcaaaactgcaggaaaagtccacaccctttaaccaggcattcaaggcctgcttatatctctgtttattttctagctgcttcctaacccaaatttgccactctagtcatgggaagcttcttgtaggtgtctgaacttgtcctcaacacactgggtttctcatgcccacaggcctttctactgagtcctcctatc

SEQ ID NO: 1879282 - DNA, 4001 bp, Homo sapiens
gactacaagcttcactatcatttctgagtgagttttaattttcagatgatgttagtattgtttggcttcttatagtagtcttttggttcagtacctgctaattgcttattgtttattattaatattatagactatatttttataccctgtggactacttggaaaaagctttgatgtcttagcactgatggaatgaagcttcatgtaattgccaaataaatttatatgcaaaacctaaaacattgcttatttgaactgtctagatatacagtattcacattattatagtaaaatgatatttaactcatgtattatgtttgtcaagtttctaaaatgaaaacttgatagtaaatccaactattacatcattgtcttgagtcgatataatctctaaactcttattgtaaaaaacttttgttatattggatgaatgaagaaaactgagttcaaatatttttaaaagagaatatatttgaactatattattcccctttttcatttctgtttgtcgtcctaatattgttaagtcacaattttccctccaaaaccgatttaaggcaggtatttcactattcgtttccaaatacagaggggtcagtaagtaattaccccttagcagttcactttaaactaagcaagaaactgcattccagttctgttttctcaaagtaaatccgttatatccgttgtaacagaatatcgggggaggaggaaggaaggaaggaaggaaggaagtaaagaaagaaggaaggaaaaggaagggaagggaagggaaaaagaagggaaaggaaaggaaggaaggaaggaaaaaaggacagaaaggggggaaaaaggaaagaaaggaagaaagggaaggaaagaagttagtttcagaaatactatgttcttaccccagaagacagatctaagtctagttttatttgaaataacttttgttaacaaggaggtgatataatggtaatgtcaggtatttatggaattcacgatatgggtaatcagatgataagcaagggatgtagaaagggaattgtcagaaactaaagacaaatttaattggctttacactttggcctagaatcataccacactgggtgatgacacttagaaatgcccatcaccatcatcatcatcatcatcatcatcatcatcattgctgttattattaagtgcctagatacttgctaataagtggaagatgaagatgctctctctatattatttcatttaatcctctcaagaaccattggatagataactctttttgacagacagataaaccaaggcgttggcttaggccaaagcatttactcaatgtgatatggttagtatgtaatatgagacttgaatttaggtctctgtgatcctgaagtctatgctagtaaccaactacagataacaggaattcaggaatttctacaatagcttttactgtcaaatttataggaatcgtgtaatagcttttttgcttctgtccccatggagtgaatattggggtcaaatcactaaaatctactaatggatgaaatgctcatagtttagtcagctctagtagttttagcaatttagaaaagcagtgatgattggtgtcataaaagccatagcacacgttcctagaagggaaaatgcaactaaactgtttttttcaattatttcattgcatgtgcatttggcaaatctgtcactgctcctggctgctctctctctctttttttaatgcaagtatttctctgcatggatttctttacttcatgatcttctgttgtgtattgtgttttctttttgaaatcatagcttgggagttgtttatgcttcagagatttttaaaccaaggctaccttttaatgtaaatgcacttaaattgaccccacttatttaaatgatgtgaaatagctcagcaatgttcccatgacctgtttttataccttttgatattttatgtgacctccaataagctggacagataataacagaacccttggcattgggctaccactgccactgtgatgctgagtctggtgtcagcagtgaagatgagggtgggaagccaccgaggaagctggaggttgacacaagtggcagtaagggcacatcattacctaggaagaaccttcagaaatcctctgcaaaagacggcctgtttccacccttcctattcttgtttcttccttctgccactttttttttttctttcaactaaggaatagaatggccagaagtagttgacaggccctaaggagagcttcacagctaacatcaggtataaatttattattattttttgaatatattgatgtctaggattaaataaaagaacattagattatacaatactggtaggaattttcagatcagtcttctttcaatagcctgcctcccagatagttgaacagctaggtgaatttgccttaactgacccaactggagagatggagaaccatggtacatttcacagtgattcatttgaccttttttttcttttttttttttttaactaggaaaggattcattgccattagcctatgtcctggctcttggtggtaagtattccatctgcaagaggtccaattagagtgatccaacagaccatgactcataaatctggtcaaacttcccatgttcttgaaatcactaggctttctagtatttattgaatgacttttaagaagtgtgcttatttgaatatatttatgtgtatggtggcaggaaaaggtattcatttattcatcatatggtcacattatcccaccttcaattttagtaattgtcatcaagcactgtgaggcatttgagattttacccttctttcaagcaacaacttagccagccacagttttatggatcatggcagaagacataagacacctgagtcagagaaaaaggactttattgttcatagcaaatagcagtagccagagtacctgtatttatgctggttccctgagctccatttctcacttggcaacatgaagagggccaggtaacacttgattgtgcagcgggctgacttacaggagaggcaccatgatcttagagaacccatatcttttataatgggcattcaactagaggaactcaggtgcaccttcccaaatatttattctgcaatgcagagatactggttgttattgatcaaattgtattcaagcaagaaaatctaattatttgtaagcaatgaaaggtgtgcacaaggaagattattagggctttctttatgccaggcactatgctaagcattttacataaattatctcatttactgtcaaaggattctgtgagtacagcattgctattcccatttcatgaataagaaaatgaaagattagagaggtgttatttcccagtttatacaattagtaaatggcagagctggcgttttttacccaggttagtctgacttccaagtacacactcattccacttcatcaaattgccattgtttgtgaatattgtttgctctcttatattaaatattttttcaaaagcccatggggttaccataaaaaaaagtcatgtttttatactaatatttcttagaaaagcttcaattactctttctcccttgcttgaggaacgtcatgtctgacacccttatagtgttgtgttcatataacatctcagctggatgccattagcactttctctcctagaatttaggcataatatattactacatggtggctaggcaattttatttccctgtttccctgaatgttctttaattaatccataaatttagaaaccagattagaaaaacagaagactttctttaaatgtttttataactgactttttagtatactttcatgcaggaatttgaatagcaacagatacactattaaagagacttgacacacgttattgtttcctattgtttcaatttaattttgtttcaaatacggtaataatctgtaatgaaataaaatggaccatattctctcaggtgaattggctatatgttctgtgaacaaatatttgattctacattttgctttggaagctttt

SEQ ID NO: 1879283 - DNA, 4001 bp, Homo sapiens
ctgtccagcttccttattgagattcagtgtgtatggtactttactggaaattgttaaaacctttctaggtattacataaaccagctgtggctaccgtaagtttctagactgcgaatctgtagcaccctgtcgtcacactgcctagatctcccagaatctcttgccaactttgttcacccatttcccatcttctgctcccttcacctttttcagaggactgccctggactactggtggtgcttcaccctcagactcaaagagcctggaaatgccagagagtttacattccccctagggtggcccatagctaatgtctgacttttccgaagtatgaaagcccagctcctgcctaatataaattacatcctaatatagcttacatgtcagaagtgcccatgggatcaggttgagattgagatggggcttgaaatatctcccttgattgatttctgcccttccttcccttgcttctgctactcccttaagagttctcctggagcacatcttaaatacttttctcacacatgaatcttcatctcagcttctgcttctgcagagctcaaaataagataaaatctccatctatgtacacacacacatgcaagtgtcacctaaaaatatttgtctatgtactggccaaatacacagatcttactgtgtccatataccaagatatactaggatggtggatagtacagtagacaaaaatttaagtttcatgcacacagaatactgtggtgatagaatgaaataaatttttttaaaaaaagcttttgttgaagagacaaaggattattcatttttttctataacaaagtgaatatttataaagcgttttcaataaaaaatggctttcaaaaaacaacaaaaaaacagggatggttgatagttaaatgtgatctcttgaaaatttctatatactcatatattccattgatttgataggttttccttatcctaacaatgatttagaccagggatctaatccccgggccacggactggtacagggtccatggcctattaggaaccaggctgcacagcaggaggtgagtggtggggaagccagcgaagttttatctgtatttacagccacttcccatcccctatcgctggcattactgcctgaggtccatctcctgttagatcagtggaaacattagatcctcataggagcagaaaccctattgtgagctgcacatgccagggttctaggttgtgagctccttatgagaatctaatgcctgatggtctgccactgtctcgcattatctccaaatctgaccgtccagatgcaggaaaacaagctcagggctcccactgattctatattattgtcagttgtataattacttcattatatattacaatgtaataataatggaaataacgtgcacaataaatgtaatgcacttgaatcatcccaaaaccatccccactcaaccccagtccatggaaaagttgtcttccatgaaaccactccctggtataaaaaagattggggaccactgagtagactatatgggaaaaggatatcaggtctatattaaactatgttttaaaatttttagtattattaattgctaacataatttttacaattaaaccaattgctttacagaacaacaacaatgtcatcacttttattttttgtagatatgaaaactgcttcatcaacctcatccagaagtcacccttattctagtgacagtgaggatgaatctgcagtgggggacagggaagcccacactgacagcagcacagatgaaagtgccagaaggtcatcttctcaggaactgagtgaaaatgataagccaagaaagtctcaccttccaattgaggaatccttagaaattgaaattgaagaccaagaaataacaaaagcagatgtggagaccaagccgatgccaatagacgaaagctttgagaatgttcttaaagaaggaacggagaaaggaacccaagagattgcagagggtttatctgagaagtccgggaaacatgtttctgcagaagaaaaggaaaaggataagagtaagctttgggaagaaagcactgctcaggtgaaggacaaaaaggcaggtctccctgggttggaggaaggtggtaagtatggccgttgagttgagctgccatcatcctcatgcatggaagctgattttggtcattgcactatgccaaagcttgggaaatactactgtgacaatgctttagggattcaagattttttgctgtgtctctctttgtcacataatcatacatgtattttcagtttgctgtttgccttctcttgcacttaaaaaattactcgataatttctatccagcctgtttcctattttcggtaaattccctcctatgggaattccatctcaggaatgaaataaagcacagtatgtgtctgaaggcaaggatgtgtgtggcttttagagattatttaatactagaaatactatttgtttttagctatatatggagtttcagatatatagctaatgttaataggtgcttactacgttccaggcatggttctaaacacttagatatattaactcatcacgtcctcacaaaaatccagtctccctctaagttacattctattatcatcatctcttttttacagatgaaaaatgaaatgtagcttccaaaggttaaataagttaccaaagattacacagctaaaagaggcattcctaggatatgaattcaggcagagttgttccagaacttataaatattgcctattgcgtctgtgtaatatgaatttagatttagataatagtgtaaaattttcttacaagattccaaacttccctttgagttctctgaaactgagttactttctgatccctggggctcctgggtgtgtaagattgttcatttgacatggaaacagtaaggagtgtcaggataatcaggccccagaccttagacacatggaaggtctgatgcttttctcaagttgaggagcacagtggaagggctgaggggtgtcctgtggagagctggattgcacctgcccgatgcttgcctctcacctagcctcctgtgccctggaactggttcacagtcctttggttgctctctctcatctgtctcccctgtcaatgcaggagccattcttgattttaagataaaatttattttcacattttaatattactaaaattcagctgcgttttaaaagcatatgaatgcttttagcgtctatgttacttttagacccttaaaaactactgttaaaccactggggtctactaggaattgaagatgtcgaatagttatctattacttcaaccaatattattaatcttctactatgcacaaggcaccatagtcaataaaaaatgtgtaagacagagtttctctcataacttgctgagtggaagccttggcacaccaccagacaaaggttagtagtcccatgtaaaatagagaaggtaaaaaatgctatgtggcttcaaaggagagaagtcctgtttgttaaaagacaccttgaaagttttcacgaagaacgtatttgagaaactttaaaggttaaatacaattttgaaggtgggatacaggaggataaaggtgttttagatagtggagtatagcaatgcatatgacctttgaataagttaccaaaaataactctagaacagagtttgacaaactttggcccaggggccaaaccactactattttgtcttgttttctaaatagcctgcaagccaagaatgatttttgtatttttaaatagcccacaaaatcctaagaatttacaaactgggactttagagataaagttcataaacctctgccctagaataaaaatgcaaagaccctgaacatcttcaaaaggatttttgtcatatataaatcaagattctagctcaaatatatttgaaacccttttataaaataattcaaatctttgatcttgaatttcattatgaaattttcatacatataaggtatcatctagaaaatgtatacaagctgacaagctgctaatcaa

SEQ ID NO: 1879284 - DNA, 4001 bp, Homo sapiens
tcagtccaggccatctggccactgggtcggcaccagcgcccaatcacacacagcacctggcatggcctgggagggggtcagggttccccagccccggagccctggagggcgttccacagcacagccagtcttcctaacacctgggatccagcccacggagggatcgtggcttctcagtgaggaaggcttaggggccggcggtccccaccagcacttgcataaggcgggctcagcgtcttccagttcacacttgggccatattggtcccgccatcaggggcacctgcccctctcaagacctgtccttctcctctgcttgaagtgagggggtgggacaggtgcatcagaatcaccgccatgagggtggggacatgtcccaggtgtggctcccaggccccaacctggagagtctaactcaggaatctgggacagcctccaagaggtgttgacaggagccagttggaaccctctactcaagggtccctgggtccctcctagtctaaatcccactgactttgacatgatccaaaccctagtttgtttggaagtagtgaattcataccaaagcagccaccaagaaggcctggcagggctggttgtgaagcaccccttcctccgggtgctgcctgttgggtctcccactaaccaaaccagggagccccttcttagcaaggatggaaccaggcccagctcccttgtcctgggctgaggggaccactggagcccggcctggtgggtcctagggccaccctacatccacgccagtgtgcctgggcccaagaggctgcagctgtggctaccttgccacatggccatatggccagaactggcctccagcttgctccctggtggccaggggccctgcaggcacacccagaaactgaccagtggtggggacaggccagaccctctcacctcgtagctgctctcgtcctgaggctgggtccacattcacatttccatctcaggctcccacttagactaacgagggtcacccatcagagtaacccactccccgctcagacccctgtggcatctggcaccctaccctctcagacagggcctgggcagcttttcccaggatccctgcctccccaggcgcacctaagacctgagtctcttcctccctccccaagactcacacatgccacctgctctgttcgaccccccaccccacccgggggagctcccagaccactccccaggaggtttgggatccccatgcttcccttgatagtgggaatgggctgaggggccacaggagataacaagttgctttctggatggcctccagccaggggctctggggtcaggaggtggggtgggggttggggaggggcctttctcccttaactgcttggtaactaatggggttccctttctgcctgtttgactagggcctaggaggcgctcctgcccttgctgcccccaactccattctgaacagtcttgcaaatgagcacagcctgagccagagagagcccctgcggcagaagcagcccaaggggaacaggtgaccttggcctgtgtgcccagcctcccaggtccagctgcgtgcggccgggcagctgaggatgttgggagcacctgcttgcagggctctgggggcagccccagaaggggttttccaggaggggaagatttcatgttgagtgggagccatttctctggcctggccctctggccccaggatggctactggagggatcattgccctggagtgccagagaagtgtggaaaatcccaggcatcccccaaagccctggcccggcccacccagaggaccccttaagaggagtgatcttactcagggtagtgcctgacgagaagcctcagggaggggaagtctcctttggctgcagcgtagtggataggcagggcgcccatgtctgtggccgcggtgggatccccaccgccatgatgcaagagccagttcaccaccttggggtggccaaagcgggcagtcagatgcaagactgtgggaccagaattgtctttgtcctgtgggaggagagcgggttcaagtcctaaagcctgttgctgccccgcccctggcttgggccgctcccagactcccacaggcctggaaggtagctctgtgctctctgtcttccctggaagaattggccaggcctcactcagcagtggtttttttgggtcaagcggatcctgggtttgaatcctgcttctgtccttgggcaactaattggccctctctgaaccgtacgtagccaataggcagcaccgtgcagggttttcagaggctgcaggtcctgactgcgagctgcctacacgacaggcacctggttgtcatggcaggagactggctccaggcccagggccacagccctgactcccaggggctcagggaatgcctgaaggagtgacacagggttactgggctgagcagggccaggaagggtggctgtggggctgtaccaagctagcatcaggattggggggcagcccctgcatccaacacttgccccctctctctccacccttcctaggtgtcacgtgggaacagagacctccaccttggtgcgcctccagcaacccaacctcagtgccttagtcaggcaataagggccctggggactggtttgggtaggaaggacacaccaaatgagcaggaggaatttccccatagaggcgaagagaatccagagatggtgagggagaaaagcacataagaaattaaaaacaaatgcaaacaaacaaggttgaaacagggctggagggtgtgaatgtggtgattcttctcttcctgaggagacagggtcctgcgagttttgtcacaagtcaggaagctccatcagctctgcaacacctgagtcctggatggcgggagatgatggcttaagatatctgggcgcaaagcctgaggccctgcctgtaactccgactccctcaagggcagctgagagggaggactcagggcactggggaaagtcagcagacccagtcacagaattagaataaggtggagctacgcagggaagacaacaccaactatttcctttttcttattttattttattttatttatttattttttttgagatggagtctcgctctgtcgcccaggctggagtgaagtggtgcgatctcggctcactgcaagctccacctcctgggttcacgcctttctcctgcctcagcctcccgagtggctgggactacaggcacctgccaccgcgcctggataatttttttatttttgtatttttagtagagacggggtttcaccatgttagccaggatggtctcgatctcctgacctcatgatctgcccacctcagcctcccaaagtgctgagatcacaggcgtgagccaccgtgccctgccaacaccaactatttcattggcagtagaagaatcacactctgcagctactgagaggtggaggtgaagccaccctgccgagcagccaacctcactttttggttattatccttgtgccgatgctgccggacaaactctctctacaaatctcagcatgtggaagaaacagaggcaggaacaattgcccagcacctttctatttctcgaggacactcttgaagttattcatcaatgttttaattaaagcagatcttatcgcttttcctcaaatgggaacttgttcacttttagactttgttattgttcattttgggcttatctttggtcttttcctgtgctcttaaaagggtgcaaatcaaaatctgagttatgataatccacttatcatatgactaattacttcagtacaaggagttcctgcctgtctgtccaatatgaatcttactacgtcccaatgtcacattggcttcttttccttctcggtggcagcatttggagcttttacttaacttagggtcaatttcgacctctgaattttccacccctcccccacagctgttgctgggtcatgctgttttcttttatctctataaatattgtgacttgtaattgtcacttataaattcattctggctatactgaatcattcccccatta

SEQ ID NO: 1879285 - DNA, 4001 bp, Homo sapiens; identical to SEQ ID NO: 676

SEQ ID NO: 1879286 - DNA, 4001 bp, Homo sapiens; identical to SEQ ID NO: 677

SEQ ID NO: 1879287 - DNA, 4001 bp, Homo sapiens
acgaagtttttctctgtcacccaggctggagtgcagtggcaccatctctgcttactacaacctccacctcccgggttcaagtgattctcctgcctcagcctccccagtagctggaattacaggtgcccgccaccacacctggctaatttttgtatttctagtagagacggggtttcaccatgttggccaggctggtctcgaattcctgacctcaagtgatcgcccacctcagcctcccaaagtgctgggattacaggcatgagccactgcgcccagcaagcacctctcatttgttgtgccctggggatcccaactgcctggcctcagagggtgggttccagggtcatggtcaggacgaaggaagagattaaagctagatagcaggacaaaagcccttctcagagggccaagagtcactggacaaggggaggccaggtgggaaccatgcagtctgccctctcagtcatcatctgtggggctgatctgtctggagatatgagctgagcaaaatgtccttgggagaaagactggcagtttcatctttaaatggggtggccacaggcacagaccaggacttacccgatttttttccccttgatggcagaggcaattccagtgtagctgcaaaacattccgacccagagcccagctcagcatgtgaagggaggggcctgggtgctaggaggcttgagcacccaggcgatgtgctcccccagggcgcagcccacaaaaataggagctgcttcaacattccctgaccctctgctgcccacagcatagtctgatctctttgactgcttttcaagactctaactctccatggcttccccttctagcccttccacacgtgcatattgctgcaggcaaagtcagccgcttacaaacaatcttacagccttctagacgccacatcatcttggcatgtctggccctcaaaaccacgctcaaatgctgcctcctccaggaatccttcccttcccttgccctgcctctgaaagtcaagagtataagcttttaataaatctctgttaaagaaaatgtcagcttcctcttgtaagctttgaccctctcttacagacctgatcactttctgactaactcatttgtgtgtctaagagcacagcaggggcaggggctgggtccaagagtggtctatgtccccagaataggggccatggtgtgggtacacagagaggggttgagagatgggtggatgcatgcatgcatatacgatgaacggatggatggatggatggatggatggatggatggatggatggatggatggatggagagatacaaatgtggattgatggatggatacacaaatggatggatggaaagatggatggataaatggttggaaggaagagtatgtgtaagtttttcaagggctgagatatttgtctcttttgttcaccgaagtaacccaagtagctagtacccaaggagctgttgtgtctgacacagtaaatagtcaatagaaatcttttaaataaatagtggatgaatggtaaaattgattgatggatagagactgagatgatgaccatgtgggtgattgaatggatgaaggacagatagatacatggacagattgatgagtaagagaaggggtatgtggatggatagctgtatagattaatgaattaatgagctgatgagttaatgagtggaaggtctattctactgccacctggaaaaatatggtatgtttagcatggctactgcaggagttatttgaagccctcctacccacttcccctagtactgagttgggtagatgaaagttgatgggaggagcagacccctctacttccccaccctctagttcccttaggcaggtccgagcccaccccaccaccaccatcaatgagtacctgaggcgggaacctgtggtccagaggccataaacaccacagaagctggctggtatgcagatgctgtcacctgtgtcagtacccatgcctaggatggaccccctttctgccagcagagcccctcaccccctgaggagcccccacatgtcttctttaagttcagtgggctcaacatctggccatagatgggagttgccgcattcaaagctaagggaagcagaagaaaatgagctgagggtgaaagcctcactcggcagacctctccccatatgggggccaaccaccctccagagtcaaccccagggcttcctgggctccatgagctcctccctaaggctgaggcttcctgggctcccttccagctggggtgaggggctgctgctgcaagaaagaccaagatcagacaccagccatgactcctaatatcaggaccaaagagcccacagctctgccatcagaactgagaacatgttcctcacgaaacacagatgcactacaggctgagtagagaagggagagaataagcgatggggagaacaatcaaagagagaagcctgggtagaaatagaacaatttgagagagaaactgggatagaaaaagagtgtagctttacagaaccttggagcccgaagggcccttacagactgtggagtccatccacatgttctgtgataaagaaactcagccccggggacagaaggggctggcccaagaaccctggtctttgaagtctgtatgactagccccctcctcaccctctgccctgaatcaggacttcaaagagctgtttcagccctgggcttagcccagcccccgaccccagctagcccgcttcagagacctgagcagcgtcagtgggatgttggtcttaacaaaggggatggctccttgggccttgagcactttcataatgaccccgtccttggtcgcaggcttctccaggaactaggccaggcggcatgcacagtcatggccctgcagggaaggaacattgcctccagccatgggggtcagggtggaaccagccagctggctgattttcagccccattccacccccctcacacacactctcacacccctggggacacaagcgcagcacttcacggatggcaaaagagtgtggtggctgagaatttggggtttggaacccaaattctgggtataaacctcagtttgccgcttcgtagctgtgcagttttaaatgactcacccattgtcacacactgagccccccagtgtcacacaccaagctccaggctggtggcacaagcgtgcatatgcacattcgtgtgcatgtacaccccaggctcaccatgctgtcataggtgtccttgaggctcatggggaccccatagagaaggcctctctcactcttcttaagcttctttaatgcctgcagttcctcctcacattcccccaggaaatccatcaggcagttcacctcctggtgcaccttcagtgcctgcacaacagtgaagacagcagacaacagccccaggtgaggccaggaccaaagcagggcactcggttgccccagcccctcctgccaccctgaggtaactgtggcatgtgccacctcccaagtcagtggcagagttacacctgcccctcagctcctctgagtaaaacaatgacaagtgacatcccccactccagcccagagccccgggcttggatcctgtgccctggccaccacctgctttaagtagctacagaggatgctctccagactcagctcttcggtccgaagctgctgggccagctctgccaggggcagctccaggattggcttggggtccagatctggctcctgcagaaatgagatggagtaggcagatatccaagatggacccgctaaggcccactcccacacactccacatcacaccccagactcccctatgcacagctgcacacacgcccatgtctctcggtacatgttccggcactcatgcttagcactaaaaacatctgttgtgtctccaggttgtcatgaaaaccctccaagggcacgatgttctcctctgcctctgcccccagtggccagcccagggcctggcgtggagaagggcctgccccttcatgctgctcttcagaagggtcacaactggagtggggg

SEQ ID NO: 1879288 - DNA, 4001 bp, Homo sapiens
gacagggtgggttaaacagcagaaatgtatttctcacagttctggaggctagaagtcctagatcatgtgccagcatggtcaggctcaggtgagggccctctgccaggttgcagcctgccaacttcttgtatctcacagggcaggaagagctagagaactctctggggtcccttttataagagcactaatcccatttatgagggctccaccctcatgacctaattacctcccaaaggccccacctcctaataccatcacactgggggctaggatttcaacaaatgcatttgggggtacacaaacattcagtctgtaacacttaccttagttaccacagcctcaaacttggtagtcaccctagacaccagcaaacaggttctctcaaccctatctcctgaagagcttttaaaaaaagtcccctccctcaccatgccctcaaccttttttttttttttttttttgagacggagtctggctctgtcacccaggctggagtgcaatggcacaatcttggctcactacaacctctgcctcctgggttcaagcaattcttctgcctcagcctcccaagtagctgggattagaggcatgcgccatcatgcctggctaattttgtatttttagtagggacggctttcaccatgttggtcaggctggtctcgaactcctgacctcggttgatccactggcctcgacctcccaaagtgctgggattacaggtgtgagccaccgcgcctggctaggtatatttaaatataccacactttctgtgttatttcctcttcctggaagatctccctgaaggccaggctaggtggctgtctcagaattctgagaatatttctaacattagatgttcaagtctccacagacgctaaagtccctgaaggtggtgttgtagtcttcgttatagccagagtacttttagcactctgcctaacacaaaaaggactgtttactttagctgaactttgcatacattcaatgctttgtatatccttccctttcaacaaaaccctactcaagcttgaattctgtgaagctttccctggcctctccaataattaggagctctgactcctttactttactcaccgcccctgaattgagcaagttatattttaatagtgtatacaacgaattgcagtgaatgttaacacgttcaccttttattgctaacagcaatgctacccgtgcttccaggctctatccaaactcactgcttccagataatagctggctggtccctagggagaattctttaactctcagcatttgatgctcaattcagtacctcctcatattcagcactgtagcttacaagtgctctccgggttcccttcctctcctccccgacagactaaactgctagggtttgggaccgcagtcctcctctcctctgactcccacctctctgcagcatttggcgctgcactttgcaaacgcagctctaaagcatctccgggaagctcctgcacagaccaaagcccccccgctccctttttttttttgagacagagtctcctctctcgcccaggctggagtgcggtggcgcgatcttactgcagcctccgcctcccgggttcaagcaattctctgcctcagcctcccgagtagctgggattataggcgcccgccaccacgccctgctaatttttttttttttttgtatttttagtacagacggggtttcaccttcttggccaggctggtcttgaactcctgacctcgtgatccaccgcctcggcctcccaaagtgctgggattccaggcatgagccaccgcgcccggcccaaagccctttaaagacaagtctccgcttgcggattcgcccgccaggtgacaaggcttcgtgggccaggactccgcccgctccccgtgggctggggcgacccaggccaggagggtacacgtgggaccggggggtaggggaattgctgggccggccttttccccctgcctcccccggttcctctgtcctggaggccgtaggagatgcgcaggacgcccgcacatgcgcagtgtcactctcgagctccagactcgagcgcggcgggcaggaggcccaggcggccccgggctcccgagactgggctgccggctcaggggcggggcacagcgctgccctcgcccgctcattggctcgcgtgctgacggacaggtggggcggacagccggcgaaagatctgaggagccgctggactggaaactgctactgggctaaaaatacttaagtaaataaatgaaagcctgtggaggaggagaggaaggagaggcgggcgtgggtttgggagcaactgaggctccgcttgcccctggctggcgcaggatgatggttcttggttcactctctccgtctccgctagaactggagcggagaagtctgctttctggaaggtcgtcctggcggcggagtcacacaggacttgttcccctgggactcttcattccgagtcttcattccgattctttcagatccagccttgaggcctcgggttcctgggagcagctttgtagggcttgagagtcctagtcaccgccaccctcgggtccagctcaggttgggggctacagctccgtccctccggcacttgggacgacactctttgaactggcctcccagcgtcccgccttgctggctgccgactaaacttttttttttctttttgagactgggtctcgcaggttgaagtgcagtgccgagaccatagctctttgggtggctgggattacaggcgcgcgccacctccccggctctccgactagacattattttattttattttatttttgaggcacagtctcgctgtgtcggccaggctgagtgcagtggtgcgatactggctcactgcaacctccacctcccaggttcaagtgattctcgtgcctcagcctcccgagtagtttggattataggtgggcaccaccacgcctggctaattcagtaaagatggggtttcaccatgttggtcgggctgatctcgaactcctaacctcaagtgatccgcccgcctcggccttccaaaatgctgggattacagcgtgagccagtgcgtccggcctagacattcttaaaaggcaaattggaacacatcctccgcttgaaaacgccagtgccccctgggccagggcaccaagatccacttaaaaccctgcgggtgaggcattagtgatgagctcctgcttatcattccagccatatcagagaggaaggccaccaaagagtcaggtcctttcagccttgacccttgtgcgcactctgcccgctcacaccctctacttctttactggagaaactctgacctcaacgcccctcctgtgcacctgtgctgcccccagccccactcccacctcgggacgttcctgtcatgctcagagcacgctgggggccctgtaccacaacacttgtcacacctgctaggctcagggacagtgaacaacctcagggcaggggctgtgtgtgttctggatgtgtatccccaagtctagcagagtgtgcatagataggggttcaataaatggatattggccaggcacagtggctcacgcctgtaatcccagcactttgggagcctggccaacatggtgaaaacccgtctctactaaaaatacaaaaattagctgggtgtgctggtgcacgcctgtaatcccagctactcgggaggctgaggcaggagaatcgcttgaacccaggagggttgcaagttgcagtgagccaagatcgtgccactgcacttcagcctgggcgatagagcgagactgtgtctcaagaaaaaaaaaaaaaggatattgaatgaatgaaggcatgaattctaaggatcaaaagtgaagctttaaaaatgttaggctgggctgtggcattttgggggctcaccaaggccaagaaccatatcttctttgagtcctgatagctagctaacaaggtggcactcctttcaaaatatgtgaataaattcaagatggcaaagtgacgtcaagctgtttagttatggtcgcatccc

SEQ ID NO: 1879289 - DNA, 4001 bp, Homo sapiens
tttatagcactaaatgcccacaagagacctctgcctgagaacgtgggtttcagcctaagagttgtaatatgtgtgcccattcacaggtgctgcatcagagtcccaggtgggaagaaggcaagcatacacaaaaatggtaaaaggcagaaaggagcccagtctcgttctttttaagaagttttcctaagaatctccacccagcgacttgctctcacatcttcttggccagcactggaccacacaactccttctagatacagaggagtcctaggattctatgagaaagaaggggagggtgggcaaagggcagccagctgtgcagcatctgctggagacacctaacccttggtggaggggttgtggtgctgggagaaggctttctggacggtgtgacagcagagataaacttaaaggccaagtaggagttaccctggtgaagcagggcagggttacaagcattccagcaacatgaagcagcaggagtgttttaattaaaagaaggcagttgctgtaaccaactataaacaaataaaggcttaaacacaatggaagtttatttctcactaagggaacatccaaatccatgatactttaagtcagggacccaggttcctcccatctatggttctgccatcactaatctgggtcttccacaattgccgtgctccttggaggtgggaagagcaggcggaggacacgtgggaggttttagggacaagcctggaggcagcatgcgtcactcccatgcagagtccattggccaatgctggctccgatggccacatctcactgcaggggcagctgggaaatacagtctggctgtctacccaggaggaagagcagccagtttctgctgctgatgatcaggaggtggagaaaatgttcagtcaggcagggagtgggaatagacaagaccacaagcagcttggtgcctctgaaagggagaggggtggaggggagactagagaggtgggtaggaatactggattccactgaccacgtgctggatgtcacgcttagccctcctgctctgtgccgggttaggcacctggtgttttacgtacataatctcaattctgtgagggcatccgacctgtgggaaaagagctgtttgtttcaaatgccagtcctgcttcctaacaagtgtttagagcttaatcgtgttcaaaatacatatacaatgtttaatacttacaagaatttggtggggaaaatattaccatctttcccttttgtgattggagaaaaatgaggctttgaagggtttaagaacttgcccaaggtcggccaggtgcagtggctcatgtctataatcccaacactttgggaggctgaggtgggaggatcgcttgaggccaggagttcaagaccagcctgagcaacatagtgagactttgtctctataaaaaataaataaataaataaaaacaacttgtccaaggtcagacaggcagcctcttagtaagcacacatatcctctatattatactacctctcatggaggatctcctgtgttctacaaatagtctggacttgagccagaatgtgttataatcctgggatcacggccagtgggcttagaagaagccatctctttctcatgccaagatgaggctcccccagatttgctcagacttacctatagtcagcagcatcgggggtcaggaaagacttcacgaagccataaatgcatccttctcggggcagcacctggctctcccaggtgagagaggactccattttcacaggcaggcgtgggagcttcagcacccatctctgggcccagaatgacccactggagaccttacagctctcctgtcacccccaattcctgccccctctgcagccttggaggagaatggagctgaagggcctgccctctgtagggtgagaaagggaggctaaagcctggtgcccactgccctggctgctccgcattgcaggagctgcgcccttcctttcctggcacagggtccacagccccgaaaccccgttgtgtgggagctgggcacagggcagcaggactaatccttggaacagctcagggaggattatcccagccactgtcagcagcggtgcagctggctcattcccatatagggggaggccagagccaggggcctgccacaagttggaaggctggggaaggggaggccagcagaggtgtcctggctgtgggtggctctgagggggctctcaggggtggggctaaatctcaggggcaggattatgtaaatcaaaccaattctagccacagatttaaagtttggaaaaaaaaaaaaacccagcctggcggaaagaatttaaattataaaaacttagaagtatggaatgtgaaatcatcctgtaggtgcttatttaacaacgaaatcatcccgacacaatgagccatatgtgaaaagtcatccttccccaacacatcccccaacaggcactcctcaagcctctcccacccaagtgctggcatcctccctgtcctgcttcacctgagacaccccttgtctcattagacatgcaactacgggaggggtgacaggaagacaagacactatttcctcaggcccagtttggtgtggggagaaagcctcctgatcctgaaagcaagaatttgaccagagcagaagtaatcagtatgcagattgattctgtggtatgttaatgtttatgcatagattatgaggaccaggtgaaaagtgggccaggggagccagatgtgtgtgtgagtcatgggtggctgagatgaggacaggagggaaactggtttggagggtgctggcgatggggtgggggtgccaggaggaagggaggctagttgtttgaatgtctgcatgaaaaagcggacgacagcggggtctgggtgaattcgggcaaccatttggaccgtggagaaaactgcctgcgtgcggctgaggacctgcactattaatttgttttttagctaaggcaaagataaatataaaaactgatactccacccagttaccagaaaacatttaggtatgtgtgagacaacttgggtatgtgaacctaccttttcaatgtaaattcagtgaaatctaagtgcagatcccatatttccaataaaaaggtaacatccaaactcagatgtcctatgagtataaaatacacaaagatcttctggacttagtatgaaaagggattttttttttgtcaggtacctcactagttatttttaaaataggattgcatgttgaaatgataatcttttggatatattgggttaaataaatttattattaaagttaatttcacttaaaaatgtttaatgtagctactagaaattttaaaattaagcatgttgctcaccttatgtttctattggacggctctctctagatacaaaggctgccaagagggacctcactctagcttcagggagaagagaggaattagcaaggccaagcagaggctcctgagggcagggccaagggcggcttggtggggtggggatgggatgcacagagataactccaacccttaagaaggtgtttcctagagcaggctgtgacctgtcagtttatatactgaggcttaggagcctcttggatgcccccagatctgcacccctgaattgccctgtgcccctgccgtctttgttcctgtgctggcatagtggtctcacctccggcagtatcaccaccactgggcacaagcttctccagcacagcaactgtgtcttatttctccttgtactcccagtgttcacaccatgctgcactcacagaagactcttcgttgatattttgtggacagagagaatgcctgtgagagtgggctgaagtgtgcgttgggctccagagaccttaaggaggggagaccaggtcctgagtaaagttgaaggggaggggctgagtcctgctagccaggagtctcatcccctggggaagttccagggacccctcagaagtgcaaggggacggtgttagtgttagtccagtaacacagcccagagcctgccttccacgtgggtttgacaggagc

SEQ ID NO: 1879290 - DNA, 4001 bp, Homo sapiens; identical to SEQ ID NO: 1879289

SEQ ID NO: 1879291 - DNA, 4001 bp, Homo sapiens
  modified_base (3070)..(4001): a, c, t, g, unknown or other
tttatagcactaaatgcccacaagagacctctgcctgagaacgtgggtttcagcctaagagttgtaatatgtgtgcccattcacaggtgctgcatcagagtcccaggtgggaagaaggcaagcatacacaaaaatggtaaaaggcagaaaggagcccagtctcgttctttttaagaagttttcctaagaatctccacccagcgacttgctctcacatcttcttggccagcactggaccacacaacttcttctagatacagaggagtcctaggattctatgagaaagaaggggagggtgggcaaagggcagccagctgtgcagcatctgctggagacacctaacccttggtggaggggttgtggtgctgggagaaggctttctggacggtgtgacagcagagataaacttaaaggccaagtaggagttaccctggtgaagcagggcagggttacaagcattccagcaacttgaagcagcaggagtgttttaattaaaagaaggcagttgctgtaaccaactataaacaaataaaggcttaaacacaatggaagtttatttctcactaagggaacatccaaatccatgatactttaagtcagggacccaggttcctcccatctatggttctgccatcactaatctgggtcttccacaattgccgtgctccttggaggtgggaagagcaggcggaggacacgtgggaggttttagagacaagcctggaggcagcatgcgtcactcccatgcagagtccattggccaatgctggctccgatggccacatctcactgcaggggcagctgggaaatacagtctggctgtctacccaggaggaagagcagccagtttctgctgctgatgatcaggaggtagagaaaatgttcagtcgggcagggagtgggaatagacaagaccacaagcagcttggtgcctctgaaagggagaggggtggaggggagactagagaggtgggtaggaatactggattccactgaccacatgctggatgtcacgcttagccctcctgctctgtgccgggttaggcacctggtgttttacgtacataatctcaattctgtgagggcatccgacctgtgggaaaagagctgtttgtttcaaatgctactcctgcttcctaacaagtgtttagagcttaatcgtgttcaaaatacatatacaatgtttaatacttacaagaatttggcggggaaaatattaccatctttcccttttatgattggagaaaaatgaggctttgaagggtttaagaacttgcccaaggttggccaggtgcagtggctcatgtctataatcccaacactttgggaggctaaggtgggaggatcgcttgaggccaggagttcaagaccagcctgagcaacatagtgagactttgtctctataaaaaataaataaataaataaaaagaacttgtccaaggtcagacaggcagcctcttagtaagcacacatatcttctatattatactacctctcatggaggatctcctgtgttctacaaatagtctggacttgagccagaatgtgttataatcctgggatcacagccagtgggcttagaagaagccatctctttctcatgccaagatgaggctcccccagatttgctcagacttacctatagtcagcagcatcgggggtcaggaaagacttcatgaagccataaatgcatccttctcggggcagcacctggctctcccaggtgagagaggaatccattttcacaggcaggtgtgggagcttcagcacccatctctgggcccagaatgacccactggagaccttacagctctcctgtcacccccaattcctgccccctctgcagccttggaggagaatggagctgaagggcctgccctctgtagggtgagaaagggaggctaaagcctggtgcccactgccctggctgctccgcattgcaggagctgcgcccttcctttcctggcacagggtccacagccccgaaaccccgttgtgtgggagctgggcacagggcagcaggactaatccttggaacagctcagggaggattatcccagccactgtcagcagcggtgcagctggctcattcccatatagggggaggccagagccaggggcctgccacaagttggaaggctggggaaggggaggccagcagaggtgtcctggctgtgggtggctctgagggggctctcaggggtggggctaaatctcaggggcaggattatgtaaatcaaaccaattctagccacagatttaaagtttggaaaaaaaaaaaaaaaacccagcctggcggaaagaatttaaattataaaaacttagaagtatggaatgtgaaatcatcctgtaggtgcttatttaacaacgaaatcatcccgacacaatgagccatatgtgaaaagtcctccttccccaacacatcccccaacaggcactcctcaaacctctaccacccaagtgctggcatcctccctgtcctgcttcacctgagacaccccttgtctcattagacatgcaactacgggaggggtgacaggaagacaagacactatttcctcaggcccagtttggtgtggggagaaagcctcctgatcctgaaagcaagaatttgaccagagcagaagtaatcagtatgcagattgactctgtggtatgttaatgtttatgcatagattatgaggactagatgaaaagtgggccaggggagacagatgtgtgtgtgagtcatgggtggctgagatggggacaggagggaaactggttcggaggctgctggcgatgggatgggggtgccaggaggaagggaggcagttgtttgaatgtctgcatgaaaaagcagaggacggcggggtctgggtgaattcgggcaaccatttggacggtggagaaaactgcctgcgtgcggctgaggacctgaactattaatttgttttttagctaatgcaaagataaatataaaaactgatactccatccagttaccagaaaacatttaggtatgtgtgagacaacttgggtatgtgaacctaccttttcaatgtaaattcagtgaaatctaagtacagatnnnnnnnnnnnnnnnnnnnnnnnnnnnnnnnnnnnnnnnnnnnnnnnnnnnnnnnnnnnnnnnnnnnnnnnnnnnnnnnnnnnnnnnnnnnnnnnnnnnnnnnnnnnnnnnnnnnnnnnnnnnnnnnnnnnnnnnnnnnnnnnnnnnnnnnnnnnnnnnnnnnnnnnnnnnnnnnnnnnnnnnnnnnnnnnnnnnnnnnnnnnnnnnnnnnnnnnnnnnnnnnnnnnnnnnnnnnnnnnnnnnnnnnnnnnnnnnnnnnnnnnnnnnnnnnnnnnnnnnnnnnnnnnnnnnnnnnnnnnnnnnnnnnnnnnnnnnnnnnnnnnnnnnnnnnnnnnnnnnnnnnnnnnnnnnnnnnnnnnnnnnnnnnnnnnnnnnnnnnnnnnnnnnnnnnnnnnnnnnnnnnnnnnnnnnnnnnnnnnnnnnnnnnnnnnnnnnnnnnnnnnnnnnnnnnnnnnnnnnnnnnnnnnnnnnnnnnnnnnnnnnnnnnnnnnnnnnnnnnnnnnnnnnnnnnnnnnnnnnnnnnnnnnnnnnnnnnnnnnnnnnnnnnnnnnnnnnnnnnnnnnnnnnnnnnnnnnnnnnnnnnnnnnnnnnnnnnnnnnnnnnnnnnnnnnnnnnnnnnnnnnnnnnnnnnnnnnnnnnnnnnnnnnnnnnnnnnnnnnnnnnnnnnnnnnnnnnnnnnnnnnnnnnnnnnnnnnnnnnnnnnnnnnnnnnnnnnnnnnnnnnnnnnnnnnnnnnnnnnnnnnnnnnnnnnnnnnnnnnnnnnnnnnnnnnnnnnnnnnnnnnnnnnnnnnnnnnnnnnnnnnnnnnnnnnnnnnnnnnnnnnnnnnnnnnnnnnnnnnnnnnnnnnnnnnnnnnnnnnnnnnnnnnnnnnnnnnnnnnnnnnnnnnnnnnnnnnnnnnnnnnnnnnnnnnnnnnnnnnnnnnnnnnnnnnn

SEQ ID NO: 1879292 - DNA, 4001 bp, Homo sapiens; identical to SEQ ID NO: 1879289

SEQ ID NO: 1879293 - DNA, 4001 bp, Homo sapiens
caggaggctgaggcacgaaaatcgcttgaacctgggaggtagaggttgcagtgagccaagatcacaccactgcactccagcctgggagtgaggctgtctcaaaaaacaaaaacaaaacaaaaacactatttcagccacagatccacaaatgtttactcagagtttcttacatctgactaccgtgctggagactggagatggagcaaagccaggcccttcaagttggggaacccttttgtggtgtttgtccccattgaagtccccctctgtggactatatgtcaatgctgggtcctttctatcccagtcccatagtattcaactacagaacttcttcagctggactggaaaccacagctgtgtccttgggggcagctctcactctgaacatctggtgggtcccatagaaagggatctcttggagaatttctgcccacagctgcagaaaaggcaggagggccaatactgctcagactggtaggaccagagttgcctgggcttggccagcggtcaccgaccaagttcagcccatattgtgcctcttttttcttttctctatccattggctacagctgccccagcttcgcccagagggacacttggggctaggctgaaaggtgtaggcaagggctattgtgtaattgaggacctggggttgttaagtggaggccattcaactggactctgcaaactcttctaaagattaattctgtttctctctctcaccctccctctcttcccctccatctctgtccctcctccctccccgcgccatgtctctgtgtctctctgtatctatctctctcctcttcctctcccctgtctttttttttttttttttttttttttttttttttttttttttttttttaaacggagtttctctcttgttgcccaggctaaagtgcaatggcccgatctcggctcactgcaacctccgcctcacgctttcaagcgattctccttcctcagcctccggagtagctgggattacaggcataggccaccacgcccagctaattttgtatttttagtggagacggggtttctccatgttggtcaggctggtctcgaactcctgaactcaagtgatccacccgtctcggcctctcaaagtgctgggattacaggcgtgcgccacccgcgcatctttcaatagttagcatatctggcacttttggctgccacggacggaccgatggcggcgccggcaccgttcgtgccttctctggtgttcttacagttgtcccactcagagacctctaatcctgcctggggcaaacttttccccgttaattaccttttaacaacacgtcgctaattgcttaattactctccgtgctctccgccaccgtccccggctgtcccggccgggcgcggcgtctccgcgctgggagggagcagcgctggcgggcgcggagcccggcgtccagggctgggctgggaggagcaccccccaccggtctgcggagcccatcggcctatcgagcctattggccgcaactccatcctccagggcctggctggcgctcgcccggctccttttgaataacaaaggagcgtcccggccttagagcgcttcgccaaaggcgagagcgtcagctaggttgactgacgccgagctctggggagagaaaggcttgttccctgcccaccccactgaaggccccagggaaagcagcccgacccccttaccccgtttcatgttttcataaaaatcattgtctgaaattaccgtgcttaccgtgtgtgtgtgtgtgtttacctgtttatcttgtctccccttctctcccatgtaagttcttgagagcagggacctcgcctgtcatactcagtatccccagccctacagccttgccaggggcgcagccgaccctcggcggctttgtgtgacaggcgtgaaccggccaagcggcggcgtctctgctccgcccgcgagggcagggctgcgaggatttcactctaggagtgaggcgggagccaccttcccagggtcctcttcggggagaaaagagcttctgagggacttctggggatgggagcggagtgggtgggggtgtttcccttcctgatcggagtttgggaaaagggactgacactatggcactctgcctgttactgagaccgctacccagtccctccccgtaaaactgtgctctccctttatgaccacacgagggtcacgtgcttcgttgggggccgcggtacagcctggagtcacgatgccctccgccgcgctggccgggaccaggtgtgtcctcgccagccccagtggctgcgcccgggtcctgtgcaaacactgcggtagggtccgcctcggccgcccagcccggcctcccggccgccctgcccattggctgaagacagcccccctgaattctcattggctgtcccacttttccctccacccccagcaccgaccgcgcgcggctagccgctggggaagcgactctgagtcccgggctcggagcgcaggctcagctccgcgctgcgagcgctacgggcgcaggggcggggagccggcccggagcgcagtttccagtggggccggggtttcacccgggccctctctgtttgaaccgaacccgacaaatgggcgcatgacgatggagagcagggaaatggactgctatctccgtcgcctcaaacaggagctggtaagagcgaagctggcgccggggcagggagggctgctccgccccgacgggcacctggtctccgccccggcccccggggagccgggacgtaagcagggcggaggagggccagggaagagaggagaggacgcgggcccgcaggcagagggcagggcttgtcctcaggaaaggggaccacgaagaaactttgagcaaagatttgtgatgagacaagaacaagtgacagagagacagagggagcaagccagccaggctgaaatgtgacacagagaaccccagagagaagatagggcacgcccagagacggccaggcacacggacgcagtggggcccccgcgccgccgacgcggaaagcgcgagagcgaaggcctggggagcgggacgcgggcgcctgggtgcggggctgcgcggggcgacctggagcgcggggaggaggagggtgctgggtcctgatccctgcgcgggcacgaggtcagcgggactgctcgctcgagggaagcgggtaccaccctgggcccccagctctgccgggcttggcagagctggcgcggctgcgggggcaggcttggccggctgtctgcctgggcttgtctgccagcagggagggggctggcagctggaaaggcgggggagggccctgcgctggaggaggggctctgcctggcaaatcgagagcgggagctgcggaggcccagccagatgtcaggtctgggcttggggagtgcgcagggagcgttcggaggccccgcggtacggggagggggagaagtagctcagtctgggggggtggaaatcaccgaagtcgggggagtggtgttcgctaaagctatgttagggagagccaggttgattctcactggcttcatataccactgcccccgcccccacgccacctgccacctttcttattccttcacccaccggaattcaggcaaatgttatgcacatacagccccatctctgctttgcccatctctccttccactaggctctctgttgtgtctttgccctcgtctctttttgtctcttttagtttgtctctcttggagtcgactcttctcagtctcacttttctgctctcctctttcttcttactttacagagccaggggcactcaggccacacaacagcaggcctggatctagaaagggccagcttatggctctccagattctgtgacagcgtttcccactgctgcctgcaaaggctacactcttcctgcttgggaaggaacttggcagtgtgttaggggccagctctgggggtagggggcagagtttgaaactgcaggtgttctcactgatgcttcctgaccaagtaaccctgccactcttcctgtcagtcc

SEQ ID NO: 1879294 - DNA, 4001 bp, Homo sapiens
cacacaccttggcagccacatcacgcacgggcttccccagagctgctgggaggatgctcaggctgttgtacctgcgaagacaccaggtcgcttggccaaactccggagaagcctgggtccagagcctgctccagtgtccatgagaccagttcctaggtcaggccccaccccacccacccgcctcaccagggctcagagatggcacaggcgaccagatcagtagccagcccagcccaccggcaggttggacaccgagcccagtggctgctagccgagggtccacagagggtgcagggagcatggatggggccccaggctgggtgtgcccagggatctggctcagctggcaactgccaagcaaaggaagcagcctgtggcacagacaccagaaagctaggatggcccctgatgggccacgaggctccaccccacgaggtggtctggacaccgagagtaagccccggacgaggtggctcattacagtcacccagcacccaagagaaggcctggcagaagggctggtcaacagtgccaccagagccgccttgcccaggaaggcccgagtggacagcaccacagagggcagcagggagaggaggtggcagggagcggtgggaacccctgggccccccaccccacgctacccaagggttcccgcccccactcaccgcttgaagcctagctccttgtaaagctgcttgctctcatccaggtagagctctggaaagcggaagccacatgtgtgtgccccaggcgcagaaccagcccccaacccactcaccacaaagaatcgccctcctccttccgaccctctgttcctctgcccaccctccgtgctcagcccacccccgcagggcagggaggggtaaaacggggctgagtgtcccccctcccctcagaagaggggctgagtcccagaggcaacaggtggagccggcggggcagagctcgtccagactctgctgctgggcccaggtctgtgcagggcaccacccagccaccagctgcggggcggggaggcagggagagatgagggacgctgacccgtgggcatatcaaggccgctccagcagacagaagggccggggttgggcaggaaagggccccgaacgccctgagcttagggaagggtatgtgcgccgccgcggcggggaacaggacgcacctcccgcgaagtagtcgccgtccaggaactcctgcagacccagggcctcgggccctacgcccaccaggcgcacgccgtgttggtccaggagcccagcaaggctgctgaggtcctgggcgatccagcggcacaccacgcacccgaagcgccgcagcccggccaccacgcacgcgtgctcccgccacaggctccgcagctccacggcctgccgggcggctgggtcatgggcgcgccccgttgcccccagccccgcccaggccccgcggcccccaccaccccatcgctgccaggacgcccgggcaaggagccagggacgcgcccaccgccctgcgtccacccggcctcacctccccggtcaccgcatgcttcaggatgcacgcgcccacgcgagcaaggtccaccgtgctcatggcggccgctgccagccctggttcccggctccccgactccctgttccccgctcccggctcctcgctcctggatccccgctcccggctcatagatccagccccaagccccgccccgagatgccccggtcccgcctttcttgctgccgccgaggccccgccccttcgggctcgtctccgccccgggcccgcccccaagatggccgcagcgcgccccggccacgcccccgaccgcaccccgagccctgctccgccccctcggattcgcccctagtcccgccttgtttcccctcctactccaggccaagcctcgagatcgcggcgccaaatcctgggtccgcctgcttcggtccctcccgcctcctcaatccgggccttgcgggacagttgctgtcccgcgtcctggtcccgcccctagccccgcctctccgttgggccgccgacttggaccccgtcggccattggcgcagcaggcggagctgggcggtgcggccctcggtgcgcggtgcgcctgtgcggaatgcggcgggaggcgggcagccggctcggggtcgtcccggggggcgccggggagcggctgggtacggtgggcccaggggtggtccagggagcggcgggggtctccctgcggcctcgcgcgagactgggctggactcagggttgaggggagagggtgagcgcaggggtcgcgggcataggggaccgcgggccggggtctcccgcggggcgggggtcccagcagtggggggcgggggggtgcgagggcttagcctttccacgtggcctggttttcgcttgaaaatccccgcaaatgcggcagcatctcaattatacatggacgcgatgtctttaatcatgaaatactgttcatgtcgtgccggttgcatatcagcttttaacccgccaaaccttggggcgaaatagaccccggggagataagcacagctcccagaagtgcactgcgggtcaggtgcctggcagatgcgtcctgttcctcccccactgcagccctgtgatagcttttgtcaccgagttggggtgagggccgggtcacagcttcacccggcctgggctcccacctgagcgggcccggcctggcagagtctgtgctgctggcacgggtcctcactccccaggccccaggacagctccaggggcctgggcgggctggagaaggaagggggagcccccacactgtattccaaataaagagaggccccgggggggtgctgctgcttcgcctgtgccctcgccctggggtggtgaaggtccagactgcgaaacggaagtcgtcactatgtcagaaagggcaaaaagcaaaacaaggaaggggaagcactaggagggaggagctgtggcagctccagagcccaggagtgcagcccccagagaccagggctacccctctaccgtctcgggctgtgcaggaggggccctctaccctctggagttgtgcaggagggggcccctctaccatctggggctgggcaggaagggcccccccccaccgtctcaggctgtgcaggagggggcccctctactgtctcgggctgtgcaggagggggcccctctatcttctggggctgtgcaggagggggcccctccactgtctcaggctgtgcaggagagggcccctctgccgtctggggctgtgcaagcagtgagcaagctgccgcctccttgggagctgggatcccagacgggattcagccattttcagagacgttcccagaaacgagaatgcgagatcaattcctcgcctggcatctcccaccaacgccatcgctgcaggagcctcactggaagccaacgggcagaggagagtgggaaaggagcttgcagcctcccagctccagtgatgcagagcagaaggtggctgggaggctgagaagccataagaaaatagcagggccagcccatgtggccgctcagatacatgctatgtgtgtgtttgcatatgtaggggctgaaaaactccacctccatccttttgaggtcctggctgggcccaagagttaaatcaagataagacagatcatcatgccagtgtatttgattaaagttggatgtggctcaggagccctcctaaggaagtgaagacccagtgaagcagactcagtcgtgtgctgagttggacagagaacagtgaggtttgaggaagcagctagatgatgtggggggctgaaaaggtgagaggcattttatcagggactgtacagcatttgctgggtctcagcttctcatccttgaggatcagagctttctagtgtagggagagcatctttcacctgggaatttcatcttctgcttttaagaaacacaagagagatcagaatgatctttttgcacctgttattgttttaactgcctttaattcctaatagtgactatgccagagcagcctattttggggtggcaccttcttaact

SEQ ID NO: 1879295 - DNA, 4001 bp, Homo sapiens
cgttagtctgagtgggactaatgccactataaaagggaccccagggagctctctctgccccctgaggatacaatgagaaggtggcagtctacaaccagaaaaaagtccctcatcataaccctaccatgttggcaccttgatctcggacttccaacctccagaactgtgagaaataaatttctgtcgtgaattagccacccagtttatggtatatagttatggaagcccgaactaagacagagatggaatcccatggagggtctctaatttgctgagctggtcatcaggtgggatgttgcaagttagaaacaagaagagctgacattttgtgcatatgaaagaagatagtggacaggcccattgtcgtcggctttgtccgccttggcgaactggagacggaagctagattcaccttcgacagccacgggaggaccgggaggacctccagaggaggttaggtcgacctcatggtaactttagatcctgaaaactcacaggatttttcttgtcttccctttgatctctcttccgcctactcaacaggacaggactcaccgcctttctttcccgtcagaaagggatcccttccggacaggacagaagtgagcagatggtttcccctacgtgtctttccgggcctgggcgtctcaggagctcaggctgacctgagacctaactcctggcaagtgggaccagcaggagcctggaagagcgcgcgcaccggggtggaggttgggcgccgggggtggagaaccgcagtcaaatcctcttcttccccgcgcaccgcgcacctgcccccggggatgccgaacgaattggcccataaagcttctctgcaacggaaagaagcctgaagctccaggaggtgcgagaggagcctcgttgagcgagcccagccctctgcccggctggccctggtcaacaggctcggaagaggccgatttggaggacagaacggaagacaagacctaaaggtttcgaatctcatgatgtggagatgttaaagcctaaatcctaaggtccgactgtgagggggagcgagggtgtctcgagctggatccacccttgagccttcacctggagagtcctctgcacaagttcagagagaaggactacgcgcagcaatggttctcaacagggggcaacttggccctcacatgcctctcccaaccccgctgggacactaggccgcggctgggggaagcgggagggagaatgttatccccctggcatgtgtctagtcagcggaggagacagatgctgctaaacaccttgcaatccacggcgggagggcccctcccccaccccgaagtagccattcggcagaggtggagaaactcgcgtgtagatcaatgcccacgcacttggccgacggaaatcacgaattggtgaccaattggatcttggatctgaggaaaaagctccagcttcagagggaactctcgaagttttgcccagagcaaacggaggggttgcgttgccatcgcctaaaatgggaaaatggcaggcgtcacaggttgcaggggaaggttggagaccagttgagtgccccggagccttcctggaaagagtttcctatccagcccgtctcggtttccgcatccgtctgattccttatgatgttgagggtgccggggtctgggtcctttatgatgcagagggtgcccctgtctcacctcgggcgcctccccgctcccgcctcctcctggcaacctggtgggcggctccggacccggcgacccgcgaccatcttgtcagttgctgccgcctcgcaaagggcatctctaggccagtggtgagctgcggccgcgtggccgcaactcgctccagtactcaggactccctcgtggagtccttggtgtgtcgcctgcaggttctttttttgaagaaagcagggagtgaacggccttgtgagacgactccaggagcaaagggcgactctcacaagacccaagtcctcctagagcacaggaaagtgtcgcttcaggtcgaagaagggagagaaagcagctttccgcatctgcatggttgtctagtggctaggattcggtgctgaaagcgccacggcccgggttcgattcccggtcagggaattgttttgcactggccgccctcccgcagaaatcttcctttaccacgctgtcagccggcctgctccaagggccagatgtagaacagcctccgcagcgaggggcaaacccgggcaaaggagggcaagtcgtggtgggccacctctcacgtttatctccgtgtctgtcatccgcagaagcggctttagagagcgactgagcgtctcgctcaggtgtacacagccgtgcagagaggccagtccccgtggagctgcacttaataagcgcaccctctttgccgtcgccgccccagaggtgcctatcgggctgagctgtgaataactaagagagaggccaagccaagtcatggcgtttgtgcgtgccctggacgtgggcaccggtcagtcagcggagcctcctcacctccgttcgcagctaacatgctcgttaggccttcggaagaggcgaccggaggcgatgcccgcgaagttgggaggggagtgagcggcgggtgaggtcctcaagggcggtcccttttgctgattgagcggtagagggaggcgatgttcgctgacccaacaaagacagcaggtggagtaggcacaaacggaaaactgttgccagtgccctaagcagaatgcaggtgtaaaaatcagcactaggacgtcaaagcgatggtaccacagtcaaatcccacaatgtctacactctaccaagcacttgcgcacgctcccccttttccattcagtattcccaagaggggtttggaagaaccccgcgtccactgtaagctcaggggagagcgggagccagggaggtgaagtgcacagactggacagaggcggcgggcagaaccgcgggggtgagagggcgcgtggttgcggggcgggagccactgctgaaaggcggcctgggttgtcgtgtggggtgactgtcggtggaatctttggcagagagtggtttggaagaatggcgaagggggcagtgggtagggtggtgaacctgagcgtccgaccagggcgaggacgctgtgctgtccctgcagggcatgcgctcattcccacttacctggcaggaaagagaccgtggtcacgaagggggttctcccagagtgaagcttcttcatcgcactctagagttgctgatctctgtgatttcttcaatgtgggaaacggtgtttgtgctagaagagggctgcgctctctacctaacataaacggggttcaaaactgacatcgcctcacgcctacccgaaaacgtttacgtggcttccttgtctctttgttttttctgtcctaaagtcgccttatcctcacaccccctcatgtttttcttccacactcgagagtgtctctccgtctcattaaaagccccaccaaatatttgaaatatctcaaccagaaaggctgcaatgaatacagtatttcatttgtggaagctacagaccagctaggttgagagttgcttgatattttctgctaaaccgtgaggcatagagcacttggaaggtttctctttgggcctttgtttgtgtactattgggtttccttcttttccccagaccgtatggcgctgtggggccagcggtaaaccctgctttctggctgcagataaaggccgcagctggtgcaggaattaaaagcaaaccaaaagactcgtgggttcgccccagtgggtccaagatagagtctgactgtaccaggattcagattagaacagaggttgctgcaggcacaaggcagggtactaaccactatagaatcccaatgcgccccacacctactgcccgtcgttttgcttccccacccctcttttatttatttatgcattttttttgagagacagaatttcgctttgtcgcccaggctggagggcagtggcgcgatctcggctcactgccacctctgcctctcaggttcaagcgattctcct

SEQ ID NO: 1879296 - DNA, 4001 bp, Homo sapiens
cgttagtctgagtgggactaatgccactataaaagggaccccagggagctctctctgccccctgaggatacaatgagaaggtggcagtctacaaccagaaaaaagtctctcatcataaccctaccatgttggcaccttgatctcggacttccaacctccagaactgtgagaaataaatttctgtcgtgaattagccacccagtttatggtatatagttatggaagcccgaactaagacagagatggaatcccatggagggtctctaatttgctgagctggtcatcaggtgggatgttgcaagttagaaacaagaagagctgacattttgtgcatatgaaagaagatagtggacaggcccattgtcgtcggctttgtccgccttggcgaactggagacggaagctagattcaccttcgacagccacgggaggaccgggaggacctccagaggaggttaggtcgacctcatggtaactttagatcctgaaaactcacaggatttttcttgtcttccctttgatctctcttccgcctactcaacaggacaggactcaccgcctttctttcccgtcagaaagggatcccttccggacaggacagaagtgagcagatggtttcccctacgtgtctttccgggcctgggcgtctcaggagctcaggctgacctgagacctaactcctggcaagtgggaccagcaggagcctggaagagcgcgcgcaccggggtggaggttgggcgccgggggtggagaaccgcagtcaaatcctcttcttccccgcgcaccgcgcacctgcccccggggatgccgaacgaattggcccataaagcttctctgcaacggaaagaagcctgaagctccaggaggtgcgagaggagcctcgttgagcgagcccagccctctgcccggctggccctggtcaacaggctcggaagaggccgatttggaggacagaacggaagacaagacctaaaggtttcgaatctcatgatgtggagatgttaaagcctaaatcctaaggtccgactgtgagggggagcgagggtgtctcgagctggatccacccttgagccttcacctggagagtcctctgcacaagttcagagagaaggactacgcgcagcaatggttctcaacagggggcaacttcgccctcacatgcctctcccaaccccgctgggacactaggccgcggctgggggaagcgggagggagaatgttatccccctggcatgtgtctagtcagcggaggagacagatgctgctaaacaccttgcaatccacggcgggagggcccctcccccaccccgaagtagccattcggcagaggtggagaaactcgcgtgtagatcaatgcccacgcacttggccgacggaaatcacgaattggtgaccaattggatcttggatctgaggaaaaagctccagcttcagagggaactctcgaagttttgcccagagcaaacggaggggttgcgttgccatcgcctaaaatgggaaaatggcaggcgtcacaggttgcaggggaaggttggagaccagttgagtgccccggagccttcctggaaagagtttcctatccagcccgtctcggtttccgcatccgtctgattccttatgatgttgagggtgccggggtctgggtcctttatgatgcagagggtgcccctgtctcacctcgggcgcctccccgctcccgcctcctcctggcaacctggtgggcggctccggacccggcgacccgcgaccatcttgtcagttgctgccgcctcgcaaagggcatctctaggccagtggtgagctgcggccgcgtggccgcaactcgctccagtactcaggactccctcgtggagtccttggtgtgtcgcctgcaggttctttttttgaagaaagcagggagtgaacggccttgtgagacgactccaggagcaaagggcgactctcacaagacccaagtcctcctagagcacaggaaagtgtcgcttcaggtcgaagaagggagagaaagcagctttccgcatctgcatggttgtctagtggctaggattcggtgctgaaagcgccacggcccgggttcgattcccggtcagggaattgttttgcactggccgccctcccgcagaaatcttcctttaccacgctgtcagccggcctgctccaagggccagatgtagaacagcctccgcagcgaggggcaaacccgggcaaaggagggcaagtcgtggtgggccacctctcacgtttatctccgtgtctgtcatccgcagaagcggctttagagagcgactgagcgtctcgctcaggtgtacacagccgtgcagagaggccagtccccgtggagctgcacttaataagcgcaccctctttgccgtcgccgccccagaggtgcctatcgggctgagctgtgaataactaagagagaggccaagccaagtcatggcgtttgtgcgtgccctggacgtgggcaccggtcagtcagcggagcctcctcacctccgttcgcagctaacatgctcgttaggccttcggaagaggcgaccggaggcgatgcccgcgaagttgggaggggagtgagcggcgggtgaggtcctcaagggcggtcccttttgctgattgagcggtagagggaggcgatgttcgctgacccaacaaagacagcaggtggagtaggcacaaacggaaaactgttgccagtgccctaagcagaatgcaggtgtaaaaatcagcactaggacgtcaaagcgatggtaccacagtcaaatcccacaatgtctacactctaccaagcacttgcgcacgctcccccttttccattcagtattcccaagaggggtttggaagaaccccgcgtccactgtaagctcaggggagagcgggagccagggaggtgaagtgcacagactggacagaggcggcgggcagaaccgcgggggtgagagggcgcgtggttgcggggcgggagccactgctgaaaggcggcctgcgttgtcgtgtggggtgactgtcggtggaatctttggcagagagtggtttggaagaatggcgaagggggcagtgggtagggtggtgaccctgagcgtccgaccagggcgaggacgctgtgctgtccctgcagggcatgcgctcattcccacttacctggcaggaaagagaccgtggtcacgaagggggttctcccagagtgaagcttcttcatcgcactctagagttgctgatctctgtgatttcttcaatgtgggaaacggtgtttgtgctagaagagggctgcgctctctacctaacataaacggggttcaaaactgacatcgcctcacgcctacccgaaaacgtttacgtggcttccttgtctctttgttttttctgtcctaaagtcgccttatcctcacaccccctcatgtttttctttcacactcgagagtgtctctccgtctcattaaaagctccaccaaatatttgaaatatctcaaccagaaaggctgcaatgaatacagtatttcatttgtggaagctacagaccagctaggttgagagttgcttgatattttctgctaaaccgtgaggcatagagcacttggaaggtttctctttgggcctttgtttgtgtactattgggtttccttcttttccccagaccgtatggcgctgtggggccagcggtaaaccctgctttctggctgcagataaaggccgcagctggtgcaggaattaaaagcaaaccaaaagactcgtgggttcgccccagtgggtccaagatagagtctgactgtaccaggattcagattagaacagaggttgctgcaggcacaaggcagggtactaaccactatagaatcccaatgcgccccacacctactgcccgtcgttttgcttccccacccctcttttatttatttatgcattttttttgagagacagaatttcgctttgtcgcccaggctggagggcagtggcgcgatctcggctcactgccacctctgcctctcaggttcaagcgattctcct

SEQ ID NO: 1879297 - DNA, 4001 bp, Homo sapiens
ggaattttaaaaggggtcagtgaccctggtggacaatgtccccaaagtctcatctcagggtaggaatgtggtcagacagctggctctgaaccagcaaggaagggtgggcaagtaggaccccaggcactccatcaccacgatggcctgggtgtgtttgtgtggcctcattctcttcaccaggtgggcatggggtatctggcagggactaggcaggaatcaagcccggtgtatactcacatgcactgaaccctatgtagaagggattaggtcctgggggccatagatggcggttgctgggcctgtgtgctcggggcagtctctccaaaggcacagatggggtttctgaacaggacctggggagacaggcaggtgctcacaagtgctgcttcccccaactggcaaccagtgaggaaaaacgcccgagtggaggtctgacctgccccactctggagggctgatgctctctggaaaggtgggtgatgtgcagtgtctgctgtctccctgtcccccactccaaaacttcagggaaaaaataatccaagattgtcaggatgagcctggtgagggtggcacctttggggataggcccttcagcctggcagagtctcctccccaggcttcttggggagcctggactgcaaagcctgctttggggaagctgtcaaatgagagctgtgtgtgtgagctgggtgctgggcaacacgcacggacagtgttcttctccctggctcttgtagaacttgtccatggcctgtgtgttggtctcttggtaattcccaccctacccccatcacacagataagatgaagccagcatagcccaggggtggggagatgaacaggcgctaccccaggtcccctaggcatgcccatctgcctctgacatgtccgggaaagcaggtgaggccccttcttgttctctgaatgttgtcaatggtctattgcagccaaatggggacaggcaggcaggagagtgtctcatctcgaaagaagtggttcctggaagcagctgggaggtgggagaggttccccaaactcccccatactcccccatactcccccacattccctcacactcccccacgctcccccacgctcgcccacgctcgcccacgctcctcccccacactctcccacactcccccacactcccccacactcccccacgctcctcccccacactctcccacactcccccacactcccccacactcccccatactcccccatactcccccatactcccccacactcccccacactcccccacactcccccatactcgcccacactcccccacaccccacactcgcccacactcgcccacactcccccacactcgcccatactcgcccacactcccccacaccccacactcgcccacactcgcccacactcgcccacactcgcccacactcccccacactcgcccacactcccccacactcgcccacactcgcccacactcccccacactccctcacagtcgcccacactcccccacactcccccacactcccccacactcgcccacactcccccacgctcccccatactcgcccacgctcccccatactcgcccacgctcccccacgctcccccatactcccccacactcccccatactcccccaaactgttctcaggttaggaaaaggggcctctgtgacagccccactcagtggctctcactgtctgaggggtgtccttgcccaacccaggtgcgcacccatctgagatggccttgcatggacctggttgggaaggttcagctacagcaaccactggaacctgcccacacctagtgtctccactcacacgtggggctagatgttcctccctcccgtagtggcacagccagtggcagagggggcaagtcaccgctgcagttcccacttgagtctgaggggggatcaggcttagtgcccatgtatttcccaattacctggttccatctgggggcttcatggacaggagtggtgcttttccaggcctcttttccatatgccagctacaggcccaggtttccaagtttctggagcccctcttccagcctggcaagcatggcgtgttgtaggggaaggacatgaagcctacaggcagcagaacctgtctgggtatgttctctacccctggaggcccctggttgtttacctcttgggtgagagtcggcttaggatctcaacattcttgtaggacttcagaactgtgccgacaggggcccaggaaggagcagaggctggggctggcagctaaccagtgtagtgggagttgtagggctcagtttggtcttgcagggaattcagggaggcttggatttgctgaagctctagatgagcttgggcttggatatggaaacggcatggagccagggcccttctgcacactggggtctgagtagttgcactctggtgcatccataggtgttccccacctggagcacagctgtggatagaagccgggagagctgtggagggaagaggaggaggagggagtctcggggcagccccagctgccaggcagggcctctgcaagtgagatgcagatccagcctgttggccacttagcacttgcttggccgcctgcagatcacctgacctctgctcacctgtaaatgggggttgcagcagcacttaccttctgggactcctgcagcttgaaggggcagcacacaccacatgctgagaaggcgcctaactcaggcaagcttctccaacagcaccacatcagattaacatccaacctgtacaggacatcaaatctccccatccctcattccaatggaagaaaagggagtctctgtcctaggggagcaagcacaggcctatctatgcagttggcagttggcacttgacccaggttggggaaaggcccttggatacatgctggtttcaccaaccatctgtgggttgggtttggcctggacccatgtaccccaggaggccagcagccccctgcatgggacaggactgggaggtgtgtgggagggctgagctttgagggaagccattatttggcctcatgggaagtggtgcaggtggttgttggtggctcagttttgcagggcctgggtgatcacccaaggagtgaaaattgcctttttatgagaaattgccaaaactgatgcaagctcatccgttgaaaaggtgagtaatgctggcagttggcttcacctgccccttccccacaagtaactggtgttcagaggtggatttggttccttcccagcctttcccgtttgcatgtagctgtgtgcatgtacttttgtgtgtacacacacattccctggaggggttacttttatttttttatttggggggataactagtgaggcagcctgacactttcttatcttgtcttttaagtgtggagtcctctatggagtgggcatcaggtacttcctagctggcctctgccagctgtttggctgccccagtttctgcccttcacagacatgccagccacctgctgtgacattcagtggccttgtttgcagctagtgtgatgagacaagtggatcaggtacattataaactgaaaaagcacacgacatgcagagggaaagggtaaatgaccatgtgtgtcctgctcggctgaagtccacatcacatgactgagatgacattttttcacctaacatttgggccctgagaaacggcatctatgttttactttttatttatgacagagttagaagaaatactaccaggctttcttttccattttccccaactccctctttaccccctcaagtttacctacctcagagagaaagcggagctcgcctggttaatgacagcctgaaattatttgagtcaggtcactgtgtaaaggtcatactgcttctgtctccttgtgcatcacctgcgcagctcagatatttcatggctccctgtatacaggtagctgtgttaccctcctagccgctttcttggtttgatacatgcctgggagcatgtgggagcagttaaggtctaggctcatgggaggacagttctgccca

SEQ ID NO: 1879298 - DNA, 4001 bp, Homo sapiens
agatgcgcgaacggctcaggctctgccactggccttctccatgactgtgtttgtagggacaaagcatggtagcaaacaacttcaaaaaacctctgtggcttgaaaacacaaagtttaatcacttgtccatgcttctcttccactgcaggctgggggtagctcctgtatcctcaggcccaggtgagataattttcccatcctgagcactgccaggctcatggcagaggggagggtgcaggaacgttgtgcggcttttaaagtttctgccaataaggggcagagtcacttccattccgttccattggctgggcctgaccacgggacaagtagcagaacctttccatccaggagaaacagagagtgtctggaggaagaatacacactgtccccaactcccagagttaatgctgtgaattcatcaacaggatgatacacttgcctcactggctttttgttccaatagacagaatcatagagtcttgttgtgctgagagccttgtaggtcacgcagtccagggatgcaaaattagaagacaatgacgaggtgcaaacctgagagtggaggcgaatggagtccggagggcggggactgcaggccgagcacacaccccaccggggagcagccatctcagctgcagccgacgttgccctagagagatgaatgcaggcccaatgttggcagctattccaatgtgaaagaaactaaaaatccagacttttatgtaacaatattctaatatttacaacattaatcagctgggggaaaaagtgtccacagaacttttgcagcctgtgagccacccatttctacccaaattcagcccaaacctctaactgcacaagctcacacaaatagagaaagccaggaaaagtatccagaactccacatgcacttcactactcacaggggcctccagccctggtaagcatgggaaccacacatgtaaacactgaggtgccctgccacgccagtgaagtgcatgctgctcgtgtgtgacccatttttaacccctaaaggcataaaacacgaatactgtgaattcagttaataagttgaatttacaccagtccttcctgatacagccgaatcagatctttcccattattcactcctcagtatatcaccccttctgttgaacagaaataagtaaatatttaaaatttcttacccaggggtcagcagattatgatccagaggccaagcccagcccgtctgcttttgtgtataaagttctcatggaacagagctgtgagcctgccgtgtgtggtctacggctgcccctggacacagctgcagagctgattcccgcacagacctcggggcccacagagggaggcgccttcccgccatcatccccactgagcaccagccgccgcagccgctaaaacctgcggaactcactccatgccccttgttggctttcttcacataaagtggataaaactgggtgtttacagcctaaagcagcccatgccaaggcagtcctcagggactgagccttagtcacagtccttgtgactacagcacgtccatagatgagagctggccgagggatccgtgtgcctccagcttctcggagctggaaagaatccatactggaaaagtgttccttcagtgctcctccttctgggaaaaaaagacggggagctacatcaaccttaagggttaatgttgcttgaatgtaagcataataaatattcagcatgtctcctaagacctggagtatcatcagagaccaagcttggaaaaccacaaagaatgacgcccagtttctaagagtcattccgtgctttacaatcagcccacaaccaccgagtcccaggaagcccagccgagaccgcggcaggtcctgacgcagcatcagcctgagtctgagcccagaggaagcttctgctgccacaattgctgcgtgtgctcatggcttgggtgcaggcccaaccacagcggaccaagggcaggctgagatttggcctggactggagggctgtctcaaggagggtgacgtgtctttgacttttgcattcttcccttttcctttctattctcttggtgacgtgaacacagacagaaagtgaacgttttttgcataagttccctgtagattctggatattaggcctttgtcagatgcatagtttgcaaatagtttctctcattcagtaggttgtctgtattctctgtcaaacgtttctcttgctgtgcagaagctctttcatttagttaaattctacttgccaattttgttttgttgcaatcgtttttgggaacttagccaaaaattctttgccaaggccaacgtcaagaagagtatttcctaggttatcttccaggatcttacagtttgaggtcttacattgaaatctttaatatattttgagttaatttttgtatatggtgaaaggtaggggtctggcttcagtcttctgtatgtggctagccagttattccaacaccatatattgaatagtatggtctttttccactgctgcttttgctggccttgtcaaagattggatggttgtaggtgtgtggctttatttctgagttttctgttctgttcattggtctatgagtctgtttttgtaccagtacagaagctgttttggttactggggctgtatagtatagtttgaagttgagtagtgtgatgcctctggctttgttctttttgcttaggattgctttggctatttgggctctcttttcattccatatgaattttaggatagtttcttcttgttcttaaatgcattttataattaacttgtttagctctaagaaaaaaacttgattttgtattggaatagcattaaatttaatatttttaaaaaatgtttcatctacttctaacttactgcaaagagttttataaagttgcctgtaatgattttttaatgtttttcttcatttttataaaggaaacatccttgtaaccacacccaggtcaaggaatagaactttatcaatcatcccagaagcgcccaccacatgtcccatttctattataacctacttcctctccccaaaaataaccacttcccaaactcttatggtaatcatttccctaatctttatagttttatcaccaagtgtatatccctagacactatagtttagtgttgttttattcttaaaatttgatatgtttttaaagtctcttttaatctacacgtttttctctctatctctttcttttccttatcttttacaatgtttaaattttcttctgttagcacttgtaactttcttatttttttttttttctaatcagatacctagtggtttgttttggttgattattttctcttgagagccagcttttggatttacttcttagttctattctttttctacttaataatatctgcttttatttgtaataattcacccctttcttttggttcacttattctttttctggctttttcagttatatgtttaaataatttatttttattatttaaatttgtattgatataggtatttaatgctataaagtttcctgtgacagttactttttttctgagtcctataaattctctatatattttcccagccttttatagctgtatatcttatatgcagtatggtgtttgattttgctttgtgagccaatccaagactgttttccatttaataggtgagccaagtccattttttacatcacagataacagggaaccaccttgttctattttatttgcttttacccttttggtatttaagagggctttcttcctcttttttttccacttttatcctaatgcctttatagcaaacacttagtttctttggttggctccccatagtacctgatactgcagttagctgatggacaccccagtcccagttggcccctgcacatcttctgcccgcccctaccacttctctggtggttgttctttgtctgcattgtccaagctggtaaccatggcatgctgcacttttatcaccgtcatgtgccagcagctccacagataaatacagaccacctgcagctca

SEQ ID NO: 1879299 - DNA, 4001 bp, Homo sapiens; identical to SEQ ID NO: 729

SEQ ID NO: 1879300 - DNA, 4001 bp, Homo sapiens; identical to SEQ ID NO: 738

SEQ ID NO: 1879301 - DNA, 4001 bp, Homo sapiens
aataatgctaatatatacatatatatgcataatatgtatatatatatattagcagttttgtttctgtggaaggtgactgcagatctagggttttgggtgggaggaagatatttcattgttcattattgctcatttgtttgaattattattatttactatgtacaggcatacatttggaataatgatacaatcttagggccgaagtcttaactctagacatcctacttagagctggcccagctgaggtactgttggtacacagtttaaggaccctgctgtgatgttttgagtatactgatttagtgtcacctggtaggtacgtagtgctgagacctgcacccagataaatcgacacacacacatctggcatccagaaaggagagaacgcagaggaagaccttgtagtttccggccctcctggtccaagtcataattacctctgtggatttccagctgtatggggtcacttcgccctgagagacctctctggcacctgtattcaccactgtcattgacactggcagaggtgattctgtagctgggggtcgaggtctgagtggctgtgccattgagaaaccactgtgtggagctgctcccaggcagatggagcacctcacagtgcaaggttacggtttcctcttggaacacgctgacccatggaggctgcaaagtgatcactgcctttgtggtgtctacttggagattacaagaagaaaaagaaaaagatcaagtggagtaaaggggagggctctgagcaactggtgaggcttttgtggatagcacaagggaaaaatacatatttagatttatttgaaaaataggcaagtggaaacctacaaaagccagcctttaagagtgtcctcctgctgcagagacctctgttcattgttattaaatcctcatctgggtgttgggaatctggggctcctgaggattaaattactgatgtaggtttttctgttgggagcaatgaagcagggttttagacttgggcaagccaagcggagctgttttccttatcctctgagctatactgtctctgagagtacattgcagggcttcagcagcttgtacattggaaacggaggttcaaactcctctctttgaagccttcagtatttgcctggctctttctgaggagaaaaaacccactctgctttcttgtaaaggggactggtttaggggatgttgggaaacccagcagactacttcagtgtcagcagactactttagtgtttgtgcaattctggccctttcctgctgttatatatacattcaggcatttcgctcagaggaaagagctcattcagaaaactttagaaagaaagcttacaaatcatagtttttatgaaaatcatgctctgaatatgggagattttacataatttataaatctttcttctttctctgctttccctatatgctcttctgcaggttaataggacccatcctttggaagtaggaaagtggcatagaaggagaagctgagttagagatcactcacccacttgcccatcaactggaactgcaagagatcagagaataaagatatcagttggtccaaggaaaataatgaggaagagagaattggggagacagaattaatgtagactctgagggatcaactcagatctcttgagtttctatttctctttctcaaaatccagtactaacagaactgaacaagctacaggtggttatcaaggaaacttcactgcggtgcgtccaggcttaatgctacctcagggttgcccttcccatccttttcataaaataagctctaataaaccgtggaagcacagatacaagttgcttcatactcatgagttctacccagagttaccacaggaagacaaaactcttgactcacaacagccacagcctgtacccttctaactgtcccctctgagtccaacttaccccaaaggagcagagttgtcaagaaccacatgttgtctccaagctggtgggagcagtgaaatctgtaacatgcaagatattgaagaggttctgctggtggctccagagccaaattagaaaagaggaaggaaattgccttttctgaccattttcatcatgttccttttctgggaaatacatctcaaatccttgaaacatgcttttcccatgctcatacctgttagcccatctctcccagtttgaatctctgattttcaggttatgaactctcagaatccagggaaaaggctaaagttgtgttgacattctattctatttttaccctctaccgtttctgtttcttacggttagaatatggcaaaacctcactctttataattggttcaatgcctggctaatgcctccaaacaatcatttgaatccagaagtatctatatcagcctctatgaggccatgggaaaagttactcatctacaagagctgccctaatacaaaccagcctctgctcctctaggggacacagacaggatcaatctcccattttggttaaaaaagaaaacaaactctcttcctgaaagacatcatgaatttggagtgtttattttggctaaatccaaggtaattaattgtttaatgtggatgctatggagaagaaaaataactcatgcacatggataacaatatcttcaagaaaagagtttcagagtacaagtggggagctctgtgccaccaaactgaggtggctcctgagacagagttgtaaccccataaaaagatttttaggtattgtggtaagagagaaagagagctaaatggaaactaggatgaattcaatgagtgcagagagactttggcaatcttactagcagagaatgaaaaatgatgacaaatcatgctgtagattggtgtactggccccagtttctcaccgctccctgaatctacactctctccacagcctcatgagggtacgtctctgactcttgactgtggctcatcatgagactttcattggccagcgaaatgtgaatggaaatgacatggtgctaatttcaaacttagcacttaggaagcttcacacattatctctcaccctcttgttctcctgtgattgctgagacaagaacattttttagctagtcagccaccgtgcgaaacagagctgtcctagacattgtggcttgaggcagagctgcctcacctgccctgcaaacttgtaagtgagaactaaatgcttacctttatatgctactgagatttgaagattgctgtacaagcaagagctgactgacacaaatgaaaagcaaggaagaaaggccgggaagaactcagggtgttctgaagagacgagagaagcctcagcttgttaaaatttatattcaaagcctatatctgtaactattttactattttgtctccaaagttttctactgtatgcatgtaccataatttatttcaccaacttctcttcatgaacatgtaggttatttctaattttttactgtgtgaccagtaaaaaagactgcttactaccaaaatagtcttgtgactacctttaaacatttgacttattttttccttaggacacattcctagaatcagtagtgcttactcaaaggaaatgcgcattttttcctttggataagatgctatcagattgtctaggatcattatcctcatcgctgcataaattttagagtgcttattacatgccagacaaatatgcttgatacatgttttcttatttaagcctcacaataatccatgagtagacactagtatctccattttacaaatgataaacctagtgaaagaggaaatcagtaatttgtccaaggttgtaaaaaatagaagcaggattcaaaatcagacagtttgatttcctttacatactcactgatggagtataacagtgcccaccccatgccttgcgattcctgctttgtagtaaaatagctacttctttgaaaaataagtgaaatcatttcattgatcaggataacatgagggaattaggattgttgtgtaagaggaatgtaagatctatagcctggaaggataaaatactttctttctaataag

SEQ ID NO: 1879302 - DNA, 4001 bp, Homo sapiens; identical to SEQ ID NO: 741

SEQ ID NO: 1879303 - DNA, 4001 bp, Homo sapiens; identical to SEQ ID NO: 749

SEQ ID NO: 1879304 - DNA, 4001 bp, Homo sapiens
aaagtggattgaagcaaactggatgaaagcttgaaagcagagaccaagtcttactcatctgcactttcccagagactaccacagttctgggcccaaagtatgtggacaagatgagtgaacaaatgaatacatgaagaactgatttggatgatctctgacaccacctgggttgattctatgtccctccattataaaaaggtgggcgggtgagaaggtaagtgatctctgtagcacgttctggtaaaataatcatttcaaatccccctgggggtggaggtagggggttccactctggctaggagattaagggcaagattcattacctcaaattattttaaaaaccagctggtaattgactgtgatttaaactatttaaatcaataagtgaaaggttaggtaaagggaactatttaaactaataagtgaaaggttagggaaagggaaccaaattccaggaaaagccaaggcccacaacaaaaactaacacagcctggaaggcccagcctcctcccagtaaacttattaattttatccagaaagacatggctctccaccctctggggttatgcccttctcccagcacacatgttttgacttccaaatccagccaggcaggctcccaacctccctccccctcaaaattgatctccaggcccagctgaccccctctgatctgttcccccaatcatccttaataacagtgctctgggcctcccactaggaggtcctccaagagccaggccagtggccatcaggtcaagagccaagcatgagggccccattaacaggagactcccagaagaccaagcggcagtcatctggctggaaaatccagcaagcaagttaaaaaggaaaaaaatcaggacatacacgtggtggatcatagaaaaaaaagaggaaaagcaagcaaaaactatacaaagcaaaactctaccatttaaataacagccacaaaataaaagactttcccttctttcattctgatttacaagtcaaaagaataagcacctcacccctcctggtctcatactttaaaatttaacctaaggattaactgcttttcagactttggtcatgtcatgactgactcttcggggaagaaatttgtgttaagacacagaagtgctttagtggaaaacagcccatgatgagggaaattcaccattttgcaccttgtcaattttttttttttttttctgagacgctctgtcccccaggctggagtgcagtggcacgatctcagctcactgcaagctccgcctcctgggttcacgctattctcctgcctcagcctcccgagaagctgggactgcaggcgcccgccaccacgcccggctaattttttgtatttttagtagagacgggggtttcaccgtgttagcctggatggtctcgatctcctgacctcgtgatccacccgccttggcctcccaaagtgctgggattacaggcgtgagccaccgcgcccggccccttgtcaatctttaaataaaaaggaaacggctaaaaatgaaaagatatccctaggcctttctactcaggataactgtaaccaaacagcattatctcatctaaactcagctgtgcctcaaacattatcacaagtgctggaagcgtttaaatctacaagcaacactagcctaaaaatgccttcggtagccagacgtgaattaaaggctcctcaaatgccaggaaaatgtcctacaagggtaaggggaggagagaaagagtactgaatacagataagtgggcactgatcggagaggaagcagcacgggttccagacacctaataggcagccttggggatgcagtcaaggccgacccttcccttcccttcccttaagtggccggacgcctcacccagaagaggacacaggggactcaacaacgtctcgggaacaacggcccggcgggtgtgagactaagcggccaggaggaggaaggggaggaggaggcaggggaggaggaggcaacgactgcgggaaaggggaaggaagggccgggccgggttggagaagcctctttctgggcgtgcgcgctaagagcctgcgcaccagcaaaagcccccagcgcccacgtgggactgagaggagggtcacttacagtacttgtccaatctgaaattacattttagctagacggattctgcacgtagccgcgccgaaccccacggcgcctgagcagggcggtcccggggcggctacagccccgccttgcgcgcgatcccgcccccgccggcgcggcccctgtaaagcgcggcccctgtaaagcgcggcccctgtaaagcgcggcccctgtaaagcgcggcccctgtaaagcgcggcccctgtaaagcgcggcccctgtaaagcgcggcccctgtaaagcgcggcctgattggccctttgaaccgggcgtgggattggccgtcgcctgcccaccccgcggctgcagcgttccctggggcctagccaaccgcgggcagggctgggcaaggcgggaggagcgcggacccaagatcggctacgctgcgtctgctcaggctgcgagttcccggctctggggactcaccttgcggagcttacccaggcggactctccgcagcccctgatgggtgtgtgtgtcagaccgtttactaaacaccaggactgttgtaggcgactgtaagaaataagaatattgcatggttacaattcttgaatgcttaccttgtgtcttgttccttactctacagaaattttctaatcccgtggcgaacccccgtacttcaacgtatgacattctgtaaatctacaaaacagatgggtccctgcctttgagaagtttttacaatttagtgggtactggacacggacctaatttaattctcacatgccttccctttctaataagctgcatgttatgtatccctattctacagatgtggggaatccgaaatttttagcttttactgggacacacagctagcaagcaactaaagcgagaattccaacctgagctccaatccgaactattttcataaaaggcaggatcccaggctgagggagttcgaggtttgggagacagtttagcagtcgctgagtccaaacatgttgttttcctagaaaagaaaactgagatccaggaaagggaagtgattttccaaagacacacctgtgaaaggtaataatttcactgaacggatcttaagtggcaggtgcactaagattgtctgctatcttcacaacaaccccgaagtaaataagtgctcttatcttggtcttacaggtgaggagaacagcccagtgaggctgaggccacacaattaaccccagtctttgcactacaactctaccagggatcctggtttggctcattttctttcttctgcaccatgattgttcaccttttcattaccagcaacatacccaaagacctagctatagactcgttggaatctgttacttagcagctgtgtgaatcaagtgttcaataggaataataagatgtattcatcttaccttttcagaacattatgaagaacaaatgtggtaagacatatgaaaatgctttgtaaagtgttagatgcttaatacacagaagacattgcttccagatctgtttcaacgtaccccaagaatggaataagtggaatatgctggtttcatgcactgtggcaagggggtctcatcttggctagacttgaataagtggatttgttgcctggcctctgtggatggctctttctctgggcttttgtgtatttgattttttatttgctccagcagccgtgttgaaccatgaaaggacctcaggaatgaaacccacacacagcaaagcaacaaagtgaaagaagcgtggattcctaatgcaggaggcactgaaccaatcaatacccactgccctccagacctccacatgaaagaaaaaaactgctgtcctgtgtaagacacttttattttgtgtttctattgtatgaggtcaaacctaataacagatatattacactctaacagatacattacattgtatagtagaatt

SEQ ID NO: 1879305 - DNA, 4001 bp, Homo sapiens
aagatgtctactctcctggaaaacatctttgccataattaatcttttcaagcaatattcaaaaaaagataaaaacactgacacattgagtaaaaaagagctgaaggaacttctggaaaaggaatttcggcaaatcctgaaggtaagagtctctgacaagaccaaagatagagcatttgtttttctcatcaataatctaagcaagggttattttgagctctttgtgaactatttctcttaaaataggaaaagagttaatcttgtctcaaaagagatagattttattttcttcccctatacctggatgtatattataaacataaagacaccctcagagaaaaaaatataaatatttaaaaattaatgtaaattagttcttagtattttggtatttataatattctcccaaacatcaacattactaaggggatttttgttaaagacaactaagtaatgaattatatacacttctgacttttaaaataagaaaaagagtcacttaccccatcaaatcttgataccttactagtctacatctttgttcacatataacacctgaatgaggatgagacaaaaaagtcttaaaaaaaaaaaagattttgtcccactttttaatactcaaagatcaggttccttaaattaactttgaattaattggctgataatgtgattctgtctgatgcagtctccctctgtgacttccctctgtacagaatccagatgacccagatatggttgatgtcttcatggatcacttggatatagaccacaacaagaaaattgacttcactgagtttcttctgatggtattcaagttggctcaagcatattatgagtctaccagaaaagagaatttaccgatatcaggacacaagcacagaaagcacagtcatcatgataaacatgaagataataaacaggaagaaaacaaagaaaacagaaaaagaccctcaagtctggaaagaagaaacaatagaaaagggaataagggaagatccaagagcccaagagaaacaggggggaaaaggcatgaatctagttctgaaaaaaaagaaagaaaaggatattcacctactcatagagaagaagaatatggaaaaaaccatcataactcaagtaaaaaagagaaaaacaagactgaaaatactagattaggagacaataggaagaggctaagtgaaagacttgaagagaaagaagacaatgaagaaggagtatatgattatgaaaatacaggaagaatgactcaaaaatggatacaatcaggccatattgccacatattacacaatccaggatgaagcctatgacaccactgatagtctattagaagaaaacaaaatatatgaaagatcaaggtcatctgatggcaaatcatcatctcaagtgaacaggtcaagacatgaaaatacaagccaggtaccattgcaggagtccaggacaagaaagcgtaggggatccagagttagccaggacagggacagtgagggacactcagaagactctgagaggcactctgggtcggcttccagaaaccatcatggatctgcgtgggagcagtcaagagatggctccagacaccccaggtcccatgatgaagacagagccagtcatgggcactctgcagacagctccagacaatcaggcactcgtcacgcagagacttcctctcgtggacagactgcatcatcccatgaacaggcaagatcaagtccaggagaaagacatggatccggccaccagcagtcagcagacagctccagacactcagccactgggcgcgggcaagcttcatctgcagtcagcgatcgtggacaccgggggtctagcggtagtcaggccagtgacagtgagggacattcagaaaactcagacacacaatcagtgtcaggccacggaaaggctgggctgagacagcagagccaccaagagtccacacgtggccggtcaggggaacggtctggacgttcagggtcttccctctaccaggtgagcactcatgaacagcctgactctgcccatggacggaccgggaccagcactggaggaagacaaggatcgcaccacgagcaggcacgagacagctccaggcattcagcgtcccaagagggtcaggacaccattcgtggacacccggggtcaagcagaggaggaaggcagggatcccaccacgagcaatcggtaaataggtctggacactcaggttcccatcacagccacaccacatcccagggaaggtctgatgcctcccatgggcagtcaggatccagaagtgcaagcagacaaacacgaaatgaggaacaatcaggagacggcaccaggcactcagggtcacgtcatcatgaagcttcctctcaggctgacagctctagacactcacaggtgggccagggacaatcatcggggcccaggacaagtaggaaccagggatccagtgttagccaggacagtgacagtcagggacactcagaagactctgagaggtggtctgggtctgcttccagaaaccatcatggatctgctcaggagcagtcaagagatggctccagacaccccaggtcccatcacgaagacagagctggtcatgggcactctgcagacagctccagaaaatcaggcactcgtcacacacagaattcctctagtggacaggctgcgtcatcccatgaacaggcaagatcaagtgcaggagaaagacatggatcccgccaccagctccagtcagcagacagctccagacactcaggcactgggcacggacaagcttcatctgcagtcagagacagtggacaccgagggtccagtggtagtcaggccactgacagtgagggacattcagaagactcagacacacagtcagtgtcaggccatggacaggctggtcaccatcagcagagccaccaagagtccgcacgtgaccggtcaggggaaaggtctcgacgttcagggtctttcctctaccaggtgagcactcataaacagtctgagtcctcccatggatggacagggcccagcactggagtaagacaaggatcccaccatgagcaggcacgagacaactccaggcactcagcatcccaagatggtcaggacaccattcgtggacacccggggtcaagcagaagaggaaggcaggggtcccaccacgagcaatcggtagataggtctggacactcagggtcccatcacagccacaccacatcccagggaaggtctgatgcctcccgtgggcagtcaggatccagaagtgcaagcagaacaacacgtaatgaggaacaatcaagagacggctccaggcactcagggtcacgtcaccatgaagcttcctctcatgccgacatctctagacactcacaggcaggccagggacaatcagaggggtccaggacaagcaggcgccagggatccagtgttagccaggacagtgacagtgagggacattcagaagactctgagaggtggtctgggtctgcttccagaaaccatcgtggatctgctcaggagcagtcaagacatggctccagacaccccaggtcccatcacgaagacagagccggtcacgggcactctgcagacagctccagacaatcaggaactcctcacgcagagacttcctctggtggacaggctgcgtcatcccatgaacaggcaagatcaagtccaggagaaagacacggatcccgccaccagcagtcagcagacagctccagacactcaggcattccgcgcagacaagcttcatctgcagtcagagacagtggacactgggggtccagtggtagtcaggccagtgatagtgagggacattcagaggagtcagacacacagtcagtgtcaggccatggacaggatgggccccatcagcagagccaccaagagtccgcacgtgactggtcagggggaaggtctggacgttcagggtctttcatctaccaggtgagcactcatgaacagtctgagtctgcccatgggcggaccaggaccagcactggacgaagacaag

SEQ ID NO: 1879306 - DNA, 4001 bp, Homo sapiens
agctaaaactagtgggtgggcctcctgactttggagtttgaaacagtcagtctttcatggttgaaaatagaaagtcagatatagattccttggcaattgacattttcttactaacttatccattttgtgttgatttcaacattactggtacttagttgtttataatattcaattttttcagctttttgaagggataactgacaataatattctatttttaaatcattagtttatctgtagttatttttgttactttttactgctctttaaccctttgcaaaaggttgcaaaatatattatgcctttaattaccaaaacactttacctttaattctattttaatctgctgttaactgcattagtgtttgcctgccatatcttttacatccttctcttttaatctttactttgtcatttgttttaggtgtgtttttaataaacaatatatagtcaaatatgggttgtttatttatttaattggagtttatctgttaatagaaaaaatcagccaatcattgcctttaaaaaaaatttaaacaacctatagaaaaggcaaagtatgaaacaggatggcagaaatactatgttagttaaatgaacataattaaaataacataatttcaaaaatgtaaatagcctaaactaatgaaataacagagacatttatagttgataaaaactacaaaaaagattcaacatgttgtctacaaaatacatgcttaataattatatacatattatatataattacatatataatcatatataattaattcagattgataacaggatgcaaaaactattaaaaatcacataacctatctttaaaatttgtcacattaatatactaaaaaaattaaaataacatgttcatctcaatgcaggaaatacatttgacaaatctcaatgcatatcaaagataaaaactcatactagaaataaatggaaatttattaatatatcaaaaaatacagtataccttataattaatgaagaaatcttagaggcattcccttcagaaacaaaatcaggagcaatatcattattagtgtttgccatagtggggtgccctgccctatgctataaggaaagaaagagaaataaatacattggtagaaaaaaaaaaagaaaacaaatgacattatttgcaggtaagataatatgactctctagctagaaaaaagcacctaatcaacaaagtattacaactaataagataattcagcaagtttatcagaaacaatcaagttacaaaaattaaaagcacttttctctccaacaataaccaattacaaaatgtatttaaaaataagatatcattcagaacagcaacaaaaaatgttaaataactagaaaataatgacaacatataatacttccatggagaaaatttttaaatctaataaatgacatagaagattatctgaataaatggagtgacattccatatcttgggggagatgacttaatattataaacatgtcagttcatattaatctatacattcaacacaatcacaaatacttcaaaatatttgtgttgaatttcttgagaagttcaataacctcaagtttttatggaagaataaagatccacgaacaggtaagtcaacatttcaagaaaaaggcaaagaatgggtacttgcccttccaagtattaagacatactacacagtcaagtaataataacaatgtgatattattgcaatgacaaaaagatcagtgaaacatgataaggagcttagaaattaagtatgtttatatgggaacttaatatatagtaaagtgggtaccatatatcaatgggaaaagggcagattaatagaaggagttgcaaacctggctcatgccatagataaaaacaaaattggatatttacctaaagtcacatacaaagatagactgcaaatgaaataaatatctgaatgtgaagcttaaaacaacaaagtaaagagaagaaaatatgggaaaataccttagtaatctcagcacaggaaagaacattgtagatagaactttacaggcacacataatacaaaactagtgatgacttttattacatcataattaaagatttctgttcagtgaaagacaccacgaacaaagttaacagagagaagacacattgaaattatttgcagtgtctaaaaataacaatgtactaacgtctagaacatacaatgaacttcttaaagtaaaaaagaaaattaacagaaaaatggacaaagtatttgaacaggcaatgtatagaatagggtaatcaaaatggcttacaaatatacataaagatgttcaaactcatggataagggaaatcaaaatcaaaataacagtgaaatgagctggaaaaagttaggaaactagatattgctaggtgttggctgggatgtgggtttaggaaatctcatgtactcctggtaagaaagtaaagctgttctggagagttatctgacagtatctagtcaatatcaagtatacatatagcctaccacccagaaattctacttctgtgtttatgacccccaaaaatgtctcccagagatccataatggacatatgtaagaggatgttcgtcgcagcattatttttagtgctgaggaattaattagaagcaatttgagtgttcatcaccagggaagtgcagaggtatactgagtagatgcaaaacaacagcacaattagaagcaatggactagacttacatactgcaacatggatactaaatgaaaaaaaaaggtaaaaaaaagaatgagatctaaaaaaaatagcacttacataaaagtaaaactctatgaacataaaagtaacaatagatactttacaaacacctgtacaagttaagccatatacagtaaactcattagaataatttatctgttgagggaggaggagaggactgggaataaagaatggggatgaaagttaaccaactcttccacagaagagtctgcatagctcaataattacaatgtgccatgaaataaggaatatgattaactcacatctctatacctaggatttaaaaaaaaaattgatatcctgagtgctgatggtctcaagtcagcaaaaactctggggccaaagtctatgaatggttaattttgcaagctcacataactgtctgctacaatagaatatccttggtgaaagcataggagagaataaaagggctgagacctaagaacaaacagattctggatttctgacttcagaagacaaaggaaaagaaagacaaggaaaattgaatcattttctagaggggtgttaacttaaaaattacacaatttataaattttgaaaggaaagttatatttctcatagagggttacagttgcaaagttgacaggcaaattctgacaagctgggaagcctggcctctggctgacgccagaaaggcaggtacttcaaaagaggagggattgggataggaactttatgctgaatgggttgactaaacatattcaatggattacagaaggagccatgaatattcgtggtcctcctaatgcacacatactgaataaatgtacatattacatctgaccaatgttcaccttggggtggagacttaacatttaaatatattataataaggctttataaggtcgtttcaggacacaaacgcactcacgtatgcagcctttgtaaactggccagaatccgtccacggtcggtggtcttcttatcaggagaaagttattgaaatagcctctcgtctaatcaaagctgtagctatagtttgtgaaacagggggatggagtcagtgtctggcagtgaatgagctacaaattgttttcatattgcttacctgaaggccagtgcttgtttagctgctgaagaaaaatagaaaccttatggcatttagaacatagtttattctttaagtgcagaagtgtgtgacttaacccttgactggcatggtcttagctcctgtttacaatttggtatcttactgccacaaagagtctgttctatcagtcttacattctctattttcacatca

SEQ ID NO: 1879307 - DNA, 4001 bp, Homo sapiens
tcccctggagccctctcctccacccccacacccagaggacaggctgcatcaggggtcttcccacccccaccccataccaaggctgctggagaggagcctggcccaaggtggcgctgcccctcttggacctccaagaatgccgcatggagcagcccctcagggctgtagtccctctacacctacattgggcccctccagcctggacccccacccctcccacttcctggcttcccatccttcaggtctcgcagaagcctcctcaacaccctccctgcttggtctctatccttcagaaccctcatcacaacctgtccttgcctctagaacggaagccccatagcagcagggaccacgtatctgttttagcttcagtttctagcccagtgcagcattgtgaaaatccttagtaatatttttaaaaagttttcgaattctacttttctttgctgacttggcatgtgctttctcctctgcccgtaacccccgttcctccttatttccttgctaacacctactcgtctttcaaagctccatgccactgtctccttgaggaaattgttcctgtgcccccagtaggtaacacaccagacagaggcgagattctctatcccgccccagacaaggagcctttgctttgcagggctccccttgggaccctctcttgccaggagagcctctagagaagccatctagaagggcattcaagactcagcaagctccagctcccagcctggcagactgggtgggggagggcccagctggtgggcgaggctggtttatcgatgttgccgagagccctggggaaatcaaggtgaaaggcagccacgctgctgaggaggcccacccgtttatcaaccagaggggctggggccgggcgaaaagaggcttggctgccagaggcagctgtgaggtgggaggtccacaccactccgtggacctggaggctgggctacacactgtgcagcccgggctgctgcgacagtgtttccaacatggcgctaattctaggtaactaagtttggctttagaaataccgtcactggagccacagggcttgctgacagaaatccccagcacttggcattgggcaaggagcccttagggggtgaagggcaggcttattcagcggccttggtgcagtgggcacacagggcaccggccctgggagcctctgtcttcctcttgcaggccagggttgcctcctgattgtgggttcctgtctgtctctcaggcccccagccagggccagcccaagggagcagggggtgcagagcacaaccaggaggatggagccaatgggtgcctggagcaggggcacagagagggagtccaacccaggagcccagcaaggcgctgcagctaaagaggtcgagggaaacatgcagggagactgccatccctccccagccccagctgccccatagcaggagtggccttggcatcccacctgctccacatagcacccaggccatctgagcagagtgaagatgtcaaagagaaaaccaaatcggattgaggctcctgctcccccttaatgaggttcattatcagcagctctgatccttgtaaaacccagcaggccggattaggggcaggctctctaatcctggctgactcctccccaccgagtggccaaccctgcagctctgacaaacaagcccttgcttcctggaggagctggaattaggcaggtgcagacaggcttctccctcaccagcccagggcactgaggcaggagctctcagggaggattggggcagggggtggcaaggctgcacatccagaggcctgtctccgtgcatgaaaaggccatggggtttgggtgcagacagttctatgggcagtctgtggccaggagctgtgtgtgctgagggacatcgagtctggctgcattccaggtgaggctggtctctgtgcattctgtccagactggacactaggtctccaagtagcaagttaaagaacacaccaatgcttgccttaacaaaaataatttattccacacacctcccaaggcagggggtagcgtgggaatcaagcatgtgtaaggcactgcccccgccagacccttctaacttctgcacactggaaggtgaaacctggagagagaagacactcccctccctagcttctacctggcaccctccaaagatgagcattcatcttggagaccaaaataaaaaaggacaaaagaccaggctcagagggagcagagctcaatggggggaagtgaaagcagccatcttctcctgcagctaagccagggcaaggcactagagacccacatccttcccatgccaccaactcgtcaggtcccaccaagcaagccactcaccctacagcccagcaaccatggcttgcctcacctgggagaccagcacgacttccagaagcttccaaaccccaccctgaagccaaaccccacccaggaggtctgaggagctggaggctggccaggcatagagggcccggggtggtccttcctcccagggtgcaaaggcttcttcattgtccggaagggagcagggtgggcggagccccagcagctagtgaggagttccattccagcccacccagctgggggaccctcctctggcttcacttgccccagttgagggccaagaccaagcaggagagactgaggctccagtgagaatgaggcaggacttcaaataagctgaaaaacaggaatgtggtgctaagaggccagggactgagctgccctatgcccactgcccggggctgccctccctgcacagcaggggaacctggaccctgctcctgtcttttgtgtcaaaggagctctctgtcctagcaaccccaagaagcttcactggagcaactcgttttcctgaatttcccacacttctaggccagacaaggagcaaggggtgggaggggagggaatggggtcagggggcttgaggtgcctagagatggcagctccctctcccgcctcctccccaggtggttcaggctgcagggtggccagcatggcccttcagggcccttatcttggcctggaagtaggtgtacatggccagcaggcccatgaaggacagggaatagagccccacacagaggctgatgtccaggtaagagaagccccctcccagcacctgcagccactggcctcggccccgtccagctcgggcctccagctggccctcagggatgtcgaccagctgcttggagctgcggcccacgcgcctgacctccaaagggccccagaggcggttcttctcagccctggactcagccagcaatgcagcccctgtgtctcgcttgctcaagtgccactgcccaagcggctgctcctgctcattcctctgaagctctgccatgtgctcaggaggctcctggcctggtgcagctctgaggccagggtgcagcttcgggggtcgacttgcctcaggtccctcagccggcacatgtggggtggtgtttgtgggggacttcatcatctcaggcttcccagggtccagagttgaattccggctttccagctccagggctcccatcgccagctctggggcggctgccacattctgcacatccctccgggcagctgacccagctgcagggaagtccaggatgatgttgcttggggagaagtgggccttgaggaagttgagggtggcttccacgtcccacacgggcacatccaggcgttcattgtggcaggcagaacaaagttcacggggtggccactgcaccttggggaactgggggtcctcgctgggggcacctacagagggaagcatacacaggctggtggtgacatcagtcccacccaaaaacccagaccacactcctccactcagaacgccagcttccttgtctgcagaaagggctcgccactgcccttccagaggatgggtaattagaaaatacagattacaaacactagcccacagtgggagctcaacagatggcagcatggaggaggaggcagatccacctacccctcagccccggccctccgtggttttccagggaag

SEQ ID NO: 1879308 - DNA, 4001 bp, Homo sapiens
agtttttagactagtggctttcaagcattaatgtgcatgtgaatcacctgcctacacgtgaagaactacccagttgatccaattagaaggcagacacaagagtagccaaaagtattgcaataaagcaacttggggtggactcaacttgcaggggattcagatcccaggtttccaaacctttttgctattcctggttcttttgctttcagtgaagagtagttaagtacaatagtagctctcatttactgactacttacaaagtgattggcactgttcttggtgctttgagcatattagctaattctcacagcaccctgtagtactatacctatagggatgataaggggatgtgggtggtggggagggggcagataaaaagaacagtaaatttcctaagtttaaactggaagaatagggatttcatcctggttcacctgagtacaaagtctaaggttcaatgattccttgacactgggtagcaagggagcatttcagggatgcctaagcttgtggtcaggtgccaacggtacaaagatagaagtatatcagagagcccttgcagaataaggccctccacaggagggttgtgaccttggtacttgcctcactgtgtttaaattcaggtaaggtaagagaattgaagaggtaaagctaccttagagagtattgctgcatctaccctggtgacttacaaggtacttgaatttttttttttctagcaaactgctaaagttagcctttgcctttttcccagagactctctaggaatttttcccatctgctgactaggaggtaagcccggacctaaatttttgtcttgttgtaggttaattaagactggtgttagattcagctcctaaggcctaagagaatttaaggttgtcttctgggaaggacacccaacagcagcattggaattggaaaaaaagtgtaggattttgctgagtgagcagggggaaagcaatgtaaagcccaagagaatatcttttgaacaaacgtccttttcattttggtttagaaatagaaacgtggtaaaaggaggcgactgttttctgaaggcttgtagcacgaaaacaggccaactggccagcaactagttgtctatcagtttctctactcacatacatctgccttttccagactgccagcgcggagcactagtttgactttgggtgctcttcaaatagctggcattgataaggcattcccagaagactgtgttacttagtaatcttgtcggtacattttttcactgggcagagattttccaaacagagagctgccagctttcaagacgtcagagtgctttttcatcctgaaattgggtgggaaaatggggagaagaaaagcacggttcagatcaatcaatgagagagaacccctccctccatactcgttaaacaacaggtggttttgctgtgcaccgtcaactcctttatgcgggagctgtaggcggggcattccaactgagtctccctggaatctgccccttagcccgtattgcaggggcggtgcagttggggattccggcctgaaaggagacttggttgtcaaggggctcaagggcttcatgatccaaggatattgggttttgcttttctccttctccatcttcctcattctatcccaccgtcccctccccacccttctcttaggaggccttcgcttctcctgtggaggggttatcttcatcctgaccctggccttcggaggagttcccagaagggctatttttagtggtggctgctcccctctaacttacccaggggaggagctgcggtggctgagccgacgctgcgcgcacagccgcctgtggttttccgcgcattgtgagggatgaggggtggaggtggtattagacgcagccgaatcctccctcagagtccgccaggtgggcgtctcaggggtgggagtggccgcgtcgtgaagcggagagaggatttctctcctggtcctggagaaggcccccggcggccggcggcatccctcgctggcgagtcccgggagcgaggtggtctctgcaggggaggaagttcccgggcggcgcggcctgcgtcacagcggggctggcaccgcggagtcgactcggcgggcggtggcgaccccggggccgggcgctgggcggcgctggctgccgctagccgggctgcgtgcggggcggcgctggaggcggctccgtccgcggccggggaggcggaggggaggagggcttgcggggctggggcgttagctgcgtcccggctggaagcccgcgaagagaagtaggaggaaggcgccgccgtggccgcggccgcagtgctcgggcgcgacaagccatgagcagcgaccccgcgggcgacgccgccgtccctggcagccgctgagcccgacccccaggcagctcgccgctccctagcaccttctccagtcgacactctcgcgcccggaggtaagggcgggggatccgcggagggatggagaggggcagcccgcagagggccacccgctcggtccgctgtgcgcgccggaccgggactcgccccgcctcactcgcgtccttgcttccccccggctctcagacaggcagaatgtggttgcccgcccggcgtgtggtgctgggaaccttccgctactgcggctcaggagcccgccaacccctaccccacccaatccgcgctagcccgagcggccgcgcgaggatctcagcctggcgcccaacgccgcgccgcagcggcaggtcctgcagactgggcgcgggggtgggggggcggtccgcgaggggaaatgcgtccgtggccggggcgatcgttgttctttcctacctcgaaaatctctgagaccccggggccagtcctttccggtctatcacccccctgccacctccgaacccttgaagttagcacttttgggcagggaaaggaattggaaggtttctcgaagaaacgtgagagcaccgtgtgctcacctgcaggacaggagggaaggggttcagcttgatcgggcgggccccagaagccaggtgtttaggccagcggttgaggccaaaaccgctgccttcatcccacgcctaggctcgctgatctttccctttccagctggttcccaccaatgagatgattagggatggagttagcaactcaggagccttagatgtgttctgtggacacgaatgcctttcttttctccctcagccggttcttccctccccaacccccacgcctgcccggtatacagcaaagtccaaacagtttcttccaaacctcgcatcctccgtagttttgcaacagccggacacctagcccgcatcctaatgcggatatttcagagtattacggctaaacttcccttggtttcaaattccttaaacatgttaaagcctcagcaaacgttaggaaacattttcaggttcccatcctcaaagtaaaaaataagaaccaatccatctttgttggagtgccggtgtttggcacggggaggcttgaattacctccatttaaagcagcctttgaaggaaggaataggtaaaggaaatcgcagccgtttgtaagtcacatacttctttcgcggtagtgtgagaaacgtagccttaaccaacagtcacatttcccgacaggtatgtgatggtttcccaaagcatcgatgaggcttcagcgtgggcaggtcattaagatgccatttagacgaaaaaggagtaaaagtggagtagtcctcttggttagcacaatgctgcaaaatcgccagagccaataatttttatacatttataaattctgtttatttttaaataatttgttgaaaacccaaaacgtaatctgagctgcataaaactcgctcaattcataaacaatgtgttgagtgtgtaaacaaacattaaatgtatacagctctagtctaggatatttgcatttcttgtgacttgctttaacagggaaggccaaggctataattggtttgctttactctggagtgattaagttctgtcttggggtcagtttgtttcctttgagggggatgtagggcag

SEQ ID NO: 1879309 - DNA, 4001 bp, Homo sapiens
aaaatgtaatgaactcagtccaggtacttttgtggattgtcatgctatccctgtagttgattctaatgtccaaatgtttcattatttgccaatggtgcaataaacactgctatggctaaaaagtctatattttctatgaatgggcctatctcccacaaaagtatactaacaaaggaaaactagacctattagacctattataataacataatctgaataatctggcagcagagcaaactgagacttctatatataagtattattcctttttcaacaaagaatcacacgtcctgatatcttgtcaatttgttctcatcccctgcccttgtttcatatggagccctgtcaaattctatctaaagccttacactcctctgcttttggggcttctgtgtcctcacatgactcctacagtgccaggtgctctggtaccagcaaaaaacattacagatttaacggtagttagattttaatttcattactttggactttaacctgccctctaattagatgatgaactaaggaaaatctaattactttttcaatattccttcagtggcattcttgattattgctgtgtcccatttctacaactcacaggggcttcctgaatgtggataacaatcacctctttcccaagaaaagctgaagtaactccctttgttaaagagttggaaatgggtttgttggtttgttatgtgtctgctgttttatattagaattggctctgtaagtttcacccctaccatgagattagtcaagtttgggcactcaggtagccagaagcatttaaaacatgctacaattggcctctgtcttgaaacaattctcttttgttttgcaagacaagcgtatgacctttccttcagccaggagccagtgggtaatggattacttgattgactgggtatgacactgctgttgagaaaagtactttgaacatatttggcaagttgaaagtggcacagctcattaggataccattatgttaatttgaaatgccactcaggtaaggaagcagttctgctataatggtacattgtaaagaactgcctggatccttcagatggaaatggccttacggtggtgaggccagctagatggtgtggatcccaggacaatgtaataggccgtgctacctgcccaactcctatgactgcctttataaggaaggcaagaaaagagactggagtatccttgtgttgcctgattgactcccactggcttcatggattcaggcaaatgaaggaaacaagaaaataataggctatgtctaagcttttgtcttttgcctctgaccccacatttcttggggggggattaactcgccaccaattaacttgccccgttcccccagactcaccacagtcaccacaaccactggagtgaaaatgaaggtcctcgtgcttctttgcatcagattcctggatgagatttcacaaacagccaaagaaagggacagtatcgttaaagattaaaaacaaacactagtaaccccaaccaagaattgtaatggcaactaggggaacaagaacaacagcaaaaaagacaaaattgcttaccaaatgtttacagacacttcatagcctctctacctcattttgattaaactatttaatatgttgcatttactttcagtgtatcggagataaggtcctgtgagtttgaagtctgtgatccaccaacaaacatattttgcagtaagaggttttcttgtggagaacagaaaaaatgctgagcgagagaagctatcctacccagcaattcaaagatatttccccttctctgcttttactgagaggcaagatgactcttctgcttctgggagggtcaaaacacagaaagaaaaccagtccagaggaaggattatcttggatacaaacccttttcctgggatactagctaatccaaaaatacaagctggtgcaagacagctaaacatcagtccagctcctctttgtgtctgtaaatgtagctccatgtaagtgacttggaacaattaaaccacaaaatcccaacaaaacaaagtgcagacaatttatagcccagctacagcagctagggaggaatatctaatagtcttacctaagaagcaattacaaatgaaagggcttctcagtaatggagattttttttttttcaggaggcactctgccagaaaattttttcaccaaaaggcagagatccataaaacctcccttttaataaactatatcattaatagatgtaccaggcatatttgcaacattggaggagagcatgtctctcagtagaaaaatgagtaaatagctagagctaaatatatatggttaatgaagtctgtactctttgaaggccttaaccatggacagtccagggagtacaaagactgttggtttcaaagtccaatgagtaagaattcaaatggagttccaacacttactagccctaggattcaggcaagtttttaacctctctgagccttggcttcctcagttggataaaaaggacagtagcatttgcaacccggaattactatggagccagcgcataacagttgctcaacaaatattacatccctgatcttttttttgcacaattatagaataaaaataggaatagtataaatttctaccttttatacaagatagtacatgatgaaaacaaaggaaagaatatttaatgtcatttaaaaagaaaatatcctaagaggcagaagacctgaagtcaactcctggctctgtccatttccatatctataattctgctcttccatctctctgggcctccaacttctcatctgaaaactggagagatctgaccaacttgttgctccctagggtttcttctggctttgaaattctttgatttcactaatgactgttcttgttgataatgtgtaagccactgaatagataagtacttaaagcccaatcattttgtattagaagcagcagcatataatagtaatgagaagcttctaaaactggactgctttggaatttgaattccagatttgccacttactaactcagggacctgagaaatttaatctctctgtgtattagttatcttatctgtaaaatgagtaaagtcatagttacttgggtcatgaagatttagtgagttagccgtggagagtgctaagaacagcatctgacacagagtaagcagtcaatgaatgacagcagctctttgttgttgttgttgctgttattattgtagttgttaactattaaggggagatgcagtaatcactacagtggtttggccaactttggatttaaaatatagtgattttgtctttgtataagtgagttttaatcaattatctttctatgtgcccatcatccattcagtccccacctgcttcattataaacacccagagcaatgactgtccctacttctgtagcccaagtgggcacatgcaagacagctctgagttctctatatatggaaagaagaccaagcccagaaaaatgtactgttaagcactgccataatttgtgaaaaggtcagacagttacacaagcattttgctgagaccagagaaaagcaaacaaagactaatacaagtgcaaaagactatgatttcaaagtaaaagacacgttgaaactttttaaagagtcactttctgaatattatgaaacttgagaaaaatttatatcagcaatttataacatgacagcaatattacccaaacagttaaaacaagtgattgatccagagcagatttttatgccaactaatctaatttgtgttggcagcaggtatcttctagaagttttatattcatttaatggcattttcattgtttagtgtctatgacactttgatctcaccaactataatcagccacagtacaactaggtagagtgaacaccagggattgttacttcaaagaacagactctctgccctcaaagagcttacagtctaatatgagcaattataacccagcacaagatgtaaagagtgacactgtgtggttcagacatcaagaaagcaataaggcttgag

SEQ ID NO: 1879310 - DNA, 4001 bp, Homo sapiens
aaaaaactagcctggtgtggtggtgcgcgcctgtaattccagctactcggaaggctgacgcaggagaatcgcttgaacctgggaggcggaggttgcagtgagctgagacagcgccattgtgccccagcttggctaacaagagtgaaacttggtctcaggaaaaaaaaaaaaaaagaggctgggcgtggtggctcaagcctgtaatcccagcactttgggaggcttgaggcgggtggattacctgaggttgtgagttcgaggccagcttgaccaacacagagaaactgtctctactaaaaatacaaaaattagccgggcatggtggcgcatgcctgtaatcccagctactcaggaggctgaagcaggagaatcgcttgaacccaggagacagaggttgcagtaagccgagaacacaccattgcactccagcctgggcaacaaaagcaaaactccgtctcaaaggaaaaaaaaaaaaaaagaaagttcaactgtaggtttcaaaagctcttaggcctggaaaggccagaggtctaattcctttctctgtttaaatattaaattatggtctgaggggaacaatattggattcctgtctcatttccgttttattccttctataccacagcgatcagcaagggtatcttgcaaacggtttcgcaagattctatataaaaaagttgcttaggccaggtgcagtgactcccgcctgtactcccagtactttaggaggccgaggcgggcggatcacctgaggtcaggagttcaagaccagcctggcctacatggtgaaaccctgtctctaataaaaatacaaaaattagccaggtgtggttgcgggtgcttgtaatcccagctacttgggaggctgaggcaggagaatcgcttgagtctgggaggcggagattgcagtgagccgagaccgtgccactgcactccagcagcctgggcaacagagcgagaccccgtattaaaaaaaaaaaagttgcttcatgttacaagccagtgactcttggatgggatgcgtttctgaagccgtcgctgttcagcagagcggtgagaagggcaacctttttctgatcgctttcccaagcaggcaggaatctaagtgtccggaaacgccaggagctggccgccaggtgagcggaggacgaaggggtcctgacttctaggggacaggccttggcagccgctttgacccgtagccctgtggaaaccaattgcatttctcttcatatcttccaccaggccggggcctggggttgccgctggaggggctaaagaccgctcctgcttcctcagccgccccttgcccggcgcgggaacccgaccgagagcccgccaagcagcgggactccactagcagctgcgcgcctgcgcaccggggccgagcgcgcgagcgttccttccccgcctgtagtccctcacttcgtcgcccggtccgcgcgcctgcgcgccggctgggaggaactcagcttctccgccttggcaggcgggaggacgcgcgcgcgcccgcggcgagggggaggcagtgcggcggcgggagtcgggccgcgcgcgccagtgggaagcgtccggctgccacagcgccagctccgtcgtagtcgctgccgcccgtgtcccgctcgcccctcctcccgctcccccgcccgcccctgcccgggcgcatgcgctgccggagcgcgagggtcggcttcgggtgtgtggtggcggcagagctgagctgcgaggcccgagagtcagaacctgggggagagggatggtctctgcacgggggggagccggaggagccgccgccgctgccgacgccaccgccgcagccgccgccgccgccgccccggcacccgcctcccggcgctgacggtctcgtacgaagccggcgagggggagccagcagcggcggtcgccggcacgccgcccagcatggtccgggaaaccaggcatctctgggtgggcaacttacccgagaacgtgcgggaagagaagatcatcgagcatttcaaacggtgagtgacacgaggcccgcggccgcgctcgctcctcgggcgccgcttcccgccccggcccgttgccggcccctcccggagcgcggagctggtgaggaggactccggcccggacccacgggcgctgtgggacctcgtcagccgctcggcccgcgtcgcggcgttgggcctcgggtgtcggcggtgcgggcggccaagccgcgccgccttcgaagagcccgcggggccccggcggccgcgtccgtgacgagggaggtgaccgaggctcggcctccacgcagccggcgccccggggctgccctcgcgtcagcccgggagtcggtgggagatgcgctgggcggcggggtcgcgtccttgcgcgcagtgcccggcccggagcagccgggacccgagcccgcccgacagccgggtccggcgccgccactccaagctgctctgcgggcgctcggcaatgtctgacttcgggagggttccgtgcgaagggaaaggcggtgcgaaaacagaagtcgcagtaggtactgtggtcgcgtcgcggacccggagagaccatctaggacctctccggaggatttgcagccttgaaactcactgggaatggcaaacgtttctcgtttttgcggggctgggtggagagtggtgtgaaataagttggtgcgcccgtttgggcttcctcgtccccggcggaggagaccgcgtctgacaggaggttgctagccccggcgcccgtagcctcgggtcgcactcccaggccgccctaagaccctggtgccccccacccctgaattcccgaatcaaacggtaaaacattccaaaccttttacgatgagaagatgtagcttaaaaaaaaaacctcccctgaatatttttgtgaattataagaataaatgttgtcgttgatacatcttattgagtagcgtgtagtgcgttttctttgtgaaatgcctgtgtaccgtaacagataggcctccgcataaaacacttattaaaatgacgattggcttggacttggtgcagattcagagggaccatagcaaatctgtggttgtcctcgaaaatgacagtttattccgatatttaagaccctggaaggttttaagtttggcttttaatttcccttactatgtagtgagtgaaggaaattatggagcgtcctcattaatgagtcaccatgggaaaaatagattgcgtcgctcgctttgagccgcttggataaggaaatggaagcagcggcggcggagctcctgtcttttaaatggaggatcattgattgtgttggtggttgctgttactggggcattaaaccctcgccgctggagcgcgcgtctgcgcgtgtccgcgtgtgaaaaggagccgggaatcgtggggccattcataacctgcttgagctgtcctcggcaggccggggggaggtgcgcgcttccagggactctcccggtgtttactacgtcgtgcctgagaaaccaggcgggggcggggggaggcagggagcaaaaattcacctctgtgccctaggatgaaggggagaccacgggctggattgggaagcagatgggaactttctcttcctggcgctgctccaccccttacccgccccccacctcctggcttctcctcgagtatcgtcagtgttttgatggaaaaatcatttaggtgtacattattggagtggaaaaaccacttagatgtgctcactttaatcccctgtggactttctctgtaggtctctgcctgggaaattcgtatgcaccgatgtacaagcacgtgcattgcagcattcgctcgctcctcagtgttatgtgcctagacgtgtcatttctcattatgcagattccagagacattgcatgcttatggctgggagtttggcccctctgcaagatgagggggcagagagaagaaagaggaaatcgtcccaggcagctttggaagggttcttagtggacggtgctgcggtctggcttgtgtgaatgactttctaaaatggcggccaggacccactt

SEQ ID NO: 1879311 - DNA, 4001 bp, Homo sapiens
aaataaccagaaaaaaaaagtaaaaatataggacattttaggtgaaggtaagcactaggaaagaaagaaaaaaaaaagcagggaagggatgttggccggggcgggcggagggggggatttatacagtttggccaaggaagacattataataatgcacttattccttagtttagaacatgtagcatttcacctgtaccgagagatgcctgatatatttcatacatgaccaaaataataatgtaagaggcaataaaaaagtgcagggttttagggttctagatatcagcacattttaagattaaatgcatggtaagaacttttgtactatatacacctagtttgaacttaaatttaataacaaactctttggagtctctctctctctctttttttttttttcccaaacatagcttcccaaggagcagaagggctgaattttctctagttccaggaagaccgcaaggctactgtgctctggatgtctcgtttttatttttttatttttttattctccagatctcaagacggtgtctggcacataccattcaatacaagtttggtacctggaacccactgaatatgcatgtccagtaactattaactacatgtgttggtgcaagggagaaggtcgagcaaccggatctgctccatcatagcccgtctcagtcgcttcattcaagtcagcggggtgaggttgaggggattccaacttcacaagggcagatttctcatggactctctttctctggttgtactggaacactttctggcgttattcctctgctgggacagcatgaacttatgaaacgtggtcctgtctgccctaaagccagggtctcaccgacaaggacagcgatgctggggcgagaaataaagttcgtcctgggcctgcgtacggtacagcgcccttgggaagcccttgtggagttaagggtgatgcccacttctttgtctccctcattctgtttcggtggctctctcgttcccagttccaagctgcccacttgttagaggagccactgcttaccaggcatctggtttaataaaacatggctagagcgactgcatgttaaagtgagtaactaggcactcacaaggcacctataaggttaatgctaaaggtctgaaaatagccgcattctaagctgaccaacaattataattacacaatatttatggccatacaggacatctcccaccaagtctgcggaattgtccagatgtcctgagttttttttttttttttagacaaggtctcactttgtcgcccaggctaggctggagggcagtgtggtgcgatctcagctcactgcaacctccgcctcccaggttcaagtagttctcctgcctcagcctcctgagtagctgggactacaggcatgcaccaccacgcctggctactggcttttttttttttttttttttttttaaatagatggcatctcagtatgttgcccaggctggtctcgaactcctgggctcaagggagactcctgtccggcctcccacagtgctgggattacagacgtggccaccgagcccggcccagccctctactcagagataacgtcaatgcgcaggcttaggttgaaggattaatggtcattagtgcaccaacagcccctacctttagtgggcacatcagcacattccacgattaatcacagctcctcacagctgcctctaagtagtgacactaccgaaggacgggagttcctcctcctgcagtctgaggacttgcactctctaacggagtagattccaataaacttgcttccttcactgcgctctgtgactcgcctccaattcttccctgaagtagacccaagaaccctctcttggggtctggatcgagacccctttttccagcaacacaacccgcggggccgcctcccgcccaccctcaggtgcaggagaccccgggccatgcatccttccgggcaggaaaatgtcagccagcgctcgccggccgctttcctcccccgcctcccgaagttctcgcccggtagctccccgactggctctcgcgccggacaaaggcgcacgctgattggccggagggccgtagtcatgcaggacgcgcgactctaggggcgggaccagacaaggggtgactgccgcgcggcgcgggggaggagaccttcatctgttcacgcggtagcgcggattgcggttcgcggcgcgcgccaccggggaaggagcggtgggccgaggggttggaggtggggccccaggaggacctcgggctgtgggccgggagagcggagtcggggagtggggcgggggagcgaggtggcgccggggagcctgggatatggcgcggccagacgatgaggagggggcggcggtggcgcccggacacccgctcgcgaaaggatacctcccgttgccgaggggcgcgcccgttgggaaggagagcgtggagctgcagaacgggcccaaagcgggcaccttcccggtgaatggggccccccgggacagcctcgctgccgcctcgggagttctgggcgggcctcagactccactggccccagaagaggagacccaggcccggctgctgcctgcgggcgcgggagctgagaccccgggggccgagagcagcccgctgccccttacggcgctctccccgcggcgcttcgtggtgctcctgatcttcagcctgtactcgctggtcaacgcctttcagtggatccagtacagcatcattagcaacgtcttcgagggcttctacggtgtcaccttgctgcacatcgactggctgtccatggtgtacatgctggcctacgtgcccctcatcttcccggccacctggctgctggacaccagaggcctgcggctcaccgccctgctgggctccggcctcaactgcctgggtgcctggatcaagtgcggcagtgtgcagcagcatctcttctgggtcaccatgttgggccagtgcttgtgctcggtggcccaggtgttcatcctgggcttgccctcccgcatcgcctcagtgtggtttgggcccaaagaggtgtccacagcttgtgccaccgccgtgctgggcaatcaggtaagtactggagtggtaggtgaaagtcagatccttaaaagaccggaaaaagtcataggccgtgagaactatggcctgtatggatgaactgccccaggaggtatttgtctataaaagaggagatgaagccgttgaataggaggccgtcttggattgaagtgggctataaatttctttgtaaggacaaaattttccaaacgaccttgtcatcttgctttgaaaattacctataaaataattaactgggccgggcgcggtggcacacacctgtaatcccagcactttgggaggccgaggtgggtggatcacttcaagtcaggagttccagaccagcctgggcaacatggggaaaccccgtctctgttaaaaatacagaaattagccaggcctgcttgcgggtatctgtagtcccagcaactcaggaggctgaggcaggagaatctcttgaacccgggaggtggaggttgcagtgagcggagattgcacctttgcactccagcttgggtgacagagtgagactctgtctcaaataataataataaactgtaaccataataataataataataattaactgtattggcttgtgtatgcctaacatggaaaatttgtcaatgcagtaacgaacaagacttggggtattatttttgtcaccagtgtatttgtgaaaggaaggtattgggttctgggaagattgtttccattttgagaggtcattgtgaacagctcccttttaatttcatatattagcagtcagcacagttcctggcacataagggacacataaatgactgctaaccaaaagttctgggctgggcgtggtggctcacgcctgtaatctcagcactttgggaggctgaggcaggcggatcacttgaggccaggagtctgagaccagcctggccaacatggcaaaaccaaatacacaaaaattagtggggcatggtgt

SEQ ID NO: 1879312 - DNA, 4001 bp, Homo sapiens
agcaatctgtcaaatgcaataaaatttctgccgtgcaacagaaggtgagacttagcttcatgttgatccaattcacggtatttaaccttacgatttcagaagaggttcggctatcaaatgagtttttgcccatttgctatcaaaggattacggaattatattatggcttgcttaatcaaatgaaatggaaccatttacaaggagtgattatattccatatttgtcatcccagtacttagcacaaactaccagaatagatgctcaagcatcatttaattgttactagggagatggtagaaagccattttatgatttactctaagctgtccacatttccctgagcaaatgtaaatagggaaaattaaattcttgaaaaatattaactcttgattaccccctactgggaaataaaaattaatgaccttatatctcatggagtgctttcagggttacaaaaccacaaatttttttaaaaaaagcttggagaagaataaaaatgtgttctaagttagcactgatatactctattggaggaggctattggcgcaggcagagcagtaactgagaccaggacaggaagtagttacaatatgaatgatgtgaatatgttttcaagccaaatatgtatcatcgacaactgattacaatggctgggaaatccaggacagaagaactagaagtttctccaaacttggctttgaaattaaaaaaaaaaatgtgtttacaaggactatttcctaattatattatttctacaatgagcccaaatggcaaagaccataatttttccctctggatttggagctgataggctattcaacagccgcacacacaatcatcatctataataatttctatctgcccaatagacataagttaattatagaatcatatcctctgcatttgacaaatgagcatttgaggtccagggaaacaaaagcaactggactgaaatcttatctgcctagaaaacctacaagttgaaattagaactcaggacttctgacctcaggatctcagtccaggtttgtttgtctcttttctagtcgtgttcctggcatttaagagcaataaagaatagaattgtttcacttacctgggaagcccatggtatatttttgactaattaccaacattagtgccctttacagcttggagatctggatttcaccatgcaggtgatgatgtttaatgagctgaaaatgtccttttcaggacaaattttgctggtatgaaatagtttttttgggcattagtatgattggagaggtaagattttactttccagatttggagcttttgtgatctgccttctaaatctgaattagaactgatcagatttgatttgcattggaatccatctccttccactggtgttctaatgatgtgccactcactgagaatttccacaggcctccaacatcatcgctcctttcaaagcaagtgggctccagcccctcctccagacagcaccatatggcagccaagccactgactccagctccgatgatgccaaccctcttgctcatgattgcctgtagcagagtctggagagaacatcttcagaagagtgtctttaatacttacgatttttttcagtagaaattatcagccaaggtttatgtatcaggatcctcactcaaacataagaagacatagatgcacattgatagtatatgctcattatttttaccacttttgctataataagattctaaaactggctgcttctgattattcaatatgtcaaaaatagcagattcagtgaatgctagagcaggaaggaccttgaagatcatcaatccaatgctctcaattgcagatgacgctttggtatgctgagactagaaactacttcttcaaggtctcagaggtaacaaataaaggaattggaactagacatccagcctgctgcatgatatcctctgtacagaatcactcctcattttgaatgctctaagggacttcacctcttaagcaatcacctttctctccccagagaatcagcagttctcgaaatgtggaagagaatggcatttaacaatgtcttttgatgtgaaaactggggaagggggaggagttattcttaaagtaaaattccttttttttcttgtatttttaatggtatagagccatagtaaaatctgaaagagaaggactgagtgtggtaaggataagagaagaacaggggaggcatgggtgaagtaaaaagaaaggggtaggaaaaaggcaagaatgaagtctttggttcttgttacaaaaaatataaaacagtgactgccatggccactggagctgtaaggtgaaactcctgggagattaggggaacaatgattctttcatttatgtttgctttggaaatatagaatatataaacaaaggctatgcacctggactataatgaaacgttttgttgtgccaacagtgaaaagtagctcaaatttctggaaacttagggcctgatctgagttgctgaactaacgcttatagatgagcttgtaaaactagtgaactcaaaagacagaattgtggtctctgaaccttgtctctggctccctccggcttctatacctgtcctttctgcttctgtttccctcctttccttcctctggccattcctttcactgtactgacagcctactatatgtcatgcattataatagtcttttgggggattcaaaggtgagaagacacagtgctttccatctggaaccatgaagtctagtgttgagggagatgataaatgtcacagtggaagtatggttcagtgtagtgctagcatgtaggaagaaaaatctaggtccacttggaggaggaaagagaggcttcaaggagtgtgagaagacagctgagtcttgaaggaagaatagatgttttccagacagataagggacaagaaatagaaaaaaggcagagagaaaaatatgtgaaaatgcatagaaaagtaagaacacgtgatgggggaactacaattagttcagttttgctggaccataagtgatgggaatagcaaaatatgggttaaacatgcaggacataggttatgaaggatactgaagtgccacaatcacaggtttggatactaccttctggattacggttgtccattcgagaattttgaacaaggaagtgacaacatcagacaagatcagattcacctggaggctagagaggatggtgactagaatcaaggagaccaaaaacccaggatgttatttcaacaatctaggccagagagactgaggacttaaattagagtagcattagaggaatggataatggagacaggatatatgagatattcaggaattagatgtttggggacctgctgactgattatatgcttaatgcctcagcaaaagtacttctgtttttaagatttcatattatgatttatatgcatatgctcatgatttagtgcaggagataaaaaacactatatatcatgaagaaaggtatatactacagggaattaggtgcttgcaaaaggtcaaagagctgaaagagcaggaactaggaggttgctgcaggactggagaggtcacaccactagagctactatccagagggcaggaaactgcttcaatcaccacagatgcctgcaacatacaaattggggggctaaaaggtggaacatggagttcagctgatataagcacacctgttggaatacatttgcccatcagcattgtcacgaaaatttagcttttgcttccctttgccttctgagcctagatgtctgtctcactggcaaaactaattgcatccaatccctaactgcaagagagtcttagaaatgtggttttttagctttccaattcttgtaatacgtatgatattaaatgaaagccagttctgtcttcttataaattttaaaaatattcatactgttatctaatattatagttaaaaactcagtgattcatctctttggctgtatattttgggataattcttgcaggaatttagatccttcccctgtaagataagcaaattggatt

SEQ ID NO: 1879313 - DNA, 4001 bp, Homo sapiens
aaaagaggaaggtctcttgcagttgagataagaggaaggcctctgtctcctgcctgccccgggaacagaatgtctcggtataaaacctgattgtacatttgtccaattctgagacaggagaaaaaccgccctgtggagggaggcgagacatgccggcagcaatgctgctctgttactctttactccactgagatgtttgagtggagagaagcataaatctggcctatgtgcacatccaggcatagtaccttcccttaaacttatttgtgacacagattcctttgctcacatgttttcttgctgaccttctccccactgttaccctgttcgcctgctgcattcctcttgccgagatagtgagaatagtaatcagtaaatactgagggaactcagagaccggtgccagtgcgggtcctccgtatgctgagcgccagtcccctgggcccacttttctttctctatactttgtctctgtgtcttatttcttttgtcagtctctcgtcccatctgatgagaaatacccacaggtgtggaggggctggcccccttcaacatgcgaacagtgcttcaatcttgctgaatcatttgtagtgactttgtaaactcatgccgtttcttcatgaaaatgtcatttgttgaaaatgctgtttacactgcagaagtgacctcccctttctcttggttatttcctatgtaaaaccttccccaaacttctcaggcatcattaagcccaaccatcttggtgaccatacagtgttttgcatacatctctatcattgcatttcccatatcattttattagttattatcctgtcttatcttgattgaataataagcacctagagatttgagacttatagctaataaatatctacagaataaaatttgagtgaatgaattaatttctaaacttccctacttttcttttacttgctaacatagtcgggcaatcagaatactacatcatgtaattataattagataaaatatgttaatgcctatccccacgtttcccaccacaaaacaatatatagtataaggcaaagatgagagaccaacctttggaaagaaggaaatccaaatttaatttcagcttcttaatgaaagtagatatattggctccttctctcttcttgaaaacagtcattccacagcaacttgaagatatgtataggttatcagattagttaatgtataatcccttcccatgagtcttacaatttggatttaaaaaattgccatgagccttttagggatgggctgggaccatgtctaatgtgatggtatttataatttacctactaatattggtctgcaatacattttaatgctaattgacatattttaaagaccactcaaatgaaatcattttcattggctgggaaaagtataacaaatatgttgggaaataaacaatctcattaattcactagtcagaagtcaaaacctttgtatctttttagataatttaatattaagaaaaattatagtgtagacaatgaaaatgtccatttaaggcatataacttttatgagaaaacaaaataagataaaaattacagaagaaatatatcagattgttactaattattaaactcatgtgagagaactatgagtgatggtgtttttaatctatatacctttctatacaaaatacataaacataaaacaagtaaaaatggtcgttattaaatacctagattttgggctctcacttacaacctaggaagaattttagacccacatctttgagttgaaagggaaatttaaaagtcatctagtccatttttttaacaagcttaggaatcctctttacagtacagctcacttcgtttatcaagtctcaaccacacaccatgatgaggctgctgctgtttcatagacagtatattcattttcaaaaagctctgattattagaaagttctttcttaccttacattaacacctgcttctcttatatacaatagtccttgttctgtgcttctattctgttttccgtatgatgactttgagacaactgtcaccttatctagccttctctttcaccaaagaaatttcctcatttcacttaactggttttttgtttgttgttgttgtttttgtttttttgagacagagtctcactctgccacccaggctggaatgcagtgatgtgatctcggctcactgcaacttccgcctcctgggttcaagtgattctcctgcctcagtctcccaagtagctgggtttacaggcgtgcaccaccacacccggctaatttttgtatttttaggagagacagggtatcaccatgttggccaggctggtctggtgctcctgacctcaagtgatccgcccaccttggcctcccaaagaactggaattacaggtgtgagtcactgtgccctgcctaactgttctcttaatacaagttgtgacatggtacctattctgggcgctaaataaatatttgttgaattgcccttggaagtgagctcctgtcatagtcacaatctccacccaccattcagagaagggaaataaagggcaggggtcactagggtcatcttagaattctgcctatcactataaccttctcttccttcccgctaatcttcacttgctctatatagaggcattttgtaacagcaccacataataggatatccttttatcagtcaacactctatgacatacaacagcagaatgaaaattttgtaatgggaaaaaaatctcaacatatgattaactgataaaatcagaaatgtaaaagcaaacagaaaaaaattcaaatgaacagaagctctttgaacatacattctaatttaaccaagtaatgtaaaacttagcattccattgctgcaagtgtcggactttgtgctttcttttttttttgtatttctttttttattaatttgtttattttatttatttattttttaaattatacttttttattttttatttatttatttttattatactttaaggtttaaggtacatgtgcacaacgtgcaggtttgttacatatgtatacatgtgccatgttggtgtgctgcacccattaactcgtcatttaacattaggtatatctcctaatgctatccctcccccctccccactcctcccaccccacaacaggcccgggtgtgtgatgttcccttcctgtgtccatgtgttctcattgttcaattcccacctatgagtgagaacattctttcttatactatatttctgttctatgcttcagaatttgtaggagatgaaggacatcactggtttattcaattcacagacattttcaaatgacagtttcctgtacatctaaaatgttacattttcttctcggtgttgtttttctccttccaaaaagatccatggagcaaactctctcttcatgcctttgagccatatctacacctaaagtataaatcacagaaaagcatggaatcttacacctatgggcttctccccggccccccgtcctattgaaagcaaacatcatctctcatacctgcttttctcgtgctgatgcctcacgctactcttttggatgtaggtatggaaaaagaaagcgataaccatgcagttactactgataaacatttttttttctgaaagcatttacaaaaactcttgtttctgaaatataaaatgcaataaaactaactttaagttagaagagaagttaaatttgattttaaagttcttggtttggcaaagaaatgtatttctatagtctgaaatgctaagagtaaaggcactgtctactctgctctcagctgaattaagtttatctttttgtgatggttcatagacaaacaggactccttgtttatctttcccctctgcttggtattagcaagtctgacacagtcgtggaaatttgcatgctgtcaatattttctaaaagcagtatcacggttgacttcacagggcagaattgggctaaagttttgtatgagggaaaataaactacgaattaagaacttaatctcacaggaaacattcaaagaaatag

SEQ ID NO: 1879314 - DNA, 4001 bp, Homo sapiens; identical to SEQ ID NO: 780

SEQ ID NO: 1879315 - DNA, 4001 bp, Homo sapiens
ctatgaggcttacgcggctctgcatctgcccagaggactcagggacgcggcaatatttccgcccccacgagggtacttacggcctcgccagttaccctgtctgggactcagaagggttacacgtgaaggtgagcgcatgtgcatgtctatggtacacacaggtcgctatggctctgcaccctccctcctgcgctgccccaattcagggcccggaagggcgtcctgttcccgaggtgccactgtgccagcaggcggcgtgtaattggtaggagggaggctgccgctggagtattcttggctgtccctcagtgcgatccctgcatgaactccttttccatgctacagtcacagaccctcaacccaggcgcaccctcacccatcctcattccccactagggtctcgctgttgaccccgagcaggtttgtcgtccccgaccaggtcgcaaggcttcagactctggggggaagtcgcgggcctggatgataagccttccaggcagtcctgggtccactctgtggacaccaagcatgaggtctggaggggaggacacaggacacaggatgcaagacaggcgcccgtcactcagggtcgcaatccgccatacagagccactgttgtccagaggacagacacatgaggacagagaaagagaggctcggcccagctggccgagaaacccacaagagcgcacttagacatgaagttctccttcccacatacctggaagcgtcccccactgcccctggccgcctctgctctcaagagcgtggagccttccctaccactccgggaactctgtgatcttcaggaccggcgggtttcaagtggcgctgttttcggtctctcctgaggtcgcaaccctcttcccacgaacaacagcccacaggctccgcagctcgccttggtctcaacaaccgcgcagtacttgggtgcttaagcgagtcccctaccacatagtccagggttgggggcgggggagatggggctgggaggggacagtggccaggagtagcggaaagagaagatgtaaattcactctcgaactttgcccggcagacgcgtggtggttatctccgcgccagcgcctgaagtgggcaggtgggcttcagagttgaaggtgcacacactggagccccagtcatttctgtgcatggggaacatgtctgaggtctgcctccgcgggtcacaggatctggagtctcccgcctcccacctgggctaagggagctgatcgcttctgagcagccgaagatccgggtggagaaaggggccgggagctgtaccggctgaggctagacagctatctcgctttggagctgcagctaggtccagagtgggaaggaggctcgcgccggctttgccgctttccctgagggtgtccagttttgtgaataaaattagagaaatctgcgggcgtagttccccaagcccagctcaggcttccgtttgcagcccggcgctggccgagctcgaaccgctgaaaagggccgcgtgcaatcgttccgctgtgcctcaggacaaactccgcttcaagccagtgccgctctccggcagtttcctgattgacttaattagatccgcataatcgctggagggcttttctttcccagagccgagaacagctcatttatggggaccaaaaggaagagagggagagacgacccggacgccactgatagcaacgtactcttcgcaaaaaacactcagtaactagtggaaaagcccaacaggcatccccctccgcccgccaacgcttcctcccaattgttctgggctgcacgagggagatggccgggccgtggaacagatgcagaaggaggcccggcacgaccagagacgctgtaaccaagacccgcagagcctgtggcttcccgctctttggcggctgcagcaggcatggtgctggagcccaaggcttctgggaaagagtccaggttttcgcggagggagcgacggactcacgcgggatcgcaggcactgctgcaagacgccgaacaggctgagccggtaggcgaaagaagtaagggtcacagaagaagcaaagaaaacgaaataaattccgaatcccgcggtggcccttctcccagtccccagtgcacttactcctgacactgttgaaaacaaactggcccagaaccttggaagggaggagaggctactagaaatccctctatacagagaggagctcggttagagaaacagctatttggataaacagaggggttctgggctaggaacccggacacgtaggtccaacccagcttagcgcccctcaaaagcctgacaagtaacatgatctcctggacctcagtttccgctcctgtaaaaagtatgtatgtgaagggtctggattctccctccccaaccctgcagagcagaagctggggattctgtactccccttccccagtgtaggtctcagtagcagtgaacgtgcagcaaggccaggcagaggcaagggctggctgctgtagctgcttggtagaacttctctgaagcaggaaatttgggcagcaagtgccctggctagtctcaccctgaccaaagcctggggagccaggggagtgctggcaaggaaggaagctactggttcccatttgctgttttagaaacgaggacattcaggccgggcagggtggctcacgcctgtagtcccagcactttgggaggccgaggcgggtggatcacctgaggtagggagtttgagaccagcctgaccaacatggagaaacctcctctctactaaaaacacaaaattagccgggcatgttggtgcctgcctgtaatcccagctatttgggaggctgaggcaggagaatcatttgaacctgggaggctgaggttgtggtgagctgctgagatcaggccattttactccagcaggggggcaacaagagcgaaactcagtcaaaaaaaaaaaaaaaaaaaaaaaagaaaagaaaaaaaagaaatgaggacattcagaaggtgaaatggagtaggatgacgccaacactgtttttctctccacttgtttagatactagcagagttgagctgggttggagttggtgtgtggtccatggtgtggggtatctgtgagtggggttctgggagtgtgagacagatatccatgtagtcaagagcaagcttgaggtatgtgtagggttgccagataaaataaatctgctaaatctagcaaccctaggtatgtgagtttccttggactcatgcaagaagcttctctccaagacctttttccccggacagtctgtcacccaggaaattccaattccagggctactagtccctgtccaatttgctgtccatggtttgaggacgagatttctcttttttccaatgacagtttatgctggaacagcacattaaatggatccccttggtcagaggtcccagagggggcccaggcgacttcctctcaaaggacatgagtagtcagacctgccttccatttttttctgcccttaccttggggggatgaagaactctattttgaggattctgtgaaaagggttgcaacccaactctgttctatttctttgcaggagcctgggtgagttctttctccctatcctgggcctctgtagctccatctgtggaatgggagagttggattaacaccaggctatcccgtagattggaggctgctgttagatgaaactgcaaagtgttctcagtaccctttcctaaatggcctagaatatggctacacttatacatcagttctgaggtaggtgttactagcctcatttttacaaaggcagaaacaaagcgcaaagaaccttgcccaaggtgacagatagggtaagtagtgaaggcaggattggaaccccaggagcctgacttaaggtcgctgctcttaactactatgcagaccaggaaactgaggctccgaagcggggaagtcacctaatgagggtcacacagccttgctacagcggaggcagctgggattccggcctcgcacgcccgagctttagccactgtgcggcgctgtcgggg

SEQ ID NO: 1879316 - DNA, 4001 bp, Homo sapiens
ttcctgaatgtgtaaatttccgctttttagctttttttttttttttttttggaccttccgacacttcggttgctgaggcagttgcagacgcgacctctgcagtcctgggcgatggccagccagctcagctcgggtcggtttcgcggaaagctgtctagacggcattgtaaacggttcggagcctgcgggccacaaagctgtggagctacggaaatcaactctgagatgcgttttagggccgtgtgcaacctcgggatcatttagataaagaaaaactgtggaggttggcgggcgtctcaggatagtgtcaccaccccctaccctgctcccagcctcagatgagtagtgttatatcctgggaaactgtctaatggggatgaaagtcaatctgtgtgtctcaatgcctgtaatgaagcaagtttacagatttttaaatttttatttttattttattgaattatttttggtgtgtctaggccaaggaaagaggagatcgtgggtggggaaacagactgagggaatcagaagcaccactgtccatccggaattaaatccacatcccagcatcttctgcaaatatttcactaattatttcctctcggaactcctcccctcgtgctccttcctctggtgaggccggcgctcccctcccaggccgcagcggacagacagggattgggttccgtgtgcctgccacaccaggcaggctcttgcggctcccaactaggcggcctaaatgagggaggaaagaggaggcgcatcgctgattcaccgcgtcaagagcactgactttccttggaggtgtgaggtccacgcaccccagccacgcacttgggggtcggtttgcggtgcctccccctccagtcccagtgaaatccccacagtttttcctactatcactgacttgccttgcactccgcgtgcattggccacacatcctcgcctcctccacccgctccgccgccggttttcttggaagttaaatcttggaggatttgtccacaccttaagagaagaaaatccacgttagctggcagcaacggagatcccagcatgctggcatgcccaagtctgcccaggttcccccaaggccatgcccgccgcccgggaagtcactgcccgcacccctcacgtttcttcagccgcccctgggcgctgcgtctaacctgaagacaccaggcctcttcccggatccactcgacttacccaggccgctgccaatcccagctccttccccagcgcctcatttccgattttttcatatgctaagtcgtttaacaactccaagtagccagttatggcttctttatttataggttccctgctattttacgtcgtttttatttctctcggcaactattctagtagattaatcaatagccattttctgaccttcgggaaccccagctgatgctttttgtggccgcacgaaaaaatacatacaggaaaacacgcccgcatcaagccgggaaagagcaggtaggacctgagtggtttggttgggggagggggaaaaagacatctcagcaggtgtcttccccggaatgagcactgaggccagaggggaatctgaaatctaattagcaggagggagccgggtgcgctgctcttactctttaaagctaaaaacaatgaaacaaaaagcaaaacagagactaagttttgctttttaaaacacgatatgggaacctcgttctaggtcgcccagtccctgtctaaggagtgtgacaaagtgggggggagaagggcggaagggagagggggcggggaaggcagggcagcgacagtcgcacagtcccgcggacgctcccaggcccacgccctgactcgctcacacccacccacactcacacccacccgctccctgggccccagggcccggatccagcctgggtgggggggtctccgggcgggccgcagcgccctccgtgccccggggatgctggcgcacagtgcggagcggagttgcgcgtctctcgtccctttgttgacaattccctgaaccaacttgagtttggccggctcggccgcggccctgacgtcacgcacggtcacgtggccccgcctcccgctggatctttaagtagaaagtaatctatcaggccagtccttaaaacgggactttcgactaccggggcttcggcgtccctgacacccagccccctgcccccccgctactgtccctgcccgcgccctcccgagctgctcggcgcccggcgtcccgcgcccgcctggaccgctcctgcgccccacgccagggccagaggccgaggaaggcgggctaagtgagggggcgcggcgtggagaaccgccggggccgggagcggtagcgagcgcctagtaccgagcgccagggacggcaggagttcgcggagcgcggccgctgggggcggacggcagagcccgcgccacgcgatgcggggccgccgagtgtgagctgagcccagcgggccccaagccacctgcggccccctcccctctccctgccccccatctttcgggggcactcaaaccctcttcccctgagctccgtggcagcccccgaacaccctcatcgcccgctgccccctccccgccgccgctaccaaccccgaggagggatgaccctctccggcggcggcagcgccagcgacatgtccggccagacggtgctgacggccgaggacgtggacatcgatgtggtgggcgagggcgacgacgggctggaagagaaggacagcgacgcaggttgcgatagccccgcggggccgccggagctgcgcctggacgaggcggacgaggtgcccccggcggcaccccatcacggacagcctcagccgccccaccagcagcccctgacattgcccaaggaggcggccggagccggggccggaccggggggcgacgtgggcgcgccggaggcggacggctgcaagggcggtgttggcggcgaggagggcggcgcgagcggcggcgggcctggcgcgggcagcggttcggcgggaggcctggccccgagcaagcccaagaacagcctagtgaagccgccttactcgtacatcgcgctcatcaccatggccatcctgcagagcccgcagaagaagctgaccctgagcggcatctgcgagttcatcagcaaccgcttcccctactacagggagaagttccccgcctggcagaacagcatccgccacaacctctcactcaacgactgcttcgtcaagatcccccgcgagccgggcaacccgggcaagggcaactactggaccctggacccgcagtccgaggacatgttcgacaacggcagcttcctgcggcgccggaaacgcttcaagcgccaccagcaggagcacctgcgcgagcagacggcgctcatgatgcagagcttcggcgcttacagcctggcggcggcggccggcgccgcgggaccctacggccgcccctacggcctgcaccctgcggcggcggccggtgcctattcgcacccggcagcggcggcggccgcggctgctgcggcggcgctccagtacccgtacgcgctgccgccggtggcaccggtgctgcctcccgctgtgccgctgctgccctcgggcgagctgggccgcaaagcggccgccttcggctcacagctcggcccgggcctgcagctgcagctcaatagcctgggcgccgccgcggccgctgcgggcacagcgggcgccgcgggcaccaccgcgtcgctcatcaagtccgagccaagcgcgcggccgtcgttcagcatcgagaacatcataggtgggggccccgcggctcctgggggctcggcggtgggcgctggggtcgccggcggcactgggggttcagggggcggcagcacggcgcagtcgtttctgcggccacccgggaccgtgcagtcggcagcgctcatggccacccaccaaccgctgtcgctgagccggacgactgccaccatcgcgcccattcttagcgtgccactctccggacagtttctgcagcccgcagcctcggccgccgccgctgct

SEQ ID NO: 1879317 - DNA, 4001 bp, Homo sapiens
ccaatcccagctccttccccagcgcctcatttccgattttttcatatgctaagtcgtttaacaactccaagtagccagttatggcttctttatttataggttccctgctattttacgtcgtttttatttctctcggcaactattctagtagattaatcaatagccattttctgaccttcgggaaccccagctgatgctttttgtggccgcacgaaaaaatacatacaggaaaacacgcccgcatcaagccgggaaagagcaggtaggacctgagtggtttggttgggggagggggaaaaagacatctcagcaggtgtcttccccggaatgagcactgaggccagaggggaatctgaaatctaattagcaggagggagccgggtgcgctgctcttactctttaaagctaaaaacaatgaaacaaaaagcaaaacagagactaagttttgctttttaaaacacgatatgggaacctcgttctaggtcgcccagtccctgtctaaggagtgtgacaaagtgggggggagaagggcggaagggagagggggcggggaaggcagggcagcgacagtcgcacagtcccgcggacgctcccaggcccacgccctgactcgctcacacccacccacactcacacccacccgctccctgggccccagggcccggatccagcctgggtgggggggtctccgggcgggccgcagcgccctccgtgccccggggatgctggcgcacagtgcggagcggagttgcgcgtctctcgtccctttgttgacaattccctgaaccaacttgagtttggccggctcggccgcggccctgacgtcacgcacggtcacgtggccccgcctcccgctggatctttaagtagaaagtaatctatcaggccagtccttaaaacgggactttcgactaccggggcttcggcgtccctgacacccagccccctgcccccccgctactgtccctgcccgcgccctcccgagctgctcggcgcccggcgtcccgcgcccgcctggaccgctcctgcgccccacgccagggccagaggccgaggaaggcgggctaagtgagggggcgcggcgtggagaaccgccggggccgggagcggtagcgagcgcctagtaccgagcgccagggacggcaggagttcgcggagcgcggccgctgggggcggacggcagagcccgcgccacgcgatgcggggccgccgagtgtgagctgagcccagcgggccccaagccacctgcggccccctcccctctccctgccccccatctttcgggggcactcaaaccctcttcccctgagctccgtggcagcccccgaacaccctcatcgcccgctgccccctccccgccgccgctaccaaccccgaggagggatgaccctctccggcggcggcagcgccagcgacatgtccggccagacggtgctgacggccgaggacgtggacatcgatgtggtgggcgagggcgacgacgggctggaagagaaggacagcgacgcaggttgcgatagccccgcggggccgccggagctgcgcctggacgaggcggacgaggtgcccccggcggcaccccatcacggacagcctcagccgccccaccagcagcccctgacattgcccaaggaggcggccggagccggggccggaccggggggcgacgtgggcgcgccggaggcggacggctgcaagggcggtgttggcggcgaggagggcggcgcgagcggcggcgggcctggcgcgggcagcggttcggcgggaggcctggccccgagcaagcccaagaacagcctagtgaagccgccttactcgtacatcgcgctcatcaccatggccatcctgcagagcccgcagaagaagctgaccctgagcggcatctgcgagttcatcagcaaccgcttcccctactacagggagaagttccccgcctggcagaacagcatccgccacaacctctcactcaacgactgcttcgtcaagatcccccgcgagccgggcaacccgggcaagggcaactactggaccctggacccgcagtccgaggacatgttcgacaacggcagcttcctgcggcgccggaaacgcttcaagcgccaccagcaggagcacctgcgcgagcagacggcgctcatgatgcagagcttcggcgcttacagcctggcggcggcggccggcgccgcgggaccctacggccgcccctacggcctgcaccctgcggcggcggccggtgcctattcgcacccggcagcggcggcggccgcggctgctgcggcggcgctccagtacccgtacgcgctgccgccggtggcaccggtgctgcctcccgctgtgccgctgctgccctcgggcgagctgggccgcaaagcggccgccttcggctcacagctcggcccgggcctgcagctgcagctcaatagcctgggcgccgccgcggccgctgcgggcacagcgggcgccgcgggcaccaccgcgtcgctcatcaagtccgagccaagcgcgcggccgtcgttcagcatcgagaacatcataggtgggggccccgcggctcctgggggctcggcggtgggcgctggggtcgccggcggcactgggggttcagggggcggcagcacggcgcagtcgtttctgcggccacccgggaccgtgcagtcggcagcgctcatggccacccaccaaccgctgtcgctgagccggacgactgccaccatcgcgcccattcttagcgtgccactctccggacagtttctgcagcccgcagcctcggccgccgccgctgctgcggccgccgctcaagccaaatggccggcgcaatagggacgcgccaatggccgggacccagggtccggcggcggcctcgagcaacaaatgcacctccaggctgcgcgccctgtcccaagcccggtcccggtcccgctgcccaatcctggactctgcctctccccaatttcctttcccctgagcccccaacgcctaccttccgcggcctccatcccctcgcgcacacctaagctggtcgagcaaactcaccgcgcgcccgccggggatagctttccatacaggtaaaaccgaaaaccgaattttccaaaaatgcaccccgacggcgcctgctcttagtaccgtggggatgggagggaaattctttgtatatatttgtaaaaaaattattgactttccttttggggtttttatttttttaagaaaaaacaaattccgtagatttagagctctgaactttcattttttttgaaggttcactctccgaagttttatctgagaaaagaatgtatagagacgttgggagattttaaatataaaaaattttcaaaaaggcaaaaagtgtcattctattataaaagtctgtttatatatgaatgaatatatatggtattctaaatgttattccatcgtgttgtacacaactttgtaaataaatttttaaaatgcccagcctagtgttttatttagttgtctgaagtaaatggcaagatttttaaatggtatttatttgccttttctcctccccagaaaatcaaggaatttcaagtaatggccttttcaaactttttaaattcataatttgagtgtaagaaaattttaattggagaaaggaaatagtatgcctaatttaaattgtgttactatttttcttttagttttcacataaaatcaggatgtgagtgatatcattcatatcaacccattaaatctaaatgaccagacatttctgtagataaagtaagctgtcatttaaaaaaagaaaccgaaacaacagcagtctttaaatttttttaaaaaatgactagacttgtatcttccacaatgaaaacttcccaaatgagagagttcttggtcatttcaattatcctttgaaaagtaagtaaattccaaacatccctctttttaacatttaaatcttagatttttgaaattatttcttttcattccttaagtggaagtggtaaatagacccagctggttttaaaatttatgttaag

SEQ ID NO: 1879318 - DNA, 4001 bp, Homo sapiens
tttgttgacaattccctgaaccaacttgagtttggccggctcggccgcggccctgacgtcacgcacggtcacgtggccccgcctcccgctggatctttaagtagaaagtaatctatcaggccagtccttaaaacgggactttcgactaccggggcttcggcgtccctgacacccagccccctgcccccccgctactgtccctgcccgcgccctcccgagctgctcggcgcccggcgtcccgcgcccgcctggaccgctcctgcgccccacgccagggccagaggccgaggaaggcgggctaagtgagggggcgcggcgtggagaaccgccggggccgggagcggtagcgagcgcctagtaccgagcgccagggacggcaggagttcgcggagcgcggccgctgggggcggacggcagagcccgcgccacgcgatgcggggccgccgagtgtgagctgagcccagcgggccccaagccacctgcggccccctcccctctccctgccccccatctttcgggggcactcaaaccctcttcccctgagctccgtggcagcccccgaacaccctcatcgcccgctgccccctccccgccgccgctaccaaccccgaggagggatgaccctctccggcggcggcagcgccagcgacatgtccggccagacggtgctgacggccgaggacgtggacatcgatgtggtgggcgagggcgacgacgggctggaagagaaggacagcgacgcaggttgcgatagccccgcggggccgccggagctgcgcctggacgaggcggacgaggtgcccccggcggcaccccatcacggacagcctcagccgccccaccagcagcccctgacattgcccaaggaggcggccggagccggggccggaccggggggcgacgtgggcgcgccggaggcggacggctgcaagggcggtgttggcggcgaggagggcggcgcgagcggcggcgggcctggcgcgggcagcggttcggcgggaggcctggccccgagcaagcccaagaacagcctagtgaagccgccttactcgtacatcgcgctcatcaccatggccatcctgcagagcccgcagaagaagctgaccctgagcggcatctgcgagttcatcagcaaccgcttcccctactacagggagaagttccccgcctggcagaacagcatccgccacaacctctcactcaacgactgcttcgtcaagatcccccgcgagccgggcaacccgggcaagggcaactactggaccctggacccgcagtccgaggacatgttcgacaacggcagcttcctgcggcgccggaaacgcttcaagcgccaccagcaggagcacctgcgcgagcagacggcgctcatgatgcagagcttcggcgcttacagcctggcggcggcggccggcgccgcgggaccctacggccgcccctacggcctgcaccctgcggcggcggccggtgcctattcgcacccggcagcggcggcggccgcggctgctgcggcggcgctccagtacccgtacgcgctgccgccggtggcaccggtgctgcctcccgctgtgccgctgctgccctcgggcgagctgggccgcaaagcggccgccttcggctcacagctcggcccgggcctgcagctgcagctcaatagcctgggcgccgccgcggccgctgcgggcacagcgggcgccgcgggcaccaccgcgtcgctcatcaagtccgagccaagcgcgcggccgtcgttcagcatcgagaacatcataggtgggggccccgcggctcctgggggctcggcggtgggcgctggggtcgccggcggcactgggggttcagggggcggcagcacggcgcagtcgtttctgcggccacccgggaccgtgcagtcggcagcgctcatggccacccaccaaccgctgtcgctgagccggacgactgccaccatcgcgcccattcttagcgtgccactctccggacagtttctgcagcccgcagcctcggccgccgccgctgctgcggccgccgctcaagccaaatggccggcgcaatagggacgcgccaatggccgggacccagggtccggcggcggcctcgagcaacaaatgcacctccaggctgcgcgccctgtcccaagcccggtcccggtcccgctgcccaatcctggactctgcctctccccaatttcctttcccctgagcccccaacgcctaccttccgcggcctccatcccctcgcgcacacctaagctggtcgagcaaactcaccgcgcgcccgccggggatagctttccatacaggtaaaaccgaaaaccgaattttccaaaaatgcaccccgacggcgcctgctcttagtaccgtggggatgggagggaaattctttgtatatatttgtaaaaaaattattgactttccttttggggtttttatttttttaagaaaaaacaaattccgtagatttagagctctgaactttcattttttttgaaggttcactctccgaagttttatctgagaaaagaatgtatagagacgttgggagattttaaatataaaaaattttcaaaaaggcaaaaagtgtcattctattataaaagtctgtttatatatgaatgaatatatatggtattctaaatgttattccatcgtgttgtacacaactttgtaaataaatttttaaaatgcccagcctagtgttttatttagttgtctgaagtaaatggcaagatttttaaatggtatttatttgccttttctcctccccagaaaatcaaggaatttcaagtaatggccttttcaaactttttaaattcataatttgagtgtaagaaaattttaattggagaaaggaaatagtatgcctaatttaaattgtgttactatttttcttttagttttcacataaaatcaggatgtgagtgatatcattcatatcaacccattaaatctaaatgaccagacatttctgtagataaagtaagctgtcatttaaaaaaagaaaccgaaacaacagcagtctttaaatttttttaaaaaatgactagacttgtatcttccacaatgaaaacttcccaaatgagagagttcttggtcatttcaattatcctttgaaaagtaagtaaattccaaacatccctctttttaacatttaaatcttagatttttgaaattatttcttttcattccttaagtggaagtggtaaatagacccagctggttttaaaatttatgttaaggcactttacattttgcagtgggattttatttatgttcatctgatagataatacatagttttgttttcataatattttcaaataagatatctcatttatatggcaataatcaatccacaacataattggatttctgaaggggtcctatagatgcttcctctccctccaacccaaagcctttctgaaggccaaggaatggtggccttaatacccttttaaaaacagctgaacatcacctctctccccttttttttctttaccttaggctaggttagtgtgaaatgcgacatcatagggcaggaatggggaaggtccttgtagattatttttaatttgcatttcagctgttaaaaacttttaaaagaaagtatgaaggtagaaatgaaacatcttgatgtggaaggctggttctcaccaccatcagcatatcctcaaaaggcatcaattctaattattttgtaattaatttagctgttacaattacttgtgcgaaatcgcttttaaaaactggagcgagtagcagtgctgtcggctcggccctgcgcgcgtccttttggttaatcccggccagtccccggtgttgtcgtccactttgcctccctggtggtggagatgcctccccgtctcggatcccacctcatttctccgctgtcgacgtgggctgggggtcgctttgaaagacacttccttgcaaatacccaatctgttttcctggtaaacggtaaacattattgtgtcttgagtaaacattccttcgggatcagggt

SEQ ID NO: 1879319 - DNA, 4001 bp, Homo sapiens; identical to SEQ ID NO: 804

SEQ ID NO: 1879320 - DNA, 4001 bp, Homo sapiens
gaccttcatgttcagtcagcatttgcttatcatcatccaggctgcatttacaaactttcttattaatcataacaagacaagaatccgccatttatttaatgcattcagcactaggaggtaactaaaaagccatttgtgccgtaggaagtttgcccagttacctgcttacttggatacagtttcacttaccatttcaacttccagctttctgtctaatgcctgtaattttaatacaaaattgtcagcaaaaaatattttaatggtagattggtggtacactgcttaaccattaacagcaaaccacaactaccccagatacatcagacagatagtacatctcttcatgattaaatctgctgaactatgcaaccatcatagtatctgttttcacattttcttcagtattaaacttagtatcaatatgagagcaaaattctcatttgaaaagaggggagagaagcactaacatagataatcatcattgctttggctattttctaatcccttaaaagtgagaagtacaaaatagaggtgtctcacctgtgtgccaatggcttgagttaggcttgctctttaggacctgggaagaaacaacttcatgtgaacttaggtgtactctctatgttccccaactcaccattttgggtgcctcagttaagataatggtggttaagatcctcatcattctagcactcaagagtagcaaataaactgtcatcattgtggcacatccaatggctttaaacctttttgagagggaattttcaacttacttcagtagctattctcatccttccttggggacacaactagaaaacaaaaagatgcaagcaaaacagtgagaatgaacctcacagcagtcacgttaaatataaatgctgttaacattaaagcctcagaatagaatttcagaaatcccttctgtccactactcttaaagcatcacaggctgagaccacctcttagatttcattcttcccaccatactttccccaattcttacctgtccataaggtgctatccagagccacactgcatctgcacccagcaccatacctaaagagatcaggtacagattttaattcattgttccacggttcttttttttaaagagtgttctttaaaaaaacggttcgtctttttaaaccaatgatgcaggtaacataccattcattatctagcgacaggtaaaggatacacttaatgttacaaagaagcactgcacccgcagttaagaaccaccgatggcggccgggcgcggtggctcacggcttgtaatcccagtatgttgggggaccacggctggtggatcacctgaggtcaggagttcaagaccagtctcgccaacatggtgaaaccccgtctctactaaaaatataaaagcctagcatggtggcgcgcgcctgtagtcccagttacttgggaggctgaggcagaactgcttaactcgggacgcggaggttgccattaaccgatgtcgagccactgcattccagcctgggtgacagaacgaggctcggtctcaaaaaagaaaaaagaaacactaatggaaatattggtgacactgcggaatgcaggcacttaagcacgtggactaccaccgacagcctttcatgagagcggacggctgatggaggctcgggtcacggcccttaacaatagcttactcgggtgactcggcatgtgccaccatcagagcggttggcattcatcattactctcagatgtccctaccaacacaggcttcatcagaggcagggcacgagagccgaggcttctccgcagttctactctaacatagtcgcagcttaggtcacgcatgcaccatatgtgcaatcccccaccatcctcaacttgtaggccctgcaaaggcgcgcgactggcttagaagtcccagtcaattcagggtgaccttagcagacaaaggctggagcgccccaaaacccgcaacattcgcaaagataaaacatacctcacaggagtcgactcctacctcgaaaagacagtatggtgcctgggctcctgtatataagagttcttttgatgacgtcacgacgcacgctcccggcagcgtccgcttcggctcctccccctaacctccctcaatcttcctctcatccagtatcaccttcttcccaccccttaagtccgccccttttccccgcccttcctcgccattgtgggcagagacatgaccgtccacgtgatgccgtgctcccgccctcctcccgactgaggaggaagagcagagaggggagggggcgcgaggcaaggaaagctctggggatgggggaagggggggcggtgtaaggctgagtgatttccttccggcacgtcgcccgctccgtgggagggggtgggggatttcacttccgggacggtgttccggcccattccggcccatttccacccccggaggtaggtgctgctccttgactggactcgggccccacaccccagtgccacttccctgcaccggggtcacctcgcccgccctccgccgcagcgcgctcctggggcgctcagctactttccttcaccccgcctccaggcaccgggcgaccttccacccccttggcccccggccgggctgatctgccggacccgccccctcgcggggcccctccctcaggaccccgggaagggcggccccctcccccaccgcagccgggacacacccagatacgcacacccacctcctggcagctccccgcccgccgccgcctggagccggtccctgggcgccgcccccttcctagttctcacctgagcgctggctcccccgcccgacgccttgtccccatcttctccgaagttcctcagtgacattttgccctttagccagttcccctctccccaggcttcctaacgcagaagaaagctgctcaagtgctggagtggccaaccccatgccgttcccaattctcccttttacagctctcacccctccagtgccgacggtagcgaaagactttcctccaggggcttcctcactggggaattgccggaaagagcaaacaaaaaaggcgctggtgtaggctccaaaataaacacatctgaattcatgatggcatcgacagaggctcttattggattaaaagtttcaaaacaaacaataacgctttggaaaaaggtcagattggctaaagttgattgttgaaaacagtgtatacacttccctatttaataagtgtgttgttaatgcggggcagtactgtgagcttggcagagtaagttcctgaagtttcaggtgtggtgtaactatgtaatatatagataagtgaacgcacattgggcttaagtaaatgtcttcctgttcggatttatacaaactattttcagtagttgaaactgtactttcaactatcttgtatacagcttcaggtttagtgtttcagccattttttaaaaatattttaatggaaaaatgttggcatacttggtaaatgctgtattttttcatcggatctggagaactaagtttcaggatggaagtattcatcaccacctcggaattgccaacttcgaatttggcagatttacccagctttcctaattttgacaactgaacttcacattctctgcatcttggttgaatcctggcacagctgtgggatttttcctagagtttgcttcacagccctataaccaaagtctttttgtggggggggctctgattcttaagcttagaaatattagcctacattcatgtgggatattagtccttttataaaataataaacataattcttgcagcaggtagtaaaatactaagaagagggatatcaagctatgtagaattgcatttattcagaaagctttcctcctccagagaaaagttgtaaagttatgagatgttatattcagtctgcaagtaccttatagttaacacttaaaagtccttccccctaccttctgttgaacttctgttttgatgttatataacttattagtaaggaaagcatggtcataacatgaatttttaggagtctaaagatcac

SEQ ID NO: 1879321 - DNA, 4001 bp, Homo sapiens
caagttttaaagaagcaaaggtatagcagttccaagtattttttttttttttttagacaagagtctagctcttgcccagaatggagtgcagcggcactatcagttcactgcaacctctgcctcccaggttcaaggaattctcctgcctcagcctcttgagtagctgggattacaggcatgtgacaccatgcctggctaattttgtacagctatgttgtccaggctggtctcgaactcttgacctcaagtgatactgcccgcactgacctcccaaagtgctgggattacaggcgtgagccaccatgccccgcctcaagtctggtttttaagtgttgtaaagccgatacaatgatgataacatagttcagcagactaacgctgatgagcaatattaagtctttcgctcctatctgatgtatctggcggtaacattctagtttatgccccgaaaaggggaatatagccattctataatgtttggagattttggattactcctaattgtatgcaagttgtcttactgtgtattgtcccttaatttcaggactcagaattcatgattgaagaaatgcaggttagtttaaactttgaaggaaatttttaaggtggcaaaaggttttggtggcatatacaccttaatctgtagatgggagtgattagctgtttaaaagttaaaatgtgactgagaaggaaattgagtagggcaaattttaaatgggtattatttttcatcttcaaacaggcagacctgttatcctaaactaggtgagtcagcttttggtacatgtgatgattttcagtgtaaccaatgatgtaatgattctgccaaatgaaatataatgatatcactgtaaaaccgttccattttgattctgaggttactctactaacaagcatcacacatttgtattttgccctgattaatatgttggcttcgctttcagggtttttaatgaccacaacaagcaagcatgcagcttactgcttgaaaggtgaggattggaaatgttgggactattataattgcagaatacatgatgatctcaatccaacttgaactctctcactgattacttgatgacaataaaatatctgatattctgcattcccatgtagcattttaattgaagtctgtaaatgtggctaaaagtcttgtcttattttttgagacagggtcttgcctcacccaagctagagtgcagtggcctttgaagcttactacagcctcaaacttctgggctcaagtgatcctcagcctcccagtggtctttgtagactgcctgatggagtctcatggcacaagaagattaaaacagtgtctccaattttaataaatttttgcaatccatctggagtgtgtagtgtttacttaaaaaaggacagtgcttttcatctgttcattagctgtaagcataaatcacattcaaaagctattataactccatggtatttgcttcattaacactgcagccagttaaaattttatgggtattttacaaggtgtcttatgcattaaagtgcaatatttcctaattctccatatgagcaaattgtcaggtttcataggcccctgtgctaattggttttgagcttaaagtattgatggagctacttggagaaagtcatgttgagtctgaggctgggaaaataagttatagaaaatactatagaaatgcccaactagtgataggcattaatggaattgggaaaatctacaatccatagccatggtgataggtttttggcaagcactaagtgtttagggatgccaaaagtgggtataaagggcacaactggtttaaggcaatctgtcccagggaaacaggaccaaggggccaaaattccaagatgggtcaaattttaatttcagtgtcagtacagctgtgcttataatgatgtctttgttagcagtaatggttttacaaatctgtttctgggctaaagcactttagtcccattaatgataaaacttcagttactctctgaattttcctttttttgagactgaatcctgttgcccaggctggagtgcaatggcatgatctcaaccgctgctcactgcaacctctacctcccgggttcaagcgattctcttcagcctcttgtagctaggactataggcacctaccatcacaaccaactcattttggtatttttagtagagacgaaaccccatcctcccaaagtgctgggatttcacaggcctgagccgcagtgcccggcctcccaggccttttatgcttgatgtttttttcagggcccttcccattgtcatttcacaatctcattgaaatgtcagcttatgcactaaatgcgtgtaagttgggaatgcccaattttgtctaagaaaaaaggcctccccctcccccaaataagcacattctttcatttcctggggctcacccgaatgtctcacacaggctgtaaaacaactaccaccacctggctgggtgctgaggtgggcagattacctgaggtcaggatttcaagaccaacctggccaatatggtgaaaccccatctctactaaaaatacaaaaatctagccgggtgtagtggtgggctattgtagtcccagctattcgggaggctgaggcaggggaactgaacctgggaggctgaggttgcagtgacccgtgatcctgccactgcactccagcctgggtgccagggtgagactttctcaaaggaaaaaagaaggctgggcgtggtggttcatgcctgtaatcccaccactttgggaggccgaggcgggtggatcacacggtcaggagtttgagaccagcctgaccaacatagtgaaacccccatctctactaaaaatacaaaagttagccaggtgtggcgtgcacctgtaatcccagctactcaggaggctgaggcaggagaattgcttgaacctaggaagtggaggttgcagtgaactgagatcatgccaccgcactccagcctgggcaacggcgagacttggtctcaaaaaaaaacacacacacaaaactaccaccacctaccccaatcggttaccctttacttttcatgtgaccaccatgacctattatgtgttttgttcttacttcccccacaagaatgtaagcgcttcaagtttattccttaatgttggaaaaatgaatgaaactgcaaatgtagtagatcagtttttggggaggtaccaaagacaagttggtaaaataccttgattttgaagtgaaaaacgatgttacatttcaaagtatcttttcgccaggttatggctcaggcttcgagaccagcctggccaacatggcaaaacccggtctctactgaaaaaaagcgaaaattagccgggtgtggtagtgtgggcctgtagtcccagctactctgaaccctggaggtggaggttgcagtgaaccaagatcgtgccacctcactccagcctgggcctcctaggctcaagtgattgttgtgcctcaactacctgagtagctgggatgacaggtgtgtgccaccactcccagctaatttttttttctgtatttttagtagagatggagtttcaccatgtcagccaggctagtcttgaactcctggcctcaagtgatccaactgccctgccctcccaaagtgctgggattacaggtgtgagccactgcatccagccaagttctattctttttttttttttttttgagacggagtttcgctcgtgttgcccaggctggaatgtagcggcgcaatcttggctcactgcaacctccacctcccaggttcaagcgattctcctgcctcagccttccaagtagctgggattacaggcgtgggccaccatgcctggctatttttgtatttttagtagagagggggtttcaccacgttggccaggctggtctcgaactcctgacctcgtgatctgcccacctagcctcccaaagtgctgggattacaggcgtgagccaccgcatccagcttcttgttctctcttttatatataagtgccatttgctgaatcagaaaactttttgacaa

SEQ ID NO: 1879322 - DNA, 4001 bp, Homo sapiens
acacctgacctcatgtgatccacccacctcggcctcccaaactgctgagattacaggcttgagccagtgtgcccagcctgaacacaattattaaagtcaaagtgagacctaacagtggaactttggttgcggctacaggaaatatggattcaaatactgaacaccagctgggcacagtggctcacgcctacaatcctagcactttgggaggctaaggtaggaggacagcagagcccaagagttcgagacaaacctggccaacatggtaaaacgaaaaaattaaccaggcatggtgatgcacacctgtagtctcagctgaggtgggaggatcgcctgaattgaggtagtggaggctgcagtgagctgtgttcctgccacagcactccagcctgagcaacagagcaagaccttgtctctaaataaataaacacaacaaaaataaaacaaatactgagccaggtgtggtggctcctgcctgtaatctcagcactttaggaggctgagatgggcagatcacttgaagtcaggagttcgagaccagcctggacaacatgatgaaatctctactaaaaatacaaaaattagctgggactgatggcgctaatccctgctactcaggaggctgaggcagaattgcttgaacctggaaggcggaggctgcagtgagccaagatcacccccactgctctgggttgcagtgagccaagatcacaccacctgggtgacagagcaagactgcatctcaaaaaaaaaaaaaagaaagagaaaagaaaagaaagagagagagagagaaggaaggaaagaaagaaagaaaaagaaaaagaaagaaagaaagaaagaaagaggaagaaagaaaaataaaagcatagagagtgctggagcagtgtgagtgagatggatagtggtaaaaggtgaccttggaaaaggaaattgggaggccagattgtgtagggtcttggtggccatggtaaggagtctgaattttgttctaagatggaaattcactgtagagtttggtgctgggaagtgacaagatcacatgtgtatttttaagagatcactttgggtgctgtgtagaaatcagactgtaggagtcaagtgtggagggagaccagcatccaattacagcctgccatgaacttgccaggttcctcttcccttccttcagcacacactactctttcccaccgcttagcctagttaacacttattctttcaaaattagcccggatgtcactttctctaagaacaaccgcgccccctgccgcctccccacctcacacacctcctctaacgcaaactcatagccctcacaacttctttgtcactttttctccccctttttttgagacaggatctcgctctattccccaggctggtctcgaactcctaggctcaaaagatcctcccgcctcagccacccgaatagctcctttgtcgctcttatcactgttgtgattaattgtacaaatggcttaatggcagttatagcgcccagctcatcaaaggcagtggcctgccaatcgtcagcgggcagggcagggaccagtccagtccatcctggctcccatgtgcagccccagtgcgcatcgcgacaccggcgctcgttgccgcgctccgtgaacgtttgtcacatgtccgaagaatgaatgaattatatacctttcttcccactccagccctcaaaaagcaagtggatacaaagacttgaagattttataatcgcttcattagtaaaatttgaccatccttaccattaaaaataatgataatgatgaaaaaggctaagtgcgaacgccgggaggggagagctaaaattcaaagggcgaaatatttataatgcctaccgtcggcgaagagaaacagcagccccaaccgaaggcaaaaggaaatcccaccgcagcctccaaaggcgcgtgggcgggactggagaatggggccctgcgcactaggcgcggaagtcaagaagcagccccaccacccgtgccgcgagaaaagcagccctggggaggcggggcggggcctcacttggaaaagagacggtcactcatccagaggcgggactcagagcccctccacaagtctcattggtccatttgaagacggacaactctccctgaccatccgtagcacagacggggcgcaagcgtattggaaagggagcgggtgccagacgcgagaactacgcatgcgtctcagcgctttcccgccagcacacccttagtgggtgggggggggcgattgaattcccacagtgagtccagcccaccgaagctgagaggattcctaaccttcctcttcagagagcctcaggttagggaacgtccagtgcccaaaagctgccctgtgggaatcccattgtccaccgcctcttacctaatgtttcgttctggccttgccccatctcttcctgaggctgggttgttacgatggtgaattattcaagatgtcttgcagcctgacgccatctctgggcagtgctcctgcatcctccctgtcttccttgggagggcaccacgttgctcttacaagcacagggtcctgaaactgtttacaaggccccactctgccacgttagtatcttaacgagtgtttgttgaggaagcactgtgtgttagacccagtgcaatgagcaagtccctgatcttgtgaccttacattctacaggacgacacaaacgtataaacaaaaaataattttagatagtgatacatgcttaaaacatggctatgtggccgggagcagtggctcacgcctgtaaatccaacattgtgggaggctgaggcaggtggatcacttgaggtcaaggagttcgagaccagcctggctaacatggcaaaaccccgtctctactgaaaatacaaaacttagtcaggcgtgatggcagacacctgtaatcccagctactcgggaagctgaggcaggagaatcgcttgaacgcaggagatggaagtttgcagtgagcccagatcacaccactgcactccagcctgggtgagagagccagactgtatctcaaaaaaaaataaaataaaataaaataaagctatgtgatagaatgactgcgatggggattaggtcctcactgaaatggtgagagtggagttaaaacctgaaattaggtgacagcaccagatatatctgcccgagggtttcgtgcttggaaaatagcaggtgcaaacgtccttgtgctgtgaggaaatttggctggaacagaaggtgggccagattgtagctgaccatagtctctgagagcttggagatgattctaaatacaatgggaagccattaaattgaggcagagccttgatgtgacgtgctttatcatcattttgctgagtggagaatggattgctgggaaaagtgaaagattgattcagaggttgtggagagagggtggctggaactaggtagctggggaggtggtgggacgtggatgaattcaagataggattggttgtgttggatatgggaaaagaagtcaccatggttcctgggcttttggaatgtgcaaatgggtaatggaggtgccattgagatgggaacagtggaaaaataaccggtgctggggtgggaatgaagagctcagttgtgtggccgggcgcagtgactcacgcctgtaattccagcactttgggaggccgaggcagggggatcacctgaggtcaggatttgcagaccagcctggtcaatatggcaacaccctgtctctactaaaaatacaaaaacattagccgggtagcggggcctataatcccatctactcgggaggctgaggcaggagaatcgcttgaaccctggaggcagaggttgcagtgagccaagatctcgccattgcactccagcctgggcaacaagagcaaaactctgcctaaaaaaaaaaaagagttcagttagttcagttgtggccatgttgaatttgaaatactcattagacatccaaccagatatgctgagttggatggcgctcaagagaggtcaaggctggacttatgcattaa

SEQ ID NO: 1879323 - DNA, 4001 bp, Homo sapiens
taaaacaaaggaaaatttatttttcttcttcctatgttgagggagtgctgggagagtctccagagcaccttagatagtattatcaagacttttcctgggtctggtctgtgcctgttgctgcctctgggacaagtcagcctaatacaggaaaacttatttctttttatttttaattgtatttttctttaatttcctgcctcatcaacactcaactatgctcacaactcaaatatttcatttaatttatagtggaaaactttctttttggattctttttaaatattttcactagtcaattaatggaagatagaacaggatttagaggatttattttgcatcctggctgtgtataaggaattcaatattgatttacttattaattcttacagtgaataatacagtgaatcagtattcatagtttgatgtttacccttagaacaatttccaaagatttttaaatgtgttccttcctccatcttcaagtggttatgcttatttcaccgcaatgaggatcaataaagcttttcacggtgccattctggaagtggaaacaacgtaacatacttttgcaaattttagaaaactatacaaacatgtgaaacacatggctgaggaaccttccaaggactctgaagggtcatgtccaagagaagggccctgaaacttaagctgcgttagagtcacaataaggtagcctctaactcagtgagggtatgaatgcaaaattgcaaatgctgaatgtttcccccagataatgaaataaggattaaaagatcaagaggcagataaagagagctacctaggaagttgttcaaatgaaatatatttccagcgatacagctttaggatttctgttttgttctgttttccatttggtagggtaggagaaagagaaatagaggaggaatagtaggagtggagaggaggaggagaaggggctgggaaggtgtgtgtgtgtttgtgtgtgtgtgtgtgtgtgtgtgagagagagagagagagagagagagagagagagagagagagagcgagaaagagctatcagaccagaaggtgatgaatgaggctagtgtcttgacaaggaattcaggcgaggactttccagaaggcaggattaaagtagtctgattgcatagagaggttaaaataagcaaagatattttctctagagatgcattacaggagaattaaagaggaaacactttaggccccagtctctactaaaagaagacaaaattggaagcactttagtgaagcagtggggttgaatttcacttctaagggacagggatcagtgggcactaggaaattagtgagtctggactatttctaaagaaagtaatccattctgaaacgaagttcacaagtgtaataaaaagtatactgttttcatgaatcttcatctttcaggctgagtttcagttttttctttgtctttaaccatgtcagtgggctgattactctgcttctcatttgctgttctttccttatgaaaagaacccatttgtagctctttccatttcttagctgcataggagcaggattcagcaagctccatcactgataatggaaatgtaatcatgtctccagtcaacacagagaatgacaacaaagagaaagactatcctagtgcatttcaaactctcagtttagcccctgtctactggtgcctaattcaacacaaacactgtagtgtcacttaaggccatgctgtccctgataacaccaggatttcatctgacctgcgtcccacttcaggctcatctgcagcctaatttggttctgacgatgtttaagaaaatgaactgacctttataaattccttcccatccctgccacaaccttatgggttccatatccctgagctgagatcctttggagctaaagagaaagctgcttaatgagaagtagtaaaagttcttacctgttctttttctccttagttcatgaggagtggcttctagcacttctgtgtctctcactggatccttggactaatattttactgttccaacgttgtagggctgggatttcttcagtgatgaaatatttaaaggttaagcatatttgtaatggatttagagtaatatgaaactgaaagtacttcattcaagtccactaccataaatgaaattactggagtgtgccagtgggagggtttaatgattgctcaaccagaagcttcaaagttttttgttggaaatcttagagaccatttgttgtctaacaaaatgcccattaggttttgaatacaatgatacatgtctcatggattgagtcagtttgagaatcctagaatgaggaggcatcatgttaattttcagctataatttcctaaaataatagacacactcacaatggagctgcctattcttttagaggtgcggtaaataaggaaagggcatatttaacacattgtctgacataaaaagtcagacagctggaaaaaaataagtagggaatttttcatttagatggtggggatgaggaagcatcatttcctcacttttcagttcacttggtttgcagtctatggaatccttctagtagatagtcacagataaaattaattcacaatttagtattattacatgatgcaataattaatgtgtatatgcctagtgatttcaaagattgtcttgatattagcatccaatgaacagactgaatttcaggtgtggaatgttttgataataagcttattttcacacaaagagctctatgcagccggctgtagagttcatagcaagagggattcagtgattcagctggggttactgagtctcatatcaaatggaagcaagacctgcaagctagaaaaacaatcaaccatctgtacatgtgtgtatagagagcaaatatactgcatgcacagcactgtactaggtgctgagaagtgtatgaagatgaattaaacacagccactgcccttaactggacttactctagagggtaagaatgacttgcactcaaagcttaaaagcaaaggcctggagaggagtggaagagtggagcactgaacactgaaatatgtagcccaagattgcacattggaagacttcaaacttttacccatgaagaatttcctttcatgtcacttatgtgaagtgggttgagttttagttttataaaaaatgacctgacagtaaaaacagacacatagaccaatggaacagaatagagaattcagaaataaattcacatattttaagttgcctcatttttgacacagagaccagtaatatacattggggaatgtatgtttacaattggtgctgggaaacgtggatattaatatgccatatatcaattcagaatggattaagtatttaaatgtaagaccccaaacaataaaactactggaggaaaacatagggaaaacacttgcagacatctgtccaggcaacaatttgatgggtaaaacttcaatagcacactcaacaaaagcaaaaatagacaaatgagactgttaaattaaaaggcttttgtgcagcaaaggaaaaaaaccaacagaatggagagtcatcctgcgtaatgggataatgtatttgcaagctattcaacttacaaaggactaatgttcagaatatacaagagtctcaactcaaaaacaaacaaacaaatactcttattaaaaaatgggcaaaatatctgaatagacatttctcaaaagaagagatacaactggctaacaagtatataaaaaaatgcttaacatgtcttagatctggcacgatggctgaataggaatagctccggtctgcagctaccagtgagaccaatgcagaaggcaagtgatttctgtgtttccaactgaggtaccctgttcatctcattgggactggttaggcagtgggtgtagtcttctgcatttccgactgaggtaccctgttcatctcattgagactggttaggcagtggtgcagctcacagagagcgagcagaagcagggtggggcattgactcacctgcgaagtgcaaggagccagggacctccctccccc

SEQ ID NO: 1879324 - DNA, 4001 bp, Homo sapiens
aatctggagaagaggacattgaagaatttcctgaaaagtgcacagatcatgaagatatctgtctgacataaatgcccatgagagggcatccactgcagagatggatcttggtggtatggtagataagatgactcatctagtaggtaatcagtcaatctcttttgccagcaggcttgctcattgagcctatgagaaatttaacatggaagcagggatggaaactatgaatgggctcagcattatgacatttctctcaccaaggttagcatgtgatttggcactatttccaggcgtctggctggactagtagcatagtgattactctggactcctttgagcatagagtaagcaatgttagtctttatagggacagaataatattgtggggacagttttgtcttccatgcccgaaccatttacatagtgaacaaagccttaatcatcaccatggcatcccctgcaatatcacctgtaaccaggaaacatatttcacagcaaaaggggtgtggcaatagaattgcccttggaattcatgattcatacttcatacctcaatattcagaagcagtgggcttgactgaatgatggaatgggctttattgaatgatggaatggcctgctgaaggtttagttattgaagctgagaaacaatactgtgtaaataagcactgctttcctgcaggctgcagtgtatgccctaaacctgcagtcaccgtaacctgatacatgagtccagaaaccaacaagacatgagagtgtctcgtacatgatgcataataatccagttgaagaatgttgcttcacttcactgaaagtttgggtttggtgtgatggttcattttacatatcaacttggttggactatggtgcccagtttttgttcaaacacaagcctcggtgttactgtgaaggtgtttttttttttttttttttttttttttgatgcgattaacatttaaatcagtagacttttagtaaagcagattaccctttataatgtgagtgggtctcatcccatcagttgaaagccttaagagaaaagactgacctgcttccaaaaagagggaattttgcctccagactttgaactcaagctgcaacatcaacctctgtcaaaatttacagcctgctggcttgccctgcaaatttcagacttgccagttccctaaattgtgtgagcctatttcttaactctcaatctctctcactcttttttctctctctccccctcagggtgtgtgtgtgtgtgtgtattctcttttacacatatttttggttctgtttctctggagaaccctgactaatacagtgaattggaagatcctagtacgaaaggaaagactactttaatgactactttcatattatatacatatatataataaaatcaaaaacaggaactgccacatggttttggtcttcccatgcctttgaatcatcaggcagagaatgaggttactctattgatagaggtgaactctagtgataggttactctattgatagaagttctttaacatctggaaagactagctgttgtaaattaggactcgtttgtcctttagatacactgtatacatagataagtaaaacaaaatgcacaatcataagaaacaatggtgaatctcgcctcactgtaagcacactggcttagagctctctgcacctcccttttcccctccttccctgaaccagtccacaaacaccatgccatcccccccccacaaaataacatttcctatgaattttaacaaaaagttatttacaaaatgtgtcattttactacctctaattttaacatgtatcaggtacttcagaacatctagaagaaacagacatctcaaaaaagcttagcgttgttacctctatatacagaagtaataaaatgcacacaaaacaatggatagaatatgaaaatgtcttggaaatacgacccgtcaggactaggtaggtctcgcccaactgcgacagagcggtcgcccaggacgtggacctgccggccgcctctggaccgccttcctcgccctccacagcctaacggcctccgggcgcatttgggcggcgccatgtttcctccccgcttaccgccgccacccgaaggcgctgagtcccggcggctcggcgcggtcttggtctgggtcggtggggttgggccgggagacccgcggccggcggggtccaggctgggggaggccgccgctgccaccaggtccccgaggtagggtaggaagaggttcgccgcggcttcaaggcctgggccgagcgggggagccacagcgagggttccggagcctgcaaggcggagtcccgggctcagctcaccccaggcgcaggcctgagggctgggagggctccgggggctctggggaacaggccggctccggtctccccgcgcgctctcagcgtcgtcaaagtttattatccacggagcgtcctggaatccacccgcttcggatactgaggaacagctgaacaacaacgcaaggagtttacaaaacaagatgacagtcaacatgtgtatatatagcaaaaaccaacaacgcaattgaacaaaactatgataattagcaaataataaatgtattttcttggtctggaaatggcatgagcacactcctttcagatttccatctaccttgagctcaaacaatattagaagaaaaacgacatcccaagtgccctgtcttccaaggtcactttgctcgatgtaaacttgatcttccttctcagaaggcactggagtctctaaatttgcgccagcttgcctgcagagccacagcagttctctaataccatgtgccggagggcgctcttcacctccgtgttcctcagggtgtaaataagtgggttcagcgcaggagtgactacggtgtagaacagagctatgaacttgccctgctcatgggaggtgctcttggctggctggagatacatgaagatgatgctcccgtaaaacagagacaccacagccacgtgggaagaacaggtgttgaatgcctttctccgcccttctgctgacctgatcttcaacacggcccgggcaatgtggccgtaagagaccaggatgagccccagaggcaggacaacaaagacaaagctggccaggtacatctccatctcattgaggctggtatccacacaagccagttgcataatgaggggcatctcgcaaaagaagtggtcgatgcaattgttcccacacagcggtaggagcatggtgagcgtggagcccaccatgctggtggtcagaccccccagccaggaggccaaagctagcccaaggcaaagctgtggatgcataatgacagtgtaatggagtggcctgcagatggcagcgtagcggtcataggacatggtggccagcaggacacactcggttgcccccagccaatgggagatatagaactggaccacacaccctccatagcttatggttttctgtggtccccagaggttagccaggagctgtgggacaatgctcgtggtgaagctcatgtccaggaaggggaggttggcaagaaagaagtacataggtgtgtggaggtgcacatctgtatgggagaccagaatgatgatgccattgcccaagatcgataccatgtaaaaactcaagacaactatgaagaggacagtttctagtgagggtcgtgtggagaagcccaggaggacaaagacttctggagaactcacattggctatttccatcattgtatgctgggggtggggcaaaaggccacctgtgggaagagcacagggcatacagggcatgagacatgaagcaattacatcagttagcaaacattaaaagtgtattttagttcattttatgttattcttttttagagacacaatttcactgtgttgcccgggctaacttcaaactcttgggatcaagcaatcctcccacctcaacttccttggtaggttgagaatacaggcacgtactaccatgtctggctaaaagtacattttatacccattgttttcaaaagtagccactca

SEQ ID NO: 1879325 - DNA, 4001 bp, Homo sapiens
gtattggcacttactaaaagtgccctggaggattccagagtagagtcacaatcaagaaccactgacttaaatggccaagagagccccccacctccgcatcactaagtatatcttcaaagaaaatgaaacataatatttggctaaagagaacttttaacaaacactaatcattaataaataataaatcttgttttaggccaaatatatattttacattatgaaagtgctcaagaatttggagatatagaagaacacataatcatgtgtatataaaaagtcatcacaaaaagaatcatcgttcatgttttagaattcttttttttttttctaggcaagaactttaatgaattgaactgttactgacaacataaaaaaccagtataatatatacaaaattatcattttatgtcaggataaaatttatcatgttggcaacagaatatgtcctgccgacctccaagtggctggcacagtacatccaccccgtgacaggcccactgggactgtggtgaacgtgcctgtacctcagtacaaagtcccctttccctgagaaatgtacagaaggagagatgaagagcgcgtatccaaaaggaagaggaagaggctgggtgccctgtgccccgagctcagaacttcggggggatgaccggccagtaattaggctgctttggatcacagtgcttgtcaaagctcagctgcacgttagcctccatggcctggatcttggcggcgctgtcccagtacaaacgcttcatttcggcctggcgccgctcaccaggcctctcagctggggcctctaccgaccggcgggtgttgcagtacaggtcgtgttcagcgttcacgtagctgttcaggcgctccgcatccagctgttgccgccgcagtagttcttctctgtgcctctctgtctctgcaaagtactggcggagctcttcggtgatttccatattgctcaggtcacatgctacctctgcatctgactcggtctccatctcttcctccttggataaggcttggtcttctcttgtggatgcctggatcctactgctgccatgtggatgttgcccagaccctctgaaatgtgaagaactgcagggggagtcctgctaggccacatgatggtcatagaaggactgaggatacgcagcctggttatcgtaagagctttggggaagaagcgcaggaaggaagaaccatggaagactgaaacaggattccaccgccttcctgtaggcattgtggtggctttgcatccaagccattgcttgatgataatgttgccagtatcttgcatatactggatgagaataccaaggcctggtagcttttgatgttgatgccttcaccactgccatctccgattgtgaaagtccaaatgggtgccgaaacttgtgggcgcgcagcttgcagatcctgggcggtggccaagcaggccatgttttagaattctttccaggcgggtcgcattggctcacgcctgtgatcctaacactttgggaggcggagacggggctgggggtggggggatcgcttgagtccaggagttggagacctgcttgggcaacatggcaaaacccccatctctataaaaataatttaaaaattttttaaaagaattattatttccattttatttcagtgctttgtcctttaagaaaatttattgacatagcgataatcagactccatacgctattttgtatcttgcttttcaaatttgccacaggcttctagaaacgtcccagacttctgtgtctccatggaggaaaccccgtaagtacttacaaatgttatgattagtcatccctagccaatactaagcaaaaggtaggcatgcggttttattagtttgggcaggaagaaggcattccaaccggcttctttcgctcttgccaggttcaaacatggcgggccgcagccggcccttcccgtacactcggcttgctttcccacaacccccgccaatctttagcgctccttttttaccttccttccccgtcagcggctccagagggtcagcacctccgagcgtgacagcggacctgcttcccgccccccacgcgagggcccgcccaccagcccgcgtcagccaatagcaggccgcgccgatggggctggtagcgccggtcggccccgcctccccagcctcgctgtggcctgcggctcccgggctggtagcgcgccgctctcggtcgcgcggagtgatcgtgtggaatcgcgggtcgcggacgctcgccgccggccatagctcagcctagcgccgccaaggccgacggccctcagcctctgccatggacttcgaggacggtaagcgctgcctctggctggtcggcgcagctggcaggaggcggggtggcctacgcagggggtctgtttaccgtctcaagatggccgtgtgggctttgttctgcgggcccggaggccgcccgcccgccccgggcccagcgcccggagtcggcctctttggggacccacgcgccccgattcggcccgctcggcgcccgctgccggcggagacaagagaactcggtgtccggtaggacgcgcctagagcgcgagagcctccgggctggagccccagactcgccttggcccctggtagtggaaattgccccgacgtctccaacttcccggtctcgggcaaacgggcgagtgcggcctcacccacctagtctcgcattcgccccacagggcagcgacccagaccgtccgtttagttaatcctcagcctcgggttacttcttgccagatagaattttcagaggcttgttcacagtgatgtttctgtttgtcccggtttaagatgagttgaaagggtgtctgtaagtgatatgtatagataaatatctatgcaaaatggaaagcaagatgtttcctggttagtaaactggggtgtttatcaccaaaaattacctgcttattaatccctaacttgaaatatttatgtgaaccaaagcacttttctttggatcgtgtgtaggtaggatttaagttaatcagaattttggcacagcaagcatcaaatgtccttcacatttagacctgtacacagccttgtaagtgtttgacttacggattaaataaactgtattttagcaatacttttcagttgtctcagatactaattctttaaaccacttttacagggtcacaaagtaatattaatttggtcttcacttttgttttcaaaccttgcttggaattggtgtcaagataaagtggtatgtagtgacaacattagggagacatgggaaaggacttatgtgattaaactggatttaatcctgagtaaccaggcatgcttaagtaaaaccagttcactaagtaggctgtaaacttttaaccccaccaaaaaaatgatctttaaatgaggtgtgatctcagcatatgtcttactcgatgagcttttgatttttcataacatttcatgcaacaaagaattaaagctttcatatctaggtacagatttgtgaaaggggactggaatagccctcttgtagatacttttcagttactttgaaatagtaagttcagctcttaagagtagcacactctcgtggttttgtttgttttggttggactttaactcattttgatgtagatacctttaaactatgaatatttgggctgggcacgatggctcacacctgtaatctcagcactttgggaggcggaggcagaagaatcccttgaacccgggaggcgaaggttgcagtgagccgagatcgtgccattgcactctagcctgggcaacaagagccaaacttcgtctgaaaaaaaaaaaacaaaaaaccaacaacaaaacaaaaaactatgaatatttgaagtggccagagttgggagtgaaaataaaaaatatattattgtattttcatgctgtagtttgatgataatgccaacacccaaggtatagcagaggctaacaaagtggaggtggggcagtagaaacagttctttccactccccacccaaggcaataagggaatccatttctatggaga

SEQ ID NO: 1879326 - DNA, 4001 bp, Homo sapiens
gtggtatgaaaacataagaacttcaatttttccaggtatcgacaaccaacttgccttgtgtctttcttctgaaacagcgtctcactctgtcgcccaggctggagtgcagtggcgtgatctcgtctcactgcaaactccgcctcccgggttcacgccattctcctgcctcagcctcccgagtagctgggactacaggcgcccgccaccttgcccggctaatttttttgtatttttagtagagacgggctttcaccgtgttagccaggatggtctcgatctcctgacctcgtgatccgcccgcctcggcctcccaaagtgctgggattacaagcgtgagccaccacgcccagccgccttgtgtcttcttaagagtctaaaggattctacacaccgtggcatatactctcaccctcacccgcctttgtttttcttttaaatcaaaggatttcccaatttatcacagctggaaatttcagctatcacatactaaagttaaatgtaaagaggcattagtgtgtgttacatgaactctactagtttccttttagagtgaaaaaactacagaatacctcagtgagagtctgaaacttctcactttcaaaactaaaaagctgccagaaatttgttcaaagagtgaatccataatcattaatacaaacgctccattcttttcaccatgtgaactactacggcaatagcctcctcgtcgggttccctgcatttgcctctttaactcttctttttttcgcttcctctactcttcagccagggatgacattccaatcggagccatctctcccttttgattgagattccttggaagatatcccattgctattaggagaaaaccaaaactcctttacaaagcctaaaaggttcgacactccccctcatcccatctctccaggctcagttcttcatattggaaaagctcccttccgccacagggctttctgacaagttagtctttttgtctggaatgtcttttccttttctctttccttagttaactcctgctagcccttcagctctcagctcgatcctcacttgctcagaaacccttcctttccctccctaaagaagccaaattccctcattctcctatcaccgtggaactctcctctggggcactgccactgcggtaatttcacatcgttttgttcagcatctgtccgtctcaccaggcgcaggtctacgaaggcagaggccaccccagtggtcggcgctcaacacccatgaagaaatgaaagcgccttctaacgcgttagacgatgaaaccagggcacacaaccttgcgtctaagaagtgaacatcccatgcaaaagacttttcaaagggaagggcctggtttgagaatggccagagacatacaaatgtgaagcgcatactgaatccttccattcatactccgggagaaagacgatggatctgaaagaagccgcctgatataaacagggaatttcaatcacttcgaggccgattttccacagcggctgggcagagaactgcaaacgtatacagtgctagcacagagtccggaggggaagaaacggtgaggtttctgcttcctcctcgctcagatgctcccttccgccccacttggccaacccttcctctccctcctcgcttaaagctaggggatggaaaattcatacacaatccggttcagcatccgggtcctcactctcctttctttctttcctctgccccgcctcccagcctcccccgcccttcttcccatccgggttccccccagccgccgccactgccgctcacagttcaacgatgatatcacgactttcacgccgccggtccgggagtaactgtaccccgcatcaacttcctattttataatgtggacttaggctcttcccgatgcctacatgaatccttcccactatttcaccacagaactctccgccctcctcagccgccagcgacaccgcattagttggtgcaagaaaatgcgccatcccggtcacactgcgcaggcgtcgttgccgcctccctactgctttgttgccccgcccctttcacctcccccccgcccccgcaccggtccacgcaggcgcagggcattgcgggccttgcagttctcgcggacgaggatttgcgcgttggccccagagtatggactttatttcccagaaagccttgaggcgtaactttctgtttccatagaactggtgggaaaatggcgtcgttgtttgtatccagggaccaataggaacagtgtataggcgggttctaaagaactttaaccaatccaaggtcgtctaagaggccatccgggaaagaggtaggggagggggggaaaaaaaatctaggggaggggagaaagggggggaacctagagtcggtgggggggaagcgatgtttgcccgtcagtcgagtccggagtgaggagctcggtcgccgaagcggagggagactcttgagcttcatcttgccgccgccacggccaccgcctggacctttgcccggagggagctgcagagggtccatcgccgccgtcctctggagggcagcgcgattgggggcccggacctccagtccgggggggatttttcgtcgtccccctccccccaaccagggagcccgagcggccgccaaacaaaggtaccagtcgccgccgcgggaggaggaggagccggagcctctgcctcagcagccgctggacccgccgcccttcttccccatctctcccccgggcctgctggttttgggggggagaaggagagaggggactctggacgtgccagggtcagatctcgcctccgaggaaggtagggatattttctggggctttcgtggtctcctaagggggttcttttgggagtcgctgggcccggccaaggagcagaggaagatcgcggtggtggtccctgcggcgcccgaattcggggcctcggcctcccgggaacccccaccccccgcagccgctgtgtccgagccgccccctggctgggcggccgcacactcagcggtttagcggccgcggtcgggggcccgggcagggtgggggccgttccgcctccggggccctcggccctcacgttgtccccgcggcggggccagatgttgatctcgctcccacttgtcgggtctgagcccggaacgggacgtgggcaggggctctgtggcgggccggtcctgcccgcggcccacaggccctcctggcccctcggtggcccccggccggcctctcgctcggacgcggcgcgtgggggcgcggattcgctcggccgggcgccgaggccctaggggagagcggccggccctgcgccggacgccgggcttgttgtgagtttcttctctgacagaaatggcgtcattgtcgtagacgggaaactccgtcgggtctcgacaatggggacgggaagctgccgagctgtgtaggtggttgggtttgcggggatggcggggccggagggagccccgagtcggcgtgtgatggttcgggggctggcgcctggttgcggctctttcttcggggttcggacgtcgctcgcttctttccctccgcctccgccagtgcagaggggctcctgtggtgttgactgggtgtcttttgtttcccctccaggtgcagctgaacctggtgttttagaggataccttggtcccagagtcatcatgaaggtaagattgcctgcggaaaacgaatctctggggttatcgaattcaggaagtaggaggtttcgacgaggtcgtcgtgtggggcttccgagttttgcagaggaaggtgtgtttggtgacttggtgaccgagcccttccccagagagaccggggtcagctggcgggctttgctgtggagttggaggcagttataggatgtctcaactgaagatgattctcccatattgaacatctctttttgtagggaatgagaggaataacggcatgaattaaagtgttttaaaaggtaaaataaaaagcaagtcaggtaatctgaccctagaaactgaactgtattgtggttctatcagttacactgatga

SEQ ID NO: 1879327 - DNA, 4001 bp, Homo sapiens; identical to SEQ ID NO: 831

SEQ ID NO: 1879328 - DNA, 4001 bp, Homo sapiens
ttctcagattttccagtgccaagtgacaaagggggtaaactttgttgattgttctccatgtgtccccccaagtcccttctccaccttctgtcctgctttgacctcagaaggttggcccccataggctgctacactgaggggctcttgccctccagtttctggtttagccaatgcaagccaccagcaagtcaaagggtcaaagggacaggtgctgggtgttgattccccctgctcccgccatgccttgccacagtctgggcagtggttgcatctccctgtgactatagcttctgaggtgacccctcttgccctcttccaagctcccgctccccagggctccagaagcatagtcccttctgttggccctgaggtctcaaggtggccacagcttcccactcttgctcatccctggggcatcactactgcacatgggcatcccaaaccctgaccacagataaatagacccctcattagattttctttggctaaaccacctgtcttccactgggaactgaactgatagagatggcatggtagaaagacagtgagatgaaggagaaggagatgaagacgccccaaggcttgctgaccatcagctgagatagaatgctggagagcatgtgtgtctgccacgtgttttcacacacataccattggctatcggcttctcatcctccctcagatctttttcttctgaagtcactaaagcagatctgggttttgcctggaaaatcttcttagaggaggtaagaagcttctaaaagaaagaaacaaagcagtaaaatggaagtacacagggtcatgtttatctgccccgtggagattatcaccaagggctgctgtgctggtcacaggaggtaccagtgtgggcaaacactgcatccccttcacctcccaaatagctgagagtgtccactggccagtccagctcctggtccacccatgcctcagccctagggacagtggcaataattcacattggagacaatttattcaaagacattcactctacacaggccatgcccccgtttgctctttcatccattccctgccctttccctgctctgttctgttccactgtagactcatttcccaagctcctttgccatcctgtaggttcaaccaaagggggatcagggtaagattggaggagagagtaagggagatgccagggtatttctcttcatttctttctaccccaaatgacatctctcagatctgtcttccccatgattccagctcctcccctggctccagagccctggctcacactgggcagcccctcccactggagggcccttggcttcccacctcctgcagaatccctctcttcttggcctgtgctctcggtctccgtttggcccccgtttggccgctgtttgtctcctcagctcttccattgcctgtgtaattaaacaccctctgtggaaagacctgggcctgtttctgttttcctgactggcagagtgatttgtgcaagatcacatgggtggtaagtggcagagcagaatcaaaccagttctcctgaccccggagcgcccactatccccagtcataccacgctaaccacctcggaggactccaggtcttgggatctcaccaggccttctgcttcccactggacactgtgcctgggagtcagggttttcatatgtggattcgaggccatgacactggttacctgatttgcctggatcagagcttactcaggacctaaaacgtagtagacagcaggcctagaaagaaggcctctctttgcttttgtttgcttgcttctttgtttatttgtgtgcaagaaaatcgtaagtcaatttaggaactctctctaccccatatacaaatgcccctcaaaatcttctgggctggaaagagaacttacttacccaagacttccaagcaaggaaagcacactgtcgtggcagcacacctctgggacgctgaggtctgcttcactccactgtctcctggaaaattatataacagcccagagggcctgaccataattggtttgggtgtagctctctctccagttctcttgctgggtgataatgatgagaaacagcacgttcccagctcctctcaggtagctcaacgtgaaacagacctgatgtgcacagcacagtaaaataatgagatttcatctaacagagaggaggttacataactggaaatcagcccaccagcaataacaaaacaatcaggggggtcagaaagacagacagctccattctcagctatcgatctgggttctgatgggggctgggctggagattaacagcagggcccagtagagatgcaattctaagtaactcaactggacagtttccctagtagtgccgggaggctggagggctctcaggaccggcttctcttcctccagaaaccaagccagccttgcttttccgcttcctttctgacctcctagaacagctattgtcagtcccactggccctcaaatatttctacctgactcagaaagggatgtgggaaatggtcagaagggcatgtcattgccataactacattcccgcatacctactgcatacagagcgatgcagggagagaatgggaaagctctctacttgacagttacatacaggaacaaataatgatctttattcacccacctgacaatggaaagagctttgatacaaaagtatcacatccaaaccaatcattacaatagctctgccagagcaagtggattacaaaggattatcccccacacaaacacactcactctccacagactaaaacaaaataaaacaggcagaaaaggcaaatcagcactacaatgagttccatagctagttatatatcaaaatctcctgaagacctttttttattatttgagatggggtctcactatgctgcccaggttggcgtgcagtggctattcatagacatgatcatagcacactgcagccttgacctcctgggttccagtgatcctccctccccagcctcctgagtagcggggactacaggcatgtggcaccacccctggctcactgaggaccttttaaaaactcattcactgttcccatccccagaaaccaggaccctgttgtctgaggtggattttggaggtcacacgctggccagcctagcaacctggctcagagacgagcctgggtaaccactgatgaacccccacagaaggcttgcctagacttcctctctccttcactcatacaaaaggcgtgaccttcagtcctcaactgctcagcttcgcttcacccaatccagagtagctgcaagaatcgagaaagaacttcataagatgaggagacatcatctaagatttcaagctccatgtttttataggtcccaaacacctatacagtgcacctgcatgttcagcactgttctaaaaactttacaaatagcaattcatgtcattaatgcaacacttctaccaattccctggggtgggtactgtggttatcaccccatttacaaagaggaaacagaggcaccctgagaggtgaggtggggagccatgcagatctttgggggaaggacatgtgggcagaggggacagcaggtgcaaaggccctgaggtaagtccacttctggcccatgcagctggctcagagtgaatgagggcaggagcagtgggaggtgtctatgtcaactcaaactctatgtccacctgccacaaactatttcagtattcttttttccccagaatataattaccagaataaacggttgtaggtgtctttgaaggaaggaatggtagaatcattaacatgtatacctgcagagatgtccttcttcctggggactttgcctctccttcagtgagtccgggaaactatctcacgtccagaaaccagacaaggaactatgactttttattgggtgactgcacttacagtcctgatcatctattcttttttgtttcttttcctttacagaaatccttccttctaataataatattcttttatgattactttgagacattgtaattgcacatatttatgggatacaat

SEQ ID NO: 1879329 - DNA, 4001 bp, Homo sapiens
gtggttttctgaacatccagcttctttactctttctggactccaagaaggcaagccccttgtctgattcatctttgtacctctcccatcacctttagcatcgcagttggtacacagcgggtgcttggtaatgtctgtcgaatggccaaaggaatagtacaaaatctgtggaagcggaaatggctcctccatttacccgaccttgaacccttccagaaaagaccaaccaaatcccattaattcattaggcagaactctgccaggtactggacattcggaaacaaatttcagggggtcggggcagatggacgggaagctcatggtgggtggatgtactacaaattctataatccgcagttatacctccactttctgggaaacttctctccgtggccccagggccctttaaatgttactatgcgtgttttcctccatagtttctggaacagaaccaaactttcgtgtaggggtttggcagcgctcatcctcacagccctggggaccgctggcacaggggcaagcgaggcgttcgcacgcgaaggaaacttgcgaggagtcagggcggccccgcgcgggggcgggtcgtagagtgggggccctcaagtcctagaacttcaggtcctccatgagaattagaggaagggggatggccaaagacgaccagacgtccaccgagcttccacaggccaggcctcgcccctcctcctgcggggccacaacgcgggctccccggcccgggacagcacagccagggcgtccgggcgggaggcagggcccggcgcggaggaaggagcccggggccgccgccgccccgcccaccccagcgaggcggagccggcgcccggaggagcaagaggaggaggaggaggagaggtcggagccgtctccaggagcccttagagaccgagtcccggcggcgacggcggggcagcgcaccggcaggcgggtgagtaccaagcggcgggcgcgggtggtgagtcgggtccccgcggggtcggggcgcggcgcggggcgtcggccagcgagttcgggggccgcctccgagtcccgggtgctgggaagcgagatggagggagggagcggaggaaggaaggaaggagggaagagtgtcctgctggagggcggggactggtctgggcgctgggcgccggagaccggggggagggggaggaaggggccaagggacaccgagacccagaggcagaaacggcgcgcgcgccctcgacgggcggccgcccgaggttgcgggaagccgcccccacggctgtggctggggctagggctgggggtggaaggaaaggtctccccttgagctcgcttgcctcctcgccagcctgcggccgtgcgccccgcgccgggttgggaggcccccagtgttcccagccgtggcttgtggtggtgtcaggcgttggaggagggctggcatgtgggggcgacagggacgccacgcccctctgcctactttctacctcccgggaccagccggcgggagcgcagccttggaatccgctgggcgctgggggtctagcagggaaatagcgggtcgcagaggggagagcccatatgacgcaccccgcgagggacccccgagtggggacccgaggctgcttttctgcagactgtatttgcaagtggtaagggggaggttgaggcttagtcttgggtgatttttttttttttaattattgccccgacagttatcccgtggggcagggtgaattctgtttttcattttaattagggcatatcaattaaagctaactttaaaacgctgtcacttagcacctcccgtcactcactcgtccctcgctttgtgtgtcctgtaaacttggcttaaatcattcataactcacgataaggaagccgtgattcttgttcacgtcgccgcagtggagtgaaactttgcccaactgggactgagtggaggcattgctgcggccggtcatctggtggtcatcctgccgggcgtggttgtatacaaacaagtgggtcgagaaggaaatctctgaacaccagaggtagaagggaggttcctgcgcccacgtgtcagggcgcgtttaatggctgctcccagcggaaacaaacgggaatttattagaccgtgtggagttggacaaacttcacatgattagcttccttcccatcagttacttcctctcccccctgctgtctttgccgacacagtttatatttcctggggcggttgtagcttcgcctgaataggctgtgtataatgaatcttttggatgtcgtcagaggcagggtctgcgtctgtgccttctctattttaaaagcggagtttggctttgtttttaaaagtgctagtcaccagactgcacccttgccagcgcttcgcagctctcgaagtaaattatcgcaggatggcggccctcacctaggagaaccaggaaggcaggcagcgctagaacgacgggattgaattttactattgccaaaacaatcacattcaagtaaggagctgttttgttttgtttttgtttttttaaccaaattatatatactagcaagccccttttctagtaaactaacgttattcacacacacaatttttaaagtaatcaaaaattttacagagtcttaagtgataaaaggactttcagataaaatgttcagtccctttgccttctctaatagttaaccagcgccgtaaagccctggtttaagtccaaaaaatgctgaaaagtctactgcgtcgttagaccttataaataatgcagtcctatttttgctgtatttaactcatgtaatttactagatatcgaacccccaacagggcacacagcacttagatttgtgtagaaatatatgaaaatgtgaatctgtgtttcacaagagcctgaaaaaaatagaattataaaaatttcctgtccagaaagctccagtcttacttgaaagctctctaacaattagatttgtggatttgtgttgtcacttgttagagaatatcggtggtttattaaagtgtgagagcaaagggcttcatggtcagaaaacttgaggaagtggttagccaatatcaaattagttttttttaaaattagaattatgtgatttattgtgttttgctttgttttggagttttatgtcagcttaagcttaacctaggaaggcaagttgtgaaagcaagtaaatttttctgagccctaacttggaagagaagcttgtttaacagtgatttggggtgttggctttggagtcagacagacttagatgaaaatattagctatttaacctttttcagtctgatttataagatggggataataatggtctctatctgtagggctttacagaaagtatatgaaaactttgtctttggaaaacacttaaactggacttaacacgcagtacatggtcaaaattattagatatttatctagcttgttcaagcagcaggctactggataaattgcagggtggcagcttgaaccttccggaaatgctagatagagcaatttcaaattctacagaaagtaactggtgtgtgtgtgtttgtgtgtgtgtatgtgtgatgtttctaccacagcaatatgaataattatgattaaaggattaatagttttaatatgcttttagtgctaaagttacagttgcatagtaattttgacagtcagaaacattgcattatcctttacatttaaagagaatttatatttcaaatagttgtgtttattagccctaggtaagaaattaagccaggaacagaagtattcatctttaaccaagtgtaattcttaatcaaagtatgaaaacatgtgacccaagggtatccggttatttacttttgcatgtgctgatgtccaaggccaacagataagccataagaagtgttaggctgattgtgagtcgttgttttatttgtaaactttcatgagattgggtgttcagttaattcaggaaatctactcatcacattgttgactcatttcctaaaatctaaaaaattttttaaatgccttcatcttgccaggcgctgtggct

SEQ ID NO: 1879330 - DNA, 4001 bp, Homo sapiens
cccaatctgaaggaggtgagattgggaggatgcaaagaggtagaaaccacgtgtaataaaacagatgtaatggaagaggcacagatagaggatactgtttttacaaggcaggctcttttattattattattattattatactttaagttttagggtacatgtgcacaatgtgcaggttagttacatatgtatacatgtgccatgctggtgtgctgcacccattaactcgtcatttagcattaggtatatctcctaatgctatccctcccccctccccccaccccccaacagtccccagagtgtgatgttccccttcctgtgtccatgtgttctcattgttcaattcccatctatgagtgagaacatgcggtgtttggttttttgtccttgcaatagtttactgagaatgatgatttccaatttcatccatgtccctacaaaggacatgaactcatcattttttacggctgcatagtattccatggtgtatatgtgccacattttcttaatccagtctatcattattagacatttgggttggttccaagtctttgctgttgtgaatagtgccgcaataaacatgtgtgcatgtgtctttatagcagcatgatttatagtcctttgggtatatacccagtaatgggatggctgggtcaaatggtatttctagttctagatccctgaggaatcgaaaaggcaggctcttaacagatgtaaattaacatacaaataatcttacagaagagagagcagaggtagcagggtgcggtggctcacgcctgtaatctcagcactttgggaggctgagacaggtggatcatgaggtcaagagatggagaccacctggccaacatggtgaaacctcgcctctactaaaaatacaaaaattagccgggcatggtagcgggcgcctgtagcttctcgggaggctgagggaggagaattgcttgaacccgggaggcggaggttgcagtgagccggcaaaaaaaaaaaaaagcaagcagaggcttactccctgagaattaatggctaatggcccccaagcgcaccctttaactcatgctatggacccaaatccctgtcctgcccggtcctgagtcctaggtcactcacctgggggaaggcaagcaggaaactaagtccccaggctgcccccagaagtttccttacacctgaacgggatccaagcgggttgagtactgctgcctggcggtccaatccaatgaccacaggcaggaaagctgcagaatacgtggccattagtttcaggaacatcagtgtccgacatgcgatgtccacagccagccattgaacagtgatattccaggtggcatctaggggcataaccacaaaagtgactagtaagtcggcggctgctaaatggatgaagagtctcctgaccggagaggggcggagctggctgggttcccgccgtgtcactgaccacaggactgccaggttccctccagccgaagaaacaaacagcacaatggtcactcccactcggaccttggctgctgccgagaaggtgggcagctctgagccctccacctccactcctgatccagcccagacctcctcccccgctgctgaccccaaggggtgccgttgcctgcagacatggtggcctggagagaaactgaggaggatgaagtgtgggtatgaagcggttagctttggccactgattcttcgccctccttttcaggatctggagctgattattgcgaatttcgttcactaaagcctctgcttctggagactctccatctgttctggaggaggtcacttgttcaactgtcaaggttctgcagggaacgaagatctggtaccaatcacgctcctttttccttggacagaccagcctgggcttcaggcctctactgacctagacctctttagcccctacagccctggattcagtcggggcctgcgtgcatgtgtatttgtgaggttctgccaggcgcacacctatgccggcggcctccaagacgtggagatcactgcggcgctttctcgccccgccccggcccctgcaggccccgcccttggtcatgaatatttaaagaagaaggtgccgctggaggcgtgctagggagtaggggtcgtctgataaggggaagctgtgacgcagacacgcacagtaatacacagatggaggctcaaaagacacgagtttcgcgtcctgaaattccgcttccagggccaagctttcttttctgatactgtttgtccctcgcgaggcaccgttgggtcgcgcagtaggcgtgactaggggcgggaagtggggcgggagcagggccgcggagcctgggctgcggctgtcatggacgcctgggtccgcttcagtgctcagagccaagcccgggagcggctgtgtaggtgcggcccgaataggaatgggggtggggcgggggagggatggacagaggaagactctagtgaggcgaagtcagtttaggctacaggggggtcaagaagggtcaactccggctacgggggcccgaacggaccgtgaggcgcagatttgagccgctgttgagatgattcctttccgttcgcggaagagatggggaaactgaggcatgagtgggccagcggggaggccgctcagggttgctgtgtccacataagaccgacagtgtcctcactgggcggtgatggaatgaggagcattcgccccacggtggatagccccagactctgcccccagagctgaggaggcactcccagtttccgtgtccccacaccgtgctgccattcgggaactcccctgcctccgccctggcgtttggtctccattcagctagagggccttgaaatctctcagttcacctattctgaggaataaaatgccctccaactgtctgcctccccctcatcgatcacgtacatgctcacgctgatgtgcttgtgatggacccctgcggcctgcactggccccttcaggcctcatcattgtcaaatctctaatttgctcaacattcaatagtgctccccacccctttctagactcttttttctccttatgcctttcccttcctctggcctggagaaatggtgagatatgggcatggaggaggaaggggagtgttctcaaactgggaaagggggaagtctgtctgtgccttttggaagatagttttgagcggaaggttagggaggtctccaccttaccttgcctgccctctcctctagggccgcccagtatgcttgctctcttcttggccatgcgctgcagaggcatggagccagtcctgagttacagaaacagattcgacaactggagagccacctgagccttggaagaaagcgtaagtaactctgtctttccttttatcccccaacctttcctccatccccagctcaccttcctttgtccctccttcctgtaccctctctgttcttctttctcatttggctctgcacttaccctctgcatgagtccagttgagataagagagcaggggtatggaagtaattaggcggactggagagaatgggtcaagtttgagaaaactaaactggcacaaaaattaaatttgaaattgaaaaatggactgtttctgctctttattttttatttttttgagacagagtctctcgtccaggtcagagtgcagtggcgcaatcttggctcactgcaacctctgcctcccaggttcaagcaattctcctgtctcagcctcctgagcagctgggactacaggtgcccaccaccatgccgggctaatttttgtatttttagtagagatggggttacaccatgttggccaggctggtctcaaactcgtgacctcaggtgatccacccacctcggcctcccaaaatgttgggattacaggcttgagccaccatgcccagcctgtttctgctctttaaaaaaattgtcattattattgctcaacttttgccctcttgctttctctgtttctgtttcttgttatctgcctctccacttacaaatccttgctttccctttctaatctccacaagttctac

SEQ ID NO: 1879331 - DNA, 4001 bp, Homo sapiens
agtagtctatacatttcttgaaggcaggattttgctgccctgtccttagcaaaatttgagtggcgctggagatgcatattactttttgaatggataaatgaaatgtaccacaaagttttacccaaaccactgacttcactctcttaatagatccccatgtatgtttttcttccctgccccaatctgaaggaggtgagattgggaggatgcaaagaggtagaaaccacgtgtaataaaacagatgtaatggaagaggcacagatagaggatactgtttttacaaggcaggctcttttattattattattattattatactttaagttttagggtacatgtgcacaatgtgcaggttagttacatatgtatacatgtgccatgctggtgtgctgcacccattaactcgtcatttagcattaggtatatctcctaatgctatccctcccccctccccccaccccccaacagtccccagagtgtgatgttccccttcctgtgtccatgtgttctcattgttcaattcccatctatgagtgagaacatgcggtgtttggttttttgtccttgcaatagtttactgagaatgatgatttccaatttcatccatgtccctacaaaggacatgaactcatcattttttacggctgcatagtattccatggtgtatatgtgccacattttcttaatccagtctatcattattagacatttgggttggttccaagtctttgctgttgtgaatagtgccgcaataaacatgtgtgcatgtgtctttatagcagcatgatttatagtcctttgggtatatacccagtaatgggatggctgggtcaaatggtatttctagttctagatccctgaggaatcgaaaaggcaggctcttaacagatgtaaattaacatacaaataatcttacagaagagagagcagaggtagcagggtgcggtggctcacgcctgtaatctcagcactttgggaggctgagacaggtggatcatgaggtcaagagatggagaccacctggccaacatggtgaaacctcgcctctactaaaaatacaaaaattagccgggcatggtagcgggcgcctgtagcttctcgggaggctgagggaggagaattgcttgaacccgggaggcggaggttgcagtgagccggcaaaaaaaaaaaaaagcaagcagaggcttactccctgagaattaatggctaatggcccccaagcgcaccctttaactcatgctatggacccaaatccctgtcctgcccggtcctgagtcctaggtcactcacctgggggaaggcaagcaggaaactaagtccccaggctgcccccagaagtttccttacacctgaacgggatccaagcgggttgagtactgctgcctggcggtccaatccaatgaccacaggcaggaaagctgcagaatacgtggccattagtttcaggaacatcagtgtccgacatgcgatgtccacagccagccattgaacagtgatattccaggtggcatctaggggcataaccacaaaagtgactagtaagtcggcggctgctaaatggatgaagagtctcctgaccggagaggggcggagctggctgggttcccgccgtgtcactgaccacaggactgccaggttccctccagccgaagaaacaaacagcacaatggtcactcccactcggaccttggctgctgccgagaaggtgggcagctctgagccctccacctccactcctgatccagcccagacctcctcccccgctgctgaccccaaggggtgccgttgcctgcagacatggtggcctggagagaaactgaggaggatgaagtgtgggtatgaagcggttagctttggccactgattcttcgccctccttttcaggatctggagctgattattgcgaatttcgttcactaaagcctctgcttctggagactctccatctgttctggaggaggtcacttgttcaactgtcaaggttctgcagggaacgaagatctggtaccaatcacgctcctttttccttggacagaccagcctgggcttcaggcctctactgacctagacctctttagcccctacagccctggattcagtcggggcctgcgtgcatgtgtatttgtgaggttctgccaggcgcacacctatgccggcggcctccaagacgtggagatcactgcggcgctttctcgccccgccccggcccctgcaggccccgcccttggtcatgaatatttaaagaagaaggtgccgctggaggcgtgctagggagtaggggtcgtctgataaggggaagctgtgacgcagacacgcacagtaatacacagatggaggctcaaaagacacgagtttcgcgtcctgaaattccgcttccagggccaagctttcttttctgatactgtttgtccctcgcgaggcaccgttgggtcgcgcagtaggcgtgactaggggcgggaagtggggcgggagcagggccgcggagcctgggctgcggctgtcatggacgcctgggtccgcttcagtgctcagagccaagcccgggagcggctgtgtaggtgcggcccgaataggaatgggggtggggcgggggagggatggacagaggaagactctagtgaggcgaagtcagtttaggctacaggggggtcaagaagggtcaactccggctacgggggcccgaacggaccgtgaggcgcagatttgagccgctgttgagatgattcctttccgttcgcggaagagatggggaaactgaggcatgagtgggccagcggggaggccgctcagggttgctgtgtccacataagaccgacagtgtcctcactgggcggtgatggaatgaggagcattcgccccacggtggatagccccagactctgcccccagagctgaggaggcactcccagtttccgtgtccccacaccgtgctgccattcgggaactcccctgcctccgccctggcgtttggtctccattcagctagagggccttgaaatctctcagttcacctattctgaggaataaaatgccctccaactgtctgcctccccctcatcgatcacgtacatgctcacgctgatgtgcttgtgatggacccctgcggcctgcactggccccttcaggcctcatcattgtcaaatctctaatttgctcaacattcaatagtgctccccacccctttctagactcttttttctccttatgcctttcccttcctctggcctggagaaatggtgagatatgggcatggaggaggaaggggagtgttctcaaactgggaaagggggaagtctgtctgtgccttttggaagatagttttgagcggaaggttagggaggtctccaccttaccttgcctgccctctcctctagggccgcccagtatgcttgctctcttcttggccatgcgctgcagaggcatggagccagtcctgagttacagaaacagattcgacaactggagagccacctgagccttggaagaaagcgtaagtaactctgtctttccttttatcccccaacctttcctccatccccagctcaccttcctttgtccctccttcctgtaccctctctgttcttctttctcatttggctctgcacttaccctctgcatgagtccagttgagataagagagcaggggtatggaagtaattaggcggactggagagaatgggtcaagtttgagaaaactaaactggcacaaaaattaaatttgaaattgaaaaatggactgtttctgctctttattttttatttttttgagacagagtctctcgtccaggtcagagtgcagtggcgcaatcttggctcactgcaacctctgcctcccaggttcaagcaattctcctgtctcagcctcctgagcagctgggactacaggtgcccaccaccatgccgggctaatttttgtatttttagtagagatggggttacaccatgttggccaggctggtctcaaactcgtgacctcaggtgatccacccacctcggcctcc

SEQ ID NO: 1879332 - DNA, 4001 bp, Homo sapiens
gaatcaaattttaacatctggaaagcttttcctgactgcacggctgtgtcagacacccctatccactccccacccccattgtcttctttagctcctttagcataacacttttgaatacactatattgtaattgcctaatttctttgtttcttgcagtagtctatacatttcttgaaggcaggattttgctgccctgtccttagcaaaatttgagtggcgctggagatgcatattactttttgaatggataaatgaaatgtaccacaaagttttacccaaaccactgacttcactctcttaatagatccccatgtatgtttttcttccctgccccaatctgaaggaggtgagattgggaggatgcaaagaggtagaaaccacgtgtaataaaacagatgtaatggaagaggcacagatagaggatactgtttttacaaggcaggctcttttattattattattattattatactttaagttttagggtacatgtgcacaatgtgcaggttagttacatatgtatacatgtgccatgctggtgtgctgcacccattaactcgtcatttagcattaggtatatctcctaatgctatccctcccccctccccccaccccccaacagtccccagagtgtgatgttccccttcctgtgtccatgtgttctcattgttcaattcccatctatgagtgagaacatgcggtgtttggttttttgtccttgcaatagtttactgagaatgatgatttccaatttcatccatgtccctacaaaggacatgaactcatcattttttacggctgcatagtattccatggtgtatatgtgccacattttcttaatccagtctatcattattagacatttgggttggttccaagtctttgctgttgtgaatagtgccgcaataaacatgtgtgcatgtgtctttatagcagcatgatttatagtcctttgggtatatacccagtaatgggatggctgggtcaaatggtatttctagttctagatccctgaggaatcgaaaaggcaggctcttaacagatgtaaattaacatacaaataatcttacagaagagagagcagaggtagcagggtgcggtggctcacgcctgtaatctcagcactttgggaggctgagacaggtggatcatgaggtcaagagatggagaccacctggccaacatggtgaaacctcgcctctactaaaaatacaaaaattagccgggcatggtagcgggcgcctgtagcttctcgggaggctgagggaggagaattgcttgaacccgggaggcggaggttgcagtgagccggcaaaaaaaaaaaaaagcaagcagaggcttactccctgagaattaatggctaatggcccccaagcgcaccctttaactcatgctatggacccaaatccctgtcctgcccggtcctgagtcctaggtcactcacctgggggaaggcaagcaggaaactaagtccccaggctgcccccagaagtttccttacacctgaacgggatccaagcgggttgagtactgctgcctggcggtccaatccaatgaccacaggcaggaaagctgcagaatacgtggccattagtttcaggaacatcagtgtccgacatgcgatgtccacagccagccattgaacagtgatattccaggtggcatctaggggcataaccacaaaagtgactagtaagtcggcggctgctaaatggatgaagagtctcctgaccggagaggggcggagctggctgggttcccgccgtgtcactgaccacaggactgccaggttccctccagccgaagaaacaaacagcacaatggtcactcccactcggaccttggctgctgccgagaaggtgggcagctctgagccctccacctccactcctgatccagcccagacctcctcccccgctgctgaccccaaggggtgccgttgcctgcagacatggtggcctggagagaaactgaggaggatgaagtgtgggtatgaagcggttagctttggccactgattcttcgccctccttttcaggatctggagctgattattgcgaatttcgttcactaaagcctctgcttctggagactctccatctgttctggaggaggtcacttgttcaactgtcaaggttctgcagggaacgaagatctggtaccaatcacgctcctttttccttggacagaccagcctgggcttcaggcctctactgacctagacctctttagcccctacagccctggattcagtcggggcctgcgtgcatgtgtatttgtgaggttctgccaggcgcacacctatgccggcggcctccaagacgtggagatcactgcggcgctttctcgccccgccccggcccctgcaggccccgcccttggtcatgaatatttaaagaagaaggtgccgctggaggcgtgctagggagtaggggtcgtctgataaggggaagctgtgacgcagacacgcacagtaatacacagatggaggctcaaaagacacgagtttcgcgtcctgaaattccgcttccagggccaagctttcttttctgatactgtttgtccctcgcgaggcaccgttgggtcgcgcagtaggcgtgactaggggcgggaagtggggcgggagcagggccgcggagcctgggctgcggctgtcatggacgcctgggtccgcttcagtgctcagagccaagcccgggagcggctgtgtaggtgcggcccgaataggaatgggggtggggcgggggagggatggacagaggaagactctagtgaggcgaagtcagtttaggctacaggggggtcaagaagggtcaactccggctacgggggcccgaacggaccgtgaggcgcagatttgagccgctgttgagatgattcctttccgttcgcggaagagatggggaaactgaggcatgagtgggccagcggggaggccgctcagggttgctgtgtccacataagaccgacagtgtcctcactgggcggtgatggaatgaggagcattcgccccacggtggatagccccagactctgcccccagagctgaggaggcactcccagtttccgtgtccccacaccgtgctgccattcgggaactcccctgcctccgccctggcgtttggtctccattcagctagagggccttgaaatctctcagttcacctattctgaggaataaaatgccctccaactgtctgcctccccctcatcgatcacgtacatgctcacgctgatgtgcttgtgatggacccctgcggcctgcactggccccttcaggcctcatcattgtcaaatctctaatttgctcaacattcaatagtgctccccacccctttctagactcttttttctccttatgcctttcccttcctctggcctggagaaatggtgagatatgggcatggaggaggaaggggagtgttctcaaactgggaaagggggaagtctgtctgtgccttttggaagatagttttgagcggaaggttagggaggtctccaccttaccttgcctgccctctcctctagggccgcccagtatgcttgctctcttcttggccatgcgctgcagaggcatggagccagtcctgagttacagaaacagattcgacaactggagagccacctgagccttggaagaaagcgtaagtaactctgtctttccttttatcccccaacctttcctccatccccagctcaccttcctttgtccctccttcctgtaccctctctgttcttctttctcatttggctctgcacttaccctctgcatgagtccagttgagataagagagcaggggtatggaagtaattaggcggactggagagaatgggtcaagtttgagaaaactaaactggcacaaaaattaaatttgaaattgaaaaatggactgtttctgctctttattttttatttttttgagacagagtctctcgtccaggtcagagtgcagtggcgcaatcttggctcactgcaacctctgcctcccaggttcaagcaa

SEQ ID NO: 1879333 - DNA, 4001 bp, Homo sapiens; identical to SEQ ID NO: 858

SEQ ID NO: 1879334 - DNA, 4001 bp, Homo sapiens; identical to SEQ ID NO: 878

SEQ ID NO: 1879335 - DNA, 4001 bp, Homo sapiens
ctaggaagagggcttgattactatcgagctttaagggccttctaattatcttgacgagtttactcatgttgacctgatcaggtacaaaattacttggtttttccaggacaggaagctgcttttcacgcctgtgtcattcttttgtcactgggattttggtaggatgctgctgtcagataagtgggacccccactctttgttcgaaggagtgacactgcttgaaggtcttctccaatctcatgccacgcaaggctggacaagggctatggccaagcagagggtcctgtttaattccttaagcaaatattgattacatgcttatcatacaccaggtactgtggtaaggttttgtcctatggggtcgaagttagatattgaaatatatgtctataatcactgtgatatgctgagggaagaaagattccaaatgctattggagcctggaagaagggcaggtgagccagtgatcagggaagattccagagaaggtgggatttgacctgagactgaaagatgggtatgagtttacctggtggataggggaaggcattttagaaagcatgtgcaaaatagaaacagtatatttgaggactcctaaatagagtatgatggacagggggtaagaagaaagcaggttggatgccaaagaaagagaggtgaagctggcacagtagtgcatgcctgtaatcccagctactcaggaggctgagacaggaaaattgcttgagcccaggagttccagatcagcctgggagacatagcaagaccctgtctcttaaaaaaaaaaaaaaaaaaaaaaaaagaaagaaagaagaagatgaacagggaaggaaaagggtgccttgcttgcaactgttattccttagaatttggattgtctttttattattattagttttattttttagaatcaggcaacaacccattctatgaaatagaaagggcagtcccagcatttggattgtcttaaaggcaatgagaaactcattaatctagggaggaatattctcatatttgcttctttttttttttttaagcctttgtggatggttttcttaaagagaaggctgttgacttctccatatccacaagggagagagtaagagggaaaagataacatgcagggaatgaattgttgcaagagagagttcgattagacaaagtaagaacttgaccctgtggggattagacagaggtcatgaagggaattggtagccttttcagacctgaggatgttttataaagggtggtcatcgtctttcacattgtaagtttcgtttctggttgaggcaagaggttggatatattcagacttcctacagcgtgttctttagaagagtcattccatctgttaacagataacagaaaacaaagtttcagtgctccccagaagtttggcttaggcacaactgaataggcctatctatttactgcagtattttttaaaacaacatttaatatgataatgcaaactatgaatatttcagtgaaacattggattcagggtccccaaacttgattacaggatcccttttatatagggaacttgtggtcttctgttctaaggagcactcttggtaaaatactgaaccagatacatttgattctgttacaaactctaagaatcttccttaggttctgaaatcctaaaaaaaataagatttggacttatttttccataatgcttattcatcatggaattatgctcattcattcaatatctgcctatctggggcatagataagctctcaagtctgttgatatttaataataactatgcagtgactatttctcagagttctgaagggtggataagtcagataaaatatgaacagatatgatgtccaccttaaactcaaatcaaactaaaatcctaagggccaacttagtagaaattttgggaaatagcaggtctactcactccaaagaatgaaaggaaaagagggaatagataaaccgtcccttatctccacacctgaagatatttcttggtacatgtcaaaactcaggaggttagaattctaacgtgtattcaaagagaggtggaactttggagtcatctaaagaatgttgccattgggaatgtaacatttaagtgccaggaataagatttgggatcctcaacaaactctaaggccagtgcagtggcacatgcctgtaatcccaattatttgggatgctgaggcaggaggattgcttgagcccaggagttcaaggtaaaatagtgagccctcatcttcaaaaaaaaaaaaaaaaaaaaaaccccaaatacaaaaaactctcaagaactagattttttagtgattaaatctaatcctggggttgaaaatagattttttctttcttttcttctgtgcatatgcttacccaagcaaatagattttaattgagatatttagatgtcaattctaattagttgtcagtgttgcctggagtattaggacgagaagagttgagactgaacctcaactgaatccatgaaacaaatgtggcaattgatgagcaatatctgccttatctgggggaaatgtgtgaagctccccatccttgtagtttccatcccctttctaagttatacttggaagtatgttaagttgtaaagggtgctgtgagctggattggatcagaaacaaaaatttgagaaatagaatgattcacaagattttgtcaaattgtgcagaatgtatgtaaccctataggtctagaagaaactggtgtacaagggagccaagtaacgttgatttagattagaagtgtgaactttgcagaaatgtggtacaacccgggaccccatagaaaggagtccttgacaaagaagtctacaaatatcttttagcacatgaagtgtacgtcttcaaattttgtatagtgtctgtatgagaatttctgctggagattgtatagttggtctttcttattcatgttaataacatgaattaacaaattcatgttaattaatctgtactttgccaagcagtactgaaaattcttgatgaagttctcaatataaataattttctttccttttacaaatggggcctctgttacccatagggatctcccagagtccctacaacaggtgacactatcaagaggaggtatactagactgggaatgaaggaagaaaaccagtacttgttgtgtcgttgttgatcacacagcatccagacaaatccctgccaccatctcctagtagggcttgtcctattgatgggtgagctgctgcccaagtggagtggtgcacctggtgattcaggaagagttacaacttcacacgcagcttgttgtccacatccaattctgtgtcttagccaaatgacataaaaatcaacttgagaaaaatacaaagtaatgtccttctgggagtttatttgcagtagtgtctggtttgtggctaaaattctggacttgaaattaggagagctgagtagaaacagaaatggaaatgtctgtgttcctttctcattttgaccaggcactgcctcagaacttttgacagttcaactttgttgggcctcagtttcctcatatttgattgggaagagagggaggctggaggtggagacaatgaagaaagggattgactattcaatgacttctagacattttatctaaagtgttacctgcatttccccaggccatgcccaatgagctatcaagaacagcaatgagatgctaatcctacagattggatgaaatagagggagctagaaccacatgcatcctgctccccacaacttctcccaactaatgcagaaggttcccaaggtttgtcagacagcgatttgaatttctgtggtctctctggctaccttgtggtatttctggtgccctgtggctcttggcataggcactataatgatgctagtccttcacccctcatttgtctgtctgaaaactgtgctggtttgagatgtttcccacagatatctgggtgatgtggctccatgttttttaccagcactatttgtaagccatttttcccctgacagggacacagc

SEQ ID NO: 1879336 - DNA, 4001 bp, Homo sapiens; identical to SEQ ID NO: 889

SEQ ID NO: 1879337 - DNA, 4001 bp, Homo sapiens; identical to SEQ ID NO: 890

SEQ ID NO: 1879338 - DNA, 4001 bp, Homo sapiens
atacgaggtctccttagacctccaggtaagattatggcttcaaagttaaacgttttcaataaaacctaatacttaactttatatataaatgatcatacagtacatttatttaagcagtagttaagtgttcaaatgaaaaaaaaaagtttctctaaagcaaaaagttttcctgttatccatctttttgttaaattatgtggatacatacaagagagactttgtcccatttttttcctgttttttaatacctgtaacgatgaggtttcttcacccctccagtagagggcgcactcttgcgagcggcttttgtagccagttgcttcctgggtgctttaccaccggtcgatttgcgggcagtctgctttgtacgagccatggtacagagacctccttacttacctaccagcattgaaaaatcaaaaatcaccatatgcaactaccaaacatacaacttttcctgccacgatcaccccctccccaaatctggaaattatgatcagtataaaaaataatgttcgtattgttatataatttgaaagggtgaagattacgtctacccaaaatctcttcttgaaacaaactagagtactagaaaattgttagcagtatcaatcacctctcaaaatgccaattctgagcgacaaacggcaaaacaaaaatacctcgaacggcctttgatccaatttatttaattaaagcagtaattagaaatgtctgtaaacattccatccacaaacaagtcaaaagaaaaaaggcacaaaccactggaaggtcgagtcaaattacagcaaaaaaaaggtcttactcccccccactttggctgcccccccttcgtctgactgttgatggattgctgtaaatatctgaaaatattcttggttttgcatctttacagttatgttgacaaaaaggcgtctcgaaaaaacaagagaggaacaacagctaccaccagcgagcattctacaaagccccgtcctcgcgtccagtcctcacaggcttcgcagtgaaataaaaagtgccccgcacccaggctttaattaacgcacgacatccgccgaccggtccaccccaagcaccacataaacttttggttttgcctccttcgggtccctcggcacagggtcccccaacctgcccgcctcgctcccagcgcctcgagcaggaaccaactcggctccccgaccagaacaaaatggaaacaatcgcaaaacgtatccgattccgttccaaagagacaaaacaccaaatcgctcgaaaatacccctatcccctgccacgtgccgccctccaaaatgcaaaagttttttttgcatttcaaatgcatcaagtttccgcctctccaaaaaagggaaaaaaacgtccctcttttaaaaattcttgcttttttgaaatggggaagagagaaacgggggaaaaaatatggtcggtgaccagagaagagagacaagatggtgaagcttagcaacaactgtggggaggcagcaaaaagcgagttaccccagggtgcgaagcggcggcgatttccacccctttcccgctcgaaaactgggggctggggcccgggggcggtagttaagaggcccgcgcgggtcatggtgaaggtttggggtccggggaaggggcggcgggcgggatttcaccgaagaaagaggagccaggggcgcggggaggaggagggagagcaggctcggcgccgcggcggttgctgctgttgggctgaggcggcgagagacgggggagccgccgccgccagagggaacagggaaactcgctcctcacctccatttctgggccaaaaagtttgtgggctaagccggaggggctatgggtcccctcccggcaccgccagggcccggctcggggctgacggcaagcggggctcggttccggggaagcgggcagacggggaaacttaccccccttctccttcggctggagctcggcgagcgagaggcggcgctggcgttggagagcgacggcggcgcggcggcggctgcgaacacaattgaaagatggctgacaccgaggctatcccccaacacacgccgccccgcccccgcgccgcgcgccagccaatcacacacaatggagggaaggctcggccccgcccccatagctcctctcgcgccccgcccccgcccttccccccgcgcgcccgttcgctggcgcgcgctcgcccctcccccgcgcgccgcccgctccctcctccaggccgcctcgcgccgtgtgtgtacaaacacaaaagacacgctgaggggccgccggctcccgccgagactgccgcccgcacccggccagcccccgcccccggccctgcactcccatcccgctccgtgtgcgcacggcgtcgaacccccgaagcccgggtttggggcgcccggagggaagtggggggaggggaaggcgggcggaggcgcggcgggtgaacgcccggcctgcgggcgtctcgggccgcggcggggaggggagggaggggctgcccccgcgcgggccccggcgcgcgcccccgaggagacccgggcggcagtgggggaggaggacgcggtcggccgggtcgccgcgccccattggaaaacgctccccagcaggaagctggcaaataggaatccagcgtcccgcgcccgctgtcggacctggccgctgcggcagcgggaggggcggaccgacggcctccttcccgcctgcgcgctcggccaagtgcggccgggtcctgcgggaccggcccgagtccgccgtagacaacttgatccgctaagactcctgggccggccgcctgcgtgcagggcagcccctcgccggtgttggcctccgggatcaggggacggggctcgctctcctcccgggcccgggcccccgacgcaagatggctgtgtcgcgtcggcctctaaacaatgtgtggagcgcgcagctcctgcaccagggcctggtggcttgtcctgcccgcccgtgggggccgtgtgatctgttttcggtaggattgctttggaaaggaattgccgaatatagatagtcaaatgtccgcagcttctgcatagtttagaagaggctgaaaacggcagaaagaaggcaaacgtggtttgggaattagtacatatacctgttttccaattctcagtagcataggaaacggacttttcatggcccaagttatcctcacgacttgtcagttgattggctttggaacctctgaaccgtccctagatggtattgacgcttcacaactgtgtgtaaaggttttcaatggaagggtcatgcaaatatcccgtagggtagtgaaggaggaaaatttcataaatgaagggcagtaattatttgtaatctgaagatctcacaaagcggcttagtgataaacattatcccgaaacagatacatggaaatcagatacgagggaagaaatggatttgtccaaggtcacttaagtgaggaagagacctaggagaaacaaacagacaaaaatccaggcctcccgtttcattattatttcatgaatgttaagtgtccatggttgctgtgcagaacacatgcaatctctaatcctatcctaaaagcacatatgcaatcagcttggaccgagctgccagcaaagaatttcctataattcaagccaagatgagttattttgcttgttttttgttttgttttcaggaaaccgaaatatttattgttggatttatccaggaaggctgttctgcattagttaaatgcatcatatcttcaagaaatgttaaatgacatgggtaatgttttctttgtatgctggatttttcaatagcttctacttcttggctttaaaaaatatttctaaccaagggtcagaccattttaggtagagtaattatgatcttagatgatttgaactaactcagctgtctgtccatttgtgaaatgggaataataatatttatctctatgaagttaggccacaaattctttctagtaggttcaagtatttaagcacctggagaggtgactggttaccctcctagtggcttcaggaagt

SEQ ID NO: 1879339 - DNA, 4001 bp, Homo sapiens
tctactctgtccactagtgacttcaggtcttgcaggtgtacctatatctcacagtggcaatcactgggttgtagcaggagagagaggagaaaaggcagagcagttggggatggaagagcccagctatggagtgcagttttttctctctttgccttcctcctggcttctctgtctacggcaactacccagactgtgtttctgaaggccattgctttccaccgatcaactgtgcccaaggaactaatgactgagggagtcagtggagtagagaagacagactatattataagctttggcacttggcaaacataggctgaaatctcagctctactactggctcaccacggttctgtgcaaaatttatttgttaaaggagaatattaacatccatcccatagggctgccatgaggactaagcagtatggcccctttgaaatttctagaacagtgccttgtatagactagattgttaataaaggcagctccatgttcattattcctcctgttgatgacatgtgtgatttcatctgaggctctggaagtggaaagctgcttcaggatttgagtatttctgtcatagtataatttaaaccctctgtcagatttactcattagtttatccaagaaggtttattgacacacactctcagccagggtggcggaggcatatactgctccccacatgcttaacatttcgctgttgcttaaatacaggcatggctctgtgactagttcttctggccaatggcctgggagtgggaatagcaggtgtgaattctaggccaaggattgaagagctggtatgtgaccctccagctttgtttcctcctctacagcgatcctccatcctcaagaaggcaaagctgtaagagaaaggccacttggattcccaaaacgccatttggaaaagggtagccctggagatcagctgatattgtgtaaggaagaaataaatatttatgtgttatctcactaagttgttaaggtttattctttactataacatagcctgatttaacataatatatcaaagtattatgctaaacactagagatatggggggggacctttatcacatcagtttctgctctcaagaagcttacagtcgaagaagacagactttcatagctcatcatttgatagctgatacgatttagagtacaacaggagtccctttgaggggagagttacctgggaatttggcaatattcccattacctctcaaatgatataccacaagtgatgttccactcaatctattctagacaagctccaattctcatctatctttaaattaggttattactgtctatctcatagggatcttgtgagaattgaaggatcttgtaaaatgcagaatatagtagtagttaagaataaaagtttgcggattttgcttcctgctaatggacgctttattctgttccattgatctgttatctatctttataccagtacctccctgtcttcattagcgttcttggcagttctccgcaggttgatctgtagattcaacttaacacaatcagaggctcttcattagtgggactttgtaacccatttgttccaaataagcttattgctcaaaggaactacattgtttgagacacattaacttctttacttttttaggagcatagccatgtcactgttttcttttgcttgtggccgggaagcagtggtcagaatactaaatatatccctgaaggcaatagcaataccttttaggttttcagaacgctgtcaagtgaaaacattttaacccatttttcctcctatggacacccacgaatattccaccatacaattctaagactcaacttcctagacttaaccttctctgtctgtatcctttttgaaaccaaatcttcctttgcccatgccctctgagttccctaacacctgtctccctaggaccatctttgccaaggtccttgccttgcaaactcatagttggcttccacgatatcttccattcccatcctatctggcacttcatcacccttctcagttccaagcacacagaacacactcaatgacaaaccttattctaatgtcttccagtcctcagggaaagaagtgtttagacgcagccactcaaagcctggctcactgccggaggtgttaggaaacacaccacatcactacccacagttcaggctaaagaagaggctgaagtctcaaagttaatcttttaatgaaaacatccagcttagcagtaaataagcaactaggccagagcaaggttgactttgaaagaattttgctgactttgcaaatttacttcaaaattaagtgaagtttattacaaaattaaacttcaaagtgaagttgtaatttcctacctgaaatcacccattccctacctctaaattcaaacttgatgttgtcctctgctcatcacagattgttagaggtagggagtggatgatttcaggtaggaaattacaaaagtccccgggttggaggaggggctttttgtggtgatggggttggggtgggagaagagcaagcacagcctgggagcccatgggcaggacagcagtggggacccaggccaggacggtccgagctttggggattttggagggtgcatagtgtagagccctccctgcccacagaactgttctggggaagtaattatgtctagattaatatgggagtcagggagaaccagtgaaatttttgagtggaaaattattcaggaatgtagaagaaatgctaggaaaagcaaacttaaaagtacatggaaaaatagaattaatttctccagaagagttctgtaggggtcccagaaaggtcactaatttgtccaggtctgttcgtctccactcctcccccagctcttgccactgctccttagtattgccacagctcacgtgtgtgatgcgcttacgacgtgccagacacactacacgcattacttcatttgatcttcacggaaggtcaatcttttcaagattgtctctttttcagaagagaaaatgagattaacgaacatgcccaaagcctttcagcagtaaagagcagaattgggatttgaacctagcctgtagccaacacacggagcagaggaggccgaaatcctgagctgtaccgatgaccatagcagtggggtttgcctttcctttagaacctgtagttagagagcaaaatgatgaatttaccactgacttgtcataccatctccactcaaggctcattggctatttatttggagggtaatccctacctgctatctagccactagaggacagtattacctcaaaaatgctttcaaaagtagccaaaatctgggttctggaaatttcttttccatagcaattttcacaatctccataatcagcctctaggccatgtcctcggtcagctctcacaacacctggcctgctcacagtcccctgatccagaccctcccttgctgttttccagactccgactctgtctctcccttccagaaggaagcctggtgatgagcacacactggaacatggtgctcaagctccaaactgcagccactcactcactaacatccacatgttacttaaattctctgtgcctcagtttcctcataatacctcccacactgtaatgagaagtaagtgagttaatacttaaaagatgctggcagtagatagaaagaacagtagagcttctcatgagagattctcaagtttgaaataatgaccttcttggagaccttttaaatctgatgattgcactgagttaaagaacatcatctctacaaggtaacacactctaatatcagcctctaatgtttgcacctaagtgaactaatctcaaataggggatatagggccacaggcagagctatttgaggcagcatttttgcagcacctcttgaattccagagaatgggtccatggataagacagaccagctttggacccaccagcaggcttggagaatgtttcaggatgaggttatgaaaagatattggttttattcaggtggtcatagggtacccattgagcaatatg

SEQ ID NO: 1879340 - DNA, 4001 bp, Homo sapiens; identical to SEQ ID NO: 904

SEQ ID NO: 1879341 - DNA, 4001 bp, Homo sapiens; identical to SEQ ID NO: 925

SEQ ID NO: 1879342 - DNA, 4001 bp, Homo sapiens
agctccttcagggcacagaccatgccttttcttctgtgtatccttaatttcttttttttttatttctttctttctttcttttttttttttttgagacagagtctcactgtcgcccaggctggagtgcaatggtgcaatctcggctcatggtagccttcttctcctgggttccagcggttcttctgcttaagcctccagggtagctgggattacaggcatgcgccactacacttggctaatgtttgtatttttagtagagacggggtttcaccatgttggccaggctggtctcgaactcctgacctcaggtgattcacctgcctcagcctcccgaagtgctgggattacaggcatgagccaccacacccagccccttaatttcttatatagtgcctagcacacagaagatgctctataaatagttactgaatggacaaatgactaaactttgaaacttctttgaccttactatgctcaaatatcacttctgatgttcttctccgactctctcacttatcttatatatgtctgcacacgttttttcctcattagactgtaaggtccctgagggaaaagaccatgctttattcacctgtctcattcatacctgacccagtgtctagaagagtgtatagcacagagcaggcacacaagcagtttgctggatgaatgagtgaatgatactaaagaggagaaaatacagactttaagaagctctccgtatagtgagaaagactgaggacctaagagcaatgaaaatagaagttaacaagtataaataaagaaggtacaggttaatttaagtaatcagatgatgatgcagaattcaaataaaataggagtcaatcagcaaaggttcccgaaagggtgaattctgagagatatttgaaaagaggaaagggacataacttgagagagcaggagtttaggaacatgtcagagagttaggttgaaccaaggcatgataaacatgtttgaagcttacattctgagcaggatctgttctacccagaccacaggtttctgcctttttttctggctcatcaagcaggcatgtttacccactctttttatcttcatgtttcccaggtcagcccaatgtgaggactttaagtagtagaaggaagtttctgtgaaaatatgcaaacaaaactgccttgtgggatcgaacatttttggtaaccctagttctctagggaaataaacttccctgttccagataaaatggaactgctccccgtgttgttaagccagagagaaagccaaatgacttcccttaaaaggtacttcagcgcattttacacaaatcatagttttctgtgtgtgttatggggatccaaggaaatcaaagatgttaatgagtgagatttgagaaacaaaacttgatagtagaattttgtcttagccacaactgcccttctcctcacagagtatatgcaaataccgatggtgacggacagtcactttctagagctcagatcactgctgcctccagcacttgtgggatggaaaaaatgaagaaattacagttgccctaaaaatgtcccccacttcaggaacctgaatattttacacagcaggagatacatcggaagtcctacagaatctcttgactttgggagatgcaactgcttttctattaggataacctaattttctgtgtccattttctcagaatgttgtgcccaacgcgttctgtttcctaaatacccagccttccttctggtagaggcaagaaaattatgctagcattcgctcactgcatgttttgagcgtttgagttcagagtacagctattctctctcctcgtaatgtaaacacaggttcccacggcggcaatgggagactcccctaaggggctcttgacgtacagggagacttccagatatggtacacagatgtcacattgctagaacgtctctagacggcaacgaaacattaaagcctaacctgaggtaatccctcaccggcagtgaagctcctctgctaggcactgtcgtcccgtacactgcccaagctctgggggtgtcacactaaactgtggtgatgtcacactagctgggatgacattttacagttggatcccgtaccaccgccaggcacctttaaatcaccgcagagtctgcagtgcggagggggcgggaagtccaggccccgcactcgatccacgctggctccctacggaggcccacctactcgaggcccaccgactcctactgcaatcagtactatgcgatcgtcctagagagtccattcagctgcacttccgcctcagtaggtgtcatggcgcggggcgggtgaatagttccggcgaggcggggccggccgggttgagggacggccgctcggcattccgttcgtcgggtctggcgacaacggcggctgcggagcaaggggcccggcggtagccccggacggcagcaggaggccgaggcgggagcgcgcggggctgaggcggcggcggcggcggcgggaaggggctgggtggtggagcgggagggaggctgaggaggctccccctgcgggacgggcgcggggacggctccggggggcgggggccggggcccgggccggctcgcgcggggggtatgatgacccggctgcggggccccagatctcgtctcctccgccgcctcctcacggcagccccagctcgcggctgagaaccagacacaccggcggtgagtggggacgggcaggaggggtcctcggcggggagcgacttcccctcagctccctgaggcggggccgggccggccgccggctctcctggagcgcccagcctgccgggggcgccttcctcaaagggcccctgcctgggaccgggcgccgcgtcttgcggcccggccgctcactgccgctgaggggattgccttcccaggaaggtggggaggctccgggctggttttcggggcaactccccctgcctcctgccacttctcgcctgggcgtgttgtccttaagtgacaggggaccgccttgcgtctcctcactcggccggttttttccccggctgtcgtggcaggttcccagtgtgtggcttgtgcgtgtgtacttcacagctccgcttatcaccatggttttgggttatttgtgctgtttgggaccaggaagccgtgcctggagaggacgacagtggggtgggtgtggaagcttttctgtcgtctccgctgatgttctgtagtcgttaggcttgtaattcgtaatgacggtggagactacgtgagaccagcccacctaatgtatatctgtacaagggagatctagaggtctggcccaaagggaaacttttgctgccaccactttcaaagctttcgttaaaaaaacaaaagggagggggaaggtggagaaacaaccaaaattctggtaaggcccacactgttcacaggtctgtggggaagagtcccctttttgtgcttagcaaccaagacgtggagttccgtctccaggagcgttggtctaacctccagtttgttgtggtgacgagctgtgagcaatggcctgtgtttatgctgggcgagctttctttcctacttggggaggggggttcaggatgggaggatgcgggtagggaagagggggggaaaacccccaagctccagtaagtcttttctttacttaatcactgattctgttgtaggtagactcatttagaggcagtcctagatgctctttcttgtctattagtgacactttgggaattctcagtaattgcatcaacataatactttcagctatagactctctgtcccaatctgtcctttatcttgtttcttagtaactggtgaaaacagcagtgtggcttcccgctcttgatgaaatagggttaaattaagtggctgatgccctcagcaaacctacaattttccttttgtttgtgtaaagctatttttgatctctggtctgtgggttttttttttttttttgtaagattatagagaatgcaaactattactagcttttttcatatggaagcctaaagctttctataaaacatttta

SEQ ID NO: 1879343 - DNA, 4001 bp, Homo sapiens
tcaccatgttggccaggctggtctcgaactcctgacctcaggtgattcacctgcctcagcctcccgaagtgctgggattacaggcatgagccaccacacccagccccttaatttcttatatagtgcctagcacacagaagatgctctataaatagttactgaatggacaaatgactaaactttgaaacttctttgaccttactatgctcaaatatcacttctgatgttcttctccgactctctcacttatcttatatatgtctgcacacgttttttcctcattagactgtaaggtccctgagggaaaagaccatgctttattcacctgtctcattcatacctgacccagtgtctagaagagtgtatagcacagagcaggcacacaagcagtttgctggatgaatgagtgaatgatactaaagaggagaaaatacagactttaagaagctctccgtatagtgagaaagactgaggacctaagagcaatgaaaatagaagttaacaagtataaataaagaaggtacaggttaatttaagtaatcagatgatgatgcagaattcaaataaaataggagtcaatcagcaaaggttcccgaaagggtgaattctgagagatatttgaaaagaggaaagggacataacttgagagagcaggagtttaggaacatgtcagagagttaggttgaaccaaggcatgataaacatgtttgaagcttacattctgagcaggatctgttctacccagaccacaggtttctgcctttttttctggctcatcaagcaggcatgtttacccactctttttatcttcatgtttcccaggtcagcccaatgtgaggactttaagtagtagaaggaagtttctgtgaaaatatgcaaacaaaactgccttgtgggatcgaacatttttggtaaccctagttctctagggaaataaacttccctgttccagataaaatggaactgctccccgtgttgttaagccagagagaaagccaaatgacttcccttaaaaggtacttcagcgcattttacacaaatcatagttttctgtgtgtgttatggggatccaaggaaatcaaagatgttaatgagtgagatttgagaaacaaaacttgatagtagaattttgtcttagccacaactgcccttctcctcacagagtatatgcaaataccgatggtgacggacagtcactttctagagctcagatcactgctgcctccagcacttgtgggatggaaaaaatgaagaaattacagttgccctaaaaatgtcccccacttcaggaacctgaatattttacacagcaggagatacatcggaagtcctacagaatctcttgactttgggagatgcaactgcttttctattaggataacctaattttctgtgtccattttctcagaatgttgtgcccaacgcgttctgtttcctaaatacccagccttccttctggtagaggcaagaaaattatgctagcattcgctcactgcatgttttgagcgtttgagttcagagtacagctattctctctcctcgtaatgtaaacacaggttcccacggcggcaatgggagactcccctaaggggctcttgacgtacagggagacttccagatatggtacacagatgtcacattgctagaacgtctctagacggcaacgaaacattaaagcctaacctgaggtaatccctcaccggcagtgaagctcctctgctaggcactgtcgtcccgtacactgcccaagctctgggggtgtcacactaaactgtggtgatgtcacactagctgggatgacattttacagttggatcccgtaccaccgccaggcacctttaaatcaccgcagagtctgcagtgcggagggggcgggaagtccaggccccgcactcgatccacgctggctccctacggaggcccacctactcgaggcccaccgactcctactgcaatcagtactatgcgatcgtcctagagagtccattcagctgcacttccgcctcagtaggtgtcatggcgcggggcgggtgaatagttccggcgaggcggggccggccgggttgagggacggccgctcggcattccgttcgtcgggtctggcgacaacggcggctgcggagcaaggggcccggcggtagccccggacggcagcaggaggccgaggcgggagcgcgcggggctgaggcggcggcggcggcggcgggaaggggctgggtggtggagcgggagggaggctgaggaggctccccctgcgggacgggcgcggggacggctccggggggcgggggccggggcccgggccggctcgcgcggggggtatgatgacccggctgcggggccccagatctcgtctcctccgccgcctcctcacggcagccccagctcgcggctgagaaccagacacaccggcggtgagtggggacgggcaggaggggtcctcggcggggagcgacttcccctcagctccctgaggcggggccgggccggccgccggctctcctggagcgcccagcctgccgggggcgccttcctcaaagggcccctgcctgggaccgggcgccgcgtcttgcggcccggccgctcactgccgctgaggggattgccttcccaggaaggtggggaggctccgggctggttttcggggcaactccccctgcctcctgccacttctcgcctgggcgtgttgtccttaagtgacaggggaccgccttgcgtctcctcactcggccggttttttccccggctgtcgtggcaggttcccagtgtgtggcttgtgcgtgtgtacttcacagctccgcttatcaccatggttttgggttatttgtgctgtttgggaccaggaagccgtgcctggagaggacgacagtggggtgggtgtggaagcttttctgtcgtctccgctgatgttctgtagtcgttaggcttgtaattcgtaatgacggtggagactacgtgagaccagcccacctaatgtatatctgtacaagggagatctagaggtctggcccaaagggaaacttttgctgccaccactttcaaagctttcgttaaaaaaacaaaagggagggggaaggtggagaaacaaccaaaattctggtaaggcccacactgttcacaggtctgtggggaagagtcccctttttgtgcttagcaaccaagacgtggagttccgtctccaggagcgttggtctaacctccagtttgttgtggtgacgagctgtgagcaatggcctgtgtttatgctgggcgagctttctttcctacttggggaggggggttcaggatgggaggatgcgggtagggaagagggggggaaaacccccaagctccagtaagtcttttctttacttaatcactgattctgttgtaggtagactcatttagaggcagtcctagatgctctttcttgtctattagtgacactttgggaattctcagtaattgcatcaacataatactttcagctatagactctctgtcccaatctgtcctttatcttgtttcttagtaactggtgaaaacagcagtgtggcttcccgctcttgatgaaatagggttaaattaagtggctgatgccctcagcaaacctacaattttccttttgtttgtgtaaagctatttttgatctctggtctgtgggttttttttttttttttgtaagattatagagaatgcaaactattactagcttttttcatatggaagcctaaagctttctataaaacattttaaaatctaacaaatcatttgacctaattttcattattcagctggtgattttggatctttacatgtaattatctcagggttctgtgttataatactgttatgatgaagggtggcattgactttaagatactgttcctggcttgaaagatattttagtaaagtacttgcggttggaactggaggcagccaagccagtaaagtatcttagaataaaatggtgaatgagatcttataaatatactggctctggttggcaagtagaacttttg

SEQ ID NO: 1879344 - DNA, 4001 bp, Homo sapiens
aacttagaggtcttcagaaattcaccccacatattaactgtggccttctctacaccacaaattcccctccactcatcctcaaattgtttcctttctcagaacatctgtgacacaaagactgtgacacacccacaggtcgattaacatgaggacccaacacctattaaaacatccacactcctgagaacactaaaaaccaaccacttcgtcaggtcccacctccagtctcgctgaatcaggaaacctcaagagaagcacctggaagcaggtttaacaagcgcaaggccgggcgcggtggctcacgcctgtaatcccagcactttgggaggccgaggcgggcggatcacgaggtcaggagatcgagaccatcccggctaaaacggtgaaaccccgtctctactaaaaatacaaaaaattagccgggcgtagtggcggacgcctgtagtcccagctacttgggaggctgaggcaggagaatggcgtgaacccgggaggcggagcttgcagtgagccgagatcccgccactgcactccggcctgggcgacagagcgagactccgtctcaaaaaaaaaaaaaaaaaaaaaaaaaaaaaaaacaagcgcaaaggtgactcttataattgggaaagtttggaaccaagacagggttcttgtcctggaggaagtattttcctgtggagaaggacctgtaaacagcctatgaagtgctcagctttcaccaagaaaaacatgggctgatagggttaaggaaaagtttgactgaagaggattaaatcctgaaggttagggatgtctttgggcgctggggtctctcaatcaccaaagatagacattacaggccaggtagctctttgtccccccagaggactgtcctgtgccttatgcttagcactcctggcctctgcccattggatacttctagcacctcccccccaacacacacacacctgacaacccaaaacatctacagatattgccaaatactccacagggggtggggtggtggcaatatatctccctgtttgaagtcactggaatggaagttaggggaggatggctaagtcaggacttgcaaaaaggctaagggacgaaagcacatggctatattagacaaagtttgtgacagacgcctgtaggtatatggtaaggaaaacagattaaaacactaagaaatagtaagaggttggaccgagggtttctcatctgtatgggaaatctcatctcgttcattactttcagaaacaaaaaggaaaacgactttaaagatacaggttaaaggctgaaggggtgtagaaccaccccccgcctccttccctccatccttcccaaatatcccagaatgagtcaaacctttctaatctcgtagcacagataacaagcaactcagtaagactagacggggatgactgagggccaactcattacaggactacaggaaactccttagtcctaaacccgaatgcatccgtgaccatggtaacactccctacctgaccaaaagctatcaaacgctctgacaagtgtttacagctgctttctcaattactgaagtggctctgaaaagagcctttggggttaggtggttgatctattgcgtcccttgcacactcttacttcgagctggtgtacttggtgaccgccttggtgccctcggacacggcgtgcttggccagcttgccgggcagcagcaggcgcacggccgtctggatctcacgggatgtgatggtggagcgcttgttgtagtgcgccaggcgggacgcctctcccgcgatgcgctcgaagatgtcgttgacgaaggagttcatgatgcccatggccttggacgagatgccggtgtcggggtggacctgcttcagcacctcctacacgtaaacggagtagctctccttgcggctgcgcttgcgcttctcgccgtccttcttctgcactcttttaacagcctttttggagcccttcttgggagcaggagcggatttcgctggatccggcatttttgcgcgaaaaaagagaacagacacttaaagaagtaatccgaactaccgcaaaacgggctggttatgcgctacttatagagcctgtatgcaaatgaagactcgcaaagtgctgcgctttaattggttaacttacaacggtgtcgtcagagggggtggagtctatgtaaataatagattctagtcttgcttccttaatggtcactgtaacaaaagtcttgttatccaatcagaatgttccatttcacactaaccagttttaagctaggtgaagcgatagtttcaacggcttgaggtttttttcttggttttcactttccattagacttgcatacggaagaaatcttaacgccagctagacaagttaactctcttgcctcgtttttgcatttttattctatactttgtggaaatttttttctcttccttgaaatactacctcacccacacatttttaaaaatcgccagatatttactcccgcccgcttaaattactattctggcttggacaccgcctgtagtatgcaatgaggaagatgctgagctttaattaagcttatagttcctaaataaaccaggaaacgggtttataatttttaagggactcgccccacccttacactcaggatcttccacatctagaaactccccatagtctcttgcccccatgcaaaactttacccacagaattgggagccggacatctagccttaaaccagcgtgaaaaggctcggccggaaccacaaggaccatgcctctgcggctttctctactgccggccaactcacggctgggctttgggttctgtaacgtcacccaccacgagtgcccctggcccctgactgctgcgcaaggcagacgcacatcagatggagagccggtacagctgctcttgatgaaaacggcagtggctctgaaaagagcctttagatcgaccacttaaaaatataccttaggccctctccccgcggatgcggctgaccaactggatgtccttgggcatgatggtcacgcgcttggcatggatggcgcacaggttcgtgtcttcgaacagccccaccaggtaggcctcgctggcctcctgcagcgccagcgccgtcacggccgagctctggaagcgcaggtccgtcttaaagtcctgcgcgatctcgcgtaccagccgctggaagggcagcttgcggatcagcagctccgtagacttctggtagcgccagatctcccgcagagccacggtgccggccggtagcggtgcggcttcttcaccccgcccgtggccggcgcgctcttgcgggccgctttggtagccagctgcttcctcggggccttgccgccggtcgacttgcgggcagtctgcttagtacgggccatgctgtctcattgatacgagagggtctaggcagtcatatttatagacatagcctcctcttgattgggcctgaaaaggaaattttcaaacttgtgatctcattggttaaaattcaatcctctttactggggcggaagattgttctgctaatctttcttcccttattatttccccctttcctgatttttttctgtaattttatcgatcacggattgcttttgaagactttcctttaaattagtctaacttttgtaaaagcaatgtataaagtgttttgcatcccattttaacagagattttttttttccccgaattcaagcatgcccttctatgagctatcagcctgtttcaggttacctgttactgtagctcttctaccatagctaacatttatttcatgtctggcattttgctcagcaagttagatgcattgtataccatgaatgaccgaagcttagcaaaaaaaatatgtaattgaaggaatgaaaaaattgatcttatttacttgaccttggaacccagccaaagccatttcatgtgggtagtgtgctgacctatattgacctgatattagagcctctgccttcctttagtcttttctccctgcgatgtggttccttcttcctcaccctcacatcaatggc

SEQ ID NO: 1879345 - DNA, 4001 bp, Homo sapiens
tagtcaataacatacattataggactatgaactactaagttacacctcatgacaaacacatgagtaataaagtctagaaaaatacttaaaggtgatgtccatcattctcattgctgtgttcacagttcacaggtagaccctaaagacaggcttgtgttgtctttactgaaccctagatgcatctctcaaactgtcaactgcacatatccacttgaatagcaaagagcttctcaaatttcagtcggaactctggatctcccttcagtgtcccaacgaatatcttctctcagtgttctatcctaatagtaccactatctacacagttgctcaagccaaaaatctaggggtttcactgttagctaaatcctgttcctcagccacacctattaattctacctcaaagataaaatccaacatttgtttccattaccaccattgcactccagcatgtcatttatccgttgtttttcacactttagcatatatcaccatcacccagaaagcttaacacaaataatggaacctgggaattttcatttttagtaacttcaagtaatgctgatgctgctggtctggagagactttaagtcttaatcactgttccagcccacaacactgcaacagcctcctaattgctttcctcgcttctattgtggccagcctaggatttacgatccccagagcaatcagtataatattttgaggttaatgaggctgtgtgattccaagtccagtgttcccaaagcagaaaacaaacctaatcaacctcccttgcaaattggtggtccttctcctcttcagggatcccaaactctggcttcagaaatcgtatattttgttgctattgtatggaacaaacccttaaactggacaagcttttccgagtgataactcttggggaaaaaaaccatttaatggtattgggtagattttagggtatctcaactagaaagcgcagaaggttatcggtgttaactcctggttatcaaaatcgaacttccatctacctccttaaggaattttcacatgagtggtggtgtaggcacgtgtttgtgaaccaatgatataaaaacctcaggtttctcgataccatatataaaagttgagctattcccttttaagtacacatctgagagcatacaatgcatttaatctctaccttcattttaccactgaagagcggacccaacctttgttcatatacacaatttgatcttacataaacttatcaaaattaacactgcgtttctcaacaggaaacaatctcctgggcacatattcacgggtacgtaaccaggccaaagacagttcaagagcagccctctaaggcaagccccaacctatctatgccatagtaagataccactatcaatctatgtaagcttacttatagcaatgcctatgtgaaaagaaaatagttatctgtgcttggtgttgtgtgctctcctaaagttaaccagacgtgaagccaaaaacatcaactgggactgacaacacaagaaagattctttaactgaggtggttaaatggccctgaaaagagcctttggagacaaagcagccggcgacccgcggagggagggagggagggagcgagcgagcgccaggtcccggcagggactcacttggagctggcgtacttggtgaccgccttggtgccctcggacacggcgtgcttggccagctcgccgggcagcagcaggcgcacggccgtctggatctccgggacgtgatggtggagcgcttgttgtagtgcgccaggcgggacgcctctcccgcgatgcgctcgaagatgtcgttgaggaaggagttcatgatgcccatggccttgcaccagatgccggtgtcggggtggacccgcttcagcaccttgtacacgtagatggagtagctctccttgcggctgcgcttgcgcttcttgccgtctttcttctgggctttggtgacggctttcttggagcccttcttgggagccggcgcgaactttgcaggctcaggcatggccagacccaagaccgacaccgacccccgagaacgcaagcagagcggtaggctcggggtctaccggaaacgactgtgtacttacagaggctgtgcgcatgacgctgcgttatggttcgcgagttttccgcggcgcgcaatgcgagggagacgagattatgtaaatgagtggattctggctgagctatcctattggctatcgggacaaaatttgcttgagccaatcaaagtgctccgtggacaatcgccgttctgtctataaaaaggtgaagcagcggcgttttcggcgactttcccgatcgccaggcaggagtttctctcggtgactactatcgctgtcatgtctggtcgtggcaagcaaggaggcaaggcccgcgccaaggccaagtcgcgctcgtcccgcgctggccttcagttcccggtagggcgagtgcatcgcttgctgcgcaaaggcaactacgcggagcgagtgggggccggcgcgcccgtctacatggctgcggtcctcgagtatctgaccgccgagatcctggagctggcgggcaacgcggctcgggacaacaagaagacgcgcatcatccctcgtcacctccagctggccatccgcaacgacgaggaactgaacaagctgctgggcaaagtcaccatcgcccagggcggcgtcttgcctaacatccaggccgtactgctccctaagaagacggagagtcaccacaaggcaaagggcaagtgaggctgacgtccggcccaagtgggcccagcccggcccgcgtctcgaaggggcacctgtgaactcaaaaggctcttttcagagccacccacgttttcaaataaaagagttgttaatgctggccactctcagtccagcgttcctcagtagtgaatagcgaacctggagctgacgggacgggacgggacgggacgggacgggacggggcggggcggggcggggtgtgtgtgtgtgcgcgccgtcttccatctggagcacgtaactgccttggctcttcgatgagtgggtccccagtcctaggacttcccagggcaggtgcaggcaccaaacgtcctgggcgccgccacggtccgctccacacagtcacaaacaccagcgccgcgggcagtacccaacgcgctgaagtgttgcgcgcggagcgcgcgcttccctagtggtttccgcaggctatggccggacacttagacctagtctggcaccagcgggacgtgctcctcgtccccacccccgatggggagggccctgagcgggtagtgctcgctagtgtggcggagctgggtcttggcttcactgagctgacttaagtcttagtttctgttttgttttccaaagcgccctggcggcggagagtaagggcctcggaggcggaatcttgcgtcctgggggcgggcacctctcccacccaaaaggcacccgacaggcgaaaaacgatccgccaagtagcaactgggggcggggggcaaatggaagaatgaggttccacgcgggagctgtagggcgcagcaagaaagggggggtattgcgggcagtgtgttctaaggaagcgaagggcggaaagggaacaatctgacaaagctgcaatggaaaatgactttcaccctgaaggaaaggggaaaaacaagcttgcgaaacttcgccaactggtaagtagaaagtgaggcggggtgggcgggattagggaggaatctgcccaagccaaccggtgactttaggacgggtgacgtcacagccaatggacagccagcgcgggattttcaattattgttccgcccaatcgggaaaagactgtgcttataaagacggctgcggcggggctaggagctcgtttttctccccgccgctgcgctggtaagcctgtgttttggttcgctatggcccgtactaagcagactgctcgcaagtcgaccggcggcaaggccccgaggaagcagctggccaccaaggcggcccgcaagagcgcgccggccacgggcggggtgaagaagccgcac

SEQ ID NO: 1879346 - DNA, 4001 bp, Homo sapiens
tcaggattcattttctgcctggaattgggaaactggaggccctgcaggggtccttctcctgggtccaactgtctccagggtgcaagaggggtgaaattaccaaatgaaagttcagataagcaattactggctgaaagagacacaggagggtcttcagatcaacactgacccagagctaataccacactgtcctcagagggacacacgatcactgacctgtattcttcacatttaagttgctagaattattcctccttgcccccactctctccctgcccccagcatacacataattacataaagacgtcttaaacaactgtagcacccaacttcttcagtctgggggagagccaggagatggtggggagctgtttgggcacacgtctgatcattacataatcacacaaacatgggctggagaacactgccatgcagatcagttcagcaaacacctcattctccctctttcctcttccctccccccgtaacacccaaaatgcacaccagagttaacaaaaccgaagcactccaggtagccagtgggcacctggctgctgtggttacaatgccaagggctaccagaaacgtcagcgtataccagaaagagggccagggtgctgctcacccagcgaccagatctgcagaccctcttcctgcaaccactgcccccgaagttcaaggaagggcctagccacagaaatattcctgacctgcaacagaaaccaaaccagctacgttaaaggaaaccaatgccgagcctccaagttcctctgcaccactgccacactcaggagtcctcagcagcctggacaatatcattagggaccattcggcaccatcagtgtttccatttaaaagatagtaaaatgtggggcataacttggaggggacactctctctgctagcagggaggcaagaatcccctatagaataggagtttggtttgggtttggttgggtcaggttgggggttgggaaatgattttgctttaggaatattttcagggggctaggattaagggggaaaaagaaagctatcccctctgtctcagcagccagcatcatacgaatctcactctcaaccaagcaggctactgcagtccgcctaaacaatccggagcagcagccaaggcagcacaagaaaacgccggtgccacggaacgcgatgcctaagccccccagccgaggctcctatggagccggccgccagtgcgcgggtgcagagcccagcagagcctgctgcaagcagcgctggagcgcacggcgcgcatagggttacagccccgccgccgccgccgccgccgccgcctgtgattgacgcgcgggggtcacttgaggctcgcgccgctccccagcaccaggccgagcagcgcgctcagcccaccgggggcactggccgccacgcgcagcccacccggccggcccctgcgtctcggcagccggacaccttgcctaagaaaggcatacacaaaatggaatcgcagctcgctattctgcttcgcggtgcggcctcaggcaaaaacacaatcacaaggtaaaatacagcgcaaggaatccatccgccgaataaaaacccagagtcccctaccttcggccttgggatggcaaactggtcctgtgttctctgacccacggatccagccccttcttcatgaattattccggccaggcaggattttgtgcatttttttcatgaacacctgtttcaagtaaggggtaaagaccttattgaaagaattgtccttaaaaaataacctgtgcatacgtatgtccatccaggcatgcatgcgtgtttgtatacacacatatgcacacggaatagccatgtacattgaagcaccaaactaggcagctggataatgggagagtcggctggttgtgagcatgctcgcgccgggaacagatccaccctctgttattcctctgaataaatataaatcacgatcagaaacccaaacagaagcatccctcttgaattcgtgctgctgaaaaacacggaataaattcagcctgcagacacagaatctaatcagcagctgttttctgaatccagagccaacccatgcctcgcttgtcttttccactaggagtccagaccttttttgaaagggggtttaaccttttaaagacacagtacaccaattatcacttcggaatagctgtcactcccagcgcaggaagccagtcccatgcctaaaggcacagtaggcttgcacacagtgataaggatttcatttattggtgctttttaaaaaacaacatatatgtataatatatgtgcatatatatgcacatatatatgcacacatattatatatatatacgtggagagaaaaaatgcaaatgcaagtcataaatatttattgcactgatgagcttctcagtactaattggcacgttatgtaaacactatgatccttcacttctgaacacccatgttcacgggtcagacgagacagggcactcttgtcagcaagcgtgtcacacctcaccagcctctggctgcagatcaggggccggggagcctcaacagtgcctgaagggagtggggtctctgcacctgagagctcaacacgggcactccttgccctgccctgccttgctctgcagtctcagggtccatgtccacaaatcaaagaatagttctggcactatttctaaagtcgaacataatccagagccacatcgcattccaagacatactttctttcaaccagaatcaggaatcagaactaccacctgaaccttagttagagtctttacgattcagacttaggcccttcttcaagattttgttattgagttctgttgttttgtttttcacttttcttttaagggtcagcatggaggtatggaggtagaaaaacagggtagggggagagacaacctccagcctaaatttttttgaaaaaaattattcttcgagtacttcagccacccagatggtgtttactgcagttttgttctggcttttaaagaggtagcgctgagaagaaacaagagtcctaaccttgctcacgtgtgttaagaaggcaaatgtctttgacagtttctttttcaccccagccccagagctccagcatggcgctgtctgctcctccgctggttcccgcctaagagcagcggcagtggctcacctcgggagctacaggggcgctcctacagccgctccagcatcacagcccattccctcccttgcctagtcctgccaggcaaaccgtgaaaacaagtgcactgtcaccctcccacctcatcacaggcgctcctgtgtggacccctcccagcgacacacacacactctcttccttcccctcttccagggccctttggcagaaaattatcatatttcatgtgtcatcgcccaagcaagctgggtccatcactgattggctgggccctggcagccggaaatgtcaccagccacacagcgtggagctggctctcccgcggccaccacagacctgagcccaggaggctctgtgacaaggcacagacctaccacagagagcctgtcactctctccctggtccagcccctgccccctgcttctccatctacccagccccccggggaataggggctgcgaggggatggtgaaggagtctcagtgacattcctattttcccagcatgtttgagaagaaactaaagatgtctccaatcaggtttataaatttggagaacttgtttttgacaaaaacattctgtcttcacactaaaaaaaaatcagtaagactgggtgaaaacaagatggtttttttttttttgttttgttttttaccccaggagagtttactagatgctgctgtttatttcccatctaacatctcaggcaccaaggtataatcatgtcacagggctgtccgataattcagaaggtgattcgagtccatcctcttacctttaaagagaacagctccagaaaatgaggctttgtaacttggctttgcaatgtatcatgatgccacacaactttttaagggttaaatgatctttgtagtga

SEQ ID NO: 1879347 - DNA, 4001 bp, Homo sapiens
tttcatcatcccttccttataggactgttgtaaaattagtagcttaatatctgtaaacccctcaaaacagtatatatgttaataaaacatgctatcctacctctaatgtaacacccaaaatacaataaatatcttccttattaaaacataggctggcaaatcaaaaccaaatcttgttagctctgaattttgtctaaaaataaattagcatgggtgaaaactcacacaatattagtccaaaacagatttaagtgacacaagaactgtaatcattactacaggaaggaatgacctcataaagacctcatacatcagaagcattgtaacatttactgcaccaaataataaatttttaaaaaaatcttaacagcctctatcagtaattatctaagtaaagtgggctgcaaatctgttagagaactgtttttgccatgataatatttctagtaaattgctgcttctataccaaaactactggtgttgcagaaccggcaggctaatagaaagattattatagaaacactattaaaatgaatcaggtattattaaagattcaacactacaacggcgcctgattacaagagatttcaagctgtattgcttaacgagcagataaaagtgctaattaagtccactcttagaggttatccctaggcaggactgtacacttatgtagcaagaggtcttcagactaaatgaggaaccagtaatgccaacccggctggatacagccctactgggaagatagggagagaatgagaagagccaagattttctgcgcacgaaggtaacctggtaaagcagacaagtatccaaacttatttaaacctcagtgtttttcttaactgaggaacactcagttaatcagcaacacttctgattcctcctttcttgaatgaagaaaaccaaataacccaccataaactgaagaccctcaataaacggcacaatcagcgggaggcagagaaagccgtgccattattaccaaagcctcctcgagcaaccagaagacatggaatcgctctctcaccttggccaaaagcatctctccatgcaaccagagcctagagctctcagaggtttttaaagagttgccagactgaaggcatttcgttccaggatctatttagctttcccaccttgttaattaactaattagggatgggaaagcaactcaccaatacaaagtgtcaggaaaatgctaagtaaatttgtccaactggtctaaatgtcaatgctaacttaagaaagggggcaagcgcgagagactgagccgtccccagactgctgcaatccagagctcgctaacgtagagacggagagacccgggcgccctgcagcagcagcctcccggcccagagccgggatgccggcaggacttctggaagggaaacctggaccagggccaccccgggcacagggaacgcggctggcaaggcgcatcctcgccgctcagtctccgtctccccgcatctctcagacgtcaacaaacccctgaccacaaagtgaaactttcccggcccccgctgtcgcgccaggtctctgccctctgcctgggagcgcgttgcggggacaggtgtggggcccgggctgaggaggggcccccgccccaggaccggaggttgtgtaatcggcccgggaaggggggctcgggacagctccctgcgccggagctgcggaggccagacgggggaccccagctgagggggccggcgcccggaggcgttggggggatggggagggctctcgtcccgccccccgggaccgcccccgggcgcagtcgggagctgcggcgctgacacggcccggagagggcgcccgcgcgtcagaccgagcccgaggaggggggcgcgatggctcggcagccgcggccagccttacctgcgcgccgggccggggcggcgggaggcggcttgggatgccggggtggcgggcggcgggcggcagcgctggcagccacccgggccacggcatgcgaggagccgtggcgcggcggcgggcgcgggactgacagccccaggccccgcctccagaccccgggccccgcccccttcctggccgcgcggcttgccccgcctcctccgcccaccgccggggtcaaactgggtccatcggcccggagggcggggatgctcgctttcgattggcctcaaaggtgcccgccccgcctactccccgccccttccttggcagggaagaggcgcgtgcgccgtggctggggagggtagcggttacgctgagcgccggcgttgctggtccccgacccctggtacccgggcatcgttttttcatcccgggcagctgggaccccgggatgacctaaggaacaaggattcagacgcagactccacggtgaattggccttattcacgtgtgaacgaacgtccaggagaaaaccaaacccgaatgggccaggctctaaccagaggagaccccaaaactgtgatctgcatcagaaaacgaaccagccagccggttcccggctctgccaggtctaggggtgctttattcaagccctgggttcgctccctggtcagcaagtatgaggtatttgcagagggtctagaagatgtgaagggagattagcccgcatttaggactgtgccaaacagagagtgagtgatgctgaagaaagtggcctcctctgctccagccctccctcctcctccccaacccctggctctaccacctctccctcagcaccggcgccctaccctcagcctgtaaacagtatcaggtctcgcccaacaaaaatcaatggagacccagcaattccactcaagagaactagaaacatgtctgtactaaaacttgtacacaaatgttcatagcggtgtattcagaaggccaaaaaaggaaacaactgaatgtccactgattgacaaatggatgagcaaattatggtctatccatacaatggaatagtattctgccataaaaaataataaggccgggcatggtggctcacgcctgtaatcccagcactttgggaggccgaggcgggcggatcacgaagtcaggagatcgagaccatactggctaacacagtgaaaccccgtctctactaaaaaaaaatacaaaaaattagccgggcgtgttggcgagtgcctgtagtcccagctaagtgggaggctgaggcaggagaatggcgtgaacccgggagtcagagcttgcagtgagccgagatcgcaccactacactccagcctgggcaacagagcaagactccgtctcaaaaaaaaaaaaaaaagaaagaaagaaattctgttacatgctacaacatggatgaaccttgaaaacactatagtgctcaatgaaagaaaccagtcacaaaaacccacatagtgtatgattctatttatatgaaatgtccaaaacaggcaaatccatagagacagtagactaatggttgccagggactgggaggaggggggactgaggagtgactgcttaatgagtacaaagcctctttggggggtgattaaaatgttaaggaattagacggtggtgatgactgtacaactttgtgaatataataaaaaaccacataactgtataaaagggtgaattttatggtatgtgaatgatattttaatttaaaccaaaaatccaaatgaccaaaaaatttaaaaaattaaaaaaaaaaaacctctcttgactctgtatgccctccaagttaccatgcagttaaccagcccttctcatccaagattcttgcaagggtagcccacacgtttttactcccacttatacattagctccctagaatgtggcttctacctgcaccagagctcaaatctgctctctccttgaaattttatcctgtggctttctatgaccctgcacattcctggttctcctcctccttccgttctttgtcatttgatcttattttcttggcaaatctattttaatctcttcaaagatcaaaacttattttgatctcttctgtggcttcttccagaatccttcctaggttatgtcgtccatgcctatgagttc

SEQ ID NO: 1879348 - DNA, 4001 bp, Homo sapiens
gaagggaaataaaaatgtcacagaatccctgttaggagatgcttattagggcaatcgaaaacaaaagttttcgtggtttcattattcgtattattttattttcttcctgaaaatgtgcaagaacagctcatctgggtggcctgtggtttgtttgggagaggggtggggaaattcattctgactataatttaaagagaagaaattcttaaaatagatatgtcgatgttgcacaaaacctccaccaccactaccctgcgttctaaagacccaaggcacgaatggaagacgttgaccaccacgcagctcctcctgcaaccaggcccaaggggttcctggggaagctgtcacagaattgaaagcagtattgaaccccacggaaatctgctcttgtgggcacttgcaaaacaacgaaccccacgtgatccggagatgtggtggaggggtgaggctaacatttcctacaacctcctgcaaaggatggaagcgcgtgccgctctcccgggtttcgggaggcagcctgttttgtagcctctgaggctccggggaaaggtttggctgcgtctaagagagacgtttggagccatccgtcttattttgtttgaaaagtcactcgttcaatttgtcactgtgtgacagctcagaataaaaccaatttgcggccgcccctcctcctcgcttcccggaggatctcctgggaggcacgaggcggacgcggtgctgagttgggccgggactcagggcggcaacatttgggcaagggcccaggaaagatgaggggctttgccgaggacacggactcctggaataaaagcagaatgaggtcaagagaagggaagcaaaggggccaaagcgcgctccgctctccaccgggaggcgggctttgcagagccctaaagagtgagattaccgtcccttccccacgcccccaactcgccccgggtgacaagcgcttcaggaaagctcctgtgatcaaccctccttgccccgtggcggttcggagctgcagaagttagaagagagtcagagccctccggagcggctgcctggcccctacgcagagtagcaagaagcactgcgatgtgcgctactaagcccacgcggccgcagcaaaaactttggcgtggccggggcgtggctagggtccggccaggcccccttgttcctaattcccctccactccccgctcccattggtcacgaggatgaccaatgagcgctcggatcgaggtcctaccccgggcctgactcgaaagctcctgccaaaactttgggagtttttagagacgagtttttttttttttctattacttttccccccccctaactaacggactattattgttgttgttttaaatttagctcttagggcttagctatttgggttttcttgcggtgtccggctcccgtctccctggctcccccgcccgccctgcggccccagcgcccctcgctctcatccagcccgcgaggagtgcgggcgccgcgccgcctttaaagcgaggccagggagcgaggcggtgaccggccgagatccggccctcgcctcctccctcggtggcgctagggctcccggcctctcttcctcagtgcgggcggagaagcgaaagcggatcgtcctcggctgccgccgccttctccgggactcgcgcgcccctccccgcgcgcccacccacccagtccggctggactgcggcagccgcgcggctcaccccggcaggatgttcgcagccgggctggctcccttctacgcctccaacttcagcctctggtcggccgcttactgctcctcggccggcccaggcggctgctccttccccttggaccccgccgccgtcaaaaagccctccttctgcatcgcagacattctgcacgccggcgtgggggatctgggggcggccccggagggcctggcaggggcctcggccgccgccctcaccgcgcacttgggctcggttcacccgcacgcctctttccaagcggcggccagatccccgcttcgacccaccccagtggtggcgccctccgaagtcccggctggcttcccgcagcggctgtctccgctctcagccgcctaccaccaccatcacccgcaacaacaacagcagcagcaacagccgcagcagcaacagcctccgcctccgccccgggctggcgccctgcagcccccggcctcggggacgcgagtggttccgaacccccaccacagtggctctgccccggccccctccagcaaagacctcaaatttggaattgaccgcattttatctgcagaatttgacccaaaagtcaaagaaggcaacacgctgagaggtaggtcttgggcgggaggctgcaggcctctgaccactgacccactccccggaccccgggctggcttggggtgcctttgagtgtttttacaattaaggacaaatcggtaaaacgggagagaagaaaacgaattgtaagaaaactacaaaacattaggtctaaaactcacctgttctatgtaaaacaaacaaaaaatgactccagggattctttaaaaacacgtcttagaatcaatatttataaaagtggttggtgtaattatctgctaacatgactttgatctctttaataatgtatctagagacagaattatattttctgacagctaaagcatttttgggaaacactttcgcacttatctgatttctagtaaaaatttcacccaggaaatgtaaataataaacaaaaccgcctagatgagcgggcagagtggggccaccttggggcggaggttttgcgtctgtggcgttcttggaagacacgtgaaagtgaggccgtaagccgatttatgtaaagcctttacttactatatacatgcatatggacgtgagggacacacaggaacttttcgtgcgtcgctccttggcaactgttgggagagagaggtttcagcgcctagacgggttctctcttgacttcgctcaataaaagtgaatccagggcaaggggaaggggaggaacaaatcagcggagagtgtgagtgtgcccgagatgtaacctgctatccttttcccttgtccccagatctcacttccctgctaaccggtgggcggcccgccggggtgcacctctcaggcctgcagccctcggccggccagttcttcgcatctctagatcccattaacgaggcttctgcaatcctgagtcccttaaactcgaacccaagaaattcagttcagcatcagttccaagacacgtttccaggtacggaaaaactccagagtactgcctaacgggcgagccgactaacagtcagaaatctcaggactgacgcctccagggctgccacggtgtcgcaatctcacaattggggcgggaggctacggagtcaggagagagaaaccgaaagatttctcagcgagctagcgctcgcttcggatggttccccttgaaaaggggtagaggcgcctggagatcccagaaagtgtgtgcgtggacggtggggtggggggctttctcgaagtcttttcgccccagagggcttgaaaaatgcagcatcaatgttgcttattagcatatacacattttgggatgacctcaaacacttgtgcttggcgagtttatgtctgggtgcctggacacatgcgggaataaacacacacacacacacacacacacacacacacacacacacacacacacacgagataattcaattcagggctgtcatcattcaggcccaagggacatttttgtctactcttcgtaggcctgatggccacgcatgaggtttatgtttttctcttggaattaaaggacaagccgccaggcttctccactccacgctcgctttaggtcttccgactgtcgtgtaaaattcctccttagaggggccattcggtgtatgtgcgaagggctttctgaatgagggtggaatcgacagttaacacgaaacagtttcaagccttacggggacccccaggctggcaggtcaaggactggacactgaacggccctcttgtctttcttccc

SEQ ID NO: 1879349 - DNA, 4001 bp, Homo sapiens
taggtccctctatcatggaataggggtccttagaggtggagttagggagatctgttgcatgtataaactggtgacaaaaaagcagctttgcattttggcccagtatttttgatgtcaagaagtcagaagaaccatttcaaaatattccatttcaatctttattgattggtatggaatgttgcctacagtatattcttgcctgaaaaatctagttaccagacagacacttacagcacaatcccatttgtgtcaaattatagtcaagtaggaaaaaacctaagtcaaaccatgtcagggaaaaaatgaaatgtgttgttcatcttcaatgaaaagtttaggagactgttctgatgccacagggattctagcatctcggcctccttcttgggccctatgagatggcaaatggctgtccacattccctggactgcggtgtcccccaggactccttacacaggtccagaggtccaccctgataggaccaacttgggtcacatgcccaccactgagccaatgactgtggccaaggcgatcctgccctcttatccagccttggtcacgaaagggagtcagagtgctatgaacaagaggaagaggagtggaggccacatattatacatctatccactgaaaaacgattgatctggttccccagccccctgctttttttttttttttttggtaaaatctgccccttgcctcctcctgattagggaacacccctgggagttcaccctggccccactgagcgtatctaagtgttgctggaaatcctgggttccctcaggcctgtctcaactcagatgccatatgtttctcctggggcctcaagtgtgagcttgaactctaggccttctagccctggcagtcttcccagtcctgccactgcttagcagagtcagacgtcatgttcctgaacctgacactgagtagggtcctctcacctggatcaccactcagaaccacggtgcttctacctccatgactgctgctactttacacctggaggctcccacccagtggcccaagtcacaccttttgtttactgctgacacttctctcaaagccagcccttccctccctttccctcccctccattcccctcctttcccttcccttcccctctcttcccttcccctccctcctctcctcccttccccttctttcccttcccgtcctctccgttcccctcctcaggatcagtctctcctctaccaagccactccctcctccacaaagcatcagtcacagctactctaatgccacacatgagaccaggaacaggaaatacggttgaatggcattttgttttttcaaactggatccatcagctctgcctgactcttttccctctgcaccggtttctagctgacattcggtacttcttcctggcattacattgtttacggtagagttcaagttcctcgaagtacttagctctcaggagagccactctttgctcataagggtgcttctccaggtctgtcgctgttgaccacatcttccctgtggccttggccacctgcaccaccgaccagttcgggttctccctcttcagctgagcatagtggtcttggcagaagagtaggaaggatgatggaggccgtctgggttcctggggatcccgctttctccgtttcttcctcttgccaacataattcatcatttcttcctggtatcgggctttgtcgagtttggccagggcttcatatttggccttttcatgctttgagatggatctccatttttccgaacactttctagagaactctttaaagccaacataggtatttggctgctgctccttgaatttgtttctgtaattcagcaaaaagtgaacgtaagaagagacatttgccttaggctttagctggatttcttttcccatgttcgtaagttcaccttttttctggattcagtaacgtggacaggagagactgttgttcccacactccaggagcaatctagaaagtgctgtacttgcagcgaatttttctgtctgcaagagctgtagtcagggctcagccttttcagtgctgatggcattgttgagtcagaggagggaaactgtgacatcatccacaagccagccaatcccagccaacacctgtgggcatttgtgtacaggtgctcgtattggttggttacttgagggtcaatgtttgcctctcatgaaagatgatggttcattcatagtaggctatgaggcagctatgtcccccagaaataattctccttggcttcctggaggcagtgggttttgctgcactttaggggcttaaaatccctaggctgtagtgacaggccatggggtctgccttcctcactatacgattttcaggatgcctcatcatcccttccaaagacaggctgagcataatgaacatggggaggtggatagatccagggctgtcatgataaaatgtgaagtgtttctgtttgccttgaacagtggcagctcatgccatacaaagggtttagtagtaactctaaaagtaatcaggtatgacagctgtgacttggttcctgtcaggacaaagttgtctaatttaaaacctgagcacttgggctatgagttggaactcttcatttctctgaagaaatgtgaggcgaaagaggggggagaaccttgagattttattaattaacactggagttcatgaaaatgaaatggaatttgtagcacatccagaagcctccccactctcatgtgaggggtccccatttcttaggtttagaacacaaagctgtaacagctacactcaaactggccggcttctggcttttggtcaaagtaattgcagatattccactagtctttcaattggagggaagagaaaagatgaaaaagtgtcattctgggggcctttggacactgctaggtacttgcctgtgtggcactgggtttaatatcacttaatggttgatgatagccccaaatttataggactagaaaactgagtttcattaacataaaaagtaacatgttcaaggttgaacagccactcacaggtgagagtgtggattttgacggctgattgcttgacctaagcctgtgcttcatcctgcctgcacagagctgttgccagggcactgagggtccagatatgtggtctcagcagctgagccggacaaggaaacttgcctaagactagaccatattttgaatttttccaggttcattcccagggttccaagacttcagtgttcatcttctgtaaaagaaagatggaaactaataagagtctccaatcctgaattcttgcccagctctgctgcaaggtggctggcctacctaagccatccccttcctccctgtgagccaatgatctctcataaattgagcattctggactggccagggaagcccctccaggggacaagctgtagttgtgtggcaggatttgggggcctataagatatcaggtgccatcaaggaagtctgggctagtagggggtctcgcaaaggaacggattactctggggacacttctcagcctaggtagcctttttccccctggctctttctcccaaggggccagaggttgactcacacattttttggacatgagcagggctgcctagatgaatgggacacagctcctttctgagatcaaaagatgggacatgaggaagaactttaatgaaagtccacatattcatcagactctgctcaggctcagacacacacacacacacacacacacacacacacacacacacacacacacacacagagtagcttatctgtgcctcttaaccttccatccctctcatgataagatccaggaagattaacccacaatagctatcgggaagctagcagatttaagaagaaaaggcagtaaaagggaaaagctatgtcaaccttttggtgttgtcaaagttccaacttggaggatgaagcaggggaagtccttgtttaggggagcttaggaaaggtaaataaatctggcttcctaaatcaatgctgtgtgctgggtatctaagagttgcccttc

SEQ ID NO: 1879350 - DNA, 4001 bp, Homo sapiens
tttaaataaaataccctcatatttccatataatctacatacattctcccatatactttaaatcatctctagattacttataatgtctaatacaaaataaatgctatgtaaatgtaattattatactgtgtatttttgttgttgttcttcattgttattttttgtctttttacctccagtattttcaacccacagttggttgaatccaaggatgcagaactggaggacatggagggctgacgtgtaacatacataacatataaaacaggtcccttccagcgctagcacactgcaattacatcttaccctgaataagagagaaactctgttttggctggtaaaatttccaatgtcttcaccaataacaaagctcattttcacagaagtttgcataaactggaaacctggataaaaacaaagttgtaacatatttggttggattattttttaaatgtttcatgtatttacatgatcactaataatttttattcttatgctattaagattttacaagtgtattaataaattaccaaagtctgtaacacccaccctcaataaggagagactggtagaacgaaagtctctcctatcaatgtctaccctaccatccaacttcacgtccaaactatttagttttttgccaaaccttcaatgcactatgaccttttttttttctctcttgagatggagtttcactctcgtcgcccaggctggagtacaatggcgtgatctcggctcactgtaacctccacctcccaggttcaagcgattctcctgcctcagccccccaagtagctgggattgcaggtgcgtgccaccacgtctggctaatttttgtatttttagtagagagggtttcaccatgttggccaggctggtctcgaactcctgacctcaggtgatccgcctgcctcggcctcccaaagtgctgggattacaggcgtgagccaccatgcccagtgcactatgacctttataccatatccatgctgccactcccaactttttcatttcatttggaatgccttttttacctcctctctgtaactttccattcttttgctcactagcttctgggaattacaatcaccttttcatttaagttctcactattttgtgtcttataatagttggtgcttttcttggtcaccagtatttggtacaatcacatacagcctaagtttctcattggcaaaaaccttggccatttttatctttacattctcatccaagtatctggcacaagatagtcaataaatgctagacaaaaagaaacagtccaggttcctggccaggtgcggtggctcacgcctgtaatcccagcactttgggaggccaaggcaggcagatcacacggttagaagttcgagaccagcctggccaaccatggtgaaaccccgcctgtactaaaaaaaaaaaaatacaaaaattagcctggcatggtggtgtgcaactgtaatcccagctactcaggaggctgaagcaggagaattgcttgaacccgagaggtggaggttgcagtgagccaagatcacgtcactacactccagccttggcgacagagccagactcgtctcaaaaaaaaataaaaatagtccaggttccccttcccctctatccagactttcacactttacaatttcaaactttaagagtaacctaccttccatgaccacctggaacctccagtgtacagcttccttcattgttccattaattccgaaatgtcacactaggtgatatagcagtaggtaccagctaaatagctgattaaaatagaattatggttattagtagtcttaaaaacttcttgtggcttatctatcatacctacttttaaaaaatctttaagtgctttatgcactttccccttccctcacccctccctctttggttttccttgactgtttgtgcttttccatctcagtaaaaggacctcggggaatttaaaattaactagctcttctctggacttgtgattatattgtctgagtttggcaacaagaaaatgtgactatccctaggtaccatcatttgcaagcatctctttagtctacgtacctctactccatcgctggtttccctttgcttcgattatataatgcgaggaggtctatataataaattcaggattcctgtttatgcacttttcagcaaagagctagggatcaaatagggtttcaatccttctattcatagataaaaatctgtgatggggatcaagatacccctttaaaagtcatgttaagatatacactattctttgggtaagcagaagaccttaacaaggaaagtagaaaaattaaaatgattgctgtaattctgatttttagtggtcctctagaataaaataagttttggaagtaggtatcttaaaatagtccagtagtcatcaacccaggtcaatataatataccaatatcctccaccacccaaatactggtattttacacaacttattttgcacattaagttccattttaaaatgttttaaaatgttttcttaaaaaggaagctgttagaacaaaaaaattatgaagatggttttcaaagtattacatttaaagttcataatgtgagcactacagatgttttacaaatatttttcagtgctttcaaccgttgcatttgccgtacgcttccatgttctagaataaggacatttttatgttgagaaggctacactgattacattaataggcaaatactaattctgagagaggtttctattgttcactttagaaaaatgtaggtcaatgtaatgggtgatatctgttcttaattattctaagaattaaatcctgtatgttatcagtcacctattatatggcacaccctcagggggtatcaatcattctttgcatatactggtttcttaaagggtaagtttccatagaaatgtttcttcatttgacttctaccctgaagtcatgtgaaataaaacatatatgccttaccatctaaattcaaagcttatttttgaaatgaatgtttccttttctgtaattttatgatttttctcaaatgaacagaaatggtaatgaaaccacaagttgcctactctttcgaaaccattaaattgctttatttgtgagtagacccatatttcattaagcaaactctgatagctacgtctagaatcagaagagcccaagccctctcatttcaccgaaagacattctggagcgtatagtggggaaaataaatttcctctgaagtctttttcagggaaatggaaaattacatattctggactgatacaaccaaaactcacacaagctctcccattccttcagtcttgaatttacttcctagttgattttatatacttcaatatatgaactaatcacttcattatccaaaaggatgtcaagctattttccaaattttcataagctagtaaaaatatgtatttctgaatttagtagaaatgaaaaagattttgggcaaccaaggacagaaaggtctcctatgcactgttttacattagaacattgtaaggaagtacttacactctaccaagtagggtggatatcaaaacaaatgtattgccaaaagttaaaagatgaaatcagaaaaatgatctaactttgaaaagactcaggtctattttcacatacacctgtaaacctaagcaagaggactgccaattgctaagagcacacagaatacacacttcacctcagatatgcaagagaaaacacccttttttttctgttacagagactctgtccatctgattaccaattactctcttcccccatcttttaaaaagagtcctatttaaagtgattctggaagcctaacataactattaaatgtacaagcagcaattaatttggaatacctattggaatcactggaacatttagttgggccctttaactcttccacacagcacattcacatggacagactaaggaaaaggagatgaaatgtaaatcaacacatttgtttgctttacttttcaagaaaaaaaaaaaaagttatgttggaatcttt

SEQ ID NO: 1879351 - DNA, 4001 bp, Homo sapiens
aaagggactttgtggtggagccatagttccctccttcctcaagctgctagactaactactgcttaagagcacagatgctgcactagactgtctgggttcaaatccagctttgcaatattctaactctgggaccttcggtgagttaattaacctctctgtgtctgtctcctgatctgtaagaaaggaggataataatattaacaatctcatagggttgctatgagtaacaaatgagtcagcacatgcaaaacatgtagcacagtgcctggcacagaaagaacactgaaaggattctttgtttttatcttcatacaggccactgcctatccattatattccctgccttttcaccataaggaacaattcctctaggctgagaattgcttttttctggtattacgtgttagattgtaaatactggtgacacataaggattacaaacatttaatcttgttttgtgttaatatttgtttatgaaagacaccattaaaacagagggtggaggaaatcggaagaggtcagagaagagcaaaagaggaacagtgtgttgggtgtggtccctgagtgctatcaagtagaggcttctctgagggcaggtcatgactctctacacagccagagcccacatgtagacacacagtaccctgggttggggaggaggacagggaattgggcacccagggaggcaaagggagagactgaagacccactttgccaagcatcagctccagagtcaagtgaggaagcctctggaggaagctctggtctgagctgtgctacacattaattagatggtctcggcaagttgctttatgtttctggactttgatggttcattgttcagttggatgcaaccccttttctaccttcctcatggggttatttgcacaaggatctgctacaccgaattctgcaatttcttggctattgagcaacagagacaaatggttaaaaaataaagccatatatgaaaaatcgaaatgaggcatatctggcctcatactgcctcttgccatctctgttctgtgctgtgtgcctgtgcacgggctctctctatcactgatgctctctttctctctcactctttctcatgcattctctgtctttctcattctctctgattttctctcccccctcattttctctctctgtttcgctttctggcacacacacacacttacacactctcctatacattcacttccttttattttgccttcactaaagatgccaaggttgctacaaaacaaaaagctcagggcagtctagaaaggcagggacccactggtgaggtctccaggtaaatggtgtcctttataaatgttgcaaagcaattgccaagacaaaaagcttcagaacataaaaacgttgtagacaagaaaaataactgatgtgggattttctagatgagaagtaaaggggtctggtgtccaaagtggctgcctctcaagttctgggtcagggccagaatccagtctctggacaccccgtccagtgtctttcacatgatgccatttatactatttaatattctttttatgatgattgtgaatgtgggattggcttagatttgactacaactttctgtaacttgctagaaaaggttcaccttcctgcacccatgcagggtttaaaatggagccacacatccatgaatcaagtttacttaccagaaaattcctccctcagctttggtctgaaggccttgtccaaggccctgatctccttcagctccttctcctccaccaagaggcggatgatcctctaacccagaaaccctcctgctcctgtcacaaggcagctccagcctgtcattgccaatccaatattgcaggaaacactcgccaggaaacagaagatgctggggagcagatctgattctagattgaccctggagagggctgaaaacgagatcaaatggttatatactcacacaaatgctttattttcctccaccccattttttttggcaaaaattccatgtcttcaccattgccagaagtagctaaaagaaaataaagaaactccaactgttagattattaaaaagctggatagaagagtcagagtgctggtcacttcatcccctaaggtagccctggagttctatgttctgtggctcctggctttccccttatcactttgaactcctgccacatactcattgctcctgtctcttccagtatgccttttctcagaagaaaagtgacctttaatgtatatctctaattcttcccaggaacaggaagagaagtccaattgtaaggctgtagtgtggtaaagggtcttaggtttagccttaacaggacactagttggttgattccagttgtctgggatctgcaatctgtgatcttaaactagactgagagaaatctccaagtgtaatgtgaactttgcctttgtgcagtaaatatgtttggagggaaatccacatgagcccattctctcctctctcagagtgtcatttgaaatgctgctgcagtcttgcaaagtttagaaatttgtaatggtgacagctccaattactgttttatggagttgactttctttcccactcaatatatccaaaacctcagttgccattttaccctggagagctctgggttcctagatgaagaacatcattgaaggaaggctgtctagtgatagccacttaattatatggcctgtactgttgctgtcagttactacggcatgaacgaagggggtcaaatgtagaaaggaagacaaagacaaaaggatatgttttaaaacaagaggtcagggggctccttgcttctagtgagcaaaggcagctctgagcttctaaagccctttgtatttatgaggtagaaagagcaggtagggagagataatggttggtcagctgcttgatttatcacaggtacacataattgctttctttatacaacagcttcagaggttcctatagataatcacaaggaacactgcactgggggtgtgacggccttcagcaccccttctggcagcagacatagtttgtcagttttaaaacgtcctgctttcatgagaacagttttctgtttgctcaaatagcctccagtggtatactgagttggtcacgaccctcattctttttggcctgtaacactgtaccacaagagtggggatttgtggttgtatgccccaatgactcttatcatagatgtttgaacttttcccatatttttgggtacaaaaccattctcagcaaatttctgaactgaagatgttgtgaatgctccttgagcctatgccagagaactgcccaaatttcaccaccataagctctccaagacactttcctctatctaaaaaaagaggtgtaatttatattcattaacatgcccagatctcaagtgttcagttcaatgaacattgacagttatatatgtccatgtaagtagcaacccaaaaatgtataggtcattttcgtcactgcagacagttcttttctgcctgttattggctaattccctgccctactcccaatctacctggtaggcaactactttctgatttttattcccacagaattcttattttatccctatattttcttatttattcttctaagatctctgtggttctggatatatatttaaatataaaatcattctgaaatgaatttttgtgcatggagtacagaaggattgaccattgattgtctctattgtttgttcatttttctatttcatgattttctttgtttttattatcagcttatgtttattaacttgggggttgttttactcctttttttcagggttcttattataaaagcatatataattgactttagtcctttgctcatttccactacaggcatttaaagttgtaagtttctctctaagcactgtgtcagctgcagccaacattttgatgcatcgggttatcatcactcagttaatgatgttttgaattttttcttgtgagttcgtctttgacccaagtgaccgataccaacagagtatgtagcttgttttctgaaattgggaat

SEQ ID NO: 1879352 - DNA, 4001 bp, Homo sapiens
acaaatatgccatgaggtagatacctgctttaaaataaagaaaattgaaactcaaaacagttaagttcccatagctaggatgaccagccaaccaccactcaaagccccctgcttctagcactatgcaatgttgtctccattgtctttagtctagtccacccgaactaaggaaaaaaatactttgagcttttcacaaaacttgtgtaaaagcaggtacatttgaggataaaaagtttaactattttattcaaaactctttattccctttgtgaatggtccagtgaaaaaggccaagctttccatgttacctgcgaggaaggcccagagaggtcatgagacctaatcaataacacacagcagcaccaaattcctagttcagtgctcaaaagtttaaaccccaaaagccattcaactcctcctccctcccctctgtcttctttatgacctggccttgtagggtaatgggaatgagcatggaagacagtcaagctgggatctgaatcctggacatagaatttaccagttgtaagcacttggacaagttgctctttgtgtctcagcctcagttttcatagctataaaattgttatataacattgttttttttttttctttttttttttttttttgagacggagtctcgctgtgtcgcccaggctggagtgcagtggcgggatctcggctcactgcaagctccacctcctgggttcacgccattctcctgcctcagcctcctgagtagctgggactacaggtgcccgccaccacgcctggctaattttttgtatttttagtagagacggagtttcaccgtgttagccaggatggtcttgatctcctgacctcgtgatccgcccatctcggcctcccaaagtgctgagattacaggcgtgagccaccacacccggcctataacattgttatatactattattcaacttgaggggggaattgaaaaggttaaatgaggtaatgtccatcattctatgtcattactttgttttaatttcttcctagcattgaacactacttatgattattttatttgttcatgagtttactgactttctacctttgtctttccatagctgttctccaagtgtctagaattgcagtgattagcacagtggccactagccaatgtggctattaagcatttgaaatgttcctagcaggaactgagatgtgctggaagtgtaacatacacacaaagtttcaaagacacagcattaaaaaaaaagtaaatgtaaaatattttattgataatttttatattgatcacatattgaaataatatttagggcatattgggttaaattattaaaattacttttacctatgtcttttcactttctttaatgtggctgctagaaaatttaaaatgtcgtatgtagttaatattattgccatcgaccagtgctagtcatgaacaatgctggcacatactaggtgctcaataaatagttgaacgactgaatatttttctttgaatgagtgagtggcacaaaagtgaaagtatgtgaataatagtttatctcaagtaggcgacctccataggataaagctgtctgctttaggttaataaactaattctggttgaggtgttaatagctgataacagcttaacttgttggcatgagtcaaggtaagatgtacattttaattgcaactctctagaagtcagataaaagtaggctttttaattctactgtgaggtcttccagaagcaaggttcctttagattaaattaaaaaaaaaaaaaaaaagaagaggagggaggggacaaatgctgagaatggggatggaacagaggatggagggagatgcggagaaacttcagagcggcaggtgccttcgtttcccgttacctgctgagtctagtcccttccagggcacacagtgggcgcttagtaactgtagaaagaagtcgaacgaaatcggaagggggagaggcagaggccacaatcaagacacggaaacgacagtcagtcgaggcagcagagagggtttcacgcgggccagcggaggcgcagggcagttgagaagggaacttgccacggggcggaggggccgcgctccccaccagcgcggcgcgggggcgctaggccagggaccgccgggccagggaccgccggctgcgagcagcgggaacggacctgccccgggtcgcagcggtttttcccgggcggggctgaggctgcagggaggcgggcgttccggcggagggtcacggcctcgccgccgggactttcctggggtggaggtgtgagcacgtaggagccctggcctttccaacttcccaggtcagactggggctgggaccaccctgcgcggccttggatgcagggaaccaacccagtgctagtccgccctcgcggggacctgtcctctcgcctgacctatgaagtccgtccctgcctccaaggctccaacaaagtccttctttcccccagagtagcagttctcaaacttgagtgcatcagcatcacccagaggctgtattcaaacacgttgctggctccctccacggtttctgattctgtgggtttagggtggtgatgctgattcctctggtcaaaggaccatccctggagagccactgccctttaggtaacgattttcccctcatttttcttctgaactcggtcagcaccttgttcagcctcccactgagcctggaacccttgacagctggggaaacaagtgcgttgctgctaagccaggagggcacctaggaatcccagcttccaatccagggcgttttcctctgcattcactgcttcttttactctcttgggagcctatgtgtgggatccagaacagggcagaaccctgagtagtaaacgctgaacgggaagcgaggttagttaaatccaactgcaggagaggaaaaaagagtccttttcttccggagaggagagggtacacagaggatgcctgtccactgaccaaacctgccctgagcatcaccattgacgctttcgttcattcaaaaaacaaagttaattcagcaggtgctctatgccaggcactgacttggtatgggggataatgaaggaaataaaaccgagatccctgtctttggagaacatacttcctaatagggagattaacagtaaacacaataaaaggtaaatcaatgaatatgttagaaggtagtaacagttacaaaaagaaaaacaagagtagggtaaaggagtgcaattggagttgcaattctaaataagatgggcaggtaggccttattgatgaggtgagttaagatattaagccataggatagctaggggaagagcgtttccaacagggggaacagccagcgcgaaggtcccgagtcaggagcatgcctgatgtgtttgaggctcatcaaacgggccattgtaactggagtaggggcagggatggggaagaagctgagtaggagatgaggccagagaggtaaaagggcgggcaggaagatgttagaggtctggcccagccattgttaaaggattgacttttaccctccaatttgatttactgttttgccctaatgattcttgcctcgtccatctacaaaatctgcctcaaaaacagccgttaaccatcccctggctcacagctggagcttgttttgagaatgatactattttcataagttggtgggccccaacctctcagatttggggcttgcaaaggttgcaatgaccctttctgacctgcagattagagagttggtaattcatatttgctttcagcatttttttttaattttctctcatcattccccatacctcctctgggttcttgttcccctgacgtacctgctccctgaagcttcccagatttctagagcagcactgtccaatcaaaatatgatgtgagacacataattaattttaaattttctagtggccacatttaaaaaagtaaaaagaaacaagtaaatttaatattaattacatatttggtttaacccaatatacccaaaatatcatctcaacgtgtaatcaacataaaaaa

SEQ ID NO: 1879353 - DNA, 4001 bp, Homo sapiens
ccttctctgccagctggttgtgctccagccaggcaaggacttcctgacacttgtcttgcactttgcgcctgtcctcttcgggaatcttgtccctaaggctttcctcttgcaaagaacctttcacatggaagacatgggcctccagcgagtttttggcagccactctgtccctctgggcctcatcctcagccccgtactgctcggcttcatgaaccatcctctccacctcctccttgctcagccggcccttgtcattggtgatcttgttagccttacctgtgctcctgtcagtggctgtcacgctcaggatgccattagcatcaatgtcaaacgtcacctctatctgggggactccatgtggggcaggagggatgccaatgagttcaaaacgccccagcaggttgttgtccttggtcatggccctctcaacctcatacacctggatgaagaccccaggctggttgtccgagtaggtggtgaaagtctgggtctgcttggtggggatagtggcgttcctctggatcagcgtggtcatcaccccacctgctgtctccagccccagagacaggggagccacatccagcagcaggagatcctgcactttctcacatttgtcccccatcaacacggccgcctgcacagcagccccataggccacagcctcatcagggttgatgctcttgttcagctccttgccgttgaagaagtcctgcagcaacttctgcaccttggggatgcgagtggagccctccccccaggacgaagtcatgaatctgggccttgtccagcttggcatcccgcagggccttctccaccggctccagggtgctgcggaagaggtctgagcacagttcctcaaagcgggcacgagtgatggacttgtagaagtccacgccctcgaacagggagtctatctccagggtggcctgggtgctggaggacggggtgcgcttggcgcgctcacaggctgtgcgcagcctgcgcagggcacgcttgttcccgctcaggtccttcccatgcttccgccggaattcttccatgaagtggttcacgagccggttgtcgaagtcctctcctcccaggtgggtatctccagcagtggctttcacctcaaagacaccggcgtcaatggagagaaccgacacatcgaaggtgcccccacccaggtcaaaaatgagcacgttgcgctttcccgcgccccgccggtccagcccataggcgatggctgctgccgtggcctcattgatgatcggcagcaccttgagccccgcgatggcccccgcgtccttggtggcctggcgctgcgagttactgaaataggtgggcacggtgatcactgcgtgcttcacgggctggcccaggtacgcctcggccgtctccttcatcttgctcagcaccatggacgagatctcctcggggtagaacgtcttgtcctccccgcggtagcatacgcgcaccttgggcttgccgccctcgctcaccacctggaagggccagtgcttcatgtccgactgcaccgtggtgtccgcgaacttgcgcccgatcagccgcttggcatcgaacacggtgttgtgggggttcagggccgcctggctcttggccgcgtccccgaccagccgctcggtgtcggtgaaggccacgtagctgggcgtggtgcggttgccctggtcgttggccaggatctccacgcggccctgctgaaacacgcccacgcacgagtaggtggtgcccaggtcgatgcccaccgcgagctcccgtggggcctgcatggctgaagcttcttgtcggatgctggaggccacggaggctgctgccgctccgccgtcgaggggcgctcagcagtgaggctctccctgcggtttctctgccgccagcccggctcggatctgctcagctccgcttccacgggcttttcatccttttgcacctccccgaccccgccgccgcgaaccttcccgcaccttcccgcccagtcgagagcctcccgcccgcccgcccgggctgagtcagccgggcggcgcagcgcggcgctgaccccgggagaaggttcgggcggatcgggccgtgagccgagaggctgggcggctatgccaggccagcccgcctctgactcagggctgctgaaagaaacgcggggaaggttctagctcctcccggctggctctgaggacgcgcggttgtggcagaggctgcaaaagcagcaactttagaggcaaggtctccccggggctgtgggaggtcggatccctgaggcgagcacgggcctgcgggctgccttggagggccgctgagagcccagcggctcaggaaggccgaagatatgttaccatgcgaatacagatatataagatatatatacatatatcttaaaacagttttatcttgaacaaaatattttccaaaccacgatttaagacagtgcctgtttccttaaggaatggccagagataatcagctttaagagatgacactgcagctctttcatcgacattagcattggtggtgtagtggtagacttctcgcccgcaacgcgggaggcccgcgtccgattaccggccaatgcacgcttggttttttccgatccatttcaattctttttctcatctaggattaatcactcttgaataaattaaaccaggtggccgaagactttaggttcctccagttttgttctcttttaccagtcactttccacaaaggagatgtgacattgcactgtggccctgggactcgggagagacctcgccactcaacccaagagagaacgcaacacctgggaaaggaggacgcagtgtacggtcaggatgtccctcatgttctccccactgtttgtatccccgaggagcctcgtctccagaggcccggtggagaggcacagtgtgcgtttttctctatggcctaagtgggttcccagccggagaccaggactcaggtggagagtaaactactgcaggctccagtccaacctacctcctaaaggctggaggacgagatgggttcactgggcagtaaagtcacactggtttctatcaggctgtgactttgtgaattgaggccatttcccactttcttcaatccagaacattccattcagatcttctggcgttcggatttccgctgaaagccaaaacaaggagacatttctgagacttttgaaggttgacaaaatccccacacaattttccgtaacctccccgtcagggaatcgaccccctctctcatgcatgacaggcagagatacttaccactatagtaacaaggatggcaactgcaatagctggcagctggagagtatgtggtacagtctggtgttataatttagcagtgtgttataaggagaaacttaaaagttggcttctatttaacgttacttgcctgattcaaaggaaacttccatttgtaaaaagagaaactaaaaacccttactccataggtggctattttctcctttgacaggttagaacccactaggaagttcaagggactttttaagagggaggcaggagtccagaagtagaggtcagtactgttcctgggctgggtttcttggttaatcctctctccgagagcaccagtgacagctggtagagattgctgcttgagagatcagctgtactggtaaggtgatcagttcaggaaaaaagggaatgtttaaagaaatgtgcaatatatgacttccacagtggaaaatcaaactgtccttgaaaagaagtaacctatttcataattccaaaagggaaagaagctgtcagctttaaattcactcactctcagggtctaagctggtcacacctggatgccagagtcaagacgtttgccgacggcctgcaagagatgggtcttcacctcagcagggaaaagttggcccagcctggggttctgtgccccggcgtgttaagggactgtcttgtgtgggctcctccaaccttctcttccagcccccagccacctcaaaaccccacttacccactcatctccaagagttacaggcatagccctaa

SEQ ID NO: 1879354 - DNA, 4001 bp, Homo sapiens
tctaatcccttttggacaaatgagtcattaagtcagcaaaggatgccacagataatgcccttctgaaagagaacttaaatccagtatatacacactactttttaaaaacagaacttaaatccagtatatacataccactttttatagaaaagaacttgaacccctgcttcctgtcttcccaagctggttgttctttttaagaccccactggtcagccacttgctctcatgccccaaaacaaatccttctttcccatcttataagagaggtccttgagagatggggttgtttcatcattcttataccagcagtccccaacctttttggcaccagagactagtttcatggaaggcaatttttccacagattgggggtggggtggatattttcaggatgattcaagcacattacatttattgcacacattatttctatcttattacattgtaatatataatgaaatgattacacaactcaccataatgtagatcagtggaagccctgagcttgttttcctgcaactagacgttcccatctgggggtgatgggagacagtgacagatcactgggcattaggagcatgcaacctagatctcttacacgcacagttcacaatagggtgtgtgctcctatgagaatctaatgccgcggctgatctgacaggaggcggagctcaggcggtaacgcaagtgatggggagcagctgtaaatacagataaagctttgctctcttgtccaccactcacctcctgctgtgcagcctgattcctaaaaggccacggactggaccggtaccagttcatggcctgggggttggggacacctgctttatactgtcccatggtgtctacactgtggttagtccacaaatactcagattaaaatccagctctatcacttactagctctgtgctcttcaggaaatgatgtgacctctctatccctcagttttctcatcctccaaagccagcaacagcagattgagtccctctcacagcgcaccacgctgaactcttctgcttccttcttctatttttaaaagcccttgttggttacactgggctcatccagtgaatccaggattatctcccaattttaacattagctgatcagcaaatttaattatatctgcaatattaattcccctttgccatacaacatgatacagtcacaggttctggggattaggatatggacatgtctggagagccatcattctgtctaccacactggccatagctcatttgaaggaaaaagaaaagagcaaacaccgattatatagcacttgatatataccagcagtttctgttgattatcccaacaaccttatgaagtggctggtatacttttccccatttttcagagaagaaaactgagggccatgagccaaggaatgtgggcggcccctagaaactggaaaaggcaaagaaatgtactctcccctcaagcctccagaagggaatgcagccctgctctcactttgattttagcccagtgcaacttctgacccactgaaaagtaagataataaatttgtgttgttttaagctactgagtttgtgataatttgttacaatggcaacagaaaactaatcaagccagttataaaaattctcagtcaagacaaatttatttctatattctcatgggccattctctgtactaaaagaaggacttttatccagcattttgaagaaccaaaaagaggatttagtataatatggatataagatattaaaccttgaatttttgtttcctctgaggatgaagaggaagtctaccctacatcagtgaggtctcccagctttgcaactgaagactgtaacaagcaattccaccccccaatgttatggtagcaaattacttgagctgactagatttagctataatcaatcaaaaacaagagctaaaggcatgcatacctacaagttttgatgtgaaatacagcatttttgttgccaatgtttcgtaccagcagaatcttctgggtgctgtatttgacaggacaagtggaaaaattcagcttgtcaggaaaatcgagaatggctcgtgcccctctagctttgatgggtacaataaacttttctctttcagtaacacaggtcaacgtatgggcgtaatcctacaagggaagggtatgatcattatttgtggaaaaagcaacatgatcacgataactgttcaagaaaagggtcgatgagaggcattttgcaaaacaacttttagtatagttctatgaaaacatcttaaaacaattacagaagtactttcaaatgagattgtcttttctgagagagagagagagagagagagaacagatctagtgttaaaacctacagctggtagagaagctatgcttcatgtgtctgtcaggcaatagggaggtaggatgaaggtcagtggaaggccaggcccatttctcccgtagatccaagaagattcacaacagttccctcaggtcctccttccaaaccccacttctccttcaagcccatgtattagaatgatgtttctttttttttttttttgagacagagtctcgctctgtcgcccaggctggagtgcagtggcgcaatctctgctcactacaagctccgcctcccgggttcccgccattctcctgcctcggcctcccgagtagctgggactagaggcacccgccaccacgcccggctaattttttgtatttttagtagagacggggtttcaccgtgttagccaggatgggtctcgatatcctgacctcgtgatccacctgcctcggcctcccaaagtgctgggattacaggcgtgagccaccgcgcccggccgatgtttctaactaatggcctctttctgcctatactctttgcaatgtgactttgcagctcctccatcaagtaatgagtctccactccacttgctttcagcaatacaaggtggccaaagttatgctatgccagtttcaagctgagacctcaagaagctttgggtctacccagtcttgttcttggaaccctgccaatggcatgtgaacaagcctggtccagcctactgcaggatgtgcacctggatgctccaaccaagaccatgctagaccagcctagagccagctgatccccagatatgtgagcccagccacaataagcagagttccctacctgatgagagggcccaggcaacaccagaaaaaccacccagctgaaccacagtcttgtgagcaataataagtgcttattattttaagccactaaatgtgggattgtttgcaatcatacagaactagctaactgatgcgtaagtcagttgaaacctcacttcttgcacaaagccatttctgaccattccaaataaaaatgctgaggccctaggcatctctcttctccagtcatgagtttaaatgcaacagaaatgctgaataaagtcactctttatgccatctcataagatagaaatagaatatttgcctgcagtgtagcaaagaaaaagttaaaagaagtcaccataaaaggtatctgatatctaaaaaaagctttgttttccttcattttctcatccttttattgtgtgttttagctgcaaggagtcttgattaatgaaaagtcattttgaacagaaatttccttttggtaaccatgtgataaacggtagtaagtggtggaggttttaaaaaaagctctttttgggctttggacatagaataagaatgggaccatctggcatacaaattggcatacagggctggccacatactcaacctcatgaagccacaggacaagcataaagcagtggcatccccagtttattcattcaactatgttcattaagtgcccaggtgccagcacagcactgtgctaggtctaggaatacaaccaattaggaaatgcagacatggtcacggtcctcctccagctcacatcaggatggaggagacaatgaacagatgaataaaggatatgtaatgtacagtgcaactcacatataaataaatataaagctaaaactgccaggaatgctcacaaa

SEQ ID NO: 1879355 - DNA, 4001 bp, Homo sapiens
gtgtagagtccaggaaggcttcttggaggtggcctggagttacggcctcacatggctcaggcactggaatgtggcccccaggactctggagctgaaagctctgtttcctttgagtccattcgaactgaagtggcccctggtgttggtggtggcttctttggggtgggggggcctaggcaggacagattcggagccagtgggcccggcccggggcaccaggttgccgcacgcctttcctgctgcctgtgcaggggtggaagcaaattcctcctctggctgaggaccaggctgacgtgagcccagaggaactcgacccccgcccgtgggtgttgtctgcgccactccctgccccgggtttcatcctgcctgccttccgctctgtccgcatggggctgcccggggggtaccgggtcaccctcaggaacgccaggctctggcagaggaaggggtggcggctgcagccagtggctagggagcgcattctaggcctggcctatctcagtcaggaagctggcgtctggcgggggactgaggcccagggaccttgggggacccagctgatttgctccaggctcctcaccatgcccggagcctcgcctggttgggtaggcagggtccggggcctcacagggcttggggcaggtggggatgctgtgaggagggtccagaagggcaagcgggagctccagggatgaggaagctgcagtgaagagagtgggctaacggcagggcctccatggccacatccagggcctgcgggaattcgctgactgcccaatgtcacctgagcccctaaggcatgccggctgctggcccaggccctcaggacacggcagggagctatggcagagactttctgcttggccaaactccggctgggatctggaactttctcctaggcccatctgtgcacttgcttggaaaatccagttttagtaagagccctactgagtcagtttagccagaaccccacaccctggatatctcaccctcgatgacatccaaccaggtccctcatcctccaccatcacctggtgacgtctgatcaccctgcctgcctagagcaaggaccctgtgaggtgggtttagccagacccctcagccctgatgtctccttagtcattcccacccacagaccccacgctgctcctcggcttctccaccctctgccctgctgtgttggggttgagctccatctcccccaaggccgccaggcagggccccacaccacatgatgcgccttggtgcagtcttcctcactgatgttactacgcatcatgaggaatttttttattcaacagatacaaagacctctgcttgctgggactctgcaccataaggacacattgagtaagtcttctttggtgctttgagtggagggcagtggagaggggaatgtcaacagggtgcatgggccccaggaggccagcaaggcagggatggcttggaccagggcagtcagactctagggctgaaggctgctggggccaccttgtagatgtgtcacctactaccagggaaagtggccactgtacagggctgctcagcagggggtatgggacatcactcctcgagaaagcacggtggggtggatatgtcatagcagtgtgtggttcctgcctaaattgtcctctgtgagttcagctgtgaagagaggacgagagttattggaaggacgtcctgtggtctggaaggacgtcctgtgggaggacaggctgggctccaggggagcttggaatcctgcactgaagaggactatagacacatgatgggggtgaccctggcctgaaaaaagcagaagttaccaaggatgtgatttgaagctgtgattgtgtctcatcatgtcacactgattaggggtgcggaggggttgtgggctggatggtgcctgtccttatccgtggagacacttggggatggagcctcctgccacctgcagctgaagtcccaatggtccagcaaatgaaaaaaatgacacaacagccacacgtggacgctggcgaactggtaggaaagaggaagcggccgggtgcggtagctcacgcctgtaatcccagcactttgggaggccaaagccggtgaatcgcttgagcctaggagtttgagaccagcctggacaacatggggagaccatttctacaaaaaaaatacaaaaattagctggtgtggtggctagcgcctgtagttccagctactcaagaggctgaggagggaggactgcctgagctctggagcttgaggccagcctgggcaacataaccaagaccctgtctttacaaaaaataaaaataaaaataaaaataaaaataaaatgctgatacatgctagaccgtggatggactttgagaatactatgctgagtgaaataagccgtcgcaaacgacaaatcccgtaggattctgctcctgtgaggtccctagaggaggcacgctcatggagccagaaggtacaatgggagctccagggcctcgggagtgggtgtttaacagggagtttcaggttgggaggatgaagaggttctcgagatgagtgacggtgcccgacatgggtgggtgaaaacgaggaaggccaccgaatgggacatgggatggcgcttaagaggccggcagaaacctcgttacctaccgagggtggagcctgcgtgctgacggataggccgagtccccgccccgaaacacaccccgcgcacgatgctccgccccacacgcatgccccacccacccagcaggcacgctcgccccgcccgccccttccagctcgggaggccctgctcctcacgcacgcactctcagtcggcctcaaccggcgctgctccgcccctcaggcacgcacgttccgttcacccctcacgcacgcactctgcgcccgccccttcccgcctccctccggcggccaccgccaggggccgctgtggcacccgcccctcccgcttccttgggcccttcccgctgccccactcttgtccaagatggcgaccgcggcgctgcttcgaggcgccactccggggcgcggcggcccggtctggcgctggcggctgcgcgcggccccaaggtgccgcctggcccacagctcctgcagtcctggtggcgacccaacggccggagcggcctgggcctgcttccggctggacgggcgcaccctgctgcgcgtgcgtggccccgacgcggcgcccttcctgctagggctgctgaccaatgaactgccgcttccgagtcctgcggccgcgggggccccgcctgctgcgcgcgcgggctacgcccacttcctgaacgtgcagggccggacgctctatgacgtcatcttgtacgggtgagcgcgtgctgggagggcgctcgggggcgggcacccaggggagtggccagggaccggcacccagggacagggcgggcgcccggggcctgcagagggcgtggggggtgggcacccggggagggccgggatggggtggaagctcaagggtgggtgggccagcgactggcactcagggtcaggcacccaggagattccacttgggatggacacccaggggaagctcacccagggcccagcacccgggggagggcacccagaggagggcttggctcaacacccagggatgggtcagcgactcatccaggggaggcctgggggccagcccaccatatcagagcagaggcgtctctaggtgggcacctcccaagtgggccatctggtgacccttctccctccgcagggacaaggggttcaggggccccgcctggtggcagagctgtgtttctgagtgacagcttgtggtgacactcccgagttctgtttaccttgtgtttccctgtgtctccccatagctggtcacattggcatttggctcagtcatctgtgctgacatcacgactgtcagtgatgttcatgccgggtcagggccttgactgcttacagccttgggtttcccttgcccagcttccagggacctggatccctgaaacctccgcccggtggagtggatctggttcgcggccgcctgc

SEQ ID NO: 1879356 - DNA, 4001 bp, Homo sapiens
ccagaagggcaagcgggagctccagggatgaggaagctgcagtgaagagagtgggctaacggcagggcctccatggccacatccagggcctgcgggaattcgctgactgcccaatgtcacctgagcccctaaggcatgccggctgctggcccaggccctcaggacacggcagggagctatggcagagactttctgcttggccaaactccggctgggatctggaactttctcctaggcccatctgtgcacttgcttggaaaatccagttttagtaagagccctactgagtcagtttagccagaaccccacaccctggatatctcaccctcgatgacatccaaccaggtccctcatcctccaccatcacctggtgacgtctgatcaccctgcctgcctagagcaaggaccctgtgaggtgggtttagccagacccctcagccctgatgtctccttagtcattcccacccacagaccccacgctgctcctcggcttctccaccctctgccctgctgtgttggggttgagctccatctcccccaaggccgccaggcagggccccacaccacatgatgcgccttggtgcagtcttcctcactgatgttactacgcatcatgaggaatttttttattcaacagatacaaagacctctgcttgctgggactctgcaccataaggacacattgagtaagtcttctttggtgctttgagtggagggcagtggagaggggaatgtcaacagggtgcatgggccccaggaggccagcaaggcagggatggcttggaccagggcagtcagactctagggctgaaggctgctggggccaccttgtagatgtgtcacctactaccagggaaagtggccactgtacagggctgctcagcagggggtatgggacatcactcctcgagaaagcacggtggggtggatatgtcatagcagtgtgtggttcctgcctaaattgtcctctgtgagttcagctgtgaagagaggacgagagttattggaaggacgtcctgtggtctggaaggacgtcctgtgggaggacaggctgggctccaggggagcttggaatcctgcactgaagaggactatagacacatgatgggggtgaccctggcctgaaaaaagcagaagttaccaaggatgtgatttgaagctgtgattgtgtctcatcatgtcacactgattaggggtgcggaggggttgtgggctggatggtgcctgtccttatccgtggagacacttggggatggagcctcctgccacctgcagctgaagtcccaatggtccagcaaatgaaaaaaatgacacaacagccacacgtggacgctggcgaactggtaggaaagaggaagcggccgggtgcggtagctcacgcctgtaatcccagcactttgggaggccaaagccggtgaatcgcttgagcctaggagtttgagaccagcctggacaacatggggagaccatttctacaaaaaaaatacaaaaattagctggtgtggtggctagcgcctgtagttccagctactcaagaggctgaggagggaggactgcctgagctctggagcttgaggccagcctgggcaacataaccaagaccctgtctttacaaaaaataaaaataaaaataaaaataaaaataaaatgctgatacatgctagaccgtggatggactttgagaatactatgctgagtgaaataagccgtcgcaaacgacaaatcccgtaggattctgctcctgtgaggtccctagaggaggcacgctcatggagccagaaggtacaatgggagctccagggcctcgggagtgggtgtttaacagggagtttcaggttgggaggatgaagaggttctcgagatgagtgacggtgcccgacatgggtgggtgaaaacgaggaaggccaccgaatgggacatgggatggcgcttaagaggccggcagaaacctcgttacctaccgagggtggagcctgcgtgctgacggataggccgagtccccgccccgaaacacaccccgcgcacgatgctccgccccacacgcatgccccacccacccagcaggcacgctcgccccgcccgccccttccagctcgggaggccctgctcctcacgcacgcactctcagtcggcctcaaccggcgctgctccgcccctcaggcacgcacgttccgttcacccctcacgcacgcactctgcgcccgccccttcccgcctccctccggcggccaccgccaggggccgctgtggcacccgcccctcccgcttccttgggcccttcccgctgccccactcttgtccaagatggcgaccgcggcgctgcttcgaggcgccactccggggcgcggcggcccggtctggcgctggcggctgcgcgcggccccaaggtgccgcctggcccacagctcctgcagtcctggtggcgacccaacggccggagcggcctgggcctgcttccggctggacgggcgcaccctgctgcgcgtgcgtggccccgacgcggcgcccttcctgctagggctgctgaccaatgaactgccgcttccgagtcctgcggccgcgggggccccgcctgctgcgcgcgcgggctacgcccacttcctgaacgtgcagggccggacgctctatgacgtcatcttgtacgggtgagcgcgtgctgggagggcgctcgggggcgggcacccaggggagtggccagggaccggcacccagggacagggcgggcgcccggggcctgcagagggcgtggggggtgggcacccggggagggccgggatggggtggaagctcaagggtgggtgggccagcgactggcactcagggtcaggcacccaggagattccacttgggatggacacccaggggaagctcacccagggcccagcacccgggggagggcacccagaggagggcttggctcaacacccagggatgggtcagcgactcatccaggggaggcctgggggccagcccaccatatcagagcagaggcgtctctaggtgggcacctcccaagtgggccatctggtgacccttctccctccgcagggacaaggggttcaggggccccgcctggtggcagagctgtgtttctgagtgacagcttgtggtgacactcccgagttctgtttaccttgtgtttccctgtgtctccccatagctggtcacattggcatttggctcagtcatctgtgctgacatcacgactgtcagtgatgttcatgccgggtcagggccttgactgcttacagccttgggtttcccttgcccagcttccagggacctggatccctgaaacctccgcccggtggagtggatctggttcgcggccgcctgcctgctgtccctgctatggcggacccggttcttgttctcttcagcttactcctgtgttttggtttcaggggatggacacctttttaatgacttcctgagctacgtggggtgaatttttggactcattgtgtctctgctagtggctttacctgatatcctggctgggtgtaaaaatctagcttggaaattgtcaccgacaatgttcacatcacaactttgttttctcgctgccagcttttctgagaagtctggtgccgttcttatttgtatgtgaactgtgtttttctcagaagcttttctttattcttgatgtcgtgaaatgtcatgctgatgtgtcttagtttgggctttttccatatcacatctctgggcacttagtgggctctttaaatctagaaccagagttggtgaaatacggccctgaggtcagacccagcccattgccggtgtttataataaaattctctgggaaccccacccgttggattccaggtggtctggggcttcttttttttttttttttttgagacggagttttgctcttgttgcccaggctggagtgcaatggcacaatcttggctcattgcaacctctgcctccagggttcaagagattctcccgcctcagcctcccaaatagctgggactacaggtgcctgccaccat

SEQ ID NO: 1879357 - DNA, 4001 bp, Homo sapiens; identical to SEQ ID NO: 1001

SEQ ID NO: 1879358 - DNA, 4001 bp, Homo sapiens; identical to SEQ ID NO: 1017

SEQ ID NO: 1879359 - DNA, 4001 bp, Homo sapiens
ctgggcaacatagcaagacccccccaactcaaaaataaataattgagaaagctttcttttgaagtaatcttctgatgagatgacttaatccctgattgttaccagtccagcatccacagtcttggaagtgacctaggatttggtaactcgtttcctttgccatgtgagaatgaactcacttgataagggttcctgggaaccattttgaaggcacataacctgaacagctcactaaaaaatacctgtttctgtttgctctagaacctcccattccaacaacattctatcctttctgccactacatgcttgccactctgccctgcattttttttaatttttatttttttttatagacagagtctgtatatcttgcccagactggaatgcagtagctattcataggtgtgatgacagcacactacagcctggaactcctgggctcaagtgatcctcctgccttggcttacatcttgctttttcttctttttctgagacaagatgtcactctgtcgcccaggctggagtgcaatggcgcaatcactgctcactgcagcctcctcctcctgggctcaagtgatcttcccacctccacctcccgaacagccgggactacagggcgtacgccaccacgcctgggcaatttttgtatttttttgtagagacgaagtctcgctatgttgcccaggctgttctcgaaatcctgggctcaagcgatcctcctgcctcggcctcccaaagtgctaggattagaggcgtgagccactgcgcctcgccacaccctgcatttttaacacctcactggagcgctcatcctctccacctgctccgctattcaggagcggctctgcaccgtaggccatttcccacgaccagctgctgacaaccatatcatcaaactgctcttgttctcgcaccccttaaatgtccagccataatttctcagggaaaaaaatttatacattttcaacaaataggattcattctcaaatagtcacatacaacactcactctggaagaaactccctttcacatgccggtgtctcccctgcccagccacttcccagctttgaggttgggctcatctaggctggaaaaccaagggactgggccgtggttttcccacttccacttcccagtttgctttagtttattttcccccctctttggattcctgaggctaagatgaagagagtcacttgagccaactttttttcagtgtttggggggaaaagaatgtggtttaaaataggggctatttgtgacccagacctctctccttaaagccctctacatctattcccatcccgcctcctctctcctaacacctgaaagatgcatgaatataaagtcatatatcatgaactttattccaaatgagattgctaacttactgtgcaactttaggaaagccccttaacctgtctggggctcagttttcacacaaatccagagatccttgcagagaaaggtgcagttctcgttcaggcagcaggaggcgctgtctctggaggcttagattcattccccgccctccgcccgctcccgcccgcctctggtgcgcaggcgcggcttcgcggattggccgcgcgcgggggccgtcattcggtggcgggtcccggccgcggggctggcgggctgaggggagaaaagatggcggcggcggcggcagctggtgcggcctccgggctgccgggtccagtggcacaaggattaaaggaagcgttagtggatacgctcaccgggatcctatccccagtacaggaggtgcgggcggctgctgaagaacagattaaggtgctggaggtgacggagggtgagtgaggcgggaccgtcacgaggatggctcagccgcacaatccgctgaccgcagctccgtaccggctggggacatggggagcctgagccagttggagatgtgggcgccgagaagtggagcaggaagcgagagattgatgtcgctggtggttgtgaaagtccgagagaggagaggcgcgcctgaaggatagggtcgggggaggtggagcctgggagtgggggagggagggtggagacttgaaaagatagatggagcctagaatctgcaggggacggagatggagctagacttggtgctgttggaggaagtagcgcggtcggggaaatattttttgagtccaggaccaaagtctttcgctgttctcttcaccagctggattgtactgggataagagtagggggagctattagtaggagtggtgaagggtagggcctcgaaaaggcggctatcaaagcttaatagatgtcatcaaacaagtttctgcctctgagttataaacctagctagttgtttgtactcttcgtgttttcccagaaattaaatgcatatgcgattgcttcactgtcctgaccatacttaacgtttattttaaaaataatttgcccttattaaatacctttgtgcatttctgtttggaggaactgatcatcctttgtttttgattctttgtctccgtcctctattgtgtgctttaaagtgatggagaagaaaataaaccattggttcgagattttctatcaatttcctgccgcgtgagcctttcaccgggtccagtgtagctaccacaaagaacaatttaatccagaaacaggaggagaaatcttcttggtctttgtgtaagaaatatatctggtcagagcttcactggaactccaaatcctcagaatctcccaactcaggaatatttccaccaccacttaaatacttcatcagagatatgggaaattgtcccatcacacacccatcatattcaaaaccttcagttagctctcctactggacgtatttctattgaaaagaatttagaacaaatctctcttaaatttagtttacattctttcacagtatgaaagagctgttgaaaacaaattttcttctgttggaaatatgttaagatttgggatctaacaggctaaggaccattttgaaggcccacttgtaattgtcattgttttataaaatatcagatctatacaggagaaaccactggttaggagaaagctgtttgagaaccatgtataaactaatctaaaggaatttttagcggcttctaaataaaattcgtttatgcacattaatgtctgtcccccttgagtatgaggaaggaagagtgacaaagcaaaggaacctcatcacattcaagttgtcacctgaataaaacttgagagtctggtgcaaattcatcttaactaaaccttccctgagtggtacccagtgctcctggtgctccaaatgcatgtctggcacctttgtatgaaaggtggaccttgacttgtatttaaactgtcttacaacaactccacttttgctctgatcttttcaactttagccaaatgccatggtctcatctgggcaaagtcaattataaagttctcgaggtcttttttgaaactctgattcctcactttattcatcttttttttcttgagactgggtctcgctctatcgtgtagactttggagcagtgatgccatcatggctcactgcagcctcaaacttttggactcaagcgatcctcccacctaggcctcccaaagtgctgggattacaggcctcagccaccacacctggcatctttttgagcctttaagtgaaaaattaaatttcagaagtacagaattttgatctaagtcactgatgagaaatagatcgactgccccccgacccccataacttactggtaatgtgctgttgggcagactatgagaatgaaaagtatggaaaggcatcgatgcagtgacctgatattggtgatctagtaatagagcatatgactcaggttttggatttggttagagggttggatcagtctctggagtttagtgcaatgcttcggaccctttggaggctgcttgtgtcttttaagtagtctggctccttaatgtctatcaaaaaaactatagagatttacccccttctgtacctgttttaaggtggagaatggcggtccattccctcagatgcgg

SEQ ID NO: 1879360 - DNA, 4001 bp, Homo sapiens; identical to SEQ ID NO: 1028

SEQ ID NO: 1879361 - DNA, 4001 bp, Homo sapiens
attcccatttaaacagggatgggccggatgcagtagctcatgcctgtaatcccaacactttgggaggctgaggcaggaggactgcttgaggccaggagttcaagaccagcctgggcaacatggtgagaccccttgtctctataaaaaacacaaaaattagccaggtgtggtggcgcgcacctgtggtcccagctactcgggaggctgaggcaggaggattgcttgaacacaggggtagaggctgccatgttcgtgccactgcactccagcctgggtgacagagcatgaccctgtctcaaaaaacaataaataaaataaaacagggatgaactggagaaactgtgaaggtataggtgctgtcttgcttaggggtggggatgatttacggaaggctaacacaagggccttggttagtctaaagataatcacggcaactaggtggtggtaccaggaactagtccaccaaatcccaacctgcagccaaaaagtctcaactctcacctataaagggatccttctaaattctctagatgtatggaaatctttgacaggtcttctgaagcctagagtcatcgtataaacatagataaatagtgtagatattgcatagctatagattgatatgtacatataccatatacattagatatatgctatatatttacacttcttggcctttcggctttattatctatctccacaaagtaggacaagacaagcttgtttcccatttaagtttttctatctgtactgttttgcaaatccaccagagagttgcaggacactcctgctacagaaagatttctgccaggcaggctcagagacctgctctgttactgttctatttaataacacaaacacacaaatgggggcctttcttccccatgactttcatggcatggctgggggcagagctgggaggttttcacggcccatatatcctcaaactgctccatttccccccgatctcagttgccaccccactaactccggggtgatcagctccataccacaatcatctcctggtgatagagttccatggattttaaaagctgtaagaaaaactgagacagattcagaagagattctagtaaccccaaaccagcaattacaaatattttttaagtatttatatatacacatttttttttgagacagagtctcactgttgcccaggctggagggcagtggcaccatctcggctcactgcaacctccaactcccaggttcaaaccaatctcctgcctcagcctccgagtagctgggattacaggcacctgccaccacacttggctgatttttgtagttttagtagagatggggtttcaccatcttggccaggctagttttgaactcctgacctcgtgatccacccacctcagcctcccatagtgctggaattacaggcgtgagccactgtgcctggcctaatttttgtatttttagttagagacggggtttcactatgttggccaggctggtctcgaacttctgacctcaggtgatctgcccgccttggcctcccaaagtgctgggattaaaggagtgagccaccacacccagccacaagttttagatacttaaaatacttttaagtatctaaaattagcacctctctttaaaccttttactcaccctttcctgaccctttccttgtatcccccattccctttcgatttcttcaccatccctatttgcctccttttcctcactatctacccaccaagtcctgctctgctcccatcccacttaagattttcgtgtctattctgtatcacccttaatgatccactgaggctgtgagcttcctgtttacccacaagcgttcagcggatccagccatcctaccaagggttaaagatgctgtagtcctactgtgctgcctccgacccagttccttccaaaacaaagcaggatgacaaggtgactccacgagaactgcgtttgacctctgtgtgggttttctgtttccaaggccacagcagggtactctgaaaactctaaaccagaaggaaaggagacctagccttcagaactctgtgtgtatgtgcttacaggcaaaaaaaaaaaaaaaaaaaaaaaaaggaaccaatgaggttgtcagaaggggatactctgctgtaactggtgtttaccacgacccaccgggtgctgaggaggaagtggttgctataaccccaagggggaaacgctcgcttgaaacaggaaaatagaactcttacaactttccattagcagcgttcaagaagccggccacactgggaaacacttgcacaagcactccccagagtcctgagacgagtgtcaagacagtccaatcacgaagcacagatcaggacacagatacaggtccatgttttttccagaacgtctcagcactggaaaaactctcatgatcacttcccttacctccagcaggctgaacttgcaaggagctgtggggaggaggaaggaaggggaaaatggcaggatgacatattggaaagaacgctgggcccagtgagggtcagaagacctgggctttagtcccagttctgcgatttactagtggtggaactttgggcaaattacccaaccttcctgcttctcgatttctacttcctctataaaacagggatattgtttactgctctgctcacatccttgggctgctgtgagaatcctatggaatccttcataggatgaaactcgtatgtgctacgcaaatgcttgttatcaatgtaagattcgagtctgcataaagccttcttgagtcccagcctcttgctcctcaaacgcatcctctcggctacacttccacctgtgcacttcctcaacccaccttacttgtaattctgcccacacttctgtagaatttctgtagaagatcccatagtctggtcagaggagtataagcaagtctaaataaccaaagtggggggatctcaaccaaatcatttgactctgggctctgtgctcccacattctctcctctccagaggtgaagacttcatcctcaatggctaatttgcctgcttggaggctcagattggcccgtgttctgagtcatattttccatttagtaaaatgaacatctggctgctgtatgatgccttttgtgtaccatcacctaagccacaattacctgcaaggtaattcataccactacagcacggtgcaaaaacagggttggtttgggatggtgaaagtcagccatcttagtgtcaatcttgcatgcaaattctaatgaagaaaagccactaccagcaggtccacacacactcacaaagaactcataaattattttaatccaagcgttcaaagggatcctgggtcccaggaaccatcctgctgtttcatctcagtgagaggcaagatggttaaggaaaaacagctctagtttcctccatccccccaattcccctaccggtgtgaccttgactaggccacccaaccttctaaaaaccttggcttcctcatctgcaaaatagggataataacaagacatgcccttcccggctcccagggttattatggcaaccaagtgagaaaacagatgtgaaagtgctttgcaaaccacaaaacaccgtccaagtgtgaggtattgttatctagcaaaagtgccttgagaataacacagaaatctggaagtattttaattcgttaatggacttataccacaccttgacttaaaaaggacgtagggtaactgcctggaggaattctgaaataatttctaaataagtttatccaagcaagttgccaaaacaatccactgaattgggtagtaggcttttggataataggaaaactgcagatcgctgttctttattcttatttcaccttttgagctctaaaaagaactggaaggaccatattgtgttgtcttttacgcaagaactaaacagtctctttgtaccctccacaccctccctattctcacttccatcccctgagcacctgggaagcagctccttctccaaacctgcaaaccctcctcccagagcccaggctagcttgga

SEQ ID NO: 1879362 - DNA, 4001 bp, Homo sapiens
gagttgacaagtgtccaggacatggttgactcttaataaatggtaattattattcttataatagaaaggaaataggaagacactgattacttgtgtatttcatattcacaaaacattgtattaattatacagtgcttgtgagtgatgatcacaatataatctcttagcaaaatctctgatgccgtgtcatggaattattttttctaagtgttctacctgtattaacatttactattcacaataaacctgtgaggtactgtttatcaccctcattttacaaacaaagaaactgaggcacagagaggttaagtaatttgttcaagatcatataccagagtcaggactcaaatcctggaaatatgactgcagagcttatgcttttaaccactttattaaaagcctggaaataacatttatgtaagataacagccattcactcaacaaatataaaaggtgccacattctgtgctaggcactagtacctaaaaccttcaagacacagagcttatatcctttagggaacttacaatgtggtgactacaagcaatcatattacctcaaagttatgagtcaaaagccaggatatttctctggattaaagaacaaaggccccctttaaattactgccatttaataaccataagaattatggcacaaccataatttacttatagaactaatcaaggtttctacatctcctgaataaatgtgaataaaattgtcattgcacttcctccatctctatgttaagaacagatacaaaaattattttaatgtaattgttacaatgtatctaacatattatcaaaatgtgtcataaaaataatttctggtcattaagggtaccaaacgtttggtcaagaggtagatcaatgtcaaaggttaactcaaacaaaaagcaaagaaaactagataatgaagtcctacttagatatacatagataaaaacaaatatatgataaaaaacaaacaacaaatctatgaccaggtatatttagatttcttgcctctatttgtttggtcttttccttcctcagctctctcttatagtctcaatcactattttcctctctcttcaatgcatgcattataaatgtactcctaactgaaaatacttcatgggctttaaaaatagggttactctcatttactctggaaggatagaatagttatatgctattaaaaccaaaaaacaactgtagataatgtataatttatataatgtatatgaaacagaatgattatgtttaaataaaatgttactcttatttttaacccttttttgtttcaaagaactgtaccactgcatactattaaataattatgtaaattaaaattggaccaataatctaacagcagtagattctgccatttatcctttttaaagggaaacaggttgcttggaggccaagtgggttagtaaaaggaacggaataattttcagtttggcttgagtgaaggttattctgaagagcaatgactgttttttcatccttttgtaataaacaatggaaactaaacgacagttagcaacatggaaatcaaatgagaaaggtgtaaattatttttaaaaagacaccaagcatgtaactaagataaaactgttggtttggcaaataccatcagtctatacatgaatgacagttccctggctctggataacaaaagggactgctcccagtagatcacagagtgctcacctgattctgtctgtcttctggcaacccttggcatatggctgaaacttgcaggtgttctcccaagatctggttacttcctgtccctccttttaattgattgtctgcaattcactcagttttaaacgtgcatcctttatttatttgaagtttatttagcttgtcaagtgctgtgatgatgacagagctgttgtgggatctgtatttttttttttaaagagaaagcctgaaggtcccttgtagtaaggtttcaggcacactgatcgaatctctcatttgcttatgtacagaacacttttacatttgcttttaaatttcatttgttggcttgaaagttcttggagaaagaaaactgtagagaagcatctttaaaaattattgcctaataaatggcatttaatccagatcatgccttattgtggttaatatctaacattccaaacaccatattttcctccttgattcagtcattatggaatgacataatgattttcatagttaaaaaatgcatttgggattcatttcacctccttagagtctcagacttaactttattttttgtgcggcttattcaaacagtggttttccttatgaaatcatttaagtaggaaccatctggaaaggttactgtggaaacggcaggggctgggaggtggggctagagagcaagagatgccatgacaacctttttcgggtttcccaggaaacatgggttgctatggaaactgcatcagtcaggtccgaattagtaacttccgctggaaggggtgtctgccactttaatcttcttgtgatactgccgaagcttatctctcagatgcattaggaaattttttgtttctctcagcaacactgaaaacatctgtttctagactttgatagttgttggggctgggacatatgcacagaacttcacaggaatctgttagtctaatgctttagaaatgcttagcaagcccgaaagaattaaactaattagtcagatcaggacatcttgggcatttccctttattcaaagttgtagagacacttaaaattccgggaaaggggattcaaataggaatttaagtcaaaaaccaaataactcatggtgggtttacaagtcattattctagttagactcttcatccacatatctacagggtaggcaaccgaaatacatattcaataaataacgttgaaaggtccatcaaaccgaagcatcatttactacgaattgatgtgcttaggaaagaaacaactgcctttaaaattctgaggttaaacagttactctaactgttctttagtttcatttcctcccaggatgtactgctcttttttaaatagggcgtgtactagaaatgaagtttaacgtaagtctgttgtttacaatgttaagagagagagggtaagagggaaaaggagagctgagagaatgcagcccacttgcaaaacaggcacctgtttcagtatgaagcagcagggagagggagaatgaagtgtgctttccacttcttcaggtcctttccttgatgaatggtctggaaatgtataaaacaagggcataggcagaccaagggggcacgttccacacaatactgagcacagcatgtcacttgtatcacatattaaacatcggtgaatatctttttgatgttgacacaagagttgggattattgttcgtggtgcaggtggcagtggaattgcccgttttgaaaggggtctgggggaaagcgctatggttcatacccccctcttcgatcaccatatactccgacttactcagagtcgagttactccttgcttttcggagctcctcggctgaagaggagaggtgctggcaacttcccacgtgcatgtactgggattgctcttccccttctgtctcccggtggtagaagtaattgaagttggaaacaatcacgggaactggcaatgcgatggtcaagacaccggcgatggcacagagagatcccacaatcttgccccctatggtcactgggtgcatatcgccgtaacccactgttgtcatggttaccactgcccaccagaaggcatccgggatgctgctgaaacctgaagtggggtcgtctgcctcggcaaagtagaccgcgctggagaaaaggatgaccccaataaagaggaagaagatgagcaatcccagctcccgcatggacgccttcagcgtttgcccgaggatctgcagccccttggagtggcgcgacagcttgaagatgcggaagacccttaccaggcggatgaccctcaggatggccagagacatggcctgctgtccattgccctgtcgttcggccagctcgg

SEQ ID NO: 1879363 - DNA, 4001 bp, Homo sapiens
agtagatcacagagtgctcacctgattctgtctgtcttctggcaacccttggcatatggctgaaacttgcaggtgttctcccaagatctggttacttcctgtccctccttttaattgattgtctgcaattcactcagttttaaacgtgcatcctttatttatttgaagtttatttagcttgtcaagtgctgtgatgatgacagagctgttgtgggatctgtatttttttttttaaagagaaagcctgaaggtcccttgtagtaaggtttcaggcacactgatcgaatctctcatttgcttatgtacagaacacttttacatttgcttttaaatttcatttgttggcttgaaagttcttggagaaagaaaactgtagagaagcatctttaaaaattattgcctaataaatggcatttaatccagatcatgccttattgtggttaatatctaacattccaaacaccatattttcctccttgattcagtcattatggaatgacataatgattttcatagttaaaaaatgcatttgggattcatttcacctccttagagtctcagacttaactttattttttgtgcggcttattcaaacagtggttttccttatgaaatcatttaagtaggaaccatctggaaaggttactgtggaaacggcaggggctgggaggtggggctagagagcaagagatgccatgacaacctttttcgggtttcccaggaaacatgggttgctatggaaactgcatcagtcaggtccgaattagtaacttccgctggaaggggtgtctgccactttaatcttcttgtgatactgccgaagcttatctctcagatgcattaggaaattttttgtttctctcagcaacactgaaaacatctgtttctagactttgatagttgttggggctgggacatatgcacagaacttcacaggaatctgttagtctaatgctttagaaatgcttagcaagcccgaaagaattaaactaattagtcagatcaggacatcttgggcatttccctttattcaaagttgtagagacacttaaaattccgggaaaggggattcaaataggaatttaagtcaaaaaccaaataactcatggtgggtttacaagtcattattctagttagactcttcatccacatatctacagggtaggcaaccgaaatacatattcaataaataacgttgaaaggtccatcaaaccgaagcatcatttactacgaattgatgtgcttaggaaagaaacaactgcctttaaaattctgaggttaaacagttactctaactgttctttagtttcatttcctcccaggatgtactgctcttttttaaatagggcgtgtactagaaatgaagtttaacgtaagtctgttgtttacaatgttaagagagagagggtaagagggaaaaggagagctgagagaatgcagcccacttgcaaaacaggcacctgtttcagtatgaagcagcagggagagggagaatgaagtgtgctttccacttcttcaggtcctttccttgatgaatggtctggaaatgtataaaacaagggcataggcagaccaagggggcacgttccacacaatactgagcacagcatgtcacttgtatcacatattaaacatcggtgaatatctttttgatgttgacacaagagttgggattattgttcgtggtgcaggtggcagtggaattgcccgttttgaaaggggtctgggggaaagcgctatggttcatacccccctcttcgatcaccatatactccgacttactcagagtcgagttactccttgcttttcggagctcctcggctgaagaggagaggtgctggcaacttcccacgtgcatgtactgggattgctcttccccttctgtctcccggtggtagaagtaattgaagttggaaacaatcacgggaactggcaatgcgatggtcaagacaccggcgatggcacagagagatcccacaatcttgccccctatggtcactgggtgcatatcgccgtaacccactgttgtcatggttaccactgcccaccagaaggcatccgggatgctgctgaaacctgaagtggggtcgtctgcctcggcaaagtagaccgcgctggagaaaaggatgaccccaataaagaggaagaagatgagcaatcccagctcccgcatggacgccttcagcgtttgcccgaggatctgcagccccttggagtggcgcgacagcttgaagatgcggaagacccttaccaggcggatgaccctcaggatggccagagacatggcctgctgtccattgccctgtcgttcggccagctcggtacccagagtgataaaataaggaatgatggccacaatgtcgatcaggttcatgatgtttcgcgagaaggtggctttgctaggacaagcgaagaaccgcaccagcagttcgaaggagaaccagatgatgcacagcgtctccaccacgaagaagggatcggagaagctggaggctcctgcgcgggaccccgacgtgctgttgccggctgcttcgaatgagtcctgcgacgtcgaggcggggtagtccttctcgtcgcggaactccggcagcgtctccaggcagaagatgacaatggagatgaggatgaccagcacggacacgatggcgatgccccgggccggcccggagctctcggggtactcgaagagcagccacacctggcgctggaagtcgcggcggggcaagggccgctcctcctcccgcaggaagccctcgtcctcgcggaacttctccatggcctcctcgcccagctggtagaagcggatctcctcggagaaaatgtcgatgggcacgttgaccggccggcggatgcggcccccggactgatagtagtagaggatggcgtcgaagctgggccggttgcggtcgaagaagtactcgttgcggagcgggtcgaagtacctcatgcgccgcttggggtcgcccagcagcgtctcggggaactggcaaagggtcttcagctgcgtctcgaagcgcagcccggagatgttgatgaccacgcgctccccgcagcagtcctgctcgcccgcggccggcagtgagggcggcagcggctcgtagcggtcgcagccgccgccgccacagccgccttgaggcggggcccctccaccatcggccacctccggctccagcaggtggtccccgggcaccacggtcatgtcgggcggcagctcgcggcctgcggcgggctccgcgtagccgtggttcaccagcgtgtgggcaccgccgctgctcgctgggcgctgaggagggtgggcgcggtggcgggctgagggcggcggcggcgagcgcagaaggctgaggcgctcgtccatgcggcggggaagaggcggcagcggtgaggccaggtcgctcctcctcgcgctccccgccctttcgccgcctccgcccccgagccgagcccaccgcctgttgcagccaaagccgcgatgctctgtctgggtctggcgcggtcagccgggctcccgcacggggacgcctcctccctccttctcgcgctctccgccccctcccctgcggggcgcgcgcccgcctccgcgtccccttaggattcccgcccaccgcgcgggcgcgcgtcccgctctcgggggcagccgccgggcctgcatttcttgcagccctcaaggcccctcggtgtcagcgaaagagccctcatgttgtacctcggcgccccgcgggaatgcccacccagcagagccggcccacggggagtcaggctgccggcccgggcccctaggctccgcccgcttctggtcagcgcccctcgcccccggcccgcctggccgcgtcccagtcgccagggttttcggcccgtgggccgggagagctcccgccgcggccccgcgggcgccggccccctggcctccacacccctaggtacagcccggggagggcaggcgggcccagtgtccagggagggagtgcaggccaggcgggcgccctgggccagaggcaagcctg

SEQ ID NO: 1879364 - DNA, 4001 bp, Homo sapiens; identical to SEQ ID NO: 1052

SEQ ID NO: 1879365 - DNA, 4001 bp, Homo sapiens
gggctctcctatccttccccggctctgtgttttgagggaacaccaagacctcacacaaagaaatgatggggacaagtcccatagtgctaactgcagcatatcgactccctcagagaggtacacgtaacaggtgagcccagagttctagaataaaccttcagcaagggtgaggcattctctggaggcctcaggactgaggctgagctcccctctcccgagctggtcagtgcacagagctgggagtcctggccccatgcacctttacccagctgcctctctcaggctgggccctctgtttttgtcagctcttcctaggttcctatgcctgtgtcccaactttctgatcttcctcccttccctcttggcctcctttttccctggcagctttctccctttacccatctccccaggtgctcatcactatccacaagcaccgcagagtggaagcaccagttgggcagatttactaggatgagtggctgttttattcactgatgtatttccagtacccggaactgcttctggcatatcgtaggtattcaataagtgttcattgagttaataagtcaatcaggggtgggatactatgggttttgtccccttgcctactacactccctttgttacaattactgagctcagtcatcctgatgaacggaaagcaggggagagaccccaagggactttgccaggacacggaccagataggacttgaaagttattcattacattaatattctgtggttctttcttcctcactccagtttctggcctgtcccgggtcttctcttcccagtcacacttgggatatttcttttcactgcagcaaactcaaagacagctaaactctgaaatacaaacatcagtttcgaggagcagggactgggcacaaagggggtgccagtaaatgtgtgtttctgattaactcacctcccctgcgtgtcagtacagatcatcaaagatcattgtcattttggttttctggcctcattaataatgagacttttgcttgtaaaaatcccttgcattggcactgagcttttaacctttcctgagacacacataggcccttgtcttgtttttctcagttgagctaggtactgcctgatctggaactgggaaggtgcacaggtgtccagggcaggtgtgtcattcacctttcatttctgcctcaagatctctttacatcatccagacaggcatggaggctgcctgaagctgtaaaaaagaaaaaaaaacccaatggggattaatatgaagatgtaaaataggttctggacttaacaaaaacaaatgaatctggaaattgctcttgggatagggccagtaaagtcctgttggtgcctacgttttgggtatggcagcttctcaatcacttagcaaacaggttctcagaggcaggcactgtgggagctatcaagatgaaaaagcacaatgccgcctgcaggagctcagggttagggaggggagaggagacatatacacaggcaaagtcaaattgtaatgggtagaataagagtagaaacaggaaggggtcatgaggcaggacacgggcatttcctatgtggaccccagagcaatgacgagcaaaggctttaactaatgacttttcagggccacccacccactccacatccataaaacatttcgcgatgaacacagccagagctacggtttccttccatccggcacaagaagcgcttctctgcccaaggccaccccgtcctccattccatcgcggggactttggtggctgggacagaggcggagagcatcaagaccatgggtgtcttgggctacgttgggcctccgaggcgcaggatgcggggcggggtggtcagaaggccccaacacggtccctgggaaaggagagggcagcctgatcctcgcgacagcgtctctaccctctttcttccttggccttccgtcagccgcagtgaaacggcaacagtgcgaccagcttggcggggagggggcgagggacgaagcaagaagagccgggcggaggttagaggtcaggggtcgagagcgcttcggtgtcagcgggctgcggtgggaggagctgcgggcccgggggaggcgcggagcagggctgaggggggcgggaggggttgccggcggaagcgcgcaggggcggcgcgctgggctgggcactggcggcgaggaggtgacgcgcttggttggggctcggctccggggaggaagactgcgctcggtcgccagggcctgcagtgagtcggatcggccccgcgctgcgccgcgccccgcccaccccgccccgcgaagggcgcgtctgggcgaggcggggccccggaggaaaaggcgccactggggcgtggcggccgctgccagcgccggagggagaccatgagcccctagggccccagcccaccggcgccgaggcgccccctcccctatgccacctcgcgcccgccccctgccgcgcgcgagccaaggccggcgccccgcccggagatgggcagacgcgtagatggcgtggctcccagcgccgccagatcgcaggaaccaggcgccggggcgttgcgctgaggctccctctccgcgcggcccgggaagcctgcaggtgtccttggccgctcggccgccgcccccggtacaccttcgccagtgcccagagcccggctccccagagcggccccgccccccaggctcggcgccgcgcaggacgccccgtctgaggcacccccgccccagcgcggcccccgcagcgctgcgcccggtccggcgcagctcccagccgcggacgcaggacccgaggctcgctcctgcgggcgcgcttgttttccagctgccgcctcgccctgcgcagcccccgcccgcccggccgccgctctctgctctgccccgcctgccttcctcgcccggcgctggatttatgaatggggggaagaggccacatgccgccgccgccgcctcgtgttgaccgcaagcagcccgggcccacggagctccggctgccgtgagagtgtcggcctggccccggcagccgctcggaggacttgttgctgctgcgctgccgccgctgcggggaagccggctattccggggcttggtgcggtcttggagccggagggtggcccgtgtgagcgcgagcgccccggaccttcgcggtgcgcgtggactgtgcgcttcctcgtctttggtcggggtgaaggcgggggcgtgtccccggcccagagcgtttgtgtgtcccgtcgtagcgggggaccgcgtgtgtgcttgcttctacttccccgggtcctccctctctgcgcctccctctctccggagcttcctgccctaaccccaaccacctgtgtaccggagaaatccaactcctcccgctccgcgtcctagggggataggcaggggcaagcccaagccgcagagggggccgccaccgcctcctgcctcctcttcgtctcctccccctcccccgtctgacgctgcctcctcgggaagggtgtttggagggcagcggccgccccaagccggagccccgcagcgcttcttatgatcagctcggtgtgtgtctcctcctaccgcgggcgcaagtcggggaacaagcctccgtccaaaacatgtctgaaggaggagatggccaagggcgaggcgtcggagaagatcatcatcaacgtgggcggcacgcgacatgagacctaccgcagcaccctgcgcaccctaccgggaacccgcctcgcctggctggccgaccccgacggcgggggccggcccgagaccgatggcggcggtgtgggtagcagcggcagcagcggcggcgggggctgcgagttcttcttcgacaggcacccgggcgtcttcgcctacgtgctcaactactaccgcaccggcaagctgcactgccccgcggacgtgtgcgggccgctcttcgaagaggagctcaccttctggggcatcgacgagaccgacgtggaaccctgctgctggatgacctaccggcagcaccgcgacgccgaggaggcgctcgacatcttcgagagc

SEQ ID NO: 1879366 - DNA, 4001 bp, Homo sapiens
ccattagggaacttcaaagcacctggagaatctcactcacatttcctggggaccttctacatccccggcatcctgtcacagagtaaggtacctgccactctgtggcttcgtcagtcctgccgcttaagggctcacctgactgtgccctgtctccatcctggtctggccagctgctctcaccaccccctggggtccacttcatgaaactgagatccttaggcccatgggggaggttaagctgaggtcaaacccagactgaaacctcacaaccagagctccccttttgtgttctggagctccaaggcctgggctgcttctcaatcctgcagtgccccagaatgtccagttgggcagcctccagtcccatatattcccctcatggggacaagcctgccagcctccctcctgagtatgagttcccagtgtccgttatccgaaagctaactcatccccctcatcttccaaggtcagggaggcgtgttccagcaagtgcaacccagggtgactctgatcaccagcttgtaattacttttcacaccttggttacatcatgatggtccttgagctgagtctttgtcttatgctaatgaccacataccagcctggcctgagaaggctgtggaggggatcttccgatagcaaggaggctgctggatctctggccaaactgctgaaatttgggaagctttggggtacatatccttggggcataggtcagagtcagcatcctgttctctatatgggtctaggaggaccatatctctcaccttagaccttttccataaccccctgctgcacacctccaccccaggcaggtggcacactcaaatcagggtatgggagaaggtttataaaggggctgcctacagagatgtgggcagggtctacagaaaccacgagggatggctccactcaaaggaaagtaaagtggcactgtcaccatctaggctaactggatgaggggagggagtgggaccaaagcctaggagaagagaatcatagaaacggccccctcaagaggagctatggccttcaactatggggcagagccagtcccagatgacctgcagggaggcagccaagggagtaccccaacctcaccctcttttctccctccaggctcttgccaggacccccactggccaaacccagccagaagccaggatggagaaggatggcgagcagacctggacggagaccctccctgatgaatacccaagggactgcctccgcactctgcacctgccttgcaggggagagaagaggtaggatagcaggggtgttttcactgtccacagtaagtttggtgagggcatggatgtggggtggggagatgttttcagaagtttcagaacacacaatttggtctcagaagccttgagaccttgcactgtgtgtggccctggtcaagttgcttgccctctttggtccctgctcttctccctatagcagcattgctaattccacacagggcgactgtgatcattacagaggataacatgagtggaagctctctgcgtgctgtgcacagggcacttagtagatgtgcaataagcacaacctgaatctagaatggcagctggtggtcgcctggtagcctcggcctcccctccaaacccgggcttcctgcctgctgtctctctcagcctccctcaggccagacccccccttgcacatggtggatcctgagcctctgcccgacttggggtcagcgccaggaagcctgctgccagccccacctgccaaaggtgactgctggctagcactggcctgtcccagcatctggcagagcttacttatgagcactggttccaagccccaagtgactgcattgctaggtgtcaaggtgtgcaaaggagctgggggccagactggatggaggagggagggggacccagggaaagggacctaccttgtgagatcctgtcccctgtcctctgggcaagcagctaagcagggcaggaagagggggagggcctcttctgcctgagagaaaccagcagctgcctgtctaccttgttaactggagcacaattaaagcagttaggagtcgaggacgtctcatgtttattcatgtacctttgacacactgtctttctgtgtcggtcacagtccctgtgggtgctttgtggccactcctcctcctctaaccttctctgcctccacccagttcctggacactcgtcatgcgccttctcattgatttcatttacaaatagtaagtgaacatctgtaaaacgccttgcagtttacaaagcacttttcatattcgttactttgggtaagcctcacagcagccctgtatggtttctaggatcatcatcgcggtgttacagatgctctgggctccacagtccctgagagaaggtgcagccctgggcgtggggtcacagcgcgtgctgaggaggacagagatgtctgcaccattctgcttctgtgcagagggcacggggctggttttgctgacccaggtagcggggacaggacgaagtgttcctgtgggctgatggagtgagtgttgtcctcctcctctcctggctgagctccgaaggcttcttttgccagcatatgcagtacagccgggagaagtaaatacccgtcgcttatggggggtgttggcaaccctcagtcagaagaacagtgtggtgattgttgcctcctcagcaaatctatgcctctgacaaccgcttggcccagccctccaggggactccagctgtcttctcctctctgttcctgttaggggtacccagagtactcctaggcttgccccctttctcggtggaaggtcctccccagcgccaggtgaactcactggtccacaggtgctgcctctgggaggcatcctctgatccccctatctaaagagccccctccttgactctccatcttctaatagaatttttcttaatagtacatttaaccttagtaatatatgaatttcactttttttgcaatctagaatgaatgaatgatactagaccttaagaaagcttcaactcatgtttatgaacacctactgtgtaccaggcacatttacttgggttattaaaaaatttttctgattctcgcaataatgctgtgagatggtctgcagtgcccccattaggacaggaaactgatactcagaagagtgacgtgacttactggaggttgtcggctgccggttctacatctcagcgaaaggcaccttcaaacatgtggctgcccaagttagtgaactgagagtcacgtaggcctccttctcacccgtgcccaccaaaggcacacatggaaacaatcatccagtcttgtaaaccccactattagagtttttcttaactccatcaaatcccttctcccttgccatttccctgggcaaacccaccagcatctcttagggactgccttactttgacgcttcaaagtgtccagttctctcctctgtaaaaggtgagtaagttcaacctatcctgagccaaagtccctccaaaggcctatgagatagggtgacttgacatcatggttttgggggctgcattatgatttttgtggatcctttgctttcatggtcccatttctccataaaaactttttaaaaattagacttttaaatagcatgggaatgaagacaaatataatccagactaaattcattattatcatgttgattttttcttctgattaaaaaaaaagttaaaacattgtcatgggcccctaaaagtgttgtgggccctaagcacagtctctcctgtgcctgatggatgggtcagttctgttatccacaggtcagttttagcactgaaagtcccccatcccaggacaaccctcagtcccaggcaaaatggagtggttggtcactctcctacaaggccttccatgatctgactccccactgcctctctaacctcaatgcctactcttttcccttggccagttctgctctagacactcccctgcccccaggctggtcctggatcaaatgaggacactcctgcctcagggcctttgcacttatcctcc

SEQ ID NO: 1879367 - DNA, 4001 bp, Homo sapiens
caagaatttgtttgcctgggcccaggattggagggcttcacaccaataccctgtgtatacaagaatcagatttataatacttccccttttttgttacgtatgaacactataaaccaaattattttgaaaactggtgcatcaccttgtccttagcaataaaatgtgttgagcagaggattggctgtctgccccaaggagcccacgtggcccacgtcaggctggggggtgtatctagagtcataggctctggagcggggctgtgtattttaagacaaatcagtaaggcattccctaggaagttccagagagtgggtcctttgcttgtcaagctctgtattaggccaagtatggtgggtcatgggagcagggacacttctggctctgagcacctctttgttgtgcttgctctgccttagagacgggcaagatgaggtaacagaggaagcaccagaccaatgagtcctctcaacagagtatctctcactgctgccccatttgatacatctttgttgaactggcctaagttcatgccagcatctgtgctctatacaaattgtggaaccagtgggaaggatgggtgcattttaggtgcttgaaaagcaagggactcaacctccagtgggatcctcagattgctctccgagctgtctagttggtgagaagcttccctggaggaagacccaatctcctttggctggtagatccctgaggtcaaagtggacaaggatggggaaccacagagcagggaggggggcaatgaataggtgcaggacttgggtgccccggagctgcaccggctggcccttaaacagccaggcacttcctgtggcatggccctgtccaggtgcaggagaggcttaggtcagttcagctgctctggatgcttccttgtgtccctgggggttgagaggtggttgctacttggtatctcattgtggagaaagggaggtgcaggaggtgatcttttctatgtcagctccctcctggggcccagggagggaagttggcctttttttttctttgcccacactccacttggggattcccaggggatgtagcaagggaggctgggcagaaccaggccttagtggattggtgagagaacactaatccatacatctttggaagagaggaacacttcaccagcctttttacacaggatccctacctttctcgatgaccccactgcctccaggggtgggcgctgggtttaatcccagcagtttttactcaacagctgaccagttttccagaaactgcactttttttttttggtcaacctaataactcttaggaaactgcaactcaggtgatccaaatcacacagaccggcccgttctctcccctactggctgcctatgcagtcgggtcgacctcaagagaactggccccagccaaaagcggcacctcccggcctgccagtcccttcctgccttaggcagctcctcccagaagcctttttgtagggcaaactgccttccctttgtaaggtagggcctttggatccaaggttgcagtttaaagaccaccccgactttgttgaggaattaagttttaaattccgccccaggcggataacaccagggctcagccgcaggaatgaaaaaggagtgggagggctgcaaagtgtacgtggggcttggaggccttgtgccacgcgcggactaaaaatgttctacgagtctcttaacgctcacccccgtgcccccttacccaccagggcccacggaggtccgaagctttcggcctcagtgagcggaatgggtgcgctcacgacctggagggcgagatgagatgtccctcggcgtgaagtggccgtgactaccctagcactttgcgttccccgcgcgggcgacgaaacacgctctcgaggggagagagccgtgcgtcctctgggccgtgaagccaggggaagagggttcctctagacagctcgatgtgcccgggagagacacccacgctgaacctgcaagctggggtgctccaccagcgcgaacctctcgccccgcactcgccgcagcactgctctcgtggtaggcggggtgggcgggacggcaaatccgcggctcctgcgtctattgggctgctcggggcagcgcagctccgcattggccaggccctcgctccgcccggcttccgcgagcccattggtcgcaggcgcccgaccgggtcgcggccgcgcgctccgcccgccgctgcgtccccactatggcggcgcccatgcagcccagcgcgttgtgggctcccgccggggtcccccgcggctgtcgccgccgcctacgccgctgcctccgccttcctgccccgcgtcgggccgggcgccacctcccccctgcctccctctccgctgtggtaagggcctgcccagtgcgcttcggggcgcgatggctgaccgcgaataacggtcgccgctccgccccgcccctcccccgccggccgcgggtcccgggctgggcggggcgcggagcccgcgcgctagtgcccgggaaggcggggtcggggcacggcccagtcgtccttcgggctgggggcccagtacctggatgacctctcctgggtgggggccgccgagcctgggggaaaggccggccggacgcaggccaggaggtctgagatcatctccgtgtgaaaccccgcagcgctgcgcaccttggcgcagagcacggacaccgtcattcgggccctgctgtgggaaaaggaaagaaaagtccagggagcgcctgagcgggaatcggcagcgtttgggtagcggttgtcattgcttactgctctagcgggggccagaactggggtcagtttgatcggcaaagtacgcctctcttgcttcctttccttctggcactttcccccgttgtgtcctcggtgcttttgcttgcaagagaaaatatcttagtgaggagggcaggtttggttaggagagtgtcccatgaacattttggattcctttttacaacaatgtccatttttatgattcctcagtaagcctcatttatgtttccttcacgtatgaggaaggagtgaaacctgataactgaatgtaattaattgagggaaggaccagtgaaggcggctattacctcagaaagtaaaatactcaaacttttcagtggatgtactgtgaattatagatagctggacattaaggtaggaaaaaactcttattaggttactaaaagtaagatagtccccatgacaaattaggttgtttctaaggcagaattatcttgtagagatgatcactgaaatgtttggtgtactttcaagtcaacagaggattaaaaggaagctggcacagaaatttatagccaaatgatactttcaaataatctcttaaggcaatacagctcctcctatgattagagattcttaaggatattttgagatattaagtggtgaatctctccatttcgcgtgtctaactgtctaaccatggtttaataaaaataaaatgttaacgatgaaacaagacattcatgttctcagagactaacagactttgtatcaatcaatggaacgcctcttgagtacatattttatgcaaggcattgactgaggggaaactcaaaaccatttaagataagaaacttgctctaatgggcctataatatacttgagggaataaagcacacacatgacaatgataactgtgatatggtctctagaattccaagatggtaggtactctgagaaaccgagaaaaggagaaatccatgtgtttgaggaaggtttcacagggaagctgaggcttgaattgggtcatgaagagtgggtagccggctgtatgaaggggaagaagtgagcagatgagaaagtgaggatgacaaaggtgcaggggaacctgagatgctcatgggtggttccagggggtttcttagcagaaaaagcaggatatgaggttgcacaaaaggtaggttgatggcattaatccaagaggtacctttgtcctgtgtggtgcaaagagtaaacaagtaatagaatttacttcaaaggaagctgtagct

SEQ ID NO: 1879368 - DNA, 4001 bp, Homo sapiens; identical to SEQ ID NO: 1069

SEQ ID NO: 1879369 - DNA, 4001 bp, Homo sapiens
tttcagagacaaatcttgagtctcagattgaaatttaataagcatttgaagtgaagcagatagctctggtgataacgctttataggtttgcaacaaagcaaaacaaaacgaggcttagtgatgtgtcttggcactatttagataaagtccaggatgcaaacctgtggactggctgtcctgccatcctcaccaaaacccccaaccaggtaaagctgatcattccaaaggcaggtgcgatggcccatgcgtttcatcccacgatctgcacaggggaagtggaaccacaaaggaggagatgtgcctgttggatacgggcagagggtggttattgaggcagtagcactttgtcattcacagaattcaacatgaccaagggcttgcccattgtttttctgctcacttgatttgtaggcctcttcaaatgcttaatattctgtgtactcctttaactcctgtcaactaatttttcctcctccctaccccatcactccatcctctttctgtagtcttcaggttcccccatcttcccaccttcccccccttcagccattagtctggctctcacgagtatcatagatgtagagatcattgcagatggtgtctctagctctggtcagagtttctccaccaaacagcacagcaaagggcccgaccacagaacatgagtgatgccgtagtccatggggccccttctgggacccctgcccactgctcacaagccttgcaagctgttccatcaaatgaggagcaacaggtggttcctccttggggagaaagaaaggactgtccgaagagacctgggcatcacaattttagcctcttcccatcctaaacaagatgtgtgaggagctaataccttaattttcccatgactccaatgcccagctacttctggttcagctaagttgcaacctccaaagagcaatagctgatgacctggatggggtccaggagtttggagcagggccgcacagtgacctgagcgtgaggctgtgtggcagccttcttgcttgtagctgtggacatgcagaaattcagggctgagtgggttttctggaaaatgtaagtgccaccgcccttgccaaggatggatggagaagaggcatggggcagtgcggtaggtgggataagagggagggtaatactgtagagagctcagctagcttaaacatggtaggttcccctggaaggagggtgctagagtgaggaggtggataaattgcctgagaaatctgcttaggcttttgtttttcgagagtgtggatgagagtgaaaggttttgggcggagggtgccataccaataggtgcgggcgctggggtccagccttaatgtgtagatgcttccatagcgtcgctgagtgtggataccgccctcccggccagccacctgcagctctcggtcagagattcgggtgcaggtgtgactactgaggccggcgggggggcagtcaccaggggtccctgtccacgcctcccacacaccgcgctctgtgtccagtgcggtcactgtggccaagcggcgagacccgtcccagccgcccaccacgcagagccaacgcccgtccacgggtgccgcgtcgtggtgactgcgcggggggctgccccgggctcccaatcgtacggcctggcccctagctgggtcgaaaaccaccgtatcgctgctgggctctctcgctcctcctgctaggagaccacctacgagatagaaccgtccccgcagttcggtgcatgaatggaaagctctagccaaaagcgcgtcccgcgccactggcctccaggcccagcctgagcctgcggcccgacccgggggcacggccaccgccatgggccccggggagagggagggcggtggggtctgcggcttggaacgagcccctacatggcaggccaggcacctcgccttccgcgggcttccccgggaacctccccctaccggacgccagccggggttcccacctcaagtcccggctttctctccgtggtcgcccagcaaccactgcagcggctgcagcgcgaccgctgcaaaccgaaggtcgcaaagcagcagttaccgtggagacaggacacctgggtggctatcgggaaccgtatggtggtgccaccaaggctacgggagctgtatcaggtcaataaaaatcctgcaagattgttaacctcagaaagtcggaggacagtcgggtccttagaataaacccctgtgatctccgctgtgaactgatttgcgattttgacatttgaggtgcaggtgctgctccactagggccgggagggatcatttggcttcagggtttcttactcgggctaaccaccccagggatgagcaaggaaggagaagcaaaagtcagagggtggggaagtgaaagtggactgaccactggcccgagagacaggagacctgggttctagtcccaactatgcccctgaccctcaaaggcattgtttctctctaggccttctcagttttgtcattcatcaaataggctgttcgtttattcccaaaggcttgaaggtcccgattgattgggtgggagagtcctttcagctctggccactagagggtagcagaacccagtctctcaggtgacacacacacacacacacacacacacacacacacacacacagagagagagagagagagagagagagagagagagagagagagagagagatagagagagagagagaacccacgcagccttagaagggtgaagtgggggaagagtgagaaaatgagaaaaacagactcctacccttccctgatatcttttatttaagccagtttccagatattaactctgtcccccaggaccaagtgataactgaagaggcccagatgcaagctttctgctttcagctgaaggaggaaatacagacagaattttcctcccaacacagctggtgtggggcaaaaacaggatctgtgtcctctgggactgggctgtaagtgggaatgatgactgctacttgtggcctttggtttctacacatcaccttgctccccatcatacctgagatactgagaccatagaaagtggccaggcaggagaatcacttgaggccaggagttcaggagttcaagaccagcctgggtaacatagtgagaccctggcgaaagaaagaaagaaaaaaagaaaagaaataaagaaaggaagaaaggagacagtggccagggctgcagtgaggatgggcatgtaatgcagggtctgatagcacagcagggctttcccctcctcttcccaactcttggtcctcagagaacacagcatggggatggcatgggcaggaaaggcacagttacagagattggaagattaccaggacctgttccccacctgtaccttaaagccaagattcaacaatagctttgaaagtctctgccctcccaactatagctttccctgagtatgacaggcagtattctcagttttccaaaatcatggtaagaatctctaaaaaatcactaacttttactgtccttggctgaaatttaaaagtcagtcttttccctcaggcttctttctcactggctaacctcccaacagctggattcagatctgtcatactcctaggattaggcaagggcttgcctcaggggtggggcaattttgcttaaaccttattggcctatatgtccattttaggctcttgcttttgcctaagtcttggctgttctgttagacttactttctgcctttcctggatagaaatgggaactccccaccccacgggcctttccagctcctctctcccagcttcctctctgactctgagtccttagcagtaggcatcttagttagacatagagcttgaacctcacatactccttggctgtaccctctccagttctgtacctagatgcttccagttcctcctaatagctggaagcatctgtccattgctttgccatcccaagaccctgggagaggaactgcctaggactcctaccttcttaggttagtttgaaccaaatccatattttggaggagggagaaaagaa

SEQ ID NO: 1879370 - DNA, 4001 bp, Homo sapiens
tactaaaagcacaaaaattagccacgtgtggtggtgcatgcctgtaatcccagctactcgggaggctgaggcagaagaatcgcttgaaccaggaggcagaggttgcagtgagctgagacggcgccactgcactccagcctgggcgatagagcaagactctgtctcaaaaaaataaagaaataaacaaactggaatttcaaggaagctgcaagcttcactatgacagctgcggaataaaaagggactctgaatgccagtgcagtgtattggactttggttcaataccaaagtctggtatcttccgatctgggagctgggccccagattggaaggtaggctgtgagtaaaaagctggaggtgacagagttggaagaaacttagtgcaaggaatgatccacagagggggtgaggcttaccaatttgagtaaattagcaccactttttcgggaggcaatttgtaagtatgtatcaagagtcttaaaaaatgatcatgtcctttaacccagtcattccatttctagtaacttataaggaaattttaaaactgcacagatatttagctatgaggatattcaaccagcattgtaatagctaaaacaaaaaacaaacaaaagcaaaaaaaaaaaaaaaagtccaagtacagtggctcacctgcaatctcagcgctttgggaagccaacgagggagggtcacttgagactgggctacacactgagactccatctctacaattttttttttaattagctaggtggggtggcgggtccctgtagtcccagcttcttgggaggctgaggtgggaagatcgcttgaacctagaaggctgaggctggactaagccatgatagtgccactgcactccaaccttaatccacaattaagatacagctataaaatggaatattttgcaactactacaaaggatgtaagtgaaaacttgacatggaaagacatttattctaaactctgtaaagaaggccagctacagaattgtacctccagtatgtatgtcaattttgcttacaaaacaaacaaaacaaaaaaaaccatgctaggcgtggtgactcagcctgtaatcacattttgggaggctggagtgggaggatctgttgaagcaaggagtttaagaccagcctggacaacacagcgagacccccatctctacaaaaaaacgtaaaaattagccagacatgatggctcgaggctgtggtcctagccagtcgagaggctgagaggtgaggatagcttgaacccaggacgtccgggttgcaatgagctataatcgttctactgcactacagcctgggtaacagagcaagaccctgtcccccaaaaaatttattttaaaaaggcaaacgaaaaaacattaaaagtatacatttacaaagacaactatctgaaaggatattctccaagaagttaaaagtcgtctttggacagtggggccatagatgttttcctatttttaccagctttataattaatttttaaaagttattttcaagtagtcctacccagtcttccttacgagttaggactcaaatgccactctcttcccctaaactgtcctgagtcccctcaccataataagcaccaatgtcttcgttaaaatcccgacactgccaacactcagctagggggttgaaccttgctccatctcgtcctttagtctctgtgtgcgtctttccccctacaagcctactgaccccctccaagaggtcccgtgtcttccccgtacttgccccacaggctagatcagaccctgtctgacccctgggttattgtaaaacttaagatctgtcccctaggtctcggagtcggttgaactagggtccaaaggttaaaaaacactgacacaaaatgccaggccacgaactgaagcactgaggcccggctgcagacctctcccgagaggggaataatccgtgccggccggttccgccatggagccaggtgcaggtcacctcgacggtcaccgcgcggggagcccaagccttcgtcaggctctgtgcgacggaagcgcagtgatgttttccagtaaagaacgcggacgttgcaccgtgatcaattttgtccctttggaggcgccgttacggtccacgccccgctcgcgtcaagtgactgaggcctgtggtggagaaggacgtgccgtgccgctgggttctgagccggagtggtcggtgggtgggatggaggcgaccttggagcagcacttggaagacacgtgagtagtgcgcgcctcttcggcctgtcctgaggtcgcggcggaggaacttgagcggaacgaaaggcgcgagctgcgagtaccggccagggcgtctcggggacgtcgcgcgacccccgggacacgggatgagggggctaaactctacccaaggccgcagggcggggcgggtgacccggaattaaaatcctgccgggcaccgcacattccctcttgagcgagtctcccgggcccaggccacgggccaaaactgcctatctcgttgttgaaatcgtctttacggtcagggtggttctgcggaagttttagaaaacgggttgacttttgggaagattgtgccagttgtgcagtgtcgagccctgcagtgtaaacaaacacgtatctcctgtgtgtaacctatcagttacttggtgcttaagtagataaaaatcattctttaaatttttcgaacaagcagtatctatgtaaaattcaaaactggaaaagtgtaaagggtacagagagacacctgcctcccaccgatgtccctcagcttccacttaccctccaggaggtaacttgagtttttcaacagttgttttaaatgagttagtactaaaacatgcgtttttaacaagagtgaaaacatcctagatgtttttcacgcagtgtttgtggccctccagaactcagcagtacttagcacatttttttctctcatcagagagaaactggtttatttcaattaattaactagaacttaaattttttgtgttctttttttgagacggaatttcgctcgtcttccaggctggagtgcaatggcgtgatctcggctcactgcaacctccgcctcccaggttcaagcgattctcttgcctcagcctcccgagtagctgggattacagtcatgcgccaccacgcctggctaattttgtatttttagtagagacggggtttctccatgttggtcaggctggtcttgaactcccgacctcaggtgatccgcccacctgggcctcccaaagtgctgggattacaggcgtgagcaaccgcgcccggccctagaacttaatttttttcttagggtgtgacaatgaaaaaagattgagaaatattgatttaaagcacttaatgcctggtacatagaacacctgtatgtttgtacttatttaaatcctttttctcccattatgtacttcaactctcttgtgttcctggaattagaatgaagaatccctccattgttggagtcctgtgcacagattcacaaggacttaatctgggttgtaagtatctctcataccaactatttgatgaattgcatagcatctgatgttgacttggagcctagcgtgctattattttctagcttttatttcctgttaccttgccaggtctttctgagtttgagagtagagattatctccaaataacagtatcagaaaattgaaacttttcagttggtatttatgaaggaagatgttccttgcagtcctataacaataaatagttgtctctactaaaaataatatttgaatcattttaaattgagtctagaaaggacttcagataataacagctgttaaccatttattgaatgtatgccatatgctgagactgctaggctctaaatacattatctttaattttcacaacaacccggcaaggtgggtggtgtacaattttgaagctcaactacactaaacaagaagtgaataggcagtaaaatgggatttcagtgttggacatacctggtctcaatcccttgctctttcatttgttagtagtgtgaacg

SEQ ID NO: 1879371 - DNA, 4001 bp, Homo sapiens; identical to SEQ ID NO: 1150

SEQ ID NO: 1879372 - DNA, 4001 bp, Homo sapiens
ctgccctgtccctacattctccacaatacagtgacacaggctgtgtaacaggcttttctgacattttagatggaagggaaaatgtatatgaaattgaaatgtggggagggaagaaccttaacaccaaacgctaaatgaatcattcccagaatcctaggaaaatgaaaagtgctaaccccattaaaagtgcattgaagtggctagctttgctttctgcttcaggattcatcgttttccaagggccccacctttaatccttcagagtgattctccaccctgagacccgcttacagggcacagttatacctccctcccagtgactcacaatgattcagacgtagtgctggtctcagacacaatcctgcctgaatctatataaagaaagagaaaaatctccctcactccacaacagcatactatgccaagatttctcctgcttccaacgtgcagagtgtatttgtttgttttcaaatcttatgctttgttctgtttctgcagtttctagagcacagctggggacctggtacgtaaaaaaccggccttacctcagtgccttctccaacagcagagtcattgacccacccctatcccagctatacaaggacccatgatcttgagattttcttgaccttgggccaaatcaaattccaaggcagggctctagtctcagcaataggaagagaattagtctagagactgatttcttcttgtcaagagcaaactccttgccagcgaggtgttttattttttcaatttcaatgactcgtctgcctcccctacaaatcttggagctccttgtgtcgaggactgtatcttaatcatctctggatctcctctcgaagtgatgtctgtgctacctccagaaagagcccatttccattttgagcagtttccaactcaaatagacatttgaaaccacaaaaccaataccccagattttgcttcctgtttatccctgtgatgagaagtccctaaaatgagcaaactgctgttgaaaggcattcccaatcaacctcattatgcagtgtttagccttctaacacactgtcattcccacggcatccaaagtcctcattcctataaatgtcactatttacagcagggtcaatcctgccacccagcaaaggtgttctccatcccatggccaaacaatgaagtggagccctggctggagaaacaggattgagctaattgcatgtcacacagacacactggatttcacaggcttgtgttctacagatggggcgatgaggccaattctattgcatgcatgctgtttaaatctctacccagtcaatattcagggtggcagatggaagaaattcttaaaggctctatttctgttcttcgacattcaaagaaatactgtgctaccacctcttaaaaataattggttaagtaccaagttattttcattgccacagtcataaataaagaagtgctagaccacaatgtttatatctatagtagttgataatcttacatgcaagaaaaatgattgttgatgtttaggaggttgtttttcttgctttttttcctcccttcctttcctcccctacccctacctcccagccaagaaaagtcttgttgattagagtaacaagaaggggctgatttggaagtaaaattaaacttgactctttcctgaagcaagaacgtaatctcaagactaaaataagaaagtgcctaaccaacttggcattttattctgaggaagattcccgatagaaacttggatggaagaaaatgaaagggaagccaattagcctgtgttaagcaatgctaacttttaacaagcttgctcaagaagaaatgaacctgttaagagggtcatccagggcttccttgccgcctcggtgcacagctcaatcatgcttccttcttgttcattttgacaaagcaggtgagtgatgagcaggaaaaaattatgaggaggtgttggagcaactcgctaatcagcactgctacaagatcgccagcatttacaggaccgcattcactgagaaatgatggctgctatgaatgttctcgtttgtgggcgtcacctaaacacaaccctgcctaatgaatcaatctctggagagccagagggggctattctaggtactgcagatgtggatgaggacagctctcctcatttcctggcaacaggagactggtgtgacaactctaattcctggagagccattggtaaaatcctccttgggttcaagagttagctaaaaatatgtggaggggaaaggatgagtttgtccttttttttttttttttttttttttttttttagtttattgctactgggtttttttaaatttgtctcttgaaggagaatggattattaatgttcattactgttctgattaggaggcagcctttttcccttcccagattaatgttgggcaacccttcaaattggcagagagaagggtaactccacaacctgtatgaacagggatggctttgctgctgtgaagaacatgttgctctcacttgcattactagaaaagaaaggtgagatctggtctaagaagggctgaggcagaaatttaaaaataaatatgcattaattcactccgagaaaagtaacaggcaaggcaagggttaaaaagaaaagaagcaagttttcctctgcttagcagctcacttcaaggacagttataagataaggctgtccgaaaagccaaggccaaaggaatgggctccagacacccactccttcctccagagcaaggttgaaaggaaaaaaaagaaagacaaattcctttactgttactcctttccctggcttcttaagcataactatgttttacaaatgtctgtatttagctagttcttgtttttcttttgtctcagctacaaggccaccagctatgcaaggccacaagttatgcactatatggttaactgcctttgttttgcttttgtaagcccgcttataaaaaccccgctctgtctttgttcaatgctcagctttttggatgtgaatccactgagccggtgcatatcttaaaataaatatcctcctgttctgccatatcggtctctccattcctcagtttacctcaacggggcaacgttagggagagtgtcctaagcagaagatccaggatccaattctacctctgccctggcaggctcccgtggggcctcagcttcctcatctgtaaaatgagcactagaatgatctgagccagaaactatgcaatggggaagcttaaagacattacgttaagtgaaataagccagtcagaaaaggacaaatactgtatgattccatttacatgagctacctggagtagtcggattcacagagatagaaagcagaatggtgttgccggagctggagactgtggggaatggggagttactgtttaatgggtacagaatatccattttggagaatgaaaaaagttctaagatggatggtggtgatggctgcacagcagcatgtatgtgcttagtgccactgaactgtacccttaaaaatggttacaatggtaaattttgttatgtatattttaccactatttttttgagacggagtttccctcttgttgcccaggctggagtgcaatggtgtgatctcggctcaccgcaacctccgcttcccaggttcaagtgattctcctgcctcagcctcctgagtagctgggattacaggcatgcaccaccatgcccggctaattttgtatttttaatagagatggggtttctccatgttggccaggctggtctcaaactcccgacctcaggtgatccgcctgcctcagcctcccaaagtgctgggattataggcgtgagccactgtgcctggcctttcacaatatatattataaaataaactaagcaactatccacaacattcacccaaagtatcaggagtctcaaattcaagcacccatgggggtcaggccatttgtatgagtgagcccacggtcttgcctagcgtacagaggaggtagtagctcccagcccagccaaaccatccatgcaggaatgtg

SEQ ID NO: 1879373 - DNA, 4001 bp, Homo sapiens
ggtgggaggatcacttgagggaaaccctgtctcaaagtggcggggctggggggagactcaggcagaattgtgaagatattcaattgctcctgactttatcaataatctaacatttcaacctaacattgatatctattttatgcaaagcattacactatgcactggagactgtataagacaagttccttttctcaaactacagtcgagttggatagataaaacacacaacacataccaaaagacagctataaatccaaggcagtgtatgtcaagggtaaattcacctattcagattggatcttgagaagtgcatcaggcttggaaaatgggtaaggaggagagaaaagcaacagtgaatcagaacatgagttcccagttatgggacttgtaatgaattcctcaattaaaacaaaaaataatgaaaacaaaagccagggaggagaaagcccacgttaatgacactaaaatatatctttccaaacaaatgtggataaaagccaagtagagaagatgagaactttgaggtccctaacagaaaataaacagtaagcagccagccattccaagtggctgacatgactttgtttaactttatttgtatttctggctggtgtgtttacagccaataggtcaaactatcagtcagtgtagggccctgagaagtcgggtatttaagagcatctaataggcacagaattgtgctccatactgcttaaactgttccctaagtgtccaatttggagaaaacacccacacgcaggataactggcgagtgacgcggagtggctgcgagtccaagttatcactaacggatggggagcttgggctgggcacagtccagcgtactgaacccttcccccaccgtttcacctgcatacagaggtgtgtactgtcaaaaagcagcgcctccaagtctcttctggcactgtctggacttggatccgaggcagacgaggaagctgagaaaaccctggcgttgaccccgtggacctgggcgccccgggaaggccagcgcttggtccaggcaggcggggcctgtgcggtgaccaccctggtcctgaaaagtcccagccccgagcgccctccctcctagacctggaggcctggaacagccaggtggacgtcggcccacctttcttttctttccttcccattttcctaccacctcccaccccactccgccttccgggcaaaggcagccagatccacccaggacacattctttgtccttatccctctgtgctcgtcccacagcaagccagtcgcggtccaaggctccagaggctgtgcaggaggccgagctgggtggcgatcagcggcgggtccctgtccaaaacccagcagagccgccagggacgccccagacacagaaggcggggcgcggggagggtggggagaccacagcagtgaggcgcgcgagccgggaagtgaacgaggactgactcctgtcgcttcccgtagccgcccacggacgccagagccgggaaccctgacggcacttagctgctgacaaacaacctgctccgtggagcgcctgaaacaccagtctttgggtgagtcgcgcgacccccggcctcgggtggcggggcagtcgctagaggcgtggctgctctgagggtctcgccagtggaggatggcattcggatgtcacggctcctaaatcaccatttgatgggtgggacagtgtccagtccaccccgacccgccggtcctcaccgcggcagagccggggctgggtggcggggacgctgcctctgcaggcgaggcgctccggggcataagggattatcaggagtcgcggcctttcttggacatccctggctggggtcaggctgtttgccctggggtgtctcctcgctgcaaacccaccccacctgggctgctttctcacctgttccctcctagcctgaggccgagcgccacctccaagtggaggaatctggggaagtttccttcccggaatttgtagtgacagtggagtgacctccattgcgttccctgcctctaacacgctctttaggatgccgagtcatttgactgcagtgttaaacattgcaaagcgcaagtcatgtgacttcctttgaccgtacgtgaaacttaagtgatggctgcttgtgatgcatacgaagtgttcatgctggcgggacctgtccctggggatacttcgggggttgcgtgatttaatgcaagcagatggcttaaattgggtcactggcttgttattatacatgtgtatggcaactcggcatccattctttttgctcttgttcttacttcctgaattgagtcacggagccagagttttgaggttttgactaacgaattaagttaatgacatggggctatatttaggtggtaaaccaagagggatacagttttttttcttaataaagaaaaagtgatagatttgatcggtgtgtattgttggtgtgcagtataatgacagaattgctggaagtaaaatacaggaagctctggtttcatttcccctttagttctgcttaaagtcgagtttttcctggagctattaaatgtagtgtagtgtccatgagtgcttttatcttaaaaaatgtggctgatgctttccaacactcccctgccctgtgattattatttttttaagcaacagagaaaaccgtatcttaatagtattaaaagtattggatttttccctactttgatttgtttaaattggaggaggaagagcaattctttctattcacaataataatagctaacatagcgcttactctttcgctgttttattaactcaatcctcagaacaaaccaatgatgtgaatactgtaattctcattttatggaaatgaaaatctaaatgaatacctctggtaattgtacgggactgtttgattagtatttaccattaattaattaaatttttttttttttttgagatggagtctcgttctgttgcccaggctggagtgcagtggcacaatctcggctcacttcaacctccgtctcccaggttcaagcaattctcctgtctcagcctcctgagtagctgggactacaggtgcatgccactacgtctggctaatttttgtatttttagtagggatgggatttcaccatattggtcaggctggtctctaactcctgaacctcaggtgatccacccgccttggcctcccaaagtgctgggattacaggtgtgagccaccatgcctggcctattttagtatttttaataataaattccatgttagaaattttctactgatgtattttttaagtcaatatttcctacactcacaatccaaaattatttagtatatgagcacactggtaagaatgggaggcagatcgttgattgtaataatattctattatttggtaaatatcagtaacataatatataatttaaattttaaaataggatatgaagaaaaatgctacatgcttacttttcttttcctctatttttactttacacagggccagtgcctcagtttcaatccaggtaacctttaaatgaaacttgcctaaaatcttaggtcatacacagaagagactccaatcgacaagaagctggaaaagaatgatgttgtccttaaacaacctacagaatatcatctataacccggtaactgatttctataagataactttttacctatgccaggacagatccaatagaatattaattatccattgggagacagggcaagaataaaagccagtgaacatatttaaagcacctactatgtaatagagatggtggtgggtgctgattacaaaacagctcttgtcctctagtggaggaagaagtcacaatgataatatgacgtgatgaaacagtgttatgaacagggaacgtctgggtagagtggagggaatgccaacttttggtgatgggaggaggctcagctaatcataaattgtagtttttaaaggaaaatggatttcttactctacaagtttttcattttcttttttaattagagctgtccatgagaagttaatgtctcgatctttcc

SEQ ID NO: 1879374 - DNA, 4001 bp, Homo sapiens
tggaaggtcttctgcggagggggaaagggaagagtactcaactggcgatcagagacctggtttccagtgcagctctgtcaaatcgattcacttctcttgagccccagtattcccaagaggaataccatatctttgcccatctcactgcgttgtggggatcaatgaacacaaccaactgtggatgtgcttggggaaagcctggcacatttgtatacctggaaggcatgatcgttcccacagggagcgtgtggctcccgcagagggccctggtcatttgggatgacaggtatagggaaaaggctaactcatggccatttgacaatggagtggagccttcatcttcctgctccctttaaagagcatgagctccccccaccatgttttttcataaggggaatggggggcaggcctcagaagggatggggtgttgaagtctagtctggggaggccttatttagggattggtgcagaggcccaggtggaaatagaaaaggaagtttgtgggacagaggatggaacaagttgcctgccaggacaacgatgccctgggaggactctagttcagcccagaggtcagctgagccctagagggcagcctcctctgagaacacagggcccgtgaggccttggggacagctcatgggactaatactcaccttttaggcttcttggcaggattgggaaagtcaatctcatctgggctgttgaagtcaacacctagaacatactggattgttaagctcatttctgttgggtgcaggtgggtccctgggctgacctatcattggtttctctgggaataatttctcaaagactaaaactgctcacctctgttggagagagaaattctttcaagtggcaaagattccattagatccccttaatgaaattctttaagaaaaaagaaggttcatttgccttaatcaagtcaattctttgtccccagtgaagagcttattgaatacagacagaaaccaagtcctttgatattgaacctctcttccagatagaccagaaggattttgtacagatgtctaagagtggtcctcagcttccctgaccatatgggcctgcttgcttcccaatcaactaaaccaagccctttctcagcttgaaagctttcagggtaaatgttgtcagcatgtagtttccatttgtgatgtggagacatctgacccacccagccttaggcattcatcctcctcagtgtagccagagtattagtacacgagccacaagggaccaacgagctcaccaaacatttgtccatccttctgggacctgggaatttagtctttgcaggtgtttcttgtttttctccttggcctgggttggcctctggatatcaggctgccatattggtgtgtctgacccatgcttggctgcaaggcagctgccatccttgggcatctttcctggtcatgtgtgttcctaggttgtgaagagcaggggaccatcagagtcctggcagctgacaataaatctccgttcttttgtccacagaggatcaaattctctcagaacttggccacaccaataggatttatggcaacgtgggggacgttacaggcggacagttaatgaatgggagcttctccatggacgggacaggacaatcctatcaggacttgagggatgggagcccctatggaatcccccagtctccatcctccatatcgtccctgccatcccacgctcctttgctcaatgggctggattacacggtggacagtaatttgggcatcattgcgcatgcagggcagggagtaagccagacgctgagagccatggctgggggacccacctctgacatctccacaggaagcagtgtaggctatcccgactttccaactagcccaggctcttggctcgatgaaatggatcatcctcctttttaaacttctctcctccccaccctacctgcccccctggcttgagagaatatcttcaaggatcaaaagagacttgccttttaaggatcgaaagtacgccaatgtgaatttccattattttcaatggaagtcctccgctgattcctagaaggctgtgagaccacactagggcattgtttccctggggaagcagtgggagagcagactcatctcagaacacagcacagggggtaatggcctagagctctagggacactggcttgttgggtctctcccctgctgttctgcttaggggcttggctgctcagtgctttggtagcacaaggtgactgtgataggcccccttggcctttgggaactttgctccaactggtgtgtctcacacaatgcctcccaaaacactgctctcaccagaactgagactcctaaggtagaggcctcacagcccttgagtaaaataaaagtgatttctggaccatccttattgaaccctatatttcaaaatgaaaagatcagttattaaaggtcagtgaacactttgatggccagtttgatattaaaaacatgccccctccttttttatttttgctgtgaagatatgaattctttcctacaaaccagagaatatgaacctgttttggtttttaagtgtcccatctatatcattgactctgatggcaagaggtggttttcattgcaggtgactgaggctgagctgagtagccctggaccaccgctgcagattgcctgagtcgtccccttggtgcacagtgtgccttcttcaattgcttgtatcatttattccacaagacaggctgtgggctgtaaaatgagcaaaactaaaatgtggggagaacaaaatgacaatcaatcagtgaacatttgtagacacatttggattccaaacctgcagtctgttcagccatatcggctgatgccagtcttccagagttccccatcccttgtagggtgaaatatttggagtctgttttgaaggagttggtttagatgagcttgcaagtctacccctctgaaagctttctctgctgtcctagctgactcaattggaggacagttttggtcatttccaggaaccagcaatttttttttggcctaccttggttgggaagagtaatttagggagcagccctaaaattgtccaaagggttctaagtggttcttgggctgcatctctctggattgctggctggacacctgccatgccttgggctgcagtcccatggtcagaaagccagaactctctggccagtggtggtgcagggactccccgttgtgcaggtttgcagtagcaaatcactaagcctgaggccagagcaaggccaacccccgctttacgagttgccactcctgcgacagactgcactgctgtgggaaacgctgtcctgaatggtgctgcagctcccacccaccttgtgcacccatctaccatcaggaagctctccatgtgcaaactggaatttagccagctggaatttattcctgtccctctgggaagctgtgtttgcttcttctggcctcccattctcttaaatgagatcagcagagtaggaaagggtgagaaggcattgcctatcacatgaagtgatggggccagagaccctaaggacccttccttctacgaatggttggtcaccttttgaggactgcaaagacttaggcatgtcataggcagactaaaggaagaatacacagttcctcttggactgctacatcttttgtaagcccttttccaggactaaactaagttcaattaagtaagttctttaaaacagtaaattccgggatcagccttcgggccctcttctctgaccaattttatagcgtaccctcgttttttggtgtgctgcagtggtcatgatttttgcttgagaagtctgcaaacatagacacttctcttgaggttccatgtttatggatgatgttgtgttaatcctagccaattctgtgctattgggaattctccaatcatgaacactggggtggggaggaagacacaaatgccatgtgaggaaaggaaaatgcagtcgtctttttggaggatggctttttaaatacacccttcttagcaggctgcttaaaatacacagg

SEQ ID NO: 1879375 - DNA, 4001 bp, Homo sapiens
gacaataaacgtctacatggagaccaacaggtgagtttttctgccccttctttcataacaccgttcttccctagtgaagtccacacacatccttacatggcagctgtgggtatatcaactggtctgaccccttttagtcacagagcctgaagtctctgctagtacctgctgagcacagggtcatgggtgagaatgggcaagtctttttctttctctggttcctgaacttcccaggctctctcacttctggatcctgaatacccaaaaaccaagcttccttcccagaaccaacacctcctcctcattagaaagatacctttgttctgtgcttactttataaagtcttgctctttccctatccactgccttgtgtcagtatgtgtgtgtcttggggccggtggaaaggtgaacagaagccagtagagagtaaccagcaccagcttcacaggaatggcatgaccttgatacgatagcggcagttttcccttaacatccctgccccctaaagacttcagatcatatgtcacactcttaagtaacagcgatttgtctttcacggttttaatcatattgattaaaagcatttgtcttctccagaacatcacattaagtcatcaaaaaatataaaccttaaaaagatgtaattattggaactgaaaaacataaaaggtgagctttggaaatatctttgagcaatttattcgttatgaacacatgtaatctgttggaacaaagttctaggacaatccaggtcatccttcaatatttgcagaaaacatcacaaagaaaacttgatacttatacttagttggaaactttatgccacagccattaaatacagagatcatacaaaggaatagaggaagctgttgaatactaaactaactcaaatcatcaatatccttacggagtgcacactgaattaatgtaaaaagcatttagtaaacaaaaagtattttcaatatacaattaagactgaaaagtattgaggcctcataagctgaacctgacacaataaatttaaaagggaaactaatttggaaatcagaaaaccactaaggaatttgggaattaggcttctgctgccctctctgctactgacggtcaaggcctcctcattgtattctgtcctccatatctctgctgattcccattttgtctatttccatttaccccactactgcttgctcaggtcactctccttcactgtcggtgtttgttcaaattcctcagacccatccacttcccatctaaacttccctccccttttctcgctcgttggctctacctccctcctctctgttttctcctcactctcctgccccacctcgacatccacagcgaggcaatgaagaagcccctgccaaggaggagcccgcttctcagtgggacaccgggaaggtagacacccaacagtcaccgctagtgggaggcgattgtgcagaagcacgagggttgttacaggatcgggcaggtcccctaccccagtctcggactcagggtcctgtctgaggcggccaccccgaagcgtggggtttgcggagacgtagggcctggcggagggaaggacggggaagcatctcagggaggactggcgtctgccgaatcccagggctgccctgaggggccaagaggggcgagggtggggacgatggaagacaagccacatgccgaatggggacctgaggccgcgcgcgataggatgggcggacggtgaagagaactagggtggaagggccggacaggggcgacctcagtgacggaaccggacacagacgcagatctggcagctgagcgacaggcttcggagcatttccgggcgtcgcgggactccccgccgacaggagggcggttgccgagcctgtgacatccgcggagaccagcagaccccgggtgtggaggacgccgcagggaggggactgcgtggctgggtttggccacaaaaagcggagggcactcacccgagcggaccttggctccggataatccgtttccgggtcaacaaaaaacgtcgcgcgaggggcggggcgcgtacgtgcagggaggggaggcagagaaaaaggcggggccgggccgggccggggcggggtctcgggcaggggcggggagcttaccgacctcccgcccccgctgcgcgcgtttctggccctgccagtgtctccgccggttgaaagcgcgtgtctgcgtcgggttctgttggagtgcgttcggtgcgccgtgggtccgcgctgcttccacccaacttcctgttaggtaagaggcgcgtgaggctcctgtgccgggggcggtgctgctcccgagtcggcgcgcggcggggacgcgagtccgtaggtgctggcgggagcgagagtcgggtggggaccctcgcgagcccgcactccgcctctgggtagcagcctcttcggccccacacggcgtgacgcgcgctcgggctccgcgttcgcgtcgaggcagaggcgtagtaggggtcgggcccagggctggaggggccgggaccgggcggggtgccgccctggacaccgcgccggcagctgttccgcgcgggttcatgtcattcctattttcaacctgtcctgctccgcacctgagatgatttataaattcggtacctttgggacaggcgtggatgacatcccataatttacttcgttattaatttctaaatgtaatacataccactctctaaaagtattttttaatttgaaatatatttgtatatatgtacatatatatttatttatttctgaattttgtctccagtacatataatgaggcttgtaaagtggatagtgttcaggacataggtggattttgcttttaagtagtaaagacttaattggtgacttactggggctatttgataaggatttttttttttaaatgaacattaaaaacagtgaaattgtatttccggatttcattagcttcatttatatcttaattggtgaaaactgtaagttaataactcatttttatttcctttggagattcttaagtttgtgctaccaatgattatttccaaaaaaaggcacacttctggttttcccagaactaatgctagcttctcaatcttttgagtttacttgatattaatgtttgacctcaaatcatgtcacatttttgaagaaaactttctcttagccagtggaacataaaccaccctggagttcatatagaggaggggttcaaatgcctctgatagtgtcgtgttaaaactcatggccaaacccaaggtcacatagctttctttccatgttttcctctagaatttgtatagttttgtcattataaaatgggtcttgtcctagaccccaagaacaggtttttggatttcacatgggaaagaccttttggcaagtcacagagtatagtgaagttaagatagtttattagcaactactcagctacatagcagggcgtcctcagaaagcaagaggaggaatgcacctgttgtaaacatataatttttttttgaaacagtttctctcctgtcacaatggcatgatctcggctcactgcgacctctgcttcctgggttcaaggattctcctgcctcagcctcccaagtagctgggattacaggtgcgtgccaatatacccggctaattttttgtatttttggtagagactgggcttcaccatgttggtcaggctggtctggaactcctggcctcaagtgatctgcctgcctcggcttcccaaagtgctgggataacaggcatgagccacccggcgcccgggcttaatgtttgtttatataggttattaagaatcagtttgtgacaggctattagtattgttacttctctttgttactgtcgattttaacatcaatttatgtgtgtactattacctttaaagtaaaacttatttttaaactaagaatgctgagtggtgtgctgtgtgggtgtactgtgctggtgttctatgcaggtgtattatgcatgtgtgctgtgaaagtgtattgtgggggtatattatgtaggtgtgccatgcaggtg

SEQ ID NO: 1879376 - DNA, 4001 bp, Homo sapiens
tgcctggctaattttttgtatttttagtagagatgggttttcaccgtgttagccaggatggtctcgatctcatgaccttgtgatctgcccaccttggcctcccaaagtgctgggattacaggcgtgagccaccgcgactggcctagatttttttaaaaagataaaaagcaatcactatgtttagtacatgtaatgaaaaaaatatgaaagaaactctctcatgggctagatactgccattttctgggacggcactataatgtctatctccagttctaattttctttttcacctcaaaattttagtattcactgtgacttatatttgatttgttggattcttaataatggctaaatttaattccactttttctctctttataatcagggccagatttttaaaaagaaatccacacactataaatccaaaaaccaagttatattaaaagtcagattttcgactgcatggagggtcagcgcccccaactcctgcagtagtcacaggtcaactatatatgtgtacacatgcacatacatctagtgtttatgtatattcaaatgtacatacatgtttgctgtatttttcataatgtaatgagtgcttcctatgcagcaggcactgcgttgtactggagaccatctttgcctcacagagcttacattttagttggggagatagtgacaaacaaatgaataaatacatcaaccagatgattaaagactgtgatcagagccatgtaggaagtaaacacggtggtgagacagacgaaagctgggagagcccattgtaggtgggaggtcagagaacctccctgaaaaggtaacatcttcagtagggcctcatggaggtgaatgatcagtcactacagcagaacagaaggcaggccagtgtaattgtggtggggtcattggggtaggcaggagacaaatcaagcagggcttcataaaccatggtagaaatataaattcaattctaaggtaaactggaagtcaggaagggattcatagccaagaagtggcataacttgattcaaatcttaaaatggtcacttttgctcctatagaaagaacgtgtgtctctatgagaaataaaatagaggcttaaacaagagattcctccaatataaaagcactgtggatggggttaagagtcccagatgggcccaacagctccacatccatcagaaacctagtcttctctatcaccctaccccattgtcttagaaaatggtttccattcacagaagtgcaagatggccagagcaattcctgacattttgtctgagtgctgaactataaaagaaagggaacaaaagacaacagaagttttcccatcccgtccaaatcagcttccttgaagcatcctgtttcaaagtcacacaaaacacttctgcttacatctcattggccagaatttagttacatggttacacttagcaggggaggtgaggaaacatggtctctcacttatgatgtctacatcagtaagatacttacagctatcagaacaagcaatcaaaatacgcttaatggctcaaacatgatacaggattacttctcactcacatgaagtccaaaatgatgttctggattggcaggtggttttcctccaagcaaggatctaaggacccaggtttcttctatcttgtgcctctttcaccttcaacacttgtcttccaagatcttgttacttaactgcattaagctgtggaaagataaagagtatagagaaccattgtgagtttctgtaggccaggactacagaagtgtgagtagaagggacacatcacttccactcactaacggccagaactcaaacacacagctgcatataactgcaagggaggctgagaaatggcatctggttgtgcccaagaagaagacctgggctcatgacatgaccagccagcagcctctaccactggggaaatgagtccagccaaaaactagggttctgttacaaagaaagaaccttgggagataggtggcagtttgtgtcacacgaggcgacagtggaaacagaagaccagttccactaaagagctagcaagcaaataaatacttgccatctgccagcaatgagagggcacactcagaaccagaagatgacatagttctactgcagattctgtttcgcaatgacgctcctgcaaaaatatctcaaggatttgccttcagcctacaaaacattctcaaaatgaaattgctatgattagtcaatttaatttttatttattatttgattttattaatattatagaaagctttttaacagtctagatgtgctccataatcagatattgaggctttacaggtttggccatacagagagaaatatagtattagtgacataacattgctgcaaacccaactgaagaaattcctggttgtgagcttttacatataatgtgttcattttgaaataatacttttatgttccaaatttctgtttccattgatcatttattaatttgttttttttatcttgagttttatttaatctacaaaatatactactgcaagagagaagggtactggctgggggagtacccaatgctcacaaccattctcactcaaataattaatatctggtgaacatttactatgatgttctaggacagcttagtgggtccagcataagtgtagatcctggaaaggatagaccagcaggccttaaaaatataaaggagagaataaacaaacataatgacactaggaggagaatgagtagatttcaacatatgtgaatcaatcagaaagtagagttaatttagttaagtggtcaagagcacaatatttgaattatgtcggacctatattcaaattctcagtcagccactttcaaactatgtaaaactggagaagtcacttaacccctctgagcctcactttcctcatctgtaaaaaacggaggataataacaacctcataaagtgcccagtatagtcaacgcctggatcatactatagtaaacacatgaaaaatcatggcgatgattaataaccaaggggttagcatgactagtccagccagggctcgatgccagctgcagctgagtggtaagaagatagatcttctgtaaagatctttgcagaaactcaaacaagtcagactggagagcatgcgtgacacagtcaggaaatctcatgtcacatgtttaagtcctaaatgtttgacaatgtctctaagcttcccaggagttcagaggaaaaagacttgtgatagaagggagacctgggcttcatggattggaagttgacctgagctttgaaagctgtatagggttggaataggtaatagaggaccatttaaggtgtctgtgcctgggacagagtagttaccccaaaaatggagtaaatgaatgaaagaaagagcagacacaaaagactaagacagcaagtctagttcgtgagtgaagggactccttaatcatcacctctggtgggtgttaatgtgttgggagatgcattgtccacagtgggaggaaccacgtgagcagagctttctaaactgggtgaggagtttgggttgaagtgcggaggaattatggagcagaggaggaaaatgatgaaagcagtacaaagatcaattcggggagggtcaggaatgtatcgcacaaggaagctggaatgcagagaagtcagtcaggagtctgcatgtggaactcgatgagaagtaaggatgcttggctgagggactggcagtgagacttcaatagggatggcagtgggcatgggaccagaggctcaatcaggtcctcagataaggggatgaagaaggagacaagcttgtggttggttcattaatgactacagagttagcaggaactctaatagacaggaaaattgaagagagaaaaccgaagagcaggggaagatggtgagctcagtgatgtgtttgtcggctgagccagcgatgagatacacaggtggaaatacccaacaggtacttagaagtacaaaattagaactccaacacaagaatagagaagagagggacttgg

SEQ ID NO: 1879377 - DNA, 4001 bp, Homo sapiens
cttcaagaccagcctggacaacatggtgaaaccccatctctactaaaaatacaaaaattagctgggtgtggtggcatgtatctgtgatcccagctactcaggaggctgaggcaggagaattgcttgaacccgggcggcagaggttgcagtgacccgagatcgagccactgcactccagcctgggtgatagagtgagactccatctcaaaaaacaaacaaacaaacaaaaacccaaaaattagccaggcatggtggcgcaggcctctagtcctagctactagaggggctgaggcaggagaaaccgggaggcggagcttgcagtgagctgagatcgcgccactacactccagcctaggcaacagagtgagactccgtctcaaaaaacaacaagaaacaaactagaagtggccccgcagatgactagcagctgtaggagtcacagaagatcagccagaatagaggtgaattcaagaacactgcagggatatatttgtgatattaagtcattaaaaaacccattaaggatcccaagagagaatgggccatctgaagcatctgccaagtcccacagcgttaagctacatcacccaacatgaccaatcaagtgagaactttcctgttcttcccttttctttcccttctttatgtttttccttaaattaaaaaaataatgaaattttactcccagaatgtgcttaatctttcccgtctttaaaactagaaggatcaggcactgcagttaaccaggtacaggaggagaagagttggaggagaaaagcaagaagaaatcaactagagaagacccaagatagggaaatggagacacctcaattctaagttttaattactacaaggaacgagccactttactgaaatgagactgtgttttgtggcttaaagggttacagaaatttttagtatctaaacatgactaaagcagtcaggggaacaacctgcactctcacccaagggcagaagatctagatcagtggaatacatttacagggacagtaggagatgaaaataaagttgcttgtgattacatgccatgacttgtcttattcaatggaatagttatatatacacatatatatattgacatagttttatatatgtatatcattgtgtgcatcatctgaccagaataactttgccaatatatgctgtatgtggttgttgactgtagagttagttccctatttatagatttcaggcaaattctgaatggcctgtgtattccatggcttcattgacttcaatatttctatttttctgaaccatatcaacacttaggcctgttaggaaaaattgcctattgtttgtagttctgaaggtttccattatctttacactctcatttattgtttctcttctactcctcatcttcctttatatttgcttctccccttcctagataacatctaaagtggagaaaaagggaatataatttgaggagcaaagtttatagattaaaggggataatattgatttatttctcccatttttctaatctcccatgacattacgacatatttttctattgtgtttgaaaaacgagctattagtgataacactttatataattgaggtatgtatatatgtatgtatttatttaactctttattttagaacaattttagatttacagagttgctgagtacagagagctcccataacacccagcttcccctaatgttaacatcttacataaattgtactacatttgccaaaactaagacattaatacagtagtcccttcttacccagggtttcacttcccatggtttcagttacctgtggtcacctgcagtctgaaaatgcaaaatcgaaaattccagaaatcaacaatgtatatattttaaattgtgcaccattctgagtagcatgataaaatctcacactgcctctctctgtcccacacaggacgtgaatcatctctttggccaatgtatccacactgtctaggctccctacctgttagtcactcagtagccatctcagtatcagattgactgtggtggtgttacagtgccggtgttcaataacccttattttacatcataaaggccccaaagcacaagagtagtgatgctggcaatttggaaatgccaaaaagaagtgttccctttaagtgaaaatcttaaagttctctacttaataaggaaagaacaaaaattgtatgctgtagttgctaagatctatgctaagaatgaatcttctatccgtgaaatggtgaagaaggaaaaagaaattcatgttagttttactgtcacacctcaaactgcaaaagtatatatagtgttcgttttcaggcatccactagggatcttggaatatatcccttgcagaaaaagagaagactactctacttgctggtataatactttaactaagctatagactttattcaccagttctccactaatgtccttctgttccaggatccaattcacattgcatctatttgttatgtctcccttttctcctccaatctgtaatagtttcttagttttcccttcttttttcttaatcaacattttgaagaatgctagtcaggaattttatagaatacccctcaattttattttataatgagattaagggttttagaaaaaggaccagagatgtggactatgcgttgtatcatgggtatgtgagaacaacacgatttatcactggtgattttaactttcattatttggttaaggtgatggtatctgccaagttttttttcctgtaaagttactacttttcccttcctacattttattctttggaggtgagtcactaagtctagcccacataggaaagtggaattaagctctatgtcctggaaggaataatctctacctatattatttggaatgtttctgtaaagaagatttgcttgttcttcccatttacttattcatatcattgtgtacttgtgggcttgtgggttaataatactttggggattacaatccaatgctctcattattatttcttgctcaaatcattctagctttggccctgggagttcttttgacatgtctccatccttcttttttattaactttttttttttttttttttttttttttacaatttctttcttttgtctagaaacagttatttctccaagaagccctggttccttttattgtagaatggtatttagaaatcaagatctgggtaccaggtgtgctcattgctactgaggtatcagtgctctcaggtcatctcaggagatagggctagactagatgtatattaacccatgtataaacacatatctacatttacttcatatttatctattggtatatatgttaaaagaaatcaagctgacatctccaaatttaagccaccacaatgggaattattccagccttcccacacccccacccctgcacctctacctgcttatttgcaacttttttctctaatagtaagcaagtgagctccctttatctacaagttattttacacattttttcaaccatagtgaacatgtaaattagtttcagaatttataacccatacccctatgagaaacaaatttaccaatcagagtacagtgtttatgcacagttttttgtttgtttttgtctttagctttacaatgtcagcccaaacaccatttttacaaagttatttagattggctcctttttcctctcctcttcattatgctgtatatttgtaatgtatttgtaattcaaagattgtatatttagatacaatcttcattccatcctgggacccccaatattctggttgatttttttaaattttgaatacaaaaacactcactctttgtaatgtattgttctatgggttttgacaaatccatagagtcatgtatccaccaaaacattatcagaaagaatggtttcatcaccctaaaaattctcctctgttgctgctttttagttaaccccctccttcctccatctcctggcaaccagtgatctgttttctgtccctatagttttcctttttccataatatcacgcaaat

SEQ ID NO: 1879378 - DNA, 4001 bp, Homo sapiens
aaaacaggggccatttagtagccaatatacaaatggccatgatggaaagacccctgggccatgagttgctgggctcatcctcctctgggtatcttgtctgagctatcccttccctgggctgaagtaggtaggctccctgagaatggagctcaagaacccagtggccaagcccactatcgagaatgctactaagtgcattaatgcattagagatctgaaatgtctggcagaaatgctgacagtaactcggcaattagactgagggagggggaggaagaggttttggttggtggtggttgaaacagctacaggtcgaggcttacacaagtagcctctggttttcagtgccctgttcctcagagacagaggcaattaatgccattcattttcttccttccttcctttttttttttttttttttgacacccaggctggagtgcaaggtgcgatctcggctcactgcaagctccgcctcccgggttcacgccattctcctgcctcagcctcctgagtagctgggactacaggcacccgccaccaggctggctaattttttatattttaagtagtgacagggtttcactgtgttagccaggatggtctcaatctcctgacctcgtgatccgccggtcttggcctcccaaagtgctgggattacaggcgtgagccactgtgcccagcttccttccttccttcctccctccttcctttttttttttttttttttttgagacagagtctcgctctgtcacccaggctggagtgcaatggcacgatcttggctcactgcaacctccatctgctgggttcaagccattctcctgcctcagcctcctgagtagcagggactacacgtacctgccaccatgcccagctaatttttttatttttagtagagacagagtttcaccatgctggccaggctggtctcgaactcctgaccttgtgatttgccttcctcagcctcccaaagtgctgggattaaggtgtgagccaccgcgcccggccatgccattcattttctgacaatggtcctgatctagggcctcaatcaactctaccatccttatccctgacccctaagtaacaaggacaaaatcaaaaggaattccctttagccttcatgaatctggtagaataatcttagaaatatctatctgcttaatgccaagggttaatctaccaggaatgaaggaaaggtgctgattccattaactggacttcattttcccaggagggaagatgggaaagtaggcagaatgtgagtgagacagtccttttataaagcttcctgagaagccatgagctgtttagggctagtttctggatccagatcacagtttgagcagaaacatcactgcttcctcacattattcagttttagttccctgggactgaggagcttgaacctgcaggaggagagggtttacacttggggtgggtgcgggggttccagctccatggaagaagggactgtagagacaccttcttcagtgcttattggagttacaaggtcccaacctccacaattctagtctctaagttttctaacacctcccataccaaagcactgcgatgagaatgacaacaaagatcaacgtggaggtggcagggggttttgttagaacccagctgaggctgaagggctgatgttgggagcggacctcagggatccaggatacacgttagcatcattagcctcatcagcttccagagtcaggtgcatcctggatggcgtgaatttggtcactgtggcatcttgaacatgcctcactttaggctttaatgccattttggcccaactgcctcatgctccaacaatgcggaaaggtagtatacctaaagctatgtaggcagtgaaaccaaaaagaccttgtagagaggggcatagtcaaggaaatagaaattggtagtggagggcaaggaagacccataaatctcagcctcccaggacagaagactggaaaggagcaaggaggtactggactgagggaatcttggctaggagaaaagaaatcacatagtagaagtggttgatcctgaagaaaaacaaagcaaagacaggttattttggaaagagcagacccaaaggaaagcactgggggctttagagatgggagccaaaggcgccaggttctatgggtacttggagtcagcagcctggagtgtggggtggggtagggagtgagcgtggggattctggatgcctggatgccacgaggcactttgtgtaggtcccgctggaaattttctttctgagaggaggaacttgagagagggaaaaggaaccctagcgtttccctacctagcccttttccacttttctttttcttcttttttttttttttaattcagctcttcatataacatcccttgtaaaaacaaaagaataaaaacaaaccaaaaaagaggggcagggtaaatttttttttaaaaaaaggaaaggaaagagaggaaaaggaaataaaataagacgatttattgtttctcctcagcatcctccttggtctcctccttcactgagagaccttcaagcttttctgccactttttcggcatgattgtttttgcctgatcctggccaagccgtctcctggagtttctcttcttgaaactcaatgaccaaaggaagccaagtggatgcatccaagcaccacctagaccatggtcaggctgctcagtgacatctggtcacttgccaccacagctgcagtccagcctcacagcagaggggaccaagccctctgagagacaaaccaaggaccactgtaaagcaccttctggtgagctccaggcagtgcccggactccaatgcctgcccaattggatgtgaggccagcaacacggagaagtgctcagggctccccaggaagcacctgtgtccccagggagctgcatcgccctggataggtgaggcagccacagcaccctggaatgtttctctggcagacagaaaaagcacctgcctggaagtacagtcaggtgcatagtgagtctgcaatccacttttcttcttcttttttttttttttttttgagacagagtcttgccttgttgcccaggctggtgtgtaatggcgcgatctcagctcactgcaacctcagccttccgggttcaagcgattctcctgcctcagcctccagagtagctgggattacaggcgcccaccaccacgtccagctaatttttgtatttttggcagagccaaggtttcactatgttggccaggctggtctcgaactcctgactttatgatctgccagcctcggcctcccaaagtgctgggattacaggcgtgagccaccgcacccggcctcttttccacttttctatttgttgtcttgcctataggggataagttcctaccaggtatatagtttagaatattcactccatctatctctcctatacactaacgaggtgggattgactggggaacttcttttctttctcttttttttttgagacaactctcaatctgtcacccaggctggagtgcaatggtgtggtctcagctcactgcaacctccgcctcctgggttcaagcgattttcctgcctcagcctcccaagtagctgggactacaggcatgtgccaccatgcctggcttgtatttttagtagagacggggtttcacctaaggcaggggatccacctgccttggcctcccaaagtgctggattacaggtgagaaccaccgcgcccagtctttttttttttgtgagacagagtttagctctcgttggccaggctggagtgcaatggcgcaatctcagctcactacaacctctgcctcccgggttcaagtaattcttctgcctcagcctcccgagtagctgggattacaggcatgtgccactacgcccggctaattttggatttttagtagagacgcggtttctccatgttggtcaggctggtcttgaactcccgacctcaggtgatccacccaccttggcctcccaaagtgctgggattacaggcgtgagccaccatgcctggc

SEQ ID NO: 1879379 - DNA, 4001 bp, Homo sapiens
ctgcagggataaaaatgttctctacctatgctgccctataatatagcagtcactagccatatgcagtttttgagcacttgaaatgtggctagtgtgactgaagaactgaattttaaatttcatttaattttaattaatcttaattttaatgtaaatagccacatgtggttagtggctaccagactggacagcacagctctagggcaccaaaaggagttagctgacccaaaatttttatactcattattgtcatcatcttaccaatttgccaaagccacttcctctcccaaccccttgtcctccacttgcacttcagtccatgcaataatggtgtaattgcgatgccaccataacttggaaatgaaatgtctccttttccctggcaaggaggttatccatgaatttctcaagtgtgagagcaacctagtcccagaattctatcttcagggccactcttgatatctgttactctatcaatcattgatctagaattgcacactcaaaaggggtaaaactgttaagtgttaactaaaggggccatttaaaacactgttggcaggaaagctaacatacccaagggttagcgacagtaaagagccactaaccacacctaggtacagggaagcagctgaccagacctgaggggtagctctagctgtaggagctggcctcctgctggagctggggccctctgtaggtgatgtaaacaatctctgcactcagcagagaggctacctgggaatggatacgtcagacccactctcctcctgctcaccaccctccttcctccttcctgtgccttcctttaacaaacccaaccagaagccagaatgtgaagaaggttgttattgccatccataaagtacagcctccagaggcatagagggtgggtaagggtggagggtggttctagagtagcaaacaaaacatttctctgtttgtgctactacagtagctcacccatgtttgaactattaagaaaaaagtctggacagatgaggcctggactctgaccttgtgctgattccccatagaaatgccacctgtgagttcctgatgaaggcagctggtcttccctctcctggagctattccctaatgaaatcaaatgagttacaaacattaacgatgacaaacacagtgaggaaaatttaagcaaccaaagtgggacaaattaaaaaggtgattttgaaagaatcttatagtaaaaacatagtaacgggcagttttctatgacatgtctagagatgattacttgtatctaccccacaaacaaatcttgttattgaaatcctctaaaatgcattctacacattactcagcatgatactctgtaattctaaataattctttaatataggtttgtatatgtagtgtgtgagtatgtgtactacacttttagcaatattgtaagctctgtgaggacaagattacgtcacaattagtaaattcatatttactggattcctgaggaccttcttgctcactggagcatttcatgatgctagacacagtggtaaaggctgtgcctggggccccttgggactgtgggatggtgcattggggagacaggcgttgggggagactcaccatggagcagacaggccacaaaggacctcctcggctcttttggtcagtctgagtttcccccacaaaacagctttcccagtactctgtgtttagattctggagctgtcttgcagttctgctaatcattcaccacctttggcttctttctcagctactgtgggcagtgtgtctggtttgggatgggtgattcctatcttcaaagtcctgggatcaggatgttcatgttttaaatgaacaacatgtagctttgatgcctggccaaggagggggacgggacaccacagatagaaggttattttggggctatttattctgcatccatatcattttcagcctcaaacatctggtgttctagtgcacacttctgcccttctcctcctctgactgtcgacatccctgttccagttttcaggagttaaatagggtagccagaagatgaatggtatttgtttgtcccccacatccactgcatccctagacccactgccccaaaggcagtagaagtaatattactagtgaacaaattcagcccacctgcatgcctgcagtccattctaggtagaactaggttactcagaagcaggcactggttctttgctgatggtaaacacttataggagcattggagttcactacaccaggagccacttttcctcagggcagttcagtgatttcccagagcaaaagcaagaaccaaagggaatcccaaccatttctcctccctggtccgctccatcacaaagtcacacccacagcttcccttgtacctcctctccctaagcatgcagctctttgaagttttctgaatgttttgaccactagctaaaagaagacaattgtggggtaataaatactccctttctatgcaacaaccctgttctctctctcaatttagaaaacacatgtcgaagtcattccttcctctaacggaaataaaggctttgctaattaagagaaaactgggaccaaaaccctgatctcctaatttccagtcaatcttttttttccatttcatcaccctgtcttcctaaagctgggtttctacaacaaaatgtcaacagtggttatcatcaggttatgggattgcaagtgtttctttttctctcagttttggcttctgtatttttccagatttttctataagggttatgtattagctttgcattagcttggatgaactagctgcactaacaaacaaatgcaataatttccattccttaattttaaaaaagttaatttctttttatattcatgcatagtccaaaatgagtgttcatgatctgcgtataagcctcctacaatgagtaatccaggaaatctgtcccttataccttggagctcctccatcctcaacaaaatatgacttttaactaggctgggatattctgtattaagccagaagaaagaaaagtagcatagaaaagtatgtgagggaggattttatgggtaagaacagaaagtaatatatatcacttccttcacacttcattggctaggactcagttataagcctgcatctaactgcaaggaaggatggcaaacaaaagaagaaaaagaaacaaattctatgaattgctagccagtatatgccacatttgtatatatgtaaaaaaaaggttgaagttaaaatggaataaggaagtcaagtccctctggaaagcaatcttatgctctctttcctacagtattttcacatgcaaatctccattctcccactggcaaaaagtggcctccacccaccagggtatagagagattggattttcctgatacaatcatgtgtcacttaatgacggggatatgtgctgagaaatgtgtcattaggtgacttcatcattgtgcaaacatcttagagagtacttacataagcctagatggtatagcctcctacacacccaggctaaaaggaatagcctattgctcctaatctacagacctgtacagcatgttactgtgctgaatactgtgagcaattgtaacacatgctaagtatttatgtatttaaacatacctaaacatagaaaatatacagtaaaaatatggtataaaagattaagaaaaatagtatacttgtataaggcacttaccatgaatggagcttgcaggactggaagttgttctgggtgaatcagtgagtggtgagtgaatgtgaaggcctgggacattactgtatgcttttataggactggcagtgcagtaggtttttttatgccagcattactgttacaggaccaacaggttcatttgcccactgtgcagcaacagatcaatatgccaagacagcagggtttgcagcagagaaagagtttaaggattgcaaggcagctgagtgaggagataggagaaaccctcaaatctatctccctgaggaattttgggctgaagttttaaggggatcatggagggcaagagg

SEQ ID NO: 1879380 - DNA, 4001 bp, Homo sapiens
ttttaacctgtgtgccatgaatcctttacaggttttgatcattgtgtcaaattgatctttgccactgctgtggatacacgtatatttcagtgatttcttttgcacagaagggggacatgggcaagttgtgtgagatgacacacagtgggcaccacttgccgttgggtagaggcaagaggcattgctgaacaggctcaacttggccaaggatggtgtctgatatgaactggatgtgtgtccttgctcaaatctcatattgaaatgtaatccccagtgctggaggtggggcctggtgggtggcgattggatcatgggagtggtttctcatggtttaacatcatcctcctggtaccgtcatcaccatagtaagttctcttgagatctggttgtttgaaagtgtgtggcacctccctgctctctctcttcctcctgctgtggccatgtggagctccttgctcccactttggcttccgccactattggaaacattctgaggcctccccagaagcagaagccatgatgcttcctatacagcctgcagaatcatgagccaattaaacctctcttctttggccgggcgcggtggctcacgcctgtaatcccagcactttgggaggccaaggcgggcagatcacgaggtcaggagatcgagaccatcctggccaacatagtgaaaccccatctctactaaaaatacaaaaattagctgggcgtggtggcacgcgcctgtaatcccagctacctgggaggcggaggcaggagaatcccttgaaccagggagttggaggttgcagtgagctgagatcgcgccacagcactctagcctggcgacaaagtgagactctgtctcaaaataaataaataaataaataaacctctcttcttcataaattaccccaatctcaagtttgtttgtttgttttttaatagcagtgtgagaatggactaatacagtgtcagagagaggaacaactctaccccactggtgacatatccacaccagtgagagctgatggccaatgctttcatggagtctgtgtatggagactgtaggggtgagttgatggctctgctggcttgttcagtgttgttctgagttcttttagtctcttcaaggatattgccaacacctgtaatatttgtaacattacaaatattaaatatttatatttatatttatattaaatctttataaataaatatttagggcaggcatggtggcttacacctgtaatcccagcaccttgggaggccgaggccagcggatcacgaggtcaggagttcgagaccagcctggccaatatggtgaaaccccgtctctactaaaaatacaaaaattagccaggtgtggtggcgggcacctgtagtcccagctactcgggaggctgaggcaaaagactctctttaacctgggaggtggaggttgcagtgagccaagatcgtggcactgcactccagcctgggcaacagagcaagattccatctcgaaataataaataaataaatatgtaaatatttaaaaatacaacatctgtaataaatgtaccatgagcactgtggagaactctgggtacaagggattcccatgttccttgccttactggtcagtgaattaggcctctcgggtctcactccattttcttcctgtgcctgaagcacttgtctgtttcagctgccttctctcccctgctctggttctctgccctcaccccatacccaacccacacagatgtaccaagggggaacctgccatatcctctacccccaccccatgcccacagacaatcctgtcctgaaggccatcccctggcttaattatttgcagaccttccttctcttttgggtctcccaaagtccaagacttatacatcaaccaggtgcaaacaaacaagcaaacaagcaaaaaacaagaaatgaaagtccaagactcttcagataattaaacctggagggagaggaagggcgaggcccaccccctgggcttttggaatcgggcggagtgattaggtcataattgatctttattgttgcagctgaagattatttatcccactcccagaggagcatgtgtcacccgcctgccccacccccagctttctgaagctgaaccgcctgcacccaagtggaacagggggactgggggtggtggctgggctgtttactcattctccctccttgggggcctctggcagctgcccctccctgacacgtcacatggatttttctcactcttctcttcactgccacggggcatctcagccctcctggggacctgggccagggaccaaagcccaggccaaagacagcgtccttaacagcagcctcggttcacgagttcctaagaactttcccaggcatgccctggaaaggaaacaggggcgggaggaatgaggttccctaaaaatacattgagatttcccagtggagggatgagtgggaggtggaagacaggactgtgagttacatgggacattcagctccactctgtccccaaggtgcagaggggcctgctggaaaaaacctccctgaaaaagaacgggaaagagaagaagttctactacccacagataaatctccaagggctgccctgggccatgtagattaattctattatgatttgtgataataattcgttttatttttgtagagtcctttaaaacattttttactgatttcatgttgcttgtcagcatgacctcatttgtcctggtctatgaggcagggcagagatgagcccgatttcataaacaagagaagtaagaacgagcacagctaagggacttgccaagtccgagtcagaacccgagttccctgactctcccccttagatcagttatgcagtttaactgtgacaaaatgggggtctcctctggggggctgtgactttcacttgctgggttgaaatcccctagtaggactgtctggagacacacagcctcccctggtgaggggattccaggtctcccacctctcttaggcagcaggtccttcctgggactgccacgccaccttgctctagaaagcagagcggtgccgtcctcagaatgacggactaaccatggccaacacggctgctcacctgctgtgtcccagatctgtgccaaggatttacaccaattatctcacttggtcctccaggaaccctgggtagtgggcactctgaccactcttatttttcaggtgaggcagtaggaacagagaagtgaatatgccctatgtattattctgttctcatgctgctaatacccaagactgggtaatttataaagaaaaagaagtttaatagactcacagttccacatggctggggaagcttcacaatcatggtggaagttgaaagaggacaaaggcacatcttatagggtggcaggcaagacagagcatgtgcaggggaactcccctttaggaaaccatcagatcttgtgagagatttattcactatcatgagaacagcacaggaaaaacccatccccatgattcaattacctcccattgggtccttcccatgacacgtgagaactatgggaactacagtttgagattcgggtggggacacagccaaactatattaccctaggttacacagctagcaagaggcaagggccaagatttgagaccaggactgcctgagctccagagcaatgtctttaactgtgaaagacgggctatgccgcatgtagaaatctcctaggaggggggaagcacaactgtcaaaaataataccatagactaggtgccttaaacagcagacatttattcctcgcagctctggaggctgggaagtccaagatgaaggagccagtagatttggtttctggtgagggcctacttcctggcttgcagatagaagctgtgcctccttgctgtgtcctcacatcatggaggagagagggagaaagggctctagtctctggctcttcttttatttgtttattttttttgagacagagtctcgctctctcacccaggctggagtacaatggcacaatcccagctcacta

SEQ ID NO: 1879381 - DNA, 4001 bp, Homo sapiens
accagagctcctgccaggacctgcagggacaagagtggagaggggctcagatgcagggctcacagaccgcctgcctctctcgctgacccaccacttgatgccagcctccccgagggcctgtccccatcccttctcagcctttctccctcccgcctctgtgcctttcaaacgccaagccctcactccctccttgatctcatttccaatggagggcaggctgtccatccccaagggccccaaggcctagctctggcgtctgttcctcgcagcctcctcgccctgccgccctccaagctgagggcctcccctggggtccctctttgctccccatccttgctctccttctgcccccactgccacccctgcagagtttattccagttgttcacttactggcttttctcctccagcgcagctctctgagctacctgaggtgagagaatttactctttaaaaagtaaagaaaaacttgattataaaagtaatctatgggccgggcacggtggctcatgcctataatcccagcagtttgggaggccgaggcgggtggatcacctgaggtcaggagtttgaaaccagcctggccaacatggtaaagccccgtctctactaaaaatacaaaaaaattagctggccgtggtagtaggctcctgtaatcccagctactcaggaggctgaggcaggagaatcacttgaacccggaggcggaggttgcagtgagccgagattgcgccattgtactccagcctgggcaacaagagcaaaactccatctgaaaaaaaaaaagtatcctgtgttcattgtaggcagtatggaaactgcaaaaacagataaagacaataaaaatcaccaagagtgccactacctaaagataggccaggggtggtggctcatacctgtaattccagtgctttgtgaggctgattggaggatcacttgggcccaggagttccagactgccgcactccagcctggccaacacagtgagaccctgtgtctaaaaaagaaaaaaagaaaaaaaaaaggtacatatatagtcggcgttataccattttggctgatagcttgatcattttcccaggctcagatacctgccctttttccccaagtgaagtcaggatcacaccgaaaagctttgcctcctgctatttaaaaacctaatataggcagggcgcggtggctcacgtctgtaatctcagcactttgggaggccgaagcgggcggatcacgaagtcaggagatggatcccggctaacacggtgaaaccccgtctctactaaaaatacaaaaaaataagacgggcgcagtggcgggcgcctgtagtcccagctactcgggaggctgagacaggagaatggcgtgaacccgggaggcggagcttgcagtgagccgagatcgcaccactgcactccagcctgggcgacagagcgagactccgtctcaaaaaaaaaagaaaacctaacatatcctgagcattcccatcaccgtccagccttgttccacaacaggaatttaagcgggcggtggtcccgttgcatggatgcccaggtgccgttgtccaggccggtttccagggagccgcagagggagggcaggaggtcgccgcacttggccccgcgccccagggcgtctggttttcggggacgacgcagggccggcgagggtgcggccgtttcaaaatttttttttttgagatggagtgtcactctgtcacccaggctggagtgcagtgacacaatctcggctcactgcaacctccgtctccccggatcaagcgattctcctgcctcagcctcaccaagtagctggggttaaaggcgtgcgccaccacgcccagctaatttttgtatttttagtatagacggcgtttccccatgttgcccaggttggtctcgaactcctgacctcaaatgattcgccagcctcggcctcccaaagtgctgggattacaggcgtgagccaccgcgctcggctcgtttcaaactttacattgcttcttgggacaggaacctcctgagtttgggactaagtttggacagacgcgggcggcgacttctcccaccacttcccggcccccgcccggcacagagtctggctcagagcccggatgtccccgaggggcggggaggggcgggcgggcggggcgctcccgccaaattccggacagcaacagggcgggccggagttctcgcgagaactggcaggcggcgcgcagctgcgggcagctgcccttcccgggccggcatcggcggcacagtgcgcaggcgcagccggcgcgtttctccgggctacagccggcgccgccgcccgctagtccgccgcccggcgccatggcgggctgcgcggcgcgggctccgccgggctctgaggcgcgtctcagcctcgccaccttcctgctgggcgcctcggtgctcgcgctgccgctgctcacgcgcgccggcctgcagggccgcaccgggctggcgctctacgtggccgggctcaacgcgctgctgctgctgctctatcggccgcctcgctaccaggtgcaggccggcgggggccggcgggggccggcggggcgggcggcggtccgcttggcgcggcgcgtgggcacctttctccccgggcccgcagtggcctcccacgcgcgcgctcttcatccgcgagttcaggtcgcaggaggggaccctctctctccgggctcgggcgccctgcacccgaggagtgggttgttaaattgcagcttgtgcagctcagcaggtgcgcgtggggtggagtgagcgagcccgcgagtgcttttatgtaacttaaggtgcagagacctacctgctgccctgtctcaggtcaaaggccccgcagtgacgtgggtggggctgggcgcacaggcccgggtgccctgacctcataaactaggcttaagcagttttcctacagccctgaatagtaatcacgaataataataataatgacagctaaaatgtaggtagcagttagtcttaagtgttttacgtgggtaatccttactgcagtcctaaaaggtaggtactgttatcccctggctgtagatggggaagcaagctcagagaggttaaataatttgggaggccacacagccagagagcggtgggtgcagaatttgaacccaggtcgcccacttctccctttcaacctcagcaaatcggctctatctgcttgcctgtgggttgcctattccgggaaggtcagcagcccagatctgtactctgaggactgtgaatgactgagcttctcttgggttcctttcagatagccatccgagcttgtttcctggggtttgtgttcggctgcggcacgctgctaagttttagccagtcttcttggagtcactttggctggtaagaattccttcggaaatactggttttcaggcgagggtggacagatcagagggtctgtagcggcatttcctcatccctgtctcatctgtgaccggcagaaggctgttcagggttctctggaaacgaagtctcctggcttccccctagttgctcacatttcagcccttgtgatttcgtgcctgtgggttgattgtgaatcaggcagaaacagatctccctggcacccccaaaggtgctgtcatccgcagctgtggtgacagcattccgtaacttgagcagcccttcccggaaggggtgcaggtcctcggtggcgggcaggggcagggctctggcttgtcttcatgggcctttttcatctctaatttctattaggtcacatctagtgcatccccacagccactgtaggatttttccctacactatgatttcagtcccttgagccttctagtctgacctggatatgaaccagtggcttcaaggtaaaaagttttatctcctcttatcaatattttgagccatctaatccttctttgccggaattatttcagttttgttaaattttgtatccgacatacatcactcctttatgttgttatctccctctttcatgttttattgtgtgtagtgtcatttttaacggacag

SEQ ID NO: 1879382 - DNA, 4001 bp, Homo sapiens
ctttcccctcctgcccaaaaacctttctgagtgaaaacccctaacccacttaggaaaacacccttttattacttcttctagctcccagcacccaacgtctttacaacccaggtttctaggaacagactgtcagtgggcctttttctttccttttttttttttttgagacaagtctcactctgtcgctcaggctggagtgcagtagtgtgatctcggttcactgcaacctttcctccttctgggttcaagcaattctctgcctcagcctcccgagtaactgggattacaggtgcccaccaccatacctggctaatttttatgtttttagtagagatggggtttcaccatgttgaccaggctggtctcgaactcctgacttcgggtgatccacccgcttcggcctcccaaagtgctgggattacagatgtgagccaccacgcccagcagtcagtgggccaattcttaaggctggctctcaaagatgaaccagcaccacaatttacccggcttataaatcctgtcagcttcagaagacgacttaccaaacacaaatttatcctcaccagttaataactccttttctttgctcaaaaacccagtgagaaaaaataactccaggccaggcacagtggctcatgcctatacttctagcactttggaaggccgaggcgggtggatcacctgagatcaggagttcaagaccaggctggccaacatggtgaaaccgtctctattaaaaatgcaaaacattagccaggcgtggtgatgtgcgactgtaatcccagttactcgagtggctgaggcaggagaatcgcttgaacccatgtggcagagaaggttgcagtgaggcgacaacgcggcactgcaactccggcctgggcgacagagcgagactccgtctcaaaaaaaaaaaaaagaaaaaataactccagtgcactgcgcccttacttcctatctaacattgtgccgaacgttatacacagatcctcctccgtatgatccttagttcaggatcataaactcttgataaattactgccccaggaacctccagtgacatcaaccgctgctaccatttgtggaattctgccggccagacaccccacactgcattccctcacaactgatcctcccgatagcccatggggtaggcactgttatttccattcacagataagcaaagtgaggctcggagggcggggacttgcccaaagccacaaggatgaaaggtagtgcgatgactcaaccgataaaaataatcccggttgtggtgggggggagctgagcccgactcctcccactatgctgccgcggctccgaaggcctagcccgagtgcggaaatgggcttctagggtcccaggacgaggtccacctccagagctgcagtgaggtccaagtcagcccgaggagcccgcaggtcccacatttcagtcatttccctaccccaaaggcagggactccccgctcctggggcaggcagccactgtggccgcgagcaagcgtactcgggttaggaaggagaaggaaggggacagggggaacgttcacctacgcagctgccacctcggaggacgggggagcgggggacgaggaaagatcaggataagaccctaactcccacaaatgactccaggaaagggagaccaccactccccgagctttggagcgccgcgcgggaaccggaagtcatgccccgcccggaagttaagaggaggggcataggttggaaggggtgggccgggtctctctagcctccgcggtactacgcagcttcatggttttaactcttggtggtcttttgaccgtcctcagtccttaccgtgcggagttttggatacattcttagcagctttttcgctccggagaagttctttatctttctgagccgcagtttgcccaactgcaaaatggaaagagatgaagcaggaattaagatactctaggagctcgcccacagctgattcagggccccattctgaggttacacccttaagcctttgcaccactcaaaggaaggaaaccaagagagaggggtggctggctgctgtttggagacagtggtccttgtattggcgccccgcggaatcactccagatgagtcagtggatacagtctataggtcccgcctcattgtacgcaaacagcagtgggcatatggccgtggggggttgatacagcctgtccggggtgggactctgtgtgtatgggaggctaaatctcagcaggacttttccagttgctaccagactacgcactgtcgcctgatggttaagaactgaagctttagccgtgcgcggtggctcacgcctgtaatcccagcactttaggaggcagaggcgtgtggatcacctgaggtcacgagttcgagaccagcttgaccaacaaggtgaaactcagtctttactaaaaatacaaaaattagccgggcgtgctggcaggcgcctatagtcccagctgctcgggagactgagacaggagaattgcttgaacccgggaggcggaggttgcagtgagccgagattgcgccattgcactccagcccggacgagggagcaagactccatctcaaagatgaagctttgaagtcatactgatctggtttgcgtctgatcacacaggttcaatgacacagccggctagaggaagcagagatgctaaccactgcagccccgatcttaaccctgaaggggagggattgagctgttagagagaggtactcagttgacttctccctctctctttccagctggcatatccgaatgggctgagctaccggattaagagggacaccccaaagcccccattgctgggttattgctccagagccaatgttcttggggaaaggaagatatgccctttgtcaacattgccactgctggtctgtaaactcctagacggccagctggtggttcacaaaccaggactccttgctctggccctacccctacctaccagaatgaccgtgaacccttccccactcactcctacaaccaggtttccatctcctctctcagcttaggtttccctaactgtaaaataaaagggttggactaggttaaggacttcctgctatttctctctcccacactctaaggttccttaggaatgcttcagaaaacagcaggggttggggcaaggatgccgcttgagtcccagagcaactccaatttcataggcacataaatttatgtgaaagtatatacgtttcggcttgtgtaagattattttatcatcccaggtaaaattcagcctttgtgcttcatctttccccaccctcctgctcactcagtttgctccaagaacactgaccttctggctattttgcaaatctgacaatctgacaagctcatcttcacttcttttttttttttttttttttttttgagacggagtttcgctcttgttgtctaagctggagtgcaatggtgtgatctcgactcactgcaacctctgcctcccggattcaagcgattctcctgcctcagcctcccgagtaactgggattacaggcacgagccaccacacccggctaattttttgtacttttagtagagacggggtttcgccatattggccaggctggtctcgaactcctgacctcaggtgatccgcccacctcagcctcccaaagtgctgggattacaggtgtgagccaccacgcccagcctttttttgaggcagagtctcattctgtcacccaggctggaatgcagtggcatgatctcagctcactgcaacttccacctcctgggttgaagtgattctcttgccttagcctcccaagtagttcagattacagacttgcaccaccctgtccagctaatttttgtatttttagtagagacagggttttgccatgttccccaggctggtctcgaactcctgacctcaagcgatccacccacctcggcttcccaaagtgctgggattacaggcgtgagccatcgcacccggcctcatcttcacttcttttgctgatctctgcttgcagtgctctttcc

SEQ ID NO: 1879383 - DNA, 4001 bp, Homo sapiens
aaaatgaagcaggcttatgagtactggtaagaaagctgtccatatcacaacatgactaaggtcccgatcgatgtgtagtatgacccccgatctgaggaaattaaaaatacataaatacagatacaaataaataaaacctgatatatccaaataatagatagaaagttatcaaagaaattaattgtatttacttctgaagggcagaaacagtagaagggggaaacacttttcattttacatctttctgcattgttttctaactacacacatgtattacttttataacaactcaagaggaagaaaacttctcaggctttcccctcctgcccaaaaacctttctgagtgaaaacccctaacccacttaggaaaacacccttttattacttcttctagctcccagcacccaacgtctttacaacccaggtttctaggaacagactgtcagtgggcctttttctttccttttttttttttttgagacaagtctcactctgtcgctcaggctggagtgcagtagtgtgatctcggttcactgcaacctttcctccttctgggttcaagcaattctctgcctcagcctcccgagtaactgggattacaggtgcccaccaccatacctggctaatttttatgtttttagtagagatggggtttcaccatgttgaccaggctggtctcgaactcctgacttcgggtgatccacccgcttcggcctcccaaagtgctgggattacagatgtgagccaccacgcccagcagtcagtgggccaattcttaaggctggctctcaaagatgaaccagcaccacaatttacccggcttataaatcctgtcagcttcagaagacgacttaccaaacacaaatttatcctcaccagttaataactccttttctttgctcaaaaacccagtgagaaaaaataactccaggccaggcacagtggctcatgcctatacttctagcactttggaaggccgaggcgggtggatcacctgagatcaggagttcaagaccaggctggccaacatggtgaaaccgtctctattaaaaatgcaaaacattagccaggcgtggtgatgtgcgactgtaatcccagttactcgagtggctgaggcaggagaatcgcttgaacccatgtggcagagaaggttgcagtgaggcgacaacgcggcactgcaactccggcctgggcgacagagcgagactccgtctcaaaaaaaaaaaaaagaaaaaataactccagtgcactgcgcccttacttcctatctaacattgtgccgaacgttatacacagatcctcctccgtatgatccttagttcaggatcataaactcttgataaattactgccccaggaacctccagtgacatcaaccgctgctaccatttgtggaattctgccggccagacaccccacactgcattccctcacaactgatcctcccgatagcccatggggtaggcactgttatttccattcacagataagcaaagtgaggctcggagggcggggacttgcccaaagccacaaggatgaaaggtagtgcgatgactcaaccgataaaaataatcccggttgtggtgggggggagctgagcccgactcctcccactatgctgccgcggctccgaaggcctagcccgagtgcggaaatgggcttctagggtcccaggacgaggtccacctccagagctgcagtgaggtccaagtcagcccgaggagcccgcaggtcccacatttcagtcatttccctaccccaaaggcagggactccccgctcctggggcaggcagccactgtggccgcgagcaagcgtactcgggttaggaaggagaaggaaggggacagggggaacgttcacctacgcagctgccacctcggaggacgggggagcgggggacgaggaaagatcaggataagaccctaactcccacaaatgactccaggaaagggagaccaccactccccgagctttggagcgccgcgcgggaaccggaagtcatgccccgcccggaagttaagaggaggggcataggttggaaggggtgggccgggtctctctagcctccgcggtactacgcagcttcatggttttaactcttggtggtcttttgaccgtcctcagtccttaccgtgcggagttttggatacattcttagcagctttttcgctccggagaagttctttatctttctgagccgcagtttgcccaactgcaaaatggaaagagatgaagcaggaattaagatactctaggagctcgcccacagctgattcagggccccattctgaggttacacccttaagcctttgcaccactcaaaggaaggaaaccaagagagaggggtggctggctgctgtttggagacagtggtccttgtattggcgccccgcggaatcactccagatgagtcagtggatacagtctataggtcccgcctcattgtacgcaaacagcagtgggcatatggccgtggggggttgatacagcctgtccggggtgggactctgtgtgtatgggaggctaaatctcagcaggacttttccagttgctaccagactacgcactgtcgcctgatggttaagaactgaagctttagccgtgcgcggtggctcacgcctgtaatcccagcactttaggaggcagaggcgtgtggatcacctgaggtcacgagttcgagaccagcttgaccaacaaggtgaaactcagtctttactaaaaatacaaaaattagccgggcgtgctggcaggcgcctatagtcccagctgctcgggagactgagacaggagaattgcttgaacccgggaggcggaggttgcagtgagccgagattgcgccattgcactccagcccggacgagggagcaagactccatctcaaagatgaagctttgaagtcatactgatctggtttgcgtctgatcacacaggttcaatgacacagccggctagaggaagcagagatgctaaccactgcagccccgatcttaaccctgaaggggagggattgagctgttagagagaggtactcagttgacttctccctctctctttccagctggcatatccgaatgggctgagctaccggattaagagggacaccccaaagcccccattgctgggttattgctccagagccaatgttcttggggaaaggaagatatgccctttgtcaacattgccactgctggtctgtaaactcctagacggccagctggtggttcacaaaccaggactccttgctctggccctacccctacctaccagaatgaccgtgaacccttccccactcactcctacaaccaggtttccatctcctctctcagcttaggtttccctaactgtaaaataaaagggttggactaggttaaggacttcctgctatttctctctcccacactctaaggttccttaggaatgcttcagaaaacagcaggggttggggcaaggatgccgcttgagtcccagagcaactccaatttcataggcacataaatttatgtgaaagtatatacgtttcggcttgtgtaagattattttatcatcccaggtaaaattcagcctttgtgcttcatctttccccaccctcctgctcactcagtttgctccaagaacactgaccttctggctattttgcaaatctgacaatctgacaagctcatcttcacttcttttttttttttttttttttttttgagacggagtttcgctcttgttgtctaagctggagtgcaatggtgtgatctcgactcactgcaacctctgcctcccggattcaagcgattctcctgcctcagcctcccgagtaactgggattacaggcacgagccaccacacccggctaattttttgtacttttagtagagacggggtttcgccatattggccaggctggtctcgaactcctgacctcaggtgatccgcccacctcagcctcccaaagtgctgggattacaggtgtgagccaccacgcccagcctttttttgaggcagagtctca

SEQ ID NO: 1879384 - DNA, 4001 bp, Homo sapiens
cttatcatacatctattgtccatttcccttgagaccaagtactttctggctgtccagaagtaccattaggcatccaacttagcactttcttttcccaaagtatcccgggttctaacttacttctccccaatctcccctgaaaacccctaaagtcagaggtagctggtcagtagcatcttccgtattgaaggcttcacactttctctatccctacccagtgagaaaggccctcctctgcgctgtttccccttgccatggcacctatcaacctgcatgacaaacactgattctcttgcctggttcttccttaaggaaccttgggtttaattcttcttttcattcctggtactttccaggtctacaacagttcaataaattactaataaggaataaatgagtaaataaatatatattgtatacttatatatcctctccccctgaattcagctgtgggtatgacttaaatccaagaaattttggattaaaatgagagttaccaaaaaaggcagctttgacccaaggaaaacttgtttctttaaaaatgttagaagaatttaaatttttaaaatgtgttttggcctggcaggatggttcacacctttaatcccagcactttgagaggctgaggtgggaggatcgtttgaggccaagagcttgagactagcctgggcaacagagcgagatcccatctctacaaaaaataaaaataaaaaattacctgggtgtggtggtgtgcatctgtactcccagctactcgagaggctaaggcaggaggatcacttgagcccaggaggtcgagggctgcagccatctacaattgcaccactgtactccagcctgagacacagagtgagaccctgtctcaaagaaaaacaaaaaaatgtgtttcgatatccgcgatccatgtcacatctgttagtgtacctttagtacatgacttctgcattgtttgctaactgacattctgtgtgaataaagcgtgtatcacaatggtgtttccgtatgttatccaagtgggtcctttccccaggatgtgagtgagcctttggcatggtctttttaagattttgccaagggaagactgggctggaactaaggagctaacataccattgaaatcaaatatcccgttgggtgcactggagggtagagaagaggggattcctgcactcacgctaaatgataaacttttccaagggcagggtcgtgagaggtcttccaggtcacctagtgttctgagtcatgcagaagtaggaaatggacacaatactccccgcagagaatccttcccacaggactgatcctgtcccttcctcccctcccccgccccacacaaggcggaatccccacgcagtgcactgcaggcgcggtggccactgcccctagaaccagatctctcccccagtcccgtcctctccaagctccagatatgtcaaggattcttaagcaggggttttccaatctgtcccttgaggaactacccctgaggcaaggcgggcaggcccaagctgcgatgtggagaattcgatgtccgagcgacctcctcggaggagtgggtcgagttaaatataaccgcgcgaatggaatggcgctaaaaataaggcagcagctggcctgtccacagccctgtcccgggaggggcgggggccccagtggtcttgggcaggaaggccgcgtccggcccaggggcgagaaggctgcggcgtccgcagccagggctggaaggcctgggaggccgcgctctgtgggccccggggcctccattcgggctgggtcgcgggcctggacggggactgtccagaggcatccgaaagccaggccaacttgcctggacgtaacaagacggaagggctgggcgctgaggtcctgccagcccggccgccagagggagctgagcgccagaggaggacaagccgaacccttcaggaggccgggcgtctccggagaccgaagcgccggaggacccgaggaggtctgccccgcgcgctgctctggagactcccggggcgggtggcgctcggcctttccgctcccttccttcccacaagtcccttcccgcgcgcgccccacggccctgcccgccctcccgcgtcagcgccccaaccgtcaagccagcaattgaaacgtttccaaaacggtctatttatttgctcccaataaatcgatcggcggtgattaaagaatcgatgtggcctgggtgggcgagtcgcttgaggggagggattgggggctttcgcccggcgcctgcagggaggccgagggcgggcgcgggcctgagggaggcgtgtcccgcccgggccacacccgaggacccgacacctgggctggcaggccccggcaggcagcgttccctccggcggagaggggcgcgcgcccgccgcctgctttcctcggcccctctcgcctttctcgcgcgccggggaggctgtggccgccagtggctgcggagctgctcagaggcttttgttgctcctcggccggctgaatggggattttgtaaagcgggacagataaaaatgagcagcatcatattgtttgacagaatgatctcgcatgatgaagtgtcggctccgaagggggtgaaaatggtgaattcctaaaaacccagccctgggctcctcctcgagctgccggtagcctggagggacccagcggacagccgggcctggccgcatcgctccaaacggtgtcagaaagactccggctttcaatgccaagtcatttttaagccccgatcctgtccaggacctttctcctcgtggatgaaaagaacaattttcgagagaaaggctcgtttttattaaatccgacatgctgctgataactccatgctaatgtgaaataattaacataatagccataattaaaagcacgctaacaatgccataaatttatcacacaattttactagctttctgcccctaactgctctctcatcgttaattaaacgtgttgccttttacagaatggatgtttatatatttccaatataaataaattcgaaaccatcctctctctcttcctctttctctcctcctttccttttggtctctcgccatttacaggcacgccttggcgtggaccctgagtggcagacatcttgaaaataaatgaagttttgagatgcaaatccaaacaagaacattaaaatagcctctttttttccaccccgaaaagatccggagaggtatacaagggggtagtggtgggtaagagagttgaaaatcccccgctttgggaaatggaagtaatctgggtgggttggggccttgggtaccacctctgccctttcccaccttccttggtggcggccatccagacaaagaggccggtaatagtttaacaaatctatgaagattttcaagaagcagcagactttgattgttgcgggcgcgggggtgttggggagaaaggaggggaatttttctaatagtcccacccacgttttgctccctcttggacaaagagtaactactcttggtgggggacgcgcccttcactccgcggaacctggtcccaactccccgtattgtaagaaaagtgcacccgcgcgcgggcatgatgattctatctcacatcgcgccaacgacttattcaagccactggcactgtctctgacttaaaagaggagaaaagaggcatatgggttcacttgggcctggtgaggggtaggtgggcaattcccgccttccgcactctaaccgtgcccctcctccagtgttgaccacctaagaacccaaaatgagctgtaattaatttccctttctccatcataaatttttctatccatttcttcccccccatccccccactggacgcacacactaaatctcccctcccctggagacgtctcaatttccttcctatcgatccggactccattcttcttgcctcctgttgctagaacctagatccccactccccgcacccctcattcccaccgcgtccaggtggctttcccagcggggtaccatgtactctgcccgctccagaggaaccgaa

SEQ ID NO: 1879385 - DNA, 4001 bp, Homo sapiens
ctgaaaaaacatgactttttaatggctaaatagtattccatggcatacacacacacacacacacacacacacacaccaccacattttctttacccaatcctctgttgatggagggtctacagattttatcagatattcaaaatgagaaaattgtactctgaatccttcaaccttgtctctgtatcgagaacacactacaggtggggtgcagtggctcatacctgtaatcccagcactttgggaggccaaggtgggaggactgcttgaagccaggagttcaagaccagcctgggcaacatagtgagaccctgtctctacaaaaaatacaaaaattagccgggcatggtggtgcacacctgtagtcccagatactcaggaggctgaggtggaggctgcagtgagctctgatcacgccactgcactccagcctgggcgacagagtgagaccctgtctcaaaaacaaacaaacaaaaaaacaaaaaaaaacactaaaaacaaactacagcctccacctccctcaatagtgagtacagagttatcactcctctctctgaaattagatttataatattttagtgacctagcctaaccttaacattttacagatgagtaaacacatctagcacttttacctgatttgtccaaagttgctcttatacaatttgtattctgtgcaactgagatgggatttatctgctattttatgtggcctttttatgaaggccttttcatgtttctccttcaggtcggaactaaacctcagagttcttcaaaaccccaattacctttattgtcttacataagctagctgcccaaatgtttgctgagaatagtgataaccattgtcatattgaggtagaggaagggggctggttggtgggtactggtttaggggtacttttttaaggaagcatgagcacattttggatatgcaaaatattattaagtttagagcttagatttggaaaaacaacacttaagcgtctgtgtaaggagagctctgagaaaagggttttcagacagaacccaaatttctcaagaagaaccctctaaacagcattaaggaaaaaaattcctctgtagaagcaactaagaaaaaaaggaatactcagtatttgggaaagagaaaggaatgaatgataacaacaccagattgagtaagctacacaataaatccaaatttcagccctaccacatccaacctatgttgccttgagcaaattattaaacttttctgtgcctcaattttctcatgtctgcctacttaaggactgcgtgggaagattaaataaaatgcatgtaaagcacttaggtcagtaccttactcttaaggcactcttaagggtttgagaaggaagggagggacgttaagtggaatggtccttggtacatttttgttccgcggcagtaggattctgaaacagaggacataattacaaagaaagttggagtaagaagtggtggtgcgggcatcacattttcctggtgagtatctgagggcccatcacaactgtaggaagcggaagggctaataagtgtcaggccaagagcacaccctccagggtgcatctgagaagtcggcggccgtcgagtattagcacttaaatactacgagagctttcatgacaaaggacacatcttttggggaaactcagagcttgggagcggcctcattagcgggggaccgggcagaggggggctaccaacagtcccctcggagtgaccgaagggagattgaggaaagagtgaggtgggaagaaaatggcggcgcggcttctaccggtttgccttcacactctagccacagccccggctggaacggtcacttactggaaactgcagagaaacaacctgtttggtccgacttgacaacctcaaccggaccgaaggtgctgaacaaccagtgcggcgagcgccgcgaaacccaacgcccgaccgcgtagggaacgtcacagcgcgcgcacgcgcaacagtcgactagaaatgtccggcctacgccacagagcggggcgggagcggaagcgactcttccggtcgcgggagccttaggcaagagctgctggactggagggagggaggggaggggaggggaggggcgcggggactcaagccacggtttttgtgtccgcggctgcacccctctcgaagcgttttcacgcacatgtgagaaacctcacaccctggggccgatttctttagtagattggcgcccaaatggcaaagatttccagggatttgtttgggattccatatttttgtagatttgccgagattggatactagtacaatattgagaattcccgtccagcaatgtggctatttttttaaattaattcagttctccctttgtttttcaggtaaagcgttgcagttcgcttggtgttgtgcgcatttaacattttttcatagctatttttgttattgtagtttgtttttactaatagactattaatccattagtatccttgtataagaatggcttttgattgttgatctatctggacacttcactaaacgttcgtattctaaaaatttgacaggcagtcctctttgatttgtaggtaagaatttatctgtaaagaacaattttggcttttcccaagaatccagtgcaacactgaatagtagccggaggtacttatttcttaccaggagttattttggattgcatcttaggtttcattcaagatatcttctgcaggtttatggtgtgtgtgtgtgtgggtgtataggcaaattatgttcttttcgtagtttaccatatcggttttttttttaatcagcaaatgactaagttttaccaagtattttcagtatcagtctttgagatgattgtatggccttttttccattactctacaataaaataactacaataatagattttctaatggtgagccaaacttagaatcctggtatcttattttttcaatatattgctggatgcaatttgctgtgtagttaattttggattttcatgtatgcacctaagttagattggcttatggttttcttttgctgtccttgtctagttttggtatcaggttgtgctaggagtcagacaggttaacttatttttgtatgacctggaatagacatagcatgtgtgaatgatacatttcttaggttttgaagaactcatctttaaagccttctgggtgtggtgccatcttaatggatagttttgttttttatatagcgtccatcgttattgatacctagaattttttcttttgcttcttgagaaaattagttttttctagaaaagtattggccgggtgcggtgactcacgcctgtgatcccagcacattgggaggccgaggagggcggatcacgaggtcaggagatcgagaccatcctggctaacacggtgaaactccgtctctactaaaaatacgacaatgaaaaattagccgggcatggtggcgggcgcctgtagtcccagctactcaggaggctgaagcaggagaatggcttgaacccgggaggcggagcttgcagtgagctgagattttgctactgcactccagcctgggggacagagcgagactccatctttaaaaaaaaagtatttcagctatattttctaacatttaaaaaaatctcatattgttctcaaccattcttatatattcttatatatatattcttatatattgtattggagtctttttcttgatcatatttatcaaaccagcttttggttttatagataaaatctgtcttaaaagtaatttctctttcattaatgtatgccttcattaatttcttcttatctctttgggtttattttgttctttttatagaatcttggaagcttaactttcctttaaaatgtttaatatgaaatattaccagaatgtacagttacagaaaataatataatgaacacttgtataccaaccatctagctttatcccattttaacattttctcttatttgcttcagattttaacattcagttagagctccttgtgaaactgcctgcaatctcattct

SEQ ID NO: 1879386 - DNA, 4001 bp, Homo sapiens
tctggcacatagtcagcactcaagaaatttggacttattgtttgtgtatgtatttgtgtgtgtgtgtgtgtgtgtgtgtgtgtatgtgtctagtatttgggatggaggaagtgagggagaagtgcttcagaggtggcagcaatgtgcttctgagcgtggctgcgtggctccctatttcaatctgcctgtgaagatttcctgaggcatatgacccttcctgccatgacccttggtttccagaggcatctgctggtcagcccctaggcaacacttaaataggaaaacttttgcctatctgttactaagacatgctgatttccagatatcttagtaccctttttattatctctctgcctggggtttaataacagttaaaagagacaattcatgcaatgtgcaacaaagtttactttgtgtacatatatttgctctgcacatacctggcatatagtaactgctcaataaatatcagtggctattataatctagagcttgttggggagttgtctgagtgagaaaagaacaaaagatactcgttttacaaacaatttttgcttcatctctggatggcatattcatttctgaagcatcttcacactcagttgctaagaataggatatattctttccattgtacagatggagtaaccgagagactggaaagtgacatcaccaacaggcggtgacctagggagtcagggccagaaccaggtctggaatacagacttcctgactcctgacccaggttcccttctgccctgtggccttcacaggacgcctggagagaccagggaagtatctgtttcagggctctctgagttgcccttggaagtttatcatctatcaactgactgttgaccaaaaacacactgattcctgaggagaccttacaggatgtcctgttgagacttttcctcctcttttcattagtgctttgctggcagattaaaattcagcggatcccatttgtaggaagtctgataaaatattctcatctctattgcaaacaacttctccatctgccacttggctgagaggatccgactcaaacactctcaaagaggagagagtgataccaggcagaagaaggtacaggaagcagcaaggggtttgtgtctggacgtgtctacctgatctattgtctgatggagctgactagccagctctgttaagctgctggcttttcttccctaaaatgcctgaatgcacctataattacttaccctattatttggtatcttatagatgcggctctatatatgcagtgtacaaatctctaagagaaacaacacatttggcattgggcctaggatatagatgagctatgggaggaaaagattggagaatatatgtagtgagatcagaaaagctgatttgagaaaggtaaggcagcttgcaaattgcaaagcattgagggaagtcagtgcaattcacctgagaagacatttatactagtatttgcaaagaactgtattgggatgaatagaaaatgaaaaagacatgaccctagatttaaatttgtaagggtaacattccttccttctacacatgctcatgctcagtaagtacctattatgtgcaaggcactttgctggatcctggaggtatactggtgaacaagaaagatgtgagtccaccctctcagaacttacaatttactgggagagagcaacaaggaaaataagatcacagtttgggataaatcctaagaaggtaataaagaaattggtgtgctagaaagtctaagggttggtggggtgggtggggggtgacatggtgctgtttcagattggtgaagtcgaagtcctctcttaagagatgccctcaagccagatatatgaagagctaggcaagagcattataagcaaagggaatttcaaatgcaaagatctagaagagaaatcttggcacgttctagaaactatatgaaggactacatagctggaatgtagtggggagaaagatgacaaagccaaaatgggaatctagatgagaagtgatggtaattggactaaggtgtggcagtagaatggagacaagtggatgcactcaaggtcctgggttgcagggagggagggtagtaagatcagtggccctgtctgaggaattgaatatgaaagtcaaataatactcaagtttctggattaagaaatctatgtagcacctgtttctggtatatggtggtgccacttatcacgctgttatatggtggtgccgcttatcatgatgggaagcctacagagagaatatctttgtagggggtggaatcaagatttccatttggaggctcattatttgaggggaatgtccagttgaacacactaagtacacatggttagatatgtgattgtacccaagctcaagaagaagtctgattgaagacagatgtgctatgtgtgtttagataatgaggcaattaattcagatgagggcaatatagaagagttttaagggcacactaaattcagcaaagagcataggcaaaggagtagagagtggaaagaggaagagtttgagaaatgcctttctttgtatgatgaaaggagaggattgatgattagtgattttaaaaggattgcacttctacatccttctccagagaaatttaagtaggggaagggaccggtaagtattgctctatcattaagaaaatgaatagtcaaaccacagactgagaaaacaaaatgcaatacgtatatatgacaaagggctcataagcataatatataaagaactcctacaaatcaatgacaataagacaaaatatgagcaaaaatcttgaaaagacatttcatgaaagaatatgtacaaatagcaagaagcagatgaaaagttgttagtcataagggaaatgcaaatttccctgcagtcagctaccatttcacatacatgataacggctaaaataaaaaggactcttggctgtgcatggtggctcatgtctgtaatcccagcactttgggaggacgaggcaggtggatcacctgaggtcagaagttcaagaccagcctggccaacatggtgaaacctcgtctctactaaaaatacaaaaattagctgggcatggtggcaggcgcctgtaatcccagctacttgggaggctgaggcaggagaatcacttgaacccaggaggtggaggttgcagtgagcagaaatcatgccactgcactctagtctgggcaacaagagtaagactccatcaaaaaaaaaaaaaaaaaaaagactctcaatacaaaatgtgaggatgtggagcaacaagaactttggtatattgtttgttggtaggtagtgtaaaatggcacctattataggtaccatttagaaaaactgttcagtagtttaaaaatttgatattccccttcctgtgtccatgtgatctcattgttcaattcccacctatgagtgagaatatgcggtgtttggttttttgttcttgcgatagtttactaagaatgatggtttccaatttcatccatgtccctataaaggacatgaactcatcattttttatggctgcatagtattccatggtgtatatgtgccacattttcttaatccagtctatcattgttggacatttgggttggttccaagtctttgctattgtgaataatgccgcaataaacatacgtgtgcatgtgtctttatagcggcatgatttatagtcatttgggtatatacccagtaatgggatggctgggtcaaatggtatttctagttctagatccctgaggaatcgccacactgacttgtggtggggtggggggaggggggagggatagcattgggagatatacctaatgctagatgacgagttagtgggtgcagtgcaccagcatggcacatgtatacatatgtaactaacctgcacaatgtgcacatgtaccctaaaacttaaagtataataaaaaaaataattaaaaaaaaatttgaacatatgtctactctatgacccagcaatagcaaattttaggtatttacccaagaaaaatgaaaacctcta

SEQ ID NO: 1879387 - DNA, 4001 bp, Homo sapiens
ctgctcctggaattctacctgaaacagctcccttgaagcaattcttctcttttgccttcctacttgttctgtctttgcagtttttattgcccaatatctcccccctcacccactttttttttgagacagggtctggctctgttggccaggctggagtgcagtggcgtgatcacagctgactgaagccttaaccttctgggtttgagcaattctcccatctcagcctcctgagtagctgagaccacaggtacatgccactgagccaggctagtttttatttttattttttgcagagatggggtctcctacattgtccagattgttcttgaactcttggcctcaagcaatcctcctgcctcaacctctcaaatccacagtgcccagtcccacatctcctttttgaaactatttttgtctggttttcatgactttgctctggattgtcacaagactagtaaacttccgcagatgtctctaagtctctaacttgatactacacttctggagtgtggcaggacctgggacatgaacccagcttagacacagggaggaagttggtgtaaagaagggaacgggcacaactggagccaggggcctgattgggaagacttcttgggagtgctgccttccctctgttctgcttctcttcccatctcttacatctttttcttgcttgcctttctgatccaacttcttaaagttagtaggacccaagtttcagtgttccattcccattcaaccttcttatcccttctaatacttcaatgatcatatctacacagataaatgtctcttgacctttctcctgaccatcagcccatcatctcttatgacttgctagggacttccaaccacatccatcccaaatctcaaacttaactttaggggtgccattatttcttcatactgccttgcactgtggtcctttcctctcaattccttccactccaactcccttccactttcccaccacctctctcctgcttcccacttccagtcctcccaacccgtacctgggctcctcatcctgctgcctctcttttccctcagagtcatctttccccgaaagcctagttggtacagattccccgctgcttcagaatctttaatggccccttcttggtgatgagaaaaaagctcaaccccttagttagcctggcattaaaggcctttcacaacctggccttcaccttcatctctgaagtcgccttctctggattctcgccaagatgagctgtcagctgcaggttgggggttctcttagacaagccatgtggcttgactctcaattttcctcttgcctgagagactctccctgtcttctctcctctttcacaaagaccacctgagcccatagtggttttctgcctcctccgaagttctaagtaactttaaaaaatgtgtctctgtgtactccccaaagagccaagacccctgcaggcagaacctgtattttatttgggtgcagaaagtttgctgggcaatccagtcctgttggatgcactgcctgttactagccatgctgtgggcaactctctgcatctcagtttctttggtttattataaaattggaatgattccttcctgctttcccaaatgttggttgtaataatcaaaagagcaaatggatgagaaaatgctttgaaactctaataataagcaatgtcagatattgtcagttttcctttccaatccctggcttgtctgtctatccgtatccatctttcttactataaacaattaagtgtaaagcagacttctcagctttaagctttgcctggaaagaacaattgcaaagggctatcactccttaagccccaggacataagaagattaccagctgggcacagggagctgggatccttctgccaggctgcttagatgatgggtgcccggaggagcaggtacttaccatctgtcaaggcgtctggctcatgctcaagaatgcagctcagtttctcagctgacaacacacatctgacccaaggtgtgaagctcaggatctcagacatgtgtgatccaggatgattcacttccctgtatggtcctgtgagaacactttcgccttacgcattttctattactatcatggccaccagtggaatgcagatatttagtctctgctcactccatttgccaccactgccaaatggccgatgctgctgagggctcttctcaaactggcaggtgtgttctccttatcacctgtctcatgtgtgtttcattttctcttctcaatttctccaaggttaggattaaaaagaacacatttatttatttatgactttatttagatagatacagtgctgatggtgtgcaagccaatttcataggcttattcttagttggtccttattgctgtgaagttcactgccttaaaatttaaaatgtgaggaatcacaggaagtggaagaaataattgcacctgggatcctgaaccatgtcactgcagacctgcttacctactgccttattgcatgtcctctgttacgtgtgagccagtctcatctattcaagtagcctgttatttttttgaattgatagactttattttttctttttatagagacagagtctctttatattgcctaggctggtctcctggacacaagtgatccttctgccttggcctcccaaactgcggggattacaggcgtgaaccaccgtgcccgtgtccgaccagtagactttattttttgagatggagttttgctcttgttgcctgggttggagtgcaatggtgcgatctcggctcaccacaacttccgcctcctgggttgactatttttaacagcagttttaggtttgcagaaaaactgaacagaaagtacagagttcctgtatactccctccccttctccacagcttcctctattattaacatcttgcattgggttgcacattttttacaactgatgagccaatattgatacattactataaactgaggtccatagtttacattagggttcactcgttgtgttatacattcaatgggttttgccaaatgcataatgtcgtgtatccactgttacagtatcctgctgaatgatttcactgccctaataatctcctgcggtctgtctattcatcccttttcccttctctttgccgccaagcaaccagctaatttttgcatcccccgcaatgcctagcactgcttgtgtatccaggaggtgctaattaaatgcataggttggttgatggcaacagtaaccaaagagatgaaaccatggatttaatgtctatgagaatatcaacacatagtcttggtgtgctcaggcagcgcttctagaaccatcatctgtagcaaatcatgggatgttccaaatcagctcttcatgagcaggaaggtggaaagcctctggattaggacaaaatcttctcaatgagtgaagtgctttagtcagcgtctcctgggaagggctatggtttgatcacggtgtgcagctttgctgtttcaagggccctgggggcaaaccagtcagatgagcttctggcattgaccttgtgcaggaggggcagctggagctgtgggtgagtgcacatttcattgggcaagtgcttttgcaagaggctcaagggctgtcggtgctattcgttccccaatagtgttagctcattcaatgtcatttcctggaagacaggtaaagaaaatagatgattttgattgttagggagaatgacttcctttgaagaatgaatggagaaaaatgccttcctgacaagatgataaaacctctttataatacttcatgcaaacttcgactaaatcatcttatttctcagttggggaggtgaaatgaataatagcagaataggggaagggaagatagaaactagcaatgattgagggttgctacatatgaaactgttcaaatgcattatgtcattagagtcagttcttgccatatatgcctgaatggaaagaattttgcacagataacttttttgaatgtctatttggctttagaattcacattcagttgttttgatagagg

SEQ ID NO: 1879388 - DNA, 4001 bp, Homo sapiens
tcttcacacactctgatgtcaataggtggtgactcgggtgggcaccacttgacatagcaggctgacattccctgagcatgtggacaattcagttgtctcagtgtcacttgtttaaaagacaatctttttccctattgaatttgctattgtcaaaatcaattggccatatgaatttaggccattaacccacacataggcaaaacttccctcaaaataaaataaaggcctaaatttaagggctaaactatacacctcttagaagaaaacatagattattatattcatgatcttgaattaggcaaaaacccaacttttcctggttaaaaaatagttgaaaaatgaaacaggatcaaaactaaaaatgttggcatttaaaagccaccaataagaaaatgaagagataaaccagagactgagaaaaaaaattcaaatcatatatttaatacaggactcatatccagaatatgaaatacacttacaactacgcaacaaaaagataaataacccaattttaaaataggcaaaatatttgaataaccatttcatcaaaaaggtgtaggaatagacaataaaatacatgaaaagatggtcagcatcatcagtcagcagggacatgcaaatcaaaactacagtgagacaccacttcttacccactagaatgctataataaaaaaggacagtaacacctgggggaagtgaaataatgacgtggaaaaactaaaacactcacgcattgttgatgggacatgcagtcacgttggaaaccagtttggcagtatcttaaaatgttgaagatatatttaccatatgacctagcactatcacttctagctatctacccagaagaaaaaaacctatgtccacacaacacatgaatgtgaatattcatagcaactttatccataattgtccataaagtagaaacactcaaatatgtatcaactgataaatgaataaactaatgggagctatccatacaatttaataggatttgtcccctaacaggattaaaatattgatatgtgctgccacatacatgaaccataaaagtatattaaagtaaatgaaagaagacagatacaaaagaccacatattgcatgatttcatttatatggtctccagaaaaggcaaatctgtagagtcagaaagtcaattagaggttgcctggagctggggactgggaaaaagtggtggtgactgatgaacataggggatttcttaggaatgatagaaatgttgcaaaacaggatcatggtgatggtcacacaagtctaaaattttactgaaaataatttaactgcacacttaaaacaagcgaatgttatgtcaattatacctcagtaaagctgtttaaaaacaaaagaaatttagtagtgtggcccccatcagtcttgccctttgtttaatttctcactttctttagggcttttatttatcggttccactcagagactccaagagacactggctgaaatctatcagcctccagaactctcaacagcatagggaatgtctggccccatccgaaaggtgatgggatctgtaaggtgcactctagcatgtgctatagcaggcaaaggtgtgtgatgcacctgggtggttcagatagtgctccacatgtctcagcaagacccagggcctgtagctatcggagaacaagctgctacatcttgcagcacagggccaaccttttctaggcaagtgggtttgaagcattggtagtcaggtcccaagtagcagttgaatgttttcaacatgggaggagggcaagacctagagtggggtttcaaagcaaatcatttgtagaatattacttccaacaactgcagaaagcattcgtttcaagtgtttatgggatgttcaccaacacagaccttttgctgcaccataaaacaagtctcaatatatacacaaggatcaaaatcatacagagtatatgctatggccacagtagtatttaattagaaattcaaaacaataagatatctagaagattcccaatttcagaaaacaagctacatactctgttggtatcggtcacttgggtcaaagacgaactcacaagaaaaaattcaaaacatcattaactgagtgatgataacccgatgcatcaaaatgttggctgcagctgacacagtgcttagagagaaacttacaactttaaatgcctgtagtggaaatgagcaaaggactaaagtcaattatatatgcttttataataagaaccctgaaaaaaaggagtaaaacaacccccaagttaataaacataagctgataataaaaacaaagaaaatcatgaaatagaaaaatgaacaaacaatagagacaatcaatggtcaatccttctgtactccatgaacaaaacttcagttcagaatgattttatatttaaatatatatccagaaccacagagatcttagaagaataaattaagaaaatataggaataaaatgaaaattctgtgggaataaaaatcagaaagtagctgcctaccagggtaaattgggggcaggggagggaattaactaagaacaggcagaaaagaactttctgcagtgaaggaaatgaccaatacattttttgggtgctacttacatgggcatacataactgtcaaggttcatcaaactaaacacgagctctgggcattttagtgaatataaattacacctgattacacctggattttttttttttttcttttttgagacggagtctcactgtgtcgcccaggctggagtgcagtggcgcaatctcagctcactgcaagctccgcctccagggttcacgccattctcctgcctcagcctcctgagtagctgggactacaggcgcccaccaccaggcccagctaagtttttgtatttttagtagagatggggtttcaccgtgttagccagggtggtgttgatctcctgaattcatgatctgcctgcctcggcctcccaaagtgctgggattacaggcatgagccactgcgcctggcctcgatttttttaagtagaggaaagtatcttggagagcttatggtggtgaaatttgggcagttctcaggtatacgctcaaggagcattcacagcatcttcagaaatttgctgagaatggttttgtacccaaaaatatgggaaaagttcaaacatctatgataagagtcattggagcatacaaccacaaatccccactcctgtggtacaggccatatcattaaatggttaacactagatagctttccttcaatggtgttcttcatctaggaacccagagctctctgggggaaaattgcaattgaggttttggatatattgaataggtaagtaagtcacctccgtaaaacttagtgattggagctgtcaccattgcaaatttctaaactttgcaagacagcagcaacatttcaaatgacactcagagagaggagataacgagctaatgtggatttccttccaaacatatttactgcacaaaagcaaagttcacattacacttggagatttctctcagcctagtttaagatcacagattgcggatccccgatatctggtatcaactgaccagtgtcctgttaaggctaaacctaagactctttactgcattgctgccttagaattggacttctcttcctgttcctgggaagaattagagatatagactaaaggtcactattcttctgagaaaagggatgctggaggaggcaggagaaatgagtatgtggcaggagttcaaggggataaggggcaagtcagaagccacggagcataaaggcccagggctcccttaggggatgaagtgacaagcaccctgactcttttgtccagctttaacaatctaacagtaagagcttcttcattttctttcagctactcctggcaatggtggagacatggaatttttgcaaaaaaaatggggtagaggaaaataagacatctgtgtgagtatataaccatttgatctctttttttagccctctccagggtcaccctagaatcagatctgctcccca

SEQ ID NO: 1879389 - DNA, 4001 bp, Homo sapiens
ctagagggcggcgaggtctctccgcgcagcgtcccaggggatgcggcgcgcccccgactgggtgcagcggcaggccgcccccggcagcaagtgccgggtgccatggcaacggcgggaatttcccagtcggggcggccggaagcagccccagccgggctcgcggcagcgaaagcaaaatccgatctctctcccgggggagcaaaatggacgaaaggcgaccccccaggcaggggcgctgggtgccttgggaatccgaggaatcccttctctttgccagtcggaggggactagatggagccgaaggggccggagatgggccgagcgctgccccccgggggtcctcggcgccggacgcagcttacgagcgcaacgcagcaggctccattcccggccgccgccgctcagcccattacgcaaacctggcgggtccaaccaaccccgctctgccgccgctgctggaacccatgaggcgtgcttgcaggcttcgggcactacgcggggctggaaataccacgcactgccccttcgcctagacccccgctcgggccacgcgggttctgccctcaaagctggtagctgccccagacttgggggtggggggaggggaaggggcgaggctggcgccccctcccgcttttggctcccgcgttcgttgcagcagctgttgccaaatgaaccccggaatgcggacgtgcaaaccctccaccccacccccagccacacacgtcgcggtcagagaactgggaagggggcgctgggtccgaggttctggaaaagcaagaactcacctgcaaacaggcagtcctcagctctggacttctggatcacgacgtcgatatccttctgaattcggtcttgccttgaacacatccccattaaataaatccttggaaaagaagcagccgctatttccaccccacccccctcgcacgctttcagctttcgtaaatattcagttaaaaatgaaacctctggccgaggcaggggctgaaggccaagtggtttcggaagtgatcctgggtgagaggaggaggaggaggaggaggaggaggtggaggaggagggggaggtcggctttccatttccagatgtgaccgcccagctgctgctcgccgctgctggattccaatttcctccccttctggcgatggattggtgatgaaaccgagtctcactttctccttcccccgcccggaccaaccgccgtggggggccgagggtgccggggacggccggagagcgatcaccggctgggcggcgggagccgacgaggggcgagccccgctccggctcaagcgcgcacacccctcacggcccgcactccggccttccacacccgtgcacactctcgcccgcgggcggcggcagccgtgcccaggctgctgcagcgccacccgcccgccgcggaccctccgcgccctccgcctagtcacccggcccggccgcgggccgccggggctcgcagagtgtcagccatcccgggcaggagtcgcgtctccccaccccgacctccactcgcgccgggagctgagcggcagtgtaggtagtgaagactccctggggctcccagccttccctctccgcgctctccccccatcacttttatgaattcgactccactttctaaaggaattatgagtcttgtggcaaacacaaaccggagtggccgggagggggaaaaggagggaaaagaaaatctttaaaaattaaaaaaataataaaacgaacaaatctttacttgttgccacctcagataacacggaaaaagccttgaaattactccagatgtgcaccctccccttccctcagtgcctgagtctttttcctccagatcgaagtatttcagcccttttggggcgccgtttgcgaaacacagccccttttgagggacttcctcctcttgaaaagactcaccagttctcccttcctaggtgtttctgttcatgagaaattgtcagaatcaactggcacgttccagggtcttcctaaaggatggaaacctgtttggcttgctttttaaaaccacctcctttgacagtcagtccagggaaagctacaatccaggtgttcagaaatgagatactgctctgattctcactttctgttctgcctaaggacacctcagggtgacgtagctgccccacctctatattggtttatgccctaggagaggtctccagcaggcacttttcttattgatcttttctccgctgagaaggctcccaccagtagaccatgactcgttttgctttgcattctcagtgccacgtacagtgcctggaatacaggagggtggcctaaatgttggctgaatgcatgaatggtcatttcttgcagcctcttttcattaccctgtctcatcagctttcttatcagaataagtgcccaagagtgccaaactgtttcagacccttaatcaatttagttctgattctgaccgtgacaacatgatgttcagcacggtaggaatgactgccatctctgaaggagtcttaagattctgtagaatcaatgaaagattctatgttctaacgcctttatctttcaggaaagaaattacaaaatagtttcattgtccagtcatattcactatgagttataagaggaaacattctatctagaactagaaataccatttgacccagccatcccattactgggtaggtacccaaaggactataaatcatgctgctataaagacacatgcacacgtatgtttattgcggcactattcacaatagcaaagacttggaaccaacccaaatgtccaacaatgatagactggattaagaaaatgtggcacatataccccatggaatactatgcagccataaaaaatgatgagttcatgtcctttgtagggacatggatgaaattggaaatcatcattctcagtaaactatcgcaagaacaaaaaaccaaacaccgcatattctcacttataggtgggaattgaacaatgagaacacatggacacaggaaggggaacatcacactctggagactgttgtgggttggggggaggggggaaggatatcactgggagatatacctaatgctagatgacgagttagtgggtgcagcgcaccagcatggcacatgtatacatatgtaactaacctgcacaatgtgcacatgtaccctaaaacttaaagtataataataataaattttaaaaagaacaaaacatcacattgtacgacataaaaaaaaaaaagttggattttgcaaggaagatagacatctgactaaagtttggccaagcaaggaatctttgttagtactacttcttgtttaaggaaagaagagacattcatctttccttcaaacagtataagtctcttttcttgtttgatcaccttttattcattaaggaccagttgaatcatctgttgggacttggtagcagaggatatttcctggatagtgtgagctatcaggcctttaatgtgggaagtttagtttctataaaaataaaattaaaaaagattaatagttggaacgaactataaagacagtttctgagcccagagggcagctgatcaataagatttctagatgctgggcttttaatatcttcagctggagtgagaagaggcattggattagtttgcagtttgaatgccataaagatgggccacacacaagctgttgtggtaatttttctgaagcttatgtcaagtcatccagtttcagtttgaaggacttcaagaaaagaaaagtttataattttagtgattccaagccagaatagcaggaaaaaaatgaaatattaatttggagtattgtagctaaatattgtagtaaactagaaaaattgaggatctattgcagattgcaggcagataataaaacctcagaaaaaaaaaaaaaaacagctagaatctaatattgggtgcactgcagttttctcccgaaacataacttttctctctatattcactctcatttctgtcaaagataatcaaagtcagattgatttgtttgctaaataagtttaa

SEQ ID NO: 1879390 - DNA, 4001 bp, Homo sapiens
ggtctaaggaattccctctaagctaaatctgatcctttcatatgtggctactgctcttttaaactactgtatccctaaagggctaaaaggaagaaaatcctaacttaataagtgaaggcagcaaggcatagtatttgaatggctacctttcattttaactctacttcttaaattcacaattggatttgggtttgtttcaagttgttcacaatttactaacgaaatgtgcatctctcattcttcccccaaaagaaagaagtcatccactccagctacatataagtctccaatttctgtcttacaactaaacgtgaaaaccgaaataccactcattgaaaaaaaaaatatacagagaattggcaggctgcatgtttatgtgaaccttcagaaaacatggaaacacgcagccccaactcaccaggaaaatcaacacttgtgatcaaactattttgtgacattttatgtcttttatacatttcacttcatatccagtattccagttttgcaccggcttgcctgtatcaaccccaaatcgcctgagagcaatctagtactgtagcagaaccgtttcaacatgaagagttctgctcatcgcctgtggcgtggtcttcgaaacacctgaatcaaacattgattcccctccccctgctatttaaaaccgagggacgtcaggcttgggttgtaggtaaagaaaagccacagtaatcaaacaagcaaccaaaatacccgaacacggaacacgctaagaacaaaggaaacacaagagtgtgaacaggaaatgaagcaactctacacccataaataccttctggggccgccaacataggtaaaagtaaaggtggagtctgagtatctgaaatctgaaacagaaagtcctgtcaaaagctacccctggagtggatttgttttaaccccgatcaggacttgggcgctccatttggtggagtcaggggaggcctggccgggcgggtggcgagggctagagggcggcgaggtctctccgcgcagcgtcccaggggatgcggcgcgcccccgactgggtgcagcggcaggccgcccccggcagcaagtgccgggtgccatggcaacggcgggaatttcccagtcggggcggccggaagcagccccagccgggctcgcggcagcgaaagcaaaatccgatctctctcccgggggagcaaaatggacgaaaggcgaccccccaggcaggggcgctgggtgccttgggaatccgaggaatcccttctctttgccagtcggaggggactagatggagccgaaggggccggagatgggccgagcgctgccccccgggggtcctcggcgccggacgcagcttacgagcgcaacgcagcaggctccattcccggccgccgccgctcagcccattacgcaaacctggcgggtccaaccaaccccgctctgccgccgctgctggaacccatgaggcgtgcttgcaggcttcgggcactacgcggggctggaaataccacgcactgccccttcgcctagacccccgctcgggccacgcgggttctgccctcaaagctggtagctgccccagacttgggggtggggggaggggaaggggcgaggctggcgccccctcccgcttttggctcccgcgttcgttgcagcagctgttgccaaatgaaccccggaatgcggacgtgcaaaccctccaccccacccccagccacacacgtcgcggtcagagaactgggaagggggcgctgggtccgaggttctggaaaagcaagaactcacctgcaaacaggcagtcctcagctctggacttctggatcacgacgtcgatatccttctgaattcggtcttgccttgaacacatccccattaaataaatccttggaaaagaagcagccgctatttccaccccacccccctcgcacgctttcagctttcgtaaatattcagttaaaaatgaaacctctggccgaggcaggggctgaaggccaagtggtttcggaagtgatcctgggtgagaggaggaggaggaggaggaggaggaggtggaggaggagggggaggtcggctttccatttccagatgtgaccgcccagctgctgctcgccgctgctggattccaatttcctccccttctggcgatggattggtgatgaaaccgagtctcactttctccttcccccgcccggaccaaccgccgtggggggccgagggtgccggggacggccggagagcgatcaccggctgggcggcgggagccgacgaggggcgagccccgctccggctcaagcgcgcacacccctcacggcccgcactccggccttccacacccgtgcacactctcgcccgcgggcggcggcagccgtgcccaggctgctgcagcgccacccgcccgccgcggaccctccgcgccctccgcctagtcacccggcccggccgcgggccgccggggctcgcagagtgtcagccatcccgggcaggagtcgcgtctccccaccccgacctccactcgcgccgggagctgagcggcagtgtaggtagtgaagactccctggggctcccagccttccctctccgcgctctccccccatcacttttatgaattcgactccactttctaaaggaattatgagtcttgtggcaaacacaaaccggagtggccgggagggggaaaaggagggaaaagaaaatctttaaaaattaaaaaaataataaaacgaacaaatctttacttgttgccacctcagataacacggaaaaagccttgaaattactccagatgtgcaccctccccttccctcagtgcctgagtctttttcctccagatcgaagtatttcagcccttttggggcgccgtttgcgaaacacagccccttttgagggacttcctcctcttgaaaagactcaccagttctcccttcctaggtgtttctgttcatgagaaattgtcagaatcaactggcacgttccagggtcttcctaaaggatggaaacctgtttggcttgctttttaaaaccacctcctttgacagtcagtccagggaaagctacaatccaggtgttcagaaatgagatactgctctgattctcactttctgttctgcctaaggacacctcagggtgacgtagctgccccacctctatattggtttatgccctaggagaggtctccagcaggcacttttcttattgatcttttctccgctgagaaggctcccaccagtagaccatgactcgttttgctttgcattctcagtgccacgtacagtgcctggaatacaggagggtggcctaaatgttggctgaatgcatgaatggtcatttcttgcagcctcttttcattaccctgtctcatcagctttcttatcagaataagtgcccaagagtgccaaactgtttcagacccttaatcaatttagttctgattctgaccgtgacaacatgatgttcagcacggtaggaatgactgccatctctgaaggagtcttaagattctgtagaatcaatgaaagattctatgttctaacgcctttatctttcaggaaagaaattacaaaatagtttcattgtccagtcatattcactatgagttataagaggaaacattctatctagaactagaaataccatttgacccagccatcccattactgggtaggtacccaaaggactataaatcatgctgctataaagacacatgcacacgtatgtttattgcggcactattcacaatagcaaagacttggaaccaacccaaatgtccaacaatgatagactggattaagaaaatgtggcacatataccccatggaatactatgcagccataaaaaatgatgagttcatgtcctttgtagggacatggatgaaattggaaatcatcattctcagtaaactatcgcaagaacaaaaaaccaaacaccgcatattctcacttataggtgggaattgaacaatgagaacacatggacacaggaaggggaacatcacactctggagactgttgtgggttgggggg

SEQ ID NO: 1879391 - DNA, 4001 bp, Homo sapiens
acatagcaagaaagaacaccagcctgagaacaaaaaatttaggttctaggcccaacttgatccctaatgagctgtatgatttgattttaagcatgtgacttagcttctctgggcctcttattctttatctgtacattaatttacttaagttggtagttttcaattctttttcaggcataacaactttttttttcaaaacaaagcttgtacacagttttaatgtgcaaaacaagacaacaactctggtttagtagggtgtctgcttggtttcaactcctccactatggtggcctctaattataggggcccctcagaactgtgaggattccaagatagcacggtctgagaagcatggaatccaagagcactaacattcttcctaatgctgcgatgttccagtcaattactttgtctctggtttaagagcattcaaaatcttttccaagttgttccaccctttccttccttgccccatccccaccctgttgagtatttccaattttagctctgacctttagagtccttgttctatcttcattcagttccttcaactgctgggatccaccccacaggtttggtccaaaacaacctatggggtgtattccactgtattctaattatctgtttaattatctgcttccccaaccagactgagtttcctgagagtgggtgtcttgtcttctcacctttgtctcccaggtccagtgcggtgcctcgccctcttctctattctcagtacacactgtctgagttcttctctctaccttacctatgtatgttctacccagatctctctcctcaacttcagcctctcttgtacaactactttccagacaattccactttgggtatctcataggctcttcaaaagcagcacatccagttctacagcttccattcagaatatttacctcctcctaaagtcctatctcaagaaaatatgctgcaacctacctgctgctgcccaagccagaaacccttgacacctcactttctttcatttccacttccacatccaaccctttaattccacctcctaccattttttaatccatctacactttttttagagatggagtcttgctatgttgcccaagctagacttaagtgatccccatctcagcctcctgaaaagctggagctacaggtgtgtgccacagcaccagcgatctgtctttccatttccactactgttgcccaagttaagatcacatggataataacagatcattttgatggtgcttccagggtgccaactgttgcaaaaataataaaacccttttcatacattagatccttgaatgtgcgtatctgctctggttattactgtagccccattttaccattaaggaaattgaaatttaaagagaataaataacttacccaagctggtaagggttggagctgagaatttagtccgtctctccaatgccaatactctagcccttacctataatacaacaactgaaatattaactggtgttgtatccctactatcagctttgccttccaagtcttttttttcccgttctacagcccagagattttttaaaaatagaaatcttactgtgtgcggaattcattccttctggtgggttcttggtctcgctgtcttcaagaatgaagccacggagactcccggtgagtgttacagttcttaaagatggtgtgtccggagtttgttccttcagctgttcagatgggtccagagtttcttccttctggtgggttcgtggtctcactcactccaggaatgaagccgcagaccccggcggtgaatgttacagctcttaaagatggcgcatcacagttgtttgttcctcccggtgggttcgtggtctccctgacttaaagaacgaaggcacagaacctcgcggtgagtgttacagctcacagagacagtgcggacccaaagagtgagcagcagcaagacttattacgagagtgaaagaacaaagctcccacagcaggacaccagagggcagcgggttgcagcagctggctgggtgctccgcgtggccagcttttatacccttatttgccccgcccacatcctgctgattggtccattttacagagagctgattggtccattttacagagtgatgattggtccattttacagagagctgattggtccattttacagagtgctgattggtccatttttacagagtgctgattggtgtgtttacaatcttctagctagacagaaaatttctccaagtcccccactcgacacaggaagtccagctggcttcacctctccttatcatgtgtcctccacttaaaattcttcattatttttcctttgcccagggatacaatagaaatgtgttaatatctcactatgcccttcataatctgtatctggtgtcttttcttgctactgtcacccttggcttcagtcatactgaaccgtttatgatttggggggcatatattgcagtatcttccattcgtcctccatatcttctttttcctctgcttgagaaattctttatttcccccacctctttacccagccagctcctagttatacttcagttctcagctcagaaatgttcaactctaaagaaacactctgtgaccattcctgttcccagagcaccatgaatcttctgaagctaccattgtgactctacattataaatgcttgtgtatttgtctgtatcctcccccagtacaagttcccagagggagactacttctgatttattcagcattgcccattgtcttaacttgggttccttagaagaagaccctgaggtgagaattcttcttactcaagtgatttattgaggatgaaattcatatgagtgagggaaactggatagggctggggagatcagtcaagctgtgggtctagcctcagcctgattccagggggcactttggagcttgaataacatcacagagtcagcccacttgagacaaggggactgtgcttttacccccatccccaacaactgggcattggctgcaagctgctcctagagtgtgtgtgtgtgggatgaaggcagcataatctcccaggcatagctggggggagtgcttccctgctgcagggctccagagaagggtgcagctgtgactccttagtaactgggggatgcgtgctccaccagacaacaggggtctactacataccccagctgctagaacatgtcctaccacatcatactcaatacatgccaaagaaagaaatgagagaattttttcattcatctatttctcatttattcccagctgaatgatttttctagtggattacattctctaatattcccaatcttgattttttttaaagcctctcaattttcttccacctttcctgaacactaaccactttataagatttccaaacttgggtaactctagtttctcacctcatgtgcttcgtttagttctagtttctcacctcatgtgcttcattaagttctagacaaacatgagcacggccattaatatttctacaacttaattagttgtttaaggtctgactggttaccggtcaaaatgtacacatcttctcaaattgagtgggacttatggggagaaggtttctgtcaattaggagaaaatttgattttttttcttttttttttgatggagtcttgctctgtcgcccagactggagtgcagtggcgcgatctcggctcactgcaagctctgcctcccaggttcatgccattctcctgccacagcctcccgagtagctgggactacaggcgaccgccaccacgcccagctaactttttttgtattttttgtagagatggggtttcaccatgttagccaggatggtctcaatctcctgaccttgtgatctgcctgcctcagcctcccaaagtgctgggattacaggcgtgagccaccacgcccggccgtatttttttttttagttttttttttttgagacggagtttcgctcttgttgcccaggctggagtgcaatgggtcatctcagctcactgcaacctcagcctcccgggttcaaa

SEQ ID NO: 1879392 - DNA, 4001 bp, Homo sapiens
agtaaggcaaacatgcaattggtggggaagaatcagatttggagctctatacctgcttttgaaccccatgtttcagcaaagtattcttcatgccagttggttgctgcggaaatactctgagaaattctccacatgcctgtgttactcctgcaagagagattctgtagtgcaaatacatatagtcttaaggagatgttagaaaagcagaatggcccactatgatttcatttcatatacccccaaattacttaatgcaacgcatccaagaaatcccagtagccacgtaaatacttttttttaaaactagtttgtaggtaaaaggttgcctggcattccgctaatttctgcctggctagaaaatatcaccactctctatacacatgtgagaggaaaagtttatgagaaaagaacagactggagtcaggaaacttttcttcctgtagcagatctttaactatgtactgtttgaccttgggcaagtaagttccctctagggcctcattttcttatttgtaaaatgagaggaaagcactagatgattccaacagattgcatcacagaggaggctttgggttgtaaatgaccaaaataaaaaattcaaaatttcaaattagcttaaaaatacatgatatgtattgggtcatgaaattaaaaattccagaagtgggactagcttcaggtaaagtttccgttagtacttcaacaatgtcacccaaggacccaattttgatatccatttcatcttgaggctggtcctaagatggctgccagaatctcagggctacatggcatctcatgtagcaagagtgtttgcactggattcccaacaatcattctgaaagttagtccgattggaccagctttggcaacaaacgcaccccttaacaatcatcatagctggaggataaaatgtggttatcagcttaaccttggcaatatgtgctctaaataggaagcagagagaaaattcagttttcctggaaatacaggaatctttaagaacaaatcaaagacagctggaaagagggtaaggggactactcgacagataaccaacaaatgtcttctctggggtttcctcaattctggcatcttctacttgctttttctgctccgagggagaagtaagttggctttaagcatgaaagaggacaccgtttgaagctctttgtgcttgaaagttcctattgcctttgaattttgccctaaccatgaacctcacagaaaactacacaataacttcagtgtaagcctttttagtcttttgaacagttaatgaaaataaaacatatggagaaatagggaacacacatatgcacactcacacatgcacacacagacacacacagacacagacacacacacacacacacacacacccttcctgagcatatgcccattcaactgcataacacttgtcctttccctgttcttaatttcttattttcaaaattaatctgccgttttcctttatactttaaaaatttgcactaaacttctaactttctaaggatgaatagagacacctttctctttcctttatcccttaagcacatacatgcacagacacgtatacacatatcatatattataccaggaaaaagaaacccctatcaacaaacctgaaattgaaaagccttatcagttaccacatttcaggcagggtaaccaaaaatcaaatttcaaatgatctaaatataaggaaatatattaccttataaagagaaatcttgagttaggatagttctaggttaactcagcagctcagcaatgtcatccaggccctggattttttctccatccccgccctgcttttcctagaatgctggcatcttctcttagggtgactcttctcagggtaccaagatggctgccgtagcctaagcatcacatgctcatggtaaatctaaagacaaaaaataatactttctcctcctgcttccttttcataaagcaaaacaaaatctttttctggactactacctcctttcaagcagacttcccctcatgtctctttggttaaagcagtcttacatgccctttcttaaattaatccctggaaagatgaattaccccagttggtgtgccaatcacgttcacttcctgggagaggggttctctcttaaagcacataattgcctgttacctgaagctaatagaatctgctacaaaggattttcagaagaaaatgctctggtgaaggatgtgtaacatgaagccgttctctaaagccccacccctacccagcagtagactttccctccagtgtcattgggcagaaggggttacatgcctgttctgaaataccaacttaccacaattcccacaaagaaatacagtaatcattcctgtattaaaatttctgtttctctttttattactggccatggaaatgagggtgatttttttatttttttattattatttttttattttgagacaggttcttcctctgtcacccaggctggaatgcagtggtgcgatcttggctcactgcagtctctaattctcaggctcaagtgatcctcccgcctcagcctcccgagtagctgggaccacaggtgtgagccaccacaactggataattttttgcatttttttaagagatgggggccgggcgcggtggctcacgcctgtaatcccagcactttgggaggccgaggcgggcggatcacgaggtcaggagatcgagaccatcccggctaaaacggtgaaaccctgtctctactaaaaatacaaaaaatcagccgggcgtagtggcgggcgcctgtagtcccagctacttgggaggctgaggcaggagaatggcgtgaacccgggaggtggagcttgcagtgagccgagatcccgccactgcactccagcctgggcgacagagcgagactccgtctcaaaaaaaaaaaaaaaaaaaaaagagatggggtttctcctttttgcccaggctgctcttgaactcctgggccaagcaatccacctgccttggccttccaaagtgtgaggattacaaacgtgagccaccatgcccagccgaggctaaatatcttatcattattgtgcctcaatttactcctctgtaaaattgaaataacattacagcatctacataatcatatgcttttgaaggttaaatgaaatgaggtagatataaatggcacagagagatactagtattctttaaatattagttcctttcctgtattgccatctttcttactttccttcacctaaggacctagaaagaagagagtcacacagcataaaatacattaaaattttcatgtagctgattttttttcccaagatggagtcttgctctgttgcccaggctggagtgcagcagtggcgtgatctcagcttactgcaacctctgcctcatgggctcaagcaattctcctgcctcagcatcccaagtagctgggattacagacatgtgccactatgtccagttaagttttgtatttttagtagagacggggtttcaccatgttggccaggctggtcttgaactcctgacctggtgatccgcctgcctcggcctcccaaagtgctgggattacaggcatgagccactgcacccagcctaattttttatttatcttaaattttgggatacatttattatatgaaataaatacatgttagcatattcattttgctctgtatttaagtctttataatcccagtcggcctggatctagagctcataactttggtgccctacctttgcctcctgagtcatctctttttggggttgtagcaaagctgcccgtctgtacgtgagtatattagaatgaagttgattggataatgtgacctattcaaaggtcatgaggccccctcaattctgtcacttttaagtctcccattagcattttaattttagaccaatatttgagttatagttctatgtatttagctagagaagaaaggttttgcttaaggatcattgaagttaatattgtggcagagaaggcttaatggaagagttaatatcttaactgg

SEQ ID NO: 1879393 - DNA, 4001 bp, Homo sapiens
actttaaccatctctcctcctgacaaggatgaaagtagaaccaacagcgacatcagaaaggaaactgcgtcttactcacttgatgaaatacacagctccttcctgggtggaatccacttcccagcccttgggcaaacctgtgaggaagcaaaatcaccagaatgagataccctgggatcaacctctcttcctctcttcccacaaaccccacctgcacttaggagggatgggtgcctggacagtcaggaaaatccaaatataagccagccgagttcaaaccaaccattccatccttttttgtccgtgatttctagcagtgagattcccagcaaataatgagagatatgggagtggacgggatgtcctccgtcaatgagcggtgaagtgaccgaatgaatcatagcctggcaggatgcacttattcattcaacaaatctttactgagcatctacgatgcgccaggccctgtgccagcccctggatacaacagtgaacacacagatggttcccctggaagtgtcctcaggatcatctaaccagaagggcaggtcacttgccccaggaactcatcacagatcattaacacctaagatccgagtaagactcaagtctccaaataccaggccagcgttatggccatcaggctgtgctctttctggacaggaaaccaaggacctaggaaatcagccccaggaaaatgaagagacttgcaatttttaaaatctttaatagtgtctctgaaaaaaaaaaattatccatggaaatgctcagaggagaatcacagaatctcagtgtgagcaaggaagttgacagtggccaggaggcacccaggcagtccccacaggtggccatagcacctccatctccaaagatcactcataggcactatctcatcctgctcgctctcccaaaacagccaccctgggcagcatcccgcctccccggcaaacaggattccttcaccccatggctgaggaggaggagccttttgagagacccaagagagtccactgtcagaggtggggacagtcagggagctggctgagaacattccttttgggagtgcgagcctcctggctgacatattggaaaacaggtggggattctcttgatggacagtgactgccacctttctggtcagtccacacgcctgccttgtgtatgaagtcttacgaagcatagctattcactgctggtctgactgtctcctgccatgttagcagctgctttgaggcaccagctgctggggagcagtgcctgggttctgcagagtggcaggtccagtttctaatcattcattttattcacctgtatttatcaagggtctatatttccacagttgctgctgatggtgatgctgctgtttcagcaaaacagggcagccagcaagcccagctcctgccaggacttggcccacctatcacaccagctaccacttagcgagtacttccttcctctaagctatgcactttgcctctgctagtgcatttaatctgcatagcaacattatacaataggtgtcctccgaaacattttcgccgataacagatgaggaaacagaggcccagacaggttcatcaactggctcaaggtcacacaggaagtgtctgggccgggatgtgagtgctgctgtgctgtctccaaagcccacactctttcctctgtgccgctccataaatgctacttgttcccctctgtctctgtgggaggacgttgccattcaggagggcgtgggttggcagtctccccaagtagagggatccccattgggtcagaatcataaataattctgccactgtgatgtgcctgggaaagaggccagtatggattatgtcccctgcctttttctagcaacttccctccacactgccctctctgcctgggcaacaccaagagtgcttatattcccatccaggcggagtgcccgctgaggcagctgccctcgcggcaagctccgggggcatcttaaccccttcccagccttagacaaccagttggctgcagccaaaaatgaaagcattggctcacaggctggtattcatcttccactcctacctaggatgataatgaggtggaaggactcaacctgtaaacagctgaaacactgaaggtgacaccaccatcaacctggtagaagaaaacagccctggccttagagtcaggaggcctcgctgcaagttggaaatacaatggtgacaataacagcagcagccacctccattttgggagccacctctctgatgtaatgctactacttttttgaggttcataatcctctccccattataaagatgaagaagctaagtccaggaagaattaaacccctagtgcaagagcacactggaagcaatagaaccaagattgagctcagatctctctgcctccaaaatgtatgcctttaaccatgacaccactttgcttattagtcaaatggccttgagccaggtacttcctctctgttcttcaatgtttctaccataaaatgaagagtcgaactccatgatccctgaagtctcttccagaaatgatcccagctcagaagctaaaaagaaaaggactctgaacaagccaaaggcttcatcctgtgtgtccagcagtgccagctgtgcccatgattgacggaggccttggaaccaggcgcctagtgtccagtccggtgaagcgctggaaggcgagagggggaagggctggaaggcgggaaggggagagatatctccccgcactgtgacccacaccccctcttactggcccgtggtggcgtcatgaggaggatgaatggctgttcagttaaagtacctaggccttgtgattcttgatgtctctacctcaacaacttagactgaagtctttttccttggttgtttcttcatttctgacctgtttgtgtcccacctttcccactagccctgagggctaccagtgatgttttctccataatcagcaatgaatgtcagccttgtcccctttcatgtttctcctcagtgggagaaacaggcgctcccactagctacatggggccatttacatttgaattaattaggattaaaaatccatctgggcacagtggctcacacctataatcccagcactttgggaagtcgaggtgggtggatcacctgaggtcaggagtttgagaccagcctggccaacatggcaaaaccccatctctactaacaatacaaaaattagctgggtgtggtggcacacacatgtaatcccagctatttgggaggctgaggcacgagaatctcttgaacccgggaggcagaggttgcagtgagccgagattgtgccactgcactccagcctgtgcgacagagtaagactctgcctcaaaaaaaaaaaaaaaaaaaaaaaattcagggcctcagtgatgcttgtaacatttcagttgttcattgccacatgtggctcatggcaattgtattgggcagagcagatagagaacccttccatcacgacataaaagttctagagcgcagcactgggggctggcttctgccagttcaagagcccttgagacaggggattttctgactgggcagagggatgaaagatgagtaaaaatctttgtcctcaaaggcccatctcagatactaattttggaggtggaagcttagagagacactgaggtgagctccaacaagcctgcaatctcccccagatggcaggcagtccaaatgctaagctgagtccatccatggagaaaggaaaaagtcagaagcaaagttggggcacaggattcctgctgccacctcaagctattacatcctcctcaattgcaaaggcagggacagacaggttccttacctgggcaggaggtgtgtccactctggatgggtgactttgttccagggtgcacccagctggttgacttttcctcatcactgcagaaagatcaataagaaagtgtcagctacaagagaggcttttctgagcaggacactcatctccagattcacattaacaccgactattcaatcccagacacatgagatgag

SEQ ID NO: 1879394 - DNA, 4001 bp, Homo sapiens
ggcctggggagggggagcctctggactagggcggggctggaggcgagctctccacccccagccctgagggaggggatcctgagcttcgtgattggcagacaagggagagacccagcctgcaggaggggtgggctgggcctggtgggaacctccagacacctgtgctccttctctctttcctgctctcttcccaaccttttctccccacgtaggacctctcctgcccaggcctgtctcctctttgtctctcccagcctccatccatctctgtctccctgtttctcagtctctccacctctgtttttgtctcatcctctgcctctctctctcctgtttgcctttctcctcctccacctgagctcagtgcccacctcctctttctctcttgcatcccttttcagtttccagctggttctcttggttgtccccttcccagctgtcccctgcctcctaagcttccttgatgtcaacccttggccgggcagttcccacgatctcattggtctcacttctgtgtgtggtatcatctctctgtggtcccttccaccagctatctgccaggattgcaggctgcctcaagccctggctctcagcccagaatgtcctcttactgttgaggacatttttgctcttcctggaacagggcttgcaccttgttttcccctctcccacctaaaacatgtaagtttcatagggttacattataggttatacccaaactcaggcagaaaagaaaagcctccacccagcaactgcacagttgagggaagactgcagcactgcttacttcatttagacttgaagaggaacttccagccaggagttggctttgaaaacaggctgtggagttccgtctccagagtgccaggtggtcaaggggagtttcaagattactgccgtcatactcagagtgacacatgcagaaatactatctgtttattgtgcttcaaggatccattagatcaggactattgctgggcaaagcctcttcccgcagcctaggggtagtaaaggtgggggtagaggtgctggggctggggccagaatcacacacagtctgctctggcctctacccaccttcacagggaagtcaggtggctgaagccagcagaacttgctctgggaccagggtggaggcacctgcctcccatccagacctggctggagggtcttgactccctagcttggctctcctcccagggtttttttttttttttttttttgtccctggcagtgcaggggtggccaaaagcttgagcttgggaatcatgccgattggttcaaattccagcctgctcctcgatgcttgtgggatcgcctagcctttcagatcttccattcctttgccggtaaaattggctctatagtacattccttgcagggctgctgggaggaaacagagatgacatccgtgttattattgctcctgagacttgccagaaagccctccatgatcagcgtagatgccatttcttcccagatgctcctttccccactcctgggttcagcacttcctccgggcaacttcagcccctgctcctccctctctttgcacccgccccacctgccccactcactccacccaccccagggtgctgtctacttgtctgcatcctgctcctgccctgggtctgggagctcctcaagggcaggaatggagtgacttccctctctgtgcacccaggacagggctggacaggagaagggaagcccaaggagtggtgaagagccccgaaggaagggactaaactccagccatctgtcccgcggtgtctgttcatactcctcctccgtgcacgggctcagacatacatatgcgcatatgctctgtctctttctggttgaaggtcctgggagccctccggaactctgctgcctggcagtccttcagtttcgggagcttttctgtctgcccgtggcctcggctgccacctggtggctgcacgctccaaaggaagcgtagattgatgagagcctcggaagttgagcttcaggcgcggctcttccccgtcacactgggaccggacgcatttccatggcgtggtcccaggaacctctcaggtcatgccagcaactgggacttcctgtggaatgcaagggcagtggggcctccgcgagagagagagagagagagagagagagaagagagagatattaaggatgaatcccagtgtctgctctgagcaaattggaagacgatggcatcaggggcactgctctgggctatatagactgtgcctccactaaagggtccctgagaccaggtgtgggcccgtatccctggagggagaggtaacttcctctgattcgaaggcatcatataggctagtgaatggcactgagaatggcagatgccagggacaagcaggagcatgtgtgggatgaggatgcggcgtggatgtgtgacgtttcagagcctgcaacacatccgtagggaagtcctggaggagcagttgggtgcatggtggagttctgaaacagctgggcagtcggcacttgagccagagattctgctttcgacctggatgcccattgagaggttaagagctcaggtctgggtcaggcagcttggaagcagcacagcttggacacttggtagcctgggactgtggttaaatcaacgtgactctcggagctccagttcactgtaaattagggcagtaaatgatgtctacatgataagtggtgttatgaatgttaaacattcacatgaaatacatagaatagtgcttagcatacagtacacaataactgttagctatttggaaaattactattgttattatgattatttattacagagtgaactgaattggatgcaagatcacggtgcgtcagagctagcaagatccttaggatcatttagcctggtttactaatattacactatggaatttaagcccaaggaatggagagtacccgacgagcgttatgtaaggagtcgagtgagaagtaagctggatgctctgcttggctggcaggtacagaatgtgccagacccatctgtaccagcctggatctcttgaggcatcagcacaatggacctggccacaccagtttattccacaccgctgaggctggtacagttctggacatggactttgtaaataaataactgggcctttggtcagttctagctgtgagcttggaggtatggggtgggatggtgaggacaggtgggggcaaagtgaggaaaggggcagggaggagaggggagagagaaaaaggggaatgagacaggctgagctagtgagctggaattggaggttgggaacaggctttccttgatggtggtggtgctgttttctttttaattttaatttaattttattttaagttccaggctacatgtgcaggatgtacaggtttgttacataggtaaaaacatggtggtttgctgcaactgtcaacccatcacctagatattaagcccagcatgcattagctatttatcctgatgctctccccacccctgccccaacaggccccactgtatgttgttcccctcttttttgttcacttaaaagatcccacttttaagtgagagtatgcagtgtttggttttctgttcctgtgttactttgctgaggataatggcctccagctccatccatgtccctgcaaagtacatgatctcattcctttttatgtctgcatagtattccatggtatatatgtaccatattttccttatctagtctatcatttatgggcatttgggttgattccatgtctttgctactgtgaatagtgctgcaatgaacatatgcttgcatgtatcattatttttttattttttttgagatggagtcttactccctcacccaggctggagtgcaatggtgcaatctctgctcactgcaacctcctcctcccgggttcaagcaattctcgtgcctcagcctcccgagtagctgggactacaggtgcctgccaccacacccggctaatttttttgtttttttgtatttttagtagagacggggttttaccatgttgtt

SEQ ID NO: 1879395 - DNA, 4001 bp, Homo sapiens
ggtccatagagagttcactttgtgtatttggcttgtttacaacatatatagaaacccaaccacagtgtcctatactcaacaattgaaagtgaggttactaaattttaatacacatttctagaaagcctgggggtctgactctgaaaataagccattctagtaagacaacttgttaagagtttcctttcagtaagcaacatcgactaacagagcaaacaatgatccaaatttacactgttcgaattaaaatttcaagcattaacctctattttgaaatcaatctccctgtctttacataaagattatcaacttccaattatcagaagaatgcagcttatctttattaaaatgtacccccccaatatttcatgatatttacatgtttgcatagtactttcctatccttttgtaacatgttttgcaactcctgaaaagtcaatagtcttagctcttctctaaagggggaaacacaagagactgagtgactagttcagggtgactcacaggcagagtcaacattggaactcggaacactgagcctggcattccaagttcccaaaaccttgaggctcttgctaatcccagcagaattttcttctttacagggctgtgcttctttgaggcctctgagactagaatgttagtgtccaaagctttctctttcaaaagtagtcaatagtcagaaataaatgttggcctgcaagttcaatctttttcttttttttgagacagggtctcactcagttgcccaggttggagtgcagtagcacaatcatggcttactgcagccttgacctcctgggctcaagcgatcctcctgcttcagccttccaaatagttgggaccacaggcataccccaccacacccagctaatttttaaaattttgtagacatgatggtctcactttgttgcccaagttggtctcaaagtcctgagttcaagggatcctcccaccttggcctcccaaagtgctgaaattacaggtatgagccaccgcttctagtccatcttcactttttaaaaggcatagctaaactgcattgatacaacctaatgatctccctaattaatgtaactttgctggtaattgtttttttagagtcctctgtttaagattgggttaaattcaaatcaaatggtactgtttaaactgtttgctgttttttgtgtttgttccccgttagtgctatcttggacatgctgagcttctaactgccacagggctgttttgctactactgaccttataaagccaacagttagtgactgtgtatataaggatttaagagattattttaccagaataaggttgctttgtagccatccggtgtaaatggtgtttctttccattaacaaattgaagagctcttaagcacctgaaattaaataacagcttaaaaaataaattaatatacaaaaaatttaggtttactgacaatatcagattatttcccattaaaaaaaatcacccaactcttttttctgatgcctttcacgtgggacttcaaaaagcttttccaaatattttcactatctgtagttctcattctaattttgtaaattaaaaaaaaaaaagagccaaataactgacccaaagttatgcagtcagttggtagtaaaagccaaataagagctcaaatttaatctagtcgttagaatctgccacagtgtcctcttcgctaagttgtactactgcctcattttatttcccttaaaaaataattgtttgcatatcagttaaactggtcacattgaaatataaaacacgccagtattatcaagaggtcctttcttaaagcaacaaaatacaatcacctttgtgctaaaaataagctataaaaataattgtgtaccttataaatttatctacaagttttagccttcattatattcattaattaaactgccataaatcttcctttcctattgctaagatattcttaaacttgcatacaaagcaccaaaatgcacatcagccacaacacacacaaattcatcactcaatctcggtccattactcttgccaaggtcagtatagaatattcttgaaattttcacttgtagaatgaatagatgttttgtaaggattatctattcaggcagaaaaaaaggggggaggggaagaacacaagaaacaattagctattcaactggtactgagcaaattccaagtacggaatcctttgtttgtttttatcttgtttttgtttttcttacctaccttgggactccagtccacgagaagaaatacatcttgtgagatttttgtacagcctttctacaaacctccgtagagaaggagacgttgttgtcagttttggcttccttttgcagtcagggactgggacccagagttatctatttgcatttcaacacccttcttttgttttcggtcccacaagaggctcaaccagttcaaaagcaggtaaggcagttagatcattgtaatgaccctagaaaactcaaaggagaaaacttttgcaaacaatgtggttattttagcaaaaaactactacttatttcatcagtcaagcctacagagctcaagctagaccatcttgttaaaaatttaccttaggttgttcttaattctctctgtgccctagagagagaagaatgatggtggaaagcagggttagagaacagagaggaggagagttctgcatccagaatctcttctgaataaacaaatatcgctaaaatatccaaatattcacaggaatttacaggtcacattattgcatttgattctgagagcaacagcctctgtcatttctgctgaaggagcattcctatataactctaacaaaattaagagaaaagaatactttctaggtggagagagttggagaggacgggtaaaggtgcagccatcccagtgtctgaaggacactcagacacaaatgctgctggtgtatacttcctgtcacacccactcagatgactacatggtcaagattccagaatgtgatcccgacgacagctttctaagcatttaatattccaagaggcatcagcagataaaaatgtgcagagttgcaaatttttaatagaaaaatcccccagggtctatgttgaaggtcagtgtttgggaaaaggctatattataatggggctatggagtcacagattagagacggaagggaccataaggttcatttcctcaaggtccgtggttacacagctggtttgtgacaggctatgagctctctggggtctcaatctcacgctcttgagcttttggttaccaaacctgcttagatgagatccacagtgaggttatattgtaaaaattctaagacttggcaagtcagcctataatgaagatatatatgcatagacttcaaaggactgaccttgtcatcacctacaatagctctgccgcaagattactgattcaggcattcagcttttggataagcatctttccttccaacttgcatgacaacaactccaactgctcttagaaatattggggcctccagtctattgatccatctgctttctcccaattcattagccttcagctgttttcactttccttcttactcaatttttattccatggtctgttattactatatcctttttgccaatcccttaaactcccttcctctctgttttttctacaaacctatctaggaaaacgacagccctcattgaaccccgccatctcctttctctttgcttgcacgcaacagtcaaactctgctggaggtgatcaaaagcgtagataggttcatcatcaccaacttcttatgggccctcaatactaacaactacatttttgttttatttttaagaaatggagtcttgctctgtcgcttaggctggagtgcagtggcataaacacagctcaacgcagcctccatctcctgggctcaagagatcctcctgcctcaggatcccaagtagctgggactataggcacaagcaatcatgccctgctctaacaactgtgttacgtttcttttttcaacttattttccaagaattatttg

SEQ ID NO: 1879396 - DNA, 4001 bp, Homo sapiens
cgtgaaaaccgaaataccactcattgaaaaaaaaaatgtacagagaattggcaggctgcatgtttatgtgaaccttcagaaaacatggaaacacgcagccccaactcaccaggaaaatcaacacttgtgatcaaactattttgtgacattttatgtcttttatacatttcacttcatatccagtattccagttttgcaccggcttgcctgtatcaaccccaaatcgcctgagagcaatctagtactgtagcagaaccgtttcaacatgaagagttctgctcatcgcctgtggcgtggtcttcgaaacacctgaatcaaacattgattcccctctccctgctatttaaaaccgagggacgtcaggcttgggttgtaggtaaagaaaagccacagtaatcaaacaagcaaccaaaatacccgaacacggaacacgctaagaacaaaggaaacacaagagtgtgaacaggaaatgaagcaactctacacccataaataccttctggggccgccaacataggtaaaagtaaaggtggagtctgagtatctgaaatctgaaacagaaagtcctgtcaaaagctacccctggagtggatttgttttaaccccgatcaggacttgggccctccatttggtggagtcaggggaggcctggccgggcgggaggcgagggctagagggcggcgaggtctctccgcgcagcgtccgaggggatgcggcgcgcccccgactgggtgcagcggcaggccgcccccggcagcaagtgccgggtgccatggcaacggcgggaatttcccggtcggggaggccggaagcagccccagccgggctcgcggcagcgaaagcaaaatccgatctctctcccgggggagcaaaatggacgaaaggcgaccccccaggcaggggcgctgggtgccttgggaatccgaggaatcccttctctttgccagtcggaggggactagatggagccgaaggggccggagatgggccgagcgctgccccccgggggtcctcggcgccgggcgcagcttaggagcgcagcgcagcaggctccattcccggccgccgccgctcagcccattacgcaaacctggcgggtccaaccaaccccgctctgccgccgctgctggaacccaggaggcgtgcttgcaggcttcgggcactacgcggggctggaaataccacgcactgccccttcgcctagacccccgctcgggccacgcgggttctgccctcaaagctggtagctgccccatacttgggggtggggggaggggaaggggcgaggctggcgccccctcccgcttttggctcccgcgttcgttgcagcagctgttgccaaatgaaccccggaatgcggacgtgcaaaccctccaccccacccccagccacacacgtcgcggtcggagaactgagaaaggggcgctgggtccgaggttctggaaaagcaagaactcacctgcaaacaggcagtcctcagctctggacttctggatcacgacgtcgatatccttctgaattcggtcttgccttgaacacatccccattaaataaatccttggaaaagaagcagccgctatttccaccccacccccctcgcacgctttcagctttcgtaaatattcagttaaaaatgaaacctctggccgaggcaggggctgaaggccaagtggttttggaagtgatcctgggtgagaggaggaggaggaggaggaggaggaggaggaggaggtggaggaggagggggaggtcggctttccatttccagatgttaccgtccagctgctgctcgccgctgctggattccagtttcctccccttctggcgatggattggtgatgacaccgagtctcactttctccttcccccgcccggaccaaccgccgtggggggccgagggtgccggggacggccggagagcgatcaccggctgggcggcgggagccgacgaggggcgagccccgctccggctcaagcgcgcacacccctcacggcccgcactccggccttccacacccgtgcacactctcgcccgcgggcggcggcagccgtgcccaggctgctgcagcgccacccgcccgccgcggaccctccgcgccctccgcctagtcacccggcccggccgcgggccgccggggctcgcagagtgtcagccatcccgggcaggagtcgcgtctccccaccccgacctccactcgcgccgggagctgagcggcagtgtaggtagtgaagactccctggggctcccagccttccctctccgcgctctccccccgtcacttttatgaattcgactccactttctaaaggaattatgagtcttgtggcaaacacaaaccggagtggccgggagggggaaaaggggggaaaagaaaatctttaaaaattaaaaaaataataaaacgaacaaatctctacttgttgccacatcagataacacggaaaaagccttgaaattactccagatgtgcaccctccccttccctcagtgcctgagtctttttcttccagatcgaagtatttcagcccttttggggcgccgtttgcgaaacacagccccttttgagggacttcctcctcttgaaaagactcaccagttctcccttcctaggtgtttctgttcatgagaaattgtcagaatcaactggcacgttccagggtcttcctaaaggatggaaacctgtttggcttgctttttaaaaccacctcctttgacagtcagcccagggaaagctacaatccaggttttcagaaatgagatactgctctgattctcactttctgttctgcctaaggacacctcaggctgacgtagctgccccacctctatattggtttatgccctaggaggggtctccagcaggcacttttcttgttgatcttttctccgctgagaaggctcccgccagtagaccatgactcgttttgctttgcattctcagtgccacgtacagtgcctggaatacaggagggtggcctaaatgttggctgaatgcatgaatggtcatttcttgcagcctcttttcattaccctgtctcatcagctttcttatcagaataagtgcccaagagtgccaaacggtttcagacccttaatcaatttagttctgattctgaccgtgacaacatgatgttcagcacggtaggaatgactgccatctctgaaggagtcttaagattctgtagaatcagtgaaagattctatgttctaacgcctttatctttcaggaaagaaattacaaaatagtttcattgtccagtcatattcactatgagttataagaggaaacattctatctagaattagaaataccatttgacccagccatcccattactgggtatgtacccaaaggactataaatcatgctgctataaagacacatgcacacgtatgtttattgcggcactattcacaatagcaaagacttggaaccaacccaaatgtccaacaatgatagactggattaagaaaatgtggcacatatacaccagggaatactatgcagccataaaaaaggatgagttcatgtcctttgtagggacatagatgaaattggaaatcatcattctcagtaaactatcgcaagaacaaaaaaccaaacaccgcatattctcacttataggtgggaattgaacaatgagaacacatggacacaggaaggggaacatcacactctggggactgttgtgggttgtggggaggggggagggatatcactgggagatatacctaatgctagatgacgagttagtgggtgcagcgcaccagcatggcgcatgtatgcatatgtaactaacctgcacattgtgcacatgtaccctaaaacttaaagtataataataataaatttaaaaaaaagaacaaaacatcacattgtaccacataaaaaaaaaaaagttggattttgcaaggaagatagacatctgaataaagtttggccaagcaaggaatctttgttagtactacttcttgtttaaggaaagaagagacactcatctt

SEQ ID NO: 1879397 - DNA, 4001 bp, Homo sapiens
aaccttaggatcctatatttatacatttaagagcttaaatgtatatgagtattaaagtcctccaaaaagtttagtttgttaatacagacaaatgcatataggaaaagaaagagatggcgattataactaataatcatagcttaaactatttgaaagtaattaactttattcataggccctttagaagtgattgctaaactctgctagactaaaaaataaaatagtaacaaacctgtacatgtacccctgaacttaaaagttgggaaaaatataaaataaaataattacacatataagttgaacccaaataaactatgtttttaatcctaactttaataatcagaatattaatttttaattcagaagtaaacctttaaatgctgtttccaacaaacctccaaaagccagtttcagtgacatccagaaactcctatcaaaataagcaattgccatagtgtgtgataagtgctgtaatgagggaaagataaaatactatataggaagaagtgggagagatggaatttcagagtgtctaagagggaccttaaggaggaggactgggaaggccaagaaaaaggtgtgaagattaagggagggagggaacagccaaaaggagttcattcctttacaaattctgagtatgcaccaggcacaaaaccaggggttggggctccttcctgcttggagctcaaggccaggaggtaagagggagcttggcatcttgaaggaagagaaagaacttcagtctgagtgcagcccaccctgagagggtcagaggaagagcccactcactccccctgggtgggtgagcctccaggcgctggtggatgtaggtcaactactaagatggtgcagaaaccagaaggccctccaacaactgctcctcctccttcaggaagttctttgcttaatttatttttgctttgggggtcagaagcctatttgtaaagcatttaaactttgctgggactcagctactcaaactatcagcccttcagtccagcatccctgaagcctaaacaggcaagaagctcatctttggcttcagcctgaggtcatgggctgcaggaaccggtgggatctgtttatcaagaccactgaagacctgcgggaggaaggatcttatctcagtgttgccatggggactgctggctggattgactgaatgctctgcagaaaatgactcttttttagaagagaaaatagttgctattttccaaaggctaaatgtggagtgaggtggcagtgagggggaaaacagaaggcctgtgagggtaagaagtggggaccaaggccaactctggctaaagaagaatggggacaggctgctccaggactcaagagcttgagattcatgctaacccactccaagagttcaggcctccaccagaggacatggctctattcatacaagaattttatacagaaaatagtagatctgagatttacaaaactcattttcaatttcataggctacagccttcagataactccaagtcacatcacatgtctaatagttgtctcagaaagaagtacccaaaaggcatttcctccaaaggtccttcagaaactgtgaaatgggctctatttgaagaaaaccatttccatcaatgtgcgcagagcctcagtatgagtgtgcagcacagctgagcctgtcatccctcggaacacagtctgggattgcctggtggctgtctggctataaggactttggacattatccccaactccccatggaagaattttccctgtgtttcccaccaacaatactgagccaaactgcttttgatgtccccggagttatctgatcacctagatgacactgaacagagcaagatgactaggagacagcagctcagccctgacatctgctcaaggccagcagcaaaagttccaggagttatatgagccactaggtccatccaatctaccatctgtcactggcttaccttgccaccttgggtcactgacttccccactctgtgccatctgtgaaatgtgcataatagcacaccaagtccttctgtacctcctccttcttctcctgttctctctccctccctgcttccctctctcccttcctcctccctccctctctccctttctttctctctctctacctctcttcctatccccctctctctccttctctctttttcctatagaagagagatgatgtgtttgtaaagtgctttgagctccttggagatagagagtctataaatataagctgttatcactgttaccatggaaacacacacagacaactgtgctctgtttctgcatttgctgagcataattctggccttcttgccctgctggctgttaaacaatcaatggttttacaaagctcaacagccaggtaataggtggagcctcaaggctgaacttatttgctattcaactcttcttcatgtgaattttcaaaaactgtgtttctgtttgctaaggtagaggatcgtataagattggccagagccagctgttaaaccagggatgcaaataatgacaggcataggtatgccacccaacccaggaccctgatctgtaacaagggagaattccaatgagctgcaaaaataatattctacccatttcctaaatttactccaactcctaactcctcaactttacaaccagagctggcaaaatgttggaataaagagagttatgagtttgcacccttctgccaatttgtgaccatctgaaaagcaggggctatatctttttcattattgtctccacagggcctagcacagtgcctgcacatagcagatgctgcgcagaggcctgtggaaaaaaaaaatgaataagcgagttataaatggctgttgttttctattacacaggtaaaagtgttgttgagtgaggtatgccgtcaaatgttggcttgggcctcgggatctcagaggacatcagttttggcatggccaatctgcttccttcaccctaccatcatagtgagaacaacgatatcacttcacttctagtttaatgggtggtcctgggaaagttgctctgtatctgaaagccccatatagaatgacgtaacctagttgttaaccagacaactgaaagatccagtgcaaaaagtgaaagtgtgaaaaccataggaaaagtcctttttcctctcaggcaatgctgtgatctcaggggtaagttttccaggcctcagttaggaatgcagtgaaatgggaatgggctttggactcagacacatcagaactcagtgtgtgagctctgccacttactgaccttcctgagcctcccttctcccatttgtaaaatcagaataatagcactctctcacaggtttgaggtggcagttaaacaaaattagtatataaacccatagctcagtggctggcaccagtcaatgatttatgcatgatcattccattccattagtttgccagtatgtatgaatatccatttattttgaatacttcacttactagtttattctaaaggcctggcagatgtttcaggtcccactaagatgagtgtatgtgatgtctctgcctttggaaagccggattggaggatgtgaaagggagagagaaaatgctcaaacacagacagggagtcgggacctgctacataatttgcagagtccagtgcaaaatgaaaatgcagggcacttgccagaaaatttattaagaatttcaaaaaggtgacaactgagcattaatccaagcagggggttccactaagctaaggacgccgtgtaactgcatagattgcacaccgatgaagtcagccctaaagccagggcagaggtaaactggtttccaggcttggtacagacgatatactgatgaagtaagtacagtgagtgatgcagtttcatggtgttacccaaatgctgtttttgtcatcaggtagctctaatatgatcacagaggacagaggtattttttctacaaaatacttgaatacatggaattcatattctaagctaaacctaactgatagtaaaggtcatttcaggaggaaaacac

SEQ ID NO: 1879398 - DNA, 4001 bp, Homo sapiens
gatgcttcctccagcacggcaggaccagcatttctggctctcaaacccggccttttccctaaggaattaacctggtcatgggtctccagccgttagaaacactgggagtctgcagggctcatggagaaatcgagtttccatggactccctctctgcccagaccccagcagaagttggtggttaaagccccgctctagcctccaagaccccagctatgaaattggttttggaactcgacagcagcgtgcagttgtccagtgtaggagcctctatgtggccaacccacactcactgtccttggacgacccaaggaggtcagtaggaatgagcttacagcacttacaatcccagcgcaggggccccagggcctggcatcagcctcaaggctctgcagagctagacttggtttgaaaattgcccttagaccttttagtatcaaccttttccccactgggcctacatttgccctacctgttctccaagccccccaaagcccttgccaggcagggacacagaactgggccccagggaggacttgcatctgatcttccctgcttcaccctttttccccacgggactcctcaatgcctgacctgctctccgcttctaagtctggccacgcgggggcagggcctggccaggccaggatgcaacctcggccagggccatggccttggggacagcctgcctgggctcctcgagcaggctcgggagacactgccccactggagccagggctgcgtcagtgccttgcaggtaggcagcccggctgtctccctggcgaggcttgaccggcagctaccccttcccaggcagatccatgaccccatccctacccaacagcctggtggagggcaaggaccagatggcacagaccagcttgctcccatacctcctgcccttcttccctaggggctggcaacaggccagggatggctgtcctgtcctagcctggccagggttctgagaaccacctcctgagctggaggaggaggcagggagagggcctgagagagttggggcacccgtagaagaaggccaggactgcacaaccttggcatctgttggctacctccaggccaggggcaaaggaggcctctgctgggctgcagggtgagggtggggaagggaccctctctgcaggtgggagtggttcgcaggcaccatagtaacttccccaggcctcctcccaaacctgcagaggcttcaggcaggagcaagggggacctgggtgcagagatatgggagtgaccttgagtcctttctagccagcagctccagccaggttgggcccaccgttgggaacctgcccttggcggggtttaggcaagacagcgcccgtgttcctgggctccagcacctcccacccactggggcgagcaggttcagaaccggccttggcggtgcaaagctgcagcggtgccctagttggctaggcagatcaagacctccagagccgggcctgtaaactgagctgttctctgccccaacccctgtagaaagatggtcagggtgtggggagggtgggtaaaggggtcgatagaccctcgaaaggacggcagggaatggggctgtgccattgctcatggcccttctctaggcgacactcacctggtgccagaaacagcagaggtagcggccagtgagcgcttcctccatccggggctcgggcggcgagctggctgcaagactgggcaccctggagccgtgggagccttgggagccgaatctgggttcgaatctgagcagggaagcggtgccgaccgcggaggatccaaggcagaaggcccagcgcaccgccgccgccagctcctgcccaacccggctccgctgggcttttcctctggggtggcgccggccccgcgcccctccccatccggggcgcctctgctaggacaccggggtctcggggtttctcagggctgctgcgtttcacctcctttaacgcggaggcgcggagttgcacgtgtgggtctcagtggagccgccacaggtcttattacacaacaaagggcagggagggcaaggccaggagcctcgcggggcggcgcagagaccccgcatcgcgggcgcgacccctgcctcgggctcaggctgactctgcggcagctccaagtcccgttgccgggcaggacttcggtgctccggaagggtgcggggcagcaacctggccagggcagcgcctcggtttccttccaattcattctcgattcccagatactcagatgagaaatccgcactcaggccgtcaggctcctgggcccgggccaccctgcctgcgctcagcccggcccctccgccgcagcgcctcggagtttgggggctacaggggaagaggaagcgtctggtcggctcccgtccgagctgctccacctgcgccgctggcctttccgcccgctacgcacctgggccccgagaggccagaggggagtgtccccagtggcccgggtccccgaaggtggcccagctcgggcgctcgcgcagccgggtactcaccttgggggcgcggcggcaggagagcgcgggcggagaggtgcgggcgccctgggacgaccagccgaggacgcctggtgtttggacggctgcccccgcgctgtccccccgtgcgaggcgtgttggcctccgtggcctcgcgagggaccgagggcggcgggtccgagtgccgcccgccggcctgggcagtggcggagcgcggagctggcggcgcctccgctgttgtttttgagccgcgaagcccgaagcagcagccgttgggtgggggcgaaggggaggaggcgggggccgggaggcgcgaggggggcggtggggcccggagggggcttcggaggagccgggttctggcgcgcgagccccgacgccccctccagcgatcgcagggcggggacgggggccgaggggagaatgcaggagaaaagcgggccggggcgacggggaacgcaaagcttttaaattagtaatcaaacgcagtaaaacggagcaaaaccagcccggactcgcgtccgaactatcggcgcgtgtgccccgagatccaaggaagtcgtgtggaaaaccgcagccgccgccccatcttcggccccggctggggcgggagcagcagcgcgacgcgccgcgacgcaggggcagggtggggggatagtcacctcgcctccggggccacctgggtccttttaaagtgtccggggtgcgggccccgggcgggagcgccgaacacggaatgttttcttaaagggccagttccgagctgcgctgaaaagggggggggggagaggggggagagataagtgagacgaagaccgagaaggccgaggagagccccccaatcccgcgccgaggcggcggcggcggcggcggcggcgcgacgatgaggatgatgaatacattgcaaagtttttttggccccggcgaggggtgtcagattgagtgctctgtgcgcatgtgcgaaggtgtccaaactgacaatgctggggagatgaagatagtgtgtggctgcttctggactcaaggaggaggagagagattccgcgagccgacaccatgcgatccaaggcgagggcgaggaagctagccaaaagtaagtctcccgcgctcggccgcgccgcgccgccggggcccgggccgccgggccggggcgcccgggccaggggtgcgcgtcggggcgcggccggcgcgcctgcggctccgggcccccggctcggccgcgcggcccggggggctgctccgcctcccgcgctccggggcgaccgggctcggcgcggaggctcggggcgcccgggccgcgcgctccccgaaggcgccggccccctccccgcggaaccccctccccccccaccagtgtcaggcgctcgggcccgggaacccgaggcgcgcggtgggggccggggaggggggcggagggggagggccgggggtggaggggagcgaaaagtgaaagttagcgaaaagttgacgaaaggggagagcaactttttcctccccgctcgctctctccctctctctctccg

SEQ ID NO: 1879399 - DNA, 4001 bp, Homo sapiens
tttattctgttgagttagcctttcttttgggatttccaggtcaggatacacttaaaagtgtatgctgtttctttgtatttgtgcttgataccttgcctagtttcattttatacatgcccttttaaaattctgaactcaacagactggttctgagacggaggcatttatttctttggatgcctcccctgacttcatgctgctcatgaccacagctggggacagagagatttgcctccagtcctggctttcccacttattggctgttactagagcaaattactctacctctcacagcctgttttctcatctataaaatatgaagaatcagacaaactgcagagcattgttgtgaagagtaaatgagctaactgatatggtacatctagcaaggtgcccagccataaaggaaaccctcagcatttctttgtagcaggtctaaccctcttgatttatgctttcattgtgagtttctgacaatgtcatcagattttttctttatgaagttgtaaatctatgttccagtttaaaatgtcactttctcctagataccatctttattcctctatgtctgtatgaggccagtaacccaggcatccactgtctcacctataagatggtgggctccaagagggccaggagcttggttttatgtctttcttccagttgaatttccagcaattaatgcaatgccgagcacataaagggcatgcaaatacttgctgaaggaactgtctcagtttaggagatacatgtacctatgcctgctcttccttactccattaatactaactcaaggatgaaaaggcactctctcagctaccgtcacttataaaacactaaccacatcttcttgtacatcagaattaagtaaaaaaaaatctcctaattgatgctgtgcaatttgagtgatgatatttccatcttactaaacataggaataaactacatttgtcttgaaagcttaatgtgcactaaaactattcttgtgactaatacattaatgtttgtggagattcttatggttgttttcacaggtgtgcttgagcacaaaaatatggaagcactttatatgcaatagttgatttctgcctgttatgtgttaaagtctaaaaatgacagtctaccaagtaagcatgttagcactaggtcttatataaattagtagcctagccctatagattataagggtaatctataagcatttattgagttataagtatttattagaatactgttatgtgcatagcactgtagtaattactatgataatacaaaaaaaactatccaaagagcatatttatattaaaggatacaaatgacacttcagctaaataaacctgagagatcagtggcgtattatattgttaaagtccagtttgataccacagtcttgggcaatctatacaaaggaaacaagagtaacaaatactaggttttgtagctacgaatgtaaaaaatgtcaatgacaatctaccaaacccagtcctgagaggtgacagcgtgctggcagtcctcagagccctcgctttctctcggcacctcttgtgcctggtctcccactttggcggcattggaggagcccttcagcccaccactgcactgtgggagcccctttctgggctggccaaggctggagcctgctccctcagcttgtagggaggtgtggagggagaggcgagagcgggaaccggggctgcgtgtgagccagcgagaccacgaacccaccagaaggaagaaactccgaacacatctgaacatcagaagggacagactccagacgcgccaccttaagagctgtaacactcaccgcgagggtccgcggcttcattcttgaagtcagtgagaccaagaacccaccaattccggacacaatcccacacgtatacctccttggtttacttccattatcctgtgatgaaaggaaaacagacaaggacatgtctttataaacaatattataggcatcactatctgagagattatctgataatggaatcattgttaggaaagacataggaatggtctaagagagacatttatgtatgtctgtgttattttccccccatcactgaaatgtatctcttagtgattgcttatcttacaacacagcatgctgagtatgtattctctattaaatatctgctagaatttctcaagttcaataagttagagatggcagacaggactgaagaggggcctgtgtacatggattctccttacctagtctggcacaatcttttattttcaggattcagattaatccaaatacaattagaaatccaacatccactaaaaagcaacctcccttaaaatagccctctaagagaaaaatccttaggacctatatacatgaaaatttatacaacattttacacagatatacaacttttactaagtagtgattcacaagttattattgttttagcttgggatagaaagagctgatctctattatgtcatgaatgcattttttctgtttatcatttctttgaggtatttaggtaaatgatctgtaagggacattttgataaacacttttaaggctataaaaattctttcaaatactagccaaaaatgtaagcaacttcatatataacatgaaatcattagagataatcatgaggtaagtaaatgacaaataggtaacaagtgtcatgtaatattgaaactgccattttctgaaacacggagtcagcaaaatataacccactggccaaatatgggctgttacttgtttttgtaaatgatgttttactggaacatggccatgtcctctgcttttctactacaatgactttgttgagtagatgtcacagagactgaatagccttcaaagccttaacatatgtattatctggccctctacataaaaagtttgctgacctttgctctggaatatataactaatgttctagccaaaaaaaaggataatctctttagtagataaaatatattttagtaatcaccaaagccaaatcaaattgaaagactatagagtgtaggtataatattcaagctttattgttataaaaagacttcaataaactcaccaattagtagttatagttgatacttgttcatagccacgttacatatatcatttctagttttcaaaacaaccctccaggtgacaattggacatgttcattttacagctgagaaagtcgaaaccaagaaaacgtactgaagactactgttatggactagatgtttgcctccccctaaaattcacatgttgaagccctaatctctaatgtgatgatatttggagatggtggctttcggaggtaatttggtttcaatgaggtcatgagggtggacttctcatgatgggattagtgcccttacaggaagagaccagagagtttgtcctctctctgtgtctttctctctctcttcactatgcaggatacagaaaaataaataaataaaaatttaaagaagaccctctgtaagtcaaagagaacctaaacaaccaggctggcaccccgagctcagtcttccagtcttgagaactgtgagaaataaatgtttgctggttaagccacccagtctatggtgttttgttatgggcagtctcagaagactgatacagacacacagatctattcagctccaaatttggcatttcaggtgtctccttagctccaaatttggcatttcaggtgtctccttagctccaaatttggcatttcaggtgtctccttaacattttaaagaaggcacatcaggaacattcgccataagcagtactagcatgaattgatatcataagtagctccaacatgcttctgcaccctgcactgagaaaatgctaatataaaaattacttctggagacttctcattaaaaatgaaggagtaaacgcatttatttctgctccactttcttctctgaaaccagttgaaaaatgagaaaataaaacacagtaagtagaaataagaccaactccacactataatcaatgaagaaaagtcaccaagtgcaatgaaatttgattt

SEQ ID NO: 1879400 - DNA, 4001 bp, Homo sapiens
tttagtccaaaggtttttcttttattccaaatttctatacccaattactttctgggggtgtgaactaccatggcctatgaacactccaaaatcaacatcttccctcacctcccaaccatcatccatccagttgtctaagccaaatacttgtgtatcttcctagaatcctagcttccccacttacacataatcatcaactctttgggggatctatttaattctatgtgatatatccccaactgattcaatttcatccaatttcagttaggcaacagacataatttgtctctgtgcctcaagtcttattctctagaaggcttccctgaacctccacaaaactagttttctccttatacattcttttttttttttttttttttttttttttttttttttttcctgacagagtgagactctgcagtgcagtggctgatctcggctcactgcaatcttcgcctctcaagttcaagcgattctcttgcctcagcctcccgagtagctgggattacagacacctgccaccatgcctggctaatttttgtgtttttagtagagatgggatttcaccatgttggccaggctggtctccaactcctggactcaagtgatcagcttgcctaggcctcccaaaatgttgaaattacaggcatgagacactgcgcctggcctcctcattatacattcttattcaatgctgtactcctcattcatagcaatcctcccaagtataaataaattacttattatataaatggttgtcatttgtctccctcaaaaaattaagctccctgagggaaaagaacattcataatatttaatatttgttagatgaacaaatggatcaatgcttcttaaatttattttctacactgccactaacctaatctttctaaaacaaaaacagagtcatgtcactttactgtaaaaaatccttcaatggaaaaaagaaaaaaaaagggaggtctacagtggattcccactgccttaagctattgattttatgtctaaacttcttagcatgaaagacaaggttttctaagacctggtctacttacctctacagctttgtttctttagctgactgctcaatatcactgctctccctcaacttaactgcaaataaattcaatacttcagaaataacaaaggaggaaaaacactcttttaatattttattatgctcaaataatttaaaaatatataaataaaatgattaaataaagccccaaaccttttttcaaataagcaccctaaattatctaaatcacctaggatgcttgttttcctaagaaccaaggaatatttcaggtgatttagtataaagtatagcatgcccagacaagatcccataacaggagttacttacctggtgctgcttattttggatatcagaattttaaaggaaatgaggtccatttggtttaggcatctatatatatatcagtacgtagaggactaaatgagggtttaaaagaatttgttgaatataactgaaccaactctaaaatgaaaaatatataagatggaatgatgattaaatggaaatgcttaactcagtaaatgatcagtttcttatttctaatggacccaagtctgcaattcaaagttgggaagaggcagacagtatgacatgaaatactctgtgtattatatcaattacacctcaagagaagaatttgactttgcaaattacagaactagtaagaaaacattttttttctttcatacgggtttagtctgtccttaaaagggggctttgggggtagatattggattcaactgttatttgtcagacaagtgaaagaataaagagaagtgtgtgacacagtggtggagaagccttacctgggaccaatctgaagtgcctgttgtgttctgcagtatcataagtcgccagggtctctctgtctggcatagccattctcattcccaaagtgcttcagggatttggatcaaatccaaagactattctgcttgttcattctgaacagattaattcagatttggctaaagatactgctgagaaaagaagcgtgaatcctaagggaacatcaactttcatgactaaagatagaattacctgaaaagtacatggggagctatgggcagagttagaagtttatattcttacaaagagatctaaacttaaaggaacaaggactggggagaactataactgcctatgacagtcagtttcttacatggttttattttaaactatgcagaaaaattacacagaaatggctctttcggccaggcacggtggctcacgcctgtaatcttggcactttgggaggccgaagtgggtgtatcatttgagctcaggagttcgagaccagcctgggcaacatagcgaaaccttgtttctacaaaaaatacaaaaattagccaggtgtggtgcacctatagttccagctatttgggaggctgaggtgggaggatctcttgggcccgggagtttgaggctcctgcaagccaagatactgccactgcactccagcctgggcaagagaccctgtctcaaaagaaaaagaaatagcttttttttctcaccctacattataattttcatcagccacctccaaccaatcagtaaaatctaatatatctgtgcagtcttctgtgtaattaatacgataaacaaaggggcagagcagtaaagagaaatgagaattgtcccacattttcccatttttggtactcatgagaacagagatgctacctctcaggggtttcggactagcaaggaggaaaaattttgcccgttagtggagctagagatgatgaaaagaacttgatttagagaaaaattgctagatagacaacttgagattggatatataatacccttctattttaccctaaaatgccagcctaaagacttttaaggagaagcaaaaattgacacctttgttttaacagatgtattgaataaattataatgtaatatccattccagctcttatcaaggtactggtcatcacaattaagtagtttggatgagggcactgactttgggctaagagaatcttctttttttgcctcagctgttctgtttctgttaagacactgtctgggctgagatatttaaatctggtttcaaggctgagtgtggtggatcatgcctgtgatgccaacactttgggaggttgaggtgggtggcttgcttcagtcctagcctgggcaatggagacaaaacccaaaaaatacaaaaaattgtgtctacaaaaaactagccaggcatggtgacatgcacctatagtcccagctacttggaaggcttagaggggaggatcagctgagcccaagaaatggaggctgcagtaagccatgattgcaccactgcactctagcctggacaacagagcaagaccctgtctcaaaaaaaaaatcttgcttcaaggttctatgcagatgattctttgcttgtaaaccctaggagcacctatgtgatgctttgtgctcctctcactggaattaccttattccttatctctgttctcttgagtaattgcctcctctaaccaggattagcattctttgatctgactcctttgttatcttgtctgttgtgacaatgggaaacatttaaatgttctctggccagaagagactgtttccgtctggagaccaaaatgaaactagtcctggcatttgagtactgtcatgatatgtctttcaagcggcagtccctgtagtggatgctgtgatgcgctaaagctctaaggcattcactcccccagctcccagcaatgttttctgcttaaagctcacagctgagtccctgcctaggaattgccctcagctgagggagtttcctggcccacgtttatgtccctctctccaccctgggtcagcgtgcattaagtaactggtcaatgtagaagtacaaaggcctggccccttgcctcaatttaggaactttaaagggccacaccagctccagagctcctatggatgggctgagatttcagttgcaattgcgtggcagatcagctttt

SEQ ID NO: 1879401 - DNA, 4001 bp, Homo sapiens
taaaagccagtgtgtttgtcctatacaagagaacagtactagtagtatccgtggactagaactgttcagtgctagtatccatgtgatgatggattggcacaagacgatgtggcagagctagagcaggccaactctgaagcacgtcataggcctagctattgattttacattataccttgaaggcaataacaaggattttaatttaggaaggcacatgatcagagatgtgttcaaaaagataattctggatgtctctatcaataatactgcatactttataaatatttgagacaatttattgtccaagagagacatcacgaggagctaaaccaatataagtttagagttacaaggtcagattttatatatattattaagaaggactgggccgggcatggtggcttatgcctgtaatcccagtactttgggaggctgaggcgggcagatcacgaggtcaggagatcaagaccatcctggctaacacggtgaaaccccatctctgctaaaaatacaaaaaattagccgggcgtggtggcggccacctgtagacccagctactcgggaggctgaggcaggagaatggcatgaacccgggaggcagagcttgcagtgagctgagatcatgccactgcactccagcctgggtgacagactgagactccatcccaaaaaaaaaaaaaaaaaaagaaggattgaccataaattggatgtgagacgtaaagaagagaaattcaagaaccaggtgcccctaactcccacattacccaaggatccactgtacacaataaagtgtatttaaaaagagaaacctacacccacactacacttccttcacatttagctagatgttagtcacaggtaaggcgaccaattcatttaggtttgcctgggatttttccagttttattactgaaactctcacatcacagaaaattcctcacttttaggcaaatcaggatagttgtctaccctcgccacatggtcacatctagctggaagagagaacaagtagtttttaagcctgttgaacaatgaatccagatgaacacagaagttctgttaccaaggaggaagaggaaaatggatatgcaactaccatacaggaatgcaatagatatgagtaaacaattagcaatcttctgtaatgattagtgatcaaggcgggcatgccaaatctcacaaggtaagtagagaaagagaaggttattaaggagattgaaaaagaaccatttaaaatgtagaaaaacaacagcaggtgagggaaattataacagcaaatttcaagaggatatattcaccctataatcaaatgctatagagaaagcctgtcaagtatcctctcttaagttttatctaaaaagcaatacaaccataggattaaggtaggtacctaaggaaggtcattgcaaagacatgaaaagaagcacagaagaggagggtaagggcaaatgaaaacaaacttcatttccatagaaaacttatcaatatcaacattggatttcatgccaatcctgagaacaggtgtgcttcacagttttccaacactagcgctttaatactccctgaggacacacattttcttctccttggaaaccttccttcctttagcagaaagctttctacaatttaggtggtctgtcctggctgcagttttcttcctggcaacctcacatggtaccttatctttgtctgtggaaggcaccgcccactgtcaacatcggttcagtgaaaaagaaagattcaggagcttaattctcaaattctcatgtctgtggtcatagatgcttgacatgatgtaaagagacagagattatggtatttgatgccaaatgaaacataatttaatggtttaaagaaggacactcaattacttcaccacaccagtgtttatcttaccaaaatttagagtcctgctggtccagtggctcacacctgtaattccagcattttgggaggccaatgtggaggattgtttgtgtccagaagtttgagaccagcccgggcaacacagcgagatcctgtctccacaaaaaatcaaaaattagctgggtgtggtaacacatgcctatagtttcagctacactggaggctgaggcgggaggatgtcttgagcccaggaggacaaggctgcagtgagccatgattatgccactgcatgatcatgttgggataccttcccacatcacccaccattttaaataatattaaatcaataattaaaaaaaaatgaaaaataaagttcatggactaccctcagcttttttcttatctactagcttcctaccaccttcacttctttcttcacttcgtttcctgttcagctttgatttcatggcccattcacatcaactacactttgtttccatatcctgatctcccctactccttctactcctggcaaatcagcactggagcactgctaaagaaactcacattaaactccttgcctatctgcccttcacagaaagctactctgttctcaaaatttagaccacttcctccagtcacctgcattgtaatctcagccggaaatctcaccttccacctcacagatcaaagagaagctatcaaataggagctacccaacccctgcacagctacaaaacctgcccgtaatcatggaggaggtagctcgcccatctccccatgtgtgcacgccactctattttctttggctttgcctcttgcaatattgtcaataaccctctcctgcaccccatgttacctttttcctttcttaattgacatccacgcataagcagacaaaaatatctccatatactttaaaaaaaatcctttcttgatttttttgttgctaacctatatacacaatcaaaggttttgaatgagttttttatgttccctatctcagttcatgctgctcccaatgattctgcaatttactccaatctggattctgctcctattactgcactgaaatgactttcagtgtggtcatcagtgaccattattttgctgcagccaatagccaatgaatatgccttatatgctgtttgcttacactatgagtcaggacatgatagagattagaagtcaaagtatccaagttcagatcatggcttcaccatttgctacctgtgtgactatgggcaaatttgttaaccttttagtattttattttattttatccataaaatgaaaataataaaagaacttacctaatagagttgttttgacatgttaattagagaaaagataattagtatagtgtacggcacaaaatatatgttgaatagataatagtttgtgttgtaattatttttatccttcccttgagagataattctccagggattccacacatttttgcacatcatgaaagcagaggcactgatagtcttttgttctggaatgtattttcaaggatttttgtacatggtatcttcttggaatatagggactcctttgagaggggatccattatttgctgtcgcataaaataaagatgtccccctcccaggcaaatatgggcatctttgcttgcagaaaaatacaaaagactaggatttcctaaatccatgagctgtgatgcaagctctctgtgtatgccacactcactgaggcccactccttactgcccccgtgctgcttgagcctgctcagccacagataatacagtcctttggctctggctccagagtctcatgtctttggttagtacccttgaaattgtgactgaataatctgttaacttgcaagtaggtaaaatcttccatccttcacagtttttgacacttcttgacacattccagctttggaaacttgagacattagtgagactctctgctctcagaatccatcatggtgcagtctttttttttttatatactttaagttttagggtacatgtgcataacgtgcaggttagttacatatgtatacatgtgccatgttggtgtgctgcactcattaactcatcatttaacattaggtatatctcctaatgctatccctccccactccccccaccccacaacagc

SEQ ID NO: 1879402 - DNA, 4001 bp, Homo sapiens
aatggaatatttccatcacttcagaaagtttctccagattcccttcacccccagcacctgacaaccattgatctattttctgccttttccagaatgtcacataaatggaatcatagagtagcttattatatctgactttttttcacttaacatgcatttgagatcatccatgtttttgcatatgtaagaagtctgttccttcttaatgcttagttgtatttcatcgtatagatgcatcacagttatgtatagccacccaccagttcctggacacttgggtggttcctggtcttttttctaacacaacaataaattcagcctaaatatttggccactctcatgctatatctattgtatcatctcctgaatttgtttctcttcttgcttgattatgtcctccaagaatgtcattcaaatgaatctttcataagaatatttttattattaatacattctcacattctaatgacaatatggcttaatagaaaataagttcaaagttatgcttttaaatacttacatatagaaacattttgcttgagataaaccttttcaatctgaaggtttttttctaccttgaaatttatctccattatatcttcaaatatttccccttctctgtttttatatttcttcctttctgttctagttttaccctagatataagctagaaaatttacaaataagctaacttgttttttaaaacattttctactgcctctggaggtttgctgaaagtgctcttccaattactaattcatcgtcagctgcatcttttagactattgcacattactaatacgtagcatcaatattcattctaattattatttttatgcttaatatgttttagtttcatattttttcctgattcatattgctaatatcataactcattttaaataaatttatcatgcttatttaaaaatcttggtccatctgctctactgatcagtttcagatggcatatgttattcagttgtggtcttttaacagtagttgcactcctccagtgtctaattctttgtcctatgaattcatgttcccctggggtttcacctactctgtctgataaacatgcatccaggaaggcccagtgagtttgcagtgggagggtggtgtgagcccagaaggaaatcgctggcaccagagaaccactgtctatcattcccagtttctcccacttacccagatctttcctccagtcaggtttctacccttagggagaagcagcacctaaaggaagcaattaacctagcaaccctaagggtggcagggggaagggtagaggcttgattgagaggaggtggggggaggtcggcctgcagttttttttgtttttcgttttttaaattcctcaccccaacagtgcttttgcgctggtctgacactacctggaaaactatgccaccagtcgcttcagtggacactaccatttcaattgcgaagtcaggcaatgattgtcctaaggcaaggtgggagagaagtcagagtaaaccacctcgagagcgccggtctcccggagtgtctgggttcgactcctgcctccacaacttactgggtctcctcgaacaagttgcatcaccaatggccgtgcctcagtttccctcctccgtagattaggaataacaatagcagtgagaacagaatccagcacacagtaaatgctgcttacctgtttgctatgtggaatacgccactacactgttgctcggccctcaggaagggtctgctgagactttctacttcctgctcagggcagaggccgaccacccgcccaaggtcgtggcggcgccggctcagctttagtcgtcaaagtgcacatcctgggagccgctgcctcgaggtggttgaggcgagagggcagggaagcgtctgagcctcttcctcccaccagagcaggaccccagctgacagcgggtgagctgggcagaaacccatgccgggaagaggcggacccagtggaccgcagcgcccgcagtcgccgggccaggcgcagaggcgaacgggaggcggcgctgcaccgtgcccgcccctccccggcccggccccggctccagccccagccccagccccagccccggccccggccccggctcgcgggcgctgcgtctccgcgtacaggaggcggcggcggctcccagtcaccggcccccgccggcgagcgcacgatgcactgcctgggcgccgagtacctggtaagcgctcgcagcctcggccctcgggggaggagccccggggaagggtcgagtcccccgccttcacgcaccttccctgccggacgcttccgcctttcccgcgcctcggggatcccgcccccgcttagtaccttggggccacctggcggggaggaacctggaccctgctccagtgctggggcggaggcgggggagacgcgggccgcggggcgcaaacttggggtcgtcctcaggtgcacctccaggtaagcacttggcggcagggggcttaacatccgctccgcgcagagcaggtgtttcaaaggctgtgtgaaagagcttcaggtggccacgtaaaaaaataatattaattttaaaaatttagaaaaagattggttactttggcccctcttcgagtagatttgggttcggtttccaggttgagtccacctgtttatcttctttttctcaactctccctttttctggaaggtttctgcagaaggagcccctaggcaaagggagtggcgaccccagatttataggaaatgcacagatacggcatggttattcctgttctttctcttttggactggtttggtaagtgtgggtgcttggtaggaaagaggccagagtgtgtgtgcacgtctggaaataactctgtcccaaatgtaaatcgtagttggtgctgcagtgagagacttctgccgttaacccacaataaacatcagtttgtactcgggagaattcttgtcctagactcgctagaaaggctgtctttttgctacaggccatgttctaaggggtgactccattaggaaatgggaattaacagtttgcaatgtgattgctatttagtaaggccaatgtgtctccttttactctccgaacttactgaacagaagttcttttagcacctgccacacccccaaatcaaatattcctcaagcttttggtgcacctttaacaaaggaaaagccagggtaagcctagaaataaactgcatttcctttagctgaacatcacacacacacgcgcgcgagagatatgttgtgtttagcagccaacactgttaaccatagctaacaaggaatgatttttcccactctaatttcgaggtatgtatgattgctggtaaactccatcaggctatgcggttataatcctgagagagtctgttggaagccgaatcttgctgcttttatacttattttagaattgtaggtaacagcagaaaacgtctcacccgacattttcaaaggccactttcacgaaatcatccatgccaggataaggcatgctatttgctgcatggtaaatgattaatttatagagcagggtaataactaccagatagtaattacctttgttgaaaagaattccatctgaataggccctaaaatatcatgtttgttctttccaagtaagaaaggcatttgttcacttatgacccgtttcacatagacaggcttggttacaggcacagtggaaggttaggtctgaaacacataatcagatgttttttgttgcttacgttggaactctcccctaggagctgggagagacagtgcacctacaataccttctgcttaacttcgcagatggttggtgtttttatctgagactgctgttgtataaatgcagggagcagctggcctgccttgtgcctggcagctttgacctcaagctgttattgtgatttaatgatctgccgtagcccctccacagcttcaacctaggacctcactaccaaactctcagcccaacagctgagaatcctggggaaaatctttgtagatgacctatcacagcctgaagaattgtga

SEQ ID NO: 1879403 - DNA, 4001 bp, Homo sapiens
atacacctacacagcacacctgcacaatatacctgcataccacccctatacagcacacctgtacaatacacctgcatggcacacctacataatatacccccacaatacactttcacagcacacatgcataatacacctgcatagaacaccagcacagtacacccacacagcacaccactcagcattcttagtttaaaaataagttttactttaaaggtaatagtacacacataaattgatgttaaaatcgacagtaacaaagagaagtaacaatactaatagcctgtcacaaactgattcttaataacctatataaacaaacattaagcccgggcgccgggtggctcatgcctgttatcccagcactttgggaagccgaggcaggcagatcacttgaggccaggagttccagaccagcctgaccaacatggtgaagcccagtctctaccaaaaatacaaaaaattagccgggtatattggcacgcacctgtaatcccagctacttgggaggctgaggcaggagaatccttgaacccaggaagcagaggtcgcagtgagccgagatcatgccattgtgacaggagagaaactgtttcaaaaaaaaattatatgtttacaacaggtgcattcctcctcttgctttctgaggacgccctgctatgtagctgagtagttgctaataaactatcttaacttcactatactctgtgacttgccaaaaggtctttcccatgtgaaatccaaaaacctgttcttggggtctaggacaagacccattttataatgacaaaactatacaaattctagaggaaaacatggaaagaaagctatgtgaccttgggtttggccatgagttttaacacgacactatcagaggcatttgaacccctcctctatatgaactccagggtggtttatgttccactggctaagagaaagttttcttcaaaaatgtgacatgatttgaggtcaaacattaatatcaagtaaactcaaaagattgagaagctagcattagttctgggaaaaccagaagtgtgcctttttttggaaataatcattggtagcacaaacttaagaatctccaaaggaaataaaaatgagttattaacttacagttttcaccaattaagatataaatgaagctaatgaaatccggaaatacaatttcactgtttttaatgttcatttaaaaaaaaaaatccttatcaaatagccccagtaagtcaccaattaagtctttactacttaaaagcaaaatccacctatgtcctgaacactatccactttacaagcctcattatatgtactggagacaaaattcagaaataaataaatatatatgtacatatatacaaatatatttcaaattaaaaaatacttttagagagtggtatgtattacatttagaaattaataacgaagtaaattatgggatgtcatccacgcctgtcccaaaggtaccgaatttataaatcatctcaggtgcggagcaggacaggttgaaaataggaatgacatgaacccgcgcggaacagctgccggcgcggtgtccagggcggcaccccgcccggtcccggcccctccagccctgggcccgacccctactacgcctctgcctcgacgcgaacgcggagcccgagcgcgcgtcacgccgtgtggggccgaagaggctgctacccagaggcggagtgcgggctcgcgagggtccccacccgactctcgctcccgccagcacctacggactcgcgtccccgccgcgcgccgactcgggagcagcaccgcccccggcacaggagcctcacgcgcctcttacctaacaggaagttgggtggaagcagcgcggacccacggcgcaccgaacgcactccaacagaacccgacgcagacacgcgctttcaaccggcggagacactggcagggccagaaacgcgcgcagcgggggcgggaggtcggtaagctccccgcccctgcccgagaccccgccccggcccggcccggccccgcctttttctctgcctcccctccctgcacgtacgcgccccgcccctcgcgcgacgttttttgttgacccggaaacggattatccggagccaaggtccgctcgggtgagtgccctccgctttttgtggccaaacccagccacgcagtcccctccctgcggcgtcctccacacccggggtctgctggtctccgcggatgtcacaggctcggcaaccgccctcctgtcggcggggagtcccgcgacgcccggaaatgctccgaagcctgtcgctcagctgccagatctgcgtctgtgtccggttccgtcactgaggtcgcccctgtccggcccttccaccctagttctcttcaccgtccgcccatcctatcgcgcgcggcctcaggtccccattcggcatgtggcttgtcttccatcgtccccaccctcgcccctcttggcccctcagggcagccctgggattcggcagacgccagtcctccctgagatgcttccccgtccttccctccgccaggccctacgtctccgcaaaccccacgcttcggggtggccgcctcagacaggaccctgagtccgagactggggtaggggacctgcccgatcctgtaacaaccctcgtgcttctgcacaatcgcctcccactagcggtgactgttgggtgtctaccttcccggtgtcccactgagaagcgggctcctccttggcaggggcttcttcattgcctcgctgtggatgtcgaggtggggcaggagagtgaggagaaaacagagaggagggaggtagagccaacgagcgagaaaaggggagggaagtttagatgggaagtggatgggtctgaggaatttgaacaaacaccgacagtgaaggagagtgacctgagcaagcagtagtggggtaaatggaaatagacaaaatgggaatcagcagagatatggaggacagaatacaatgaggaggccttgaccgtcagtagcagagagggcagcagaagcctaattcccaaattccttagtggttttctgatttccaaattagtttcccttttaaatttattgtgtcaggttcagcttatgaggcctcaatacttttcagtcttaattgtatattgaaaatactttttgtttactaaatgctttttacattaattcagtgtgcactccgtaaggatattgatgatttgagttagtttagtattcaacagcttcctctattcctttgtatgatctctgtatttaatggctgtggcataaagtttccaactaagtataagtatcaagttttctttgtgatgttttctgcaaatattgaaggatgacctggattgtcctagaactttgttccaacagattacatgtgttcataacgaataaattgctcaaagatatttccaaagctcaccttttatgtttttcagttccaataattacatctttttaaggtttatattttttgatgacttaatgtgatgttctggagaagacaaatgcttttaatcaatatgattaaaaccgtgaaagacaaatcgctgttacttaagagtgtgacatatgatctgaagtctttagggggcagggatgttaagggaaaactgccgctatcgtatcaaggtcatgccattcctgtgaagctggtgctggttactctctactggcttctgttcacctttccaccggccccaagacacacacatactgacacaaggcagtggatagggaaagagcaagactttataaagtaagcacagaacaaaggtatctttctaatgaggaggaggtgttggttctgggaaggaagcttggtttttgggtattcaggatccagaagtgagagagcctgggaagttcaggaaccagagaaagaaaaagacttgcccattctcacccatgaccctgtgctcagcaggtactagcagagacttcaggctctgtgactaaaaggggtcagaccagttgatatacccacagctgccatgtaaggatgtgtgtggacttcactaggg

SEQ ID NO: 1879404 - DNA, 4001 bp, Homo sapiens
ataaccagagaaactgttagtcaagtaaaatgtgaagagaaatccttatttcctatacactcattctcctggaggaattaaacaaacaaacaaaaaagtgtgatccaggaaacagcactgcagtgcaggtgagaggtgaaaagagtgttcgggattaaggtgaagacggagctcagatgctgcacacctgtactgcatgcccatataatacacctacacagcacacctgcacaatatacctgcataccacccctatacagcacacctgtacaatacacctgcatggcacacctacataatatacccccacaatacactttcacagcacacatgcataatacacctgcatagaacaccagcacagtacacccacacagcacaccactcagcattcttagtttaaaaataagttttactttaaaggtaatagtacacacataaattgatgttaaaatcgacagtaacaaagagaagtaacaatactaatagcctgtcacaaactgattcttaataacctatataaacaaacattaagcccgggcgccgggtggctcatgcctgttatcccagcactttgggaagccgaggcaggcagatcacttgaggccaggagttccagaccagcctgaccaacatggtgaagcccagtctctaccaaaaatacaaaaaattagccgggtatattggcacgcacctgtaatcccagctacttgggaggctgaggcaggagaatccttgaacccaggaagcagaggtcgcagtgagccgagatcatgccattgtgacaggagagaaactgtttcaaaaaaaaattatatgtttacaacaggtgcattcctcctcttgctttctgaggacgccctgctatgtagctgagtagttgctaataaactatcttaacttcactatactctgtgacttgccaaaaggtctttcccatgtgaaatccaaaaacctgttcttggggtctaggacaagacccattttataatgacaaaactatacaaattctagaggaaaacatggaaagaaagctatgtgaccttgggtttggccatgagttttaacacgacactatcagaggcatttgaacccctcctctatatgaactccagggtggtttatgttccactggctaagagaaagttttcttcaaaaatgtgacatgatttgaggtcaaacattaatatcaagtaaactcaaaagattgagaagctagcattagttctgggaaaaccagaagtgtgcctttttttggaaataatcattggtagcacaaacttaagaatctccaaaggaaataaaaatgagttattaacttacagttttcaccaattaagatataaatgaagctaatgaaatccggaaatacaatttcactgtttttaatgttcatttaaaaaaaaaaatccttatcaaatagccccagtaagtcaccaattaagtctttactacttaaaagcaaaatccacctatgtcctgaacactatccactttacaagcctcattatatgtactggagacaaaattcagaaataaataaatatatatgtacatatatacaaatatatttcaaattaaaaaatacttttagagagtggtatgtattacatttagaaattaataacgaagtaaattatgggatgtcatccacgcctgtcccaaaggtaccgaatttataaatcatctcaggtgcggagcaggacaggttgaaaataggaatgacatgaacccgcgcggaacagctgccggcgcggtgtccagggcggcaccccgcccggtcccggcccctccagccctgggcccgacccctactacgcctctgcctcgacgcgaacgcggagcccgagcgcgcgtcacgccgtgtggggccgaagaggctgctacccagaggcggagtgcgggctcgcgagggtccccacccgactctcgctcccgccagcacctacggactcgcgtccccgccgcgcgccgactcgggagcagcaccgcccccggcacaggagcctcacgcgcctcttacctaacaggaagttgggtggaagcagcgcggacccacggcgcaccgaacgcactccaacagaacccgacgcagacacgcgctttcaaccggcggagacactggcagggccagaaacgcgcgcagcgggggcgggaggtcggtaagctccccgcccctgcccgagaccccgccccggcccggcccggccccgcctttttctctgcctcccctccctgcacgtacgcgccccgcccctcgcgcgacgttttttgttgacccggaaacggattatccggagccaaggtccgctcgggtgagtgccctccgctttttgtggccaaacccagccacgcagtcccctccctgcggcgtcctccacacccggggtctgctggtctccgcggatgtcacaggctcggcaaccgccctcctgtcggcggggagtcccgcgacgcccggaaatgctccgaagcctgtcgctcagctgccagatctgcgtctgtgtccggttccgtcactgaggtcgcccctgtccggcccttccaccctagttctcttcaccgtccgcccatcctatcgcgcgcggcctcaggtccccattcggcatgtggcttgtcttccatcgtccccaccctcgcccctcttggcccctcagggcagccctgggattcggcagacgccagtcctccctgagatgcttccccgtccttccctccgccaggccctacgtctccgcaaaccccacgcttcggggtggccgcctcagacaggaccctgagtccgagactggggtaggggacctgcccgatcctgtaacaaccctcgtgcttctgcacaatcgcctcccactagcggtgactgttgggtgtctaccttcccggtgtcccactgagaagcgggctcctccttggcaggggcttcttcattgcctcgctgtggatgtcgaggtggggcaggagagtgaggagaaaacagagaggagggaggtagagccaacgagcgagaaaaggggagggaagtttagatgggaagtggatgggtctgaggaatttgaacaaacaccgacagtgaaggagagtgacctgagcaagcagtagtggggtaaatggaaatagacaaaatgggaatcagcagagatatggaggacagaatacaatgaggaggccttgaccgtcagtagcagagagggcagcagaagcctaattcccaaattccttagtggttttctgatttccaaattagtttcccttttaaatttattgtgtcaggttcagcttatgaggcctcaatacttttcagtcttaattgtatattgaaaatactttttgtttactaaatgctttttacattaattcagtgtgcactccgtaaggatattgatgatttgagttagtttagtattcaacagcttcctctattcctttgtatgatctctgtatttaatggctgtggcataaagtttccaactaagtataagtatcaagttttctttgtgatgttttctgcaaatattgaaggatgacctggattgtcctagaactttgttccaacagattacatgtgttcataacgaataaattgctcaaagatatttccaaagctcaccttttatgtttttcagttccaataattacatctttttaaggtttatattttttgatgacttaatgtgatgttctggagaagacaaatgcttttaatcaatatgattaaaaccgtgaaagacaaatcgctgttacttaagagtgtgacatatgatctgaagtctttagggggcagggatgttaagggaaaactgccgctatcgtatcaaggtcatgccattcctgtgaagctggtgctggttactctctactggcttctgttcacctttccaccggccccaagacacacacatactgacacaaggcagtggatagggaaagagcaagactttataaagtaagcacagaacaaaggtatctttctaatgaggaggaggtgttggttctgggaagga

SEQ ID NO: 1879405 - DNA, 4001 bp, Homo sapiens
ggaccccaagcctgtgggtcctgtttgtatgggaactggtacacgtttctcccctcctctgctcctttcagctctcctcggccatgtcctcagcacaggtgtcagccagggtgtgtggggcccggggaggcagggaaggactgggcattccagccagcaagggcgggaatgggtctgcttcgcaacatccccaaaggaggtcaaccaagtccccttgccctcactccagtagggccctctttgctttaacttagtgcatacccaactctgagctgggaatgcctcctgagaaaggcagccaaggcctgtgataacagcagggaggagcatgaggagggatttctggggtccatctcttactcacccatgtttccctccacgaccttgaccctcctggtggctctgtcctctccctggacatgggacacaatcatgtacactctggaaaggccaaggagggctgttcagagggccagctgtggtccatctgaaggtgacaatttgccaatttgttttacaggaaggctgccatgggcctcacaatagcagtccctgcttccgcctttctgtcatcttccaactaaagaggccaggaaatggccgagtcagctcctgctgcagcacctcctagaatcagaaaaggcctttccgagaatcttgctgaaccctgagggtgaggagtgtcagattttgcagcggggggaagctggcagtggagcctccacttctaagtaacctttgcttcggaaacctgccaactctctgcctggagacttgcctttgatcacgacttgtcacctttcaggagatgttccactttctaagcaggtgaaaaatgaacctgattaaaaatagggaactggactcttcacagagtccccctgtaaagccaaactactggctacacctccaagggggaaaagggaacatccctgtccctcaggtcccagggctccgtgggacccaggacccccgaacagcctgcaaccctacgacgacggcctggccatgctccagcagcaggcagaggcttgggccacagccacgtactggctcctgctcgctgggttcaccttggtgaccagagggcactgtgaccgcccattctcctccctcccttcctcctcccctcagtgctttatggacctgagtttctggagctttctcaaaaccgtggacacgttcccagtggaaatcatgacattttccgtttcacattacgcactccacaatgccccaggaagggagagagagagggaaggaaaatagggcctgggagccagcccctctctgtctgcagccagggctgctcgctgctctgtttatcctggagtcacctccctcccgaacttgacagccagtgccccagtgttttcttctgcagtcaaaggccccgatgaataggtgaactgccttttctatctgctcatgtggcacatctggataaaggcgtgcctctctactttgttgtgtttttttaaaactttactttccactgccatggtaactgctgcatgtttggcagagggaaagaggaaaaaaaaaaaaagctcggagagaagaaaaggagctctcagcgcggggctggcggccgtccagggtaatcatgccgcagagctgaaatgaggcctctggcgggcagccaagttacaaagaacaaagctgtcagttcctaatgttggcggcaatgcttgtttggcacccttatatggtttcccagaactccctgccttggccgccttccattcccttcagggcagcaaacaggattagcacagctccgagttgtttttctcctctctcctccaactgttccaatgacatcatccctgctgcattcatttgccagcagggtggtttttttctctctctctccacctccctcctcccttcctccctccctctccctccatttctctctctctctctctctcacacacacatctctactcccactcacttcctgtagcctccccctcgcctctgactttctttaaatgcaatgttttaggtcattcttcttgtccagcttctctgttaaattaaaaacaccctagtgcttgtacatttagctgaatcaagccagacgctgtattttatttttataactgaattcctgtgagataaaaatctcattttccttagtaggctgtaatcagcactcacagggatgtggtttccaactgccccagctcgtgcttccttatgaagctccgctgagaaatgaacttggctcctgttcaggtttaaagggcccgaggccggtcacacattgctcactcatacacacacacacacacacacacacacacacacacacacagaggatgtgcacacaaagaccattatacatgtatgcacacacacatggacacacgttcttgtccagggaagcccctacggttccacacacgaagagcaaaaaagtattccctgagacagacagacacacaatcagtacccagtgtcattcttcccctttccaggaggaaaataggtgaataagtcaagctgaaagctgcttccgaaaagactgttttaaactagcaggcaggccagcgttatgcaactcatggctaggttcattaaaggaatcgaggtttgccgactgcacaaatgttcccctgcctgcctccgccccagcccctccaccccaccctgctctgattcatgaactagttttcagattcatgaatcactcgggagccagcaagagaaaaatgagtagtattgatctcatttcaattgaaatgggctcattaaggccatgctggctgtggacggccttgcacgacaagacgctggccggcgtccgaggtctgcaggcgggcgcccgagcctgcgggtgggacaggactccttgggtgaagcctccgcggagggtgccccttcttattattattaaatggacacaatatgatctactggtacaagggactctggctgcactccgcagccctcgttgggcaggccggttttcttctttttgtgtggcccgtttattttgttattttttttcacagttaatggaatctcagtgcagtttcgctcctggatttctggtgactcttaaggactacctgaagtaggaattcaccttctgaaacaactggcatatcttggggtttgtttgttttaacgcaaacaaggagctttttactcttctccctccagacctctgccttgccaccctccttgtaccgtcttcagcgagaaggactaggggctaggaaccatctagacttggagtaatctaatttatgtggggaaaatttctccaccaactggatggctgccttcacgtggacaccggttttataaaaccactctttcccttcccaaatgagaataatggttgaggaagcagcaacagagcctgggtgcagagacatcacagagggaggcgttaggcccctggggcagatgtcgcagaggccgcccacgaaggagctctcttctctcccactgcctttcctctccccacttgagttccagctccctcttgacacgagctcccctcccctttccagcccttcgccttacacttgtcctcatgtctggggaatcttttcctcttcctctctacaacaccggttgggcaccgtgtgtgagcagatcaggagaggctattagctttgatttgcagcttccaaatggatttttgcatggtttcttcctccagctccttccacccccacgccagccctgggagattaaaaacaatggactggacacatgcttttcagaaaacccaaaaagctgtcaaccaacaccacagaaggattccatcctaagaggcatacttttggatccaagagtttagaaatgagattcttatccattgacttcagagacaccgtcatgcattagacgcatttcccttggcagggattcgacgaagtgaccttactcccctttgttcctgcagtgcccggagaaactgggaatgacccaaagaaggaaaaggaaggtgtgtttgtgtgaatttcaatcagcaattg

SEQ ID NO: 1879406 - DNA, 4001 bp, Homo sapiens
cagtaataaccatgactcacattcattgagccctcaccatgtgccaactccatgccgaatgctttctgccattagttcatctgattttcccaaccaccctataaagcgggtattgtgagtattccattctgcagacgaaggaacccaagtagtttggttccagaggcatgctcttcgacactgcccacccaccatctccttctaaatctttagggcaatttgttgactcaaaaaggtaagggcagccttgaactcttaaagtttagctgtttcactatgattcctttagtaagattttgcttctgctctagggtaaccataacttatcctccaaactagagcactttctgagagtgaaagggggcactcttaataattagggcaggataacaggcttacatgaggaccttcctaagaaaccttaacacacagttacctcacctgctccattctcttgaaatgcctgcctttcacgtaaaccttcagttttagcagataactttgactccacttcagagaaaatcgaagccactgtgcaggccttcccttaactgcttgtctcatacaaacctatctgcatctctgcccattttcttctcattatagccgaggcccatcttgtaatccaaggtcagttcctttcccttggttctgaatctcagttccctcctgtcttctgggtgtgtgtggggtggggtggggtcagggagaggccttgttccattatcatcaccttttccccaaatcttcaacccctattcctactggatctgctcgtcagcatttaaatatgttcaaatctccgccgcccacctcggcctcccaaagtgctgggactataggcgtgaaccgccgccccgggccaaaggtaaacttcttgagtgcataacttataaactcagtaggtctatatacccccagtgagccgcctgcagtccatctttgtagcctcatctccactcttaaaacgaaatcattggcaataaaattatccctctaccccatgttttccctttgcctcccatcctctgttccccttgccgtcaaaggtaaaccttttttttttttgagatggagtcttgctctgtccccaggctggagtacagtggcgctatcttggctgactgaaacctctagctcctgggttcaagcaattctcctgcctcagcctcccaggtacctggcattataggcatgtgccaccacgctgggctaatttttgtattcttagtagagacgggggtttcaccatgttggccgggctggtctcgaactcttgaccttgtgatccgcccgcctccgcctcccaaagtgctgggattataggcatgagccgccacgcccggccaaaggtaaacttcttgagtgcataacttataaactcagcaggtctatacgcccccagtgagcggcctgcagtccgtctttgtagcctcatctccactcttctctgcctccatctctcggccctgcctgtgtgggcttcttctgtacttcagtgtgcccagctctctcccccaccccaaggatcctgcacaggctgctccctctgcgaggaacactcttttctcctttgtttcacaatgactcctttgggtgcacttcaacaatttgcagacgcttacagttctctccatccaccttcatggttcaattgaataatcacctttttaacactgacacttaaaaaagaaaaagaaaagaaaggaaaaagaaaccatatatcaagtgcacaggctggcctcagaataggatagaagacacatgcagatctcaacacacattgcctcgggagggaggtgatttatttggaacttacttgttaatggctcctccagtaccatggctctgccgtgtgggtccccagctttccagatccaaagggaagctaaggagaaagttggagcaaaggtttggccttttattatctttcctccattctctccaccacagcaggaccagcttttcactgcaacctctttcccaaggctgttacatcagaattggggtgtgggtctgatttctcattggcttaattgctcctaaagatccaggaagaagagagagaaagtctaaacattactggtgcaactactttattatatataataatgtcatagtttggtctctctccaaagcacacccttagataaaaacttgggtggaggacgtctttctgggagataatccaagaagaaagaatgaggaaaatgagacaaggaagggaggaaagccaaagaaaagggtgtgttaatagttgattaccgttgtggacaactggggcccaatccctctgaggaaccagggagaacatgcctcagaattgctcatggaatagggcagggaggctggaacatttatccacgtttactcaccaacatggcactccctcagctgcacccccccaacctgcatacttcccagttgcttggctgagtggccttccactgtcatagggaaagcctggaagtggccgggggcagtgactcatgcctgtaatcccagcactttgggaggccaaggcgggtggatcacgaggtcgggagttcaagactagcctggccaacatggtgaaacccgtctctacaaaaattagccaggcgtagtagcatgcgcctgtaatcccagctacttgggaggctgaggtggaagaattgcttgaacctgggaggtggaggttgcagttagccgagatggtaccactgcactgaagccttggcaacagatcgaaactccgtctcaaaggaaaaaaaaaaaaaaaaagatcatcagagaaagcctggaagcagaaaaacagactgcccaggtgcaaacttcatggggcactccatcatgaaactgcccacacagcagtgtagatgcagccataaaaaatgatgagtttatgtcctttgtagggacatggatgaagctggaaaccatcattctcagcaaactatcgcaaggacaaaaaaccaaacaccgcctgttctcactcataggtgggaattgaacaatgagaacacttggacacaggatggggaacatcacacaccggggactgttgtggggtggggggaggggggagggatagcattaggagatatacctaatgctaaatgacgagttaatgggtgcagcacaccaacatggcacatgtatacatatgtaacaaacctgcacgttgtgcacatgtactctagaacttaaagtataatatatatatatatatataaagaagtcaggtggataaacaggctgtgctacagggaaccctaagtgtctgctacaagcaagatgttagaatgggtctcttcctgccttagttacgctacgctaagctgacagtgtgatgggtatcaggagatcaaaggcaatgtgagggagatctgcccttgaggaacgtacaatgggagtcaaggagaactggtgtcactgcctttggaaccccctcatctatggatggagggctgagaaagggagatcaagaaagagacttctttggaaagaactttactgtgagtccacacctcttccccagggtatagtgatgtcacctctgaccacaagccaagtaaagaagacttcaaggggagggcttagggagctttggaatgtggccccgcaagtgagagtcagaggcgacaggcacctatgacaggtctgggagagttaaaaccggtaatgggctcccatgagggagccaggagtatggtgccatgttgtagatcctaggatctgccagggcaaggaatgtttgtcatgggtagctaagggccacccatgagacacagcctgcttggttgtcctgggtgctgtacgataggggcatttggacaggcctctggggaggaggagatgagatgtgtggccagatgtccaggggctgatgaaggagttgcaaaggaccacccagaatagagatgcatccacctcctggtcaggggtaagagagagggaaccagtggtaagagagaaacttaaccagcaaaacttcccttaacaaaaaatagttcatctta

SEQ ID NO: 1879407 - DNA, 4001 bp, Homo sapiens
gcaccctgcgcccgagcacctgggagccagccctggactgcgcagccacctgcgggcggagaggggaggggccaggtgtcctcggcctctgatgtggcttccaccctgcgcccttttctgaagacacacatcctagagcccagagaacttgagggctggagggtttaaggcaaggctggatttcatttctatgttgaaattcttaagaacagaacagtgtgccgagcgcggtggctcacgcctgtaatcccagcattttgggaggccgcagcaggcggaccacgaggtcaggagatcgagatcatcctagctaacacggtgaaaccccgtctctactaaaaatacaaaaaaattagccgggtgtggtggcgggagcctgtagtcccagctactcgggaggctgaggcaggagaatggcgtgaacccgggaggcagagcttgcagtgagccgagattgcgtcactccactccagcctgggcgacatagcgagactcccgtcaaaaaaaaaaaagaaaagaaaagaacagtgggcctggcacggtggctcacgcctgtaatcccagcactttgggaggccaaggtgggcggattatttgaggtcaggagttcgagaccagcctgaccaacatgatgaaaccccatctctactaaaaatacaaaaattagccaggtgtggtggcgcctgcctgtaatcccagctactcaggaggctgaggcaggagaatggcttgagcccatgaggcggaggttgcagtgagctgagatcgcgccactgcactccagcctgggtgacagagcgagactccgtctcaaaaaacaaacaaacaaacaaaaaaacccacaacagaacagtggtcctcagctttacaaacacctccctcagcggcggccaaagaggacgcatcacagcagcccaggcctgctaggggcgtgtttgctggaggaggcgtggccgccgtgtgtccatccagacctgatagggcgcggccattggaggaggcgtggccgctgcgggtccacccaggcctgctaggggcgtggccattggaaaaggcgtggcccctgcgagtccacgttggccccggagagtaacgggacggcggaggggtcatttcccgccttgcacgtaacgggggacgaaaaccggcccccagcccgacgccggaccctggcctcctgggcccaccgacggcctccactaaggccccctcccgcccgcaacgtgggggacagctgaggccacttcccgggcgggccaccccaacccaaagcggcatgtcgcggggcagcacagcctgcgacaagcgcgcaaagctccccagcgggaccgcagcacgggcaggcctgggagtccctcgcgctgctcaaggccgctaaccggcactcagaaaccagcgctctgcggcactggagaaagcacttcccgccctcctgcaggctgttagccaggggatgcaaggggaggggcccctcacggacgtcccgcccgcccctctcaaacatggcggccacaggcgcaccaaaggaagagcccctcacaaacatggccgtccgcccctctcatacatggcgccaaagaggcttcaagggaagcgcccctcacgaacatggttgcctgcccctctcaaacatagcggccacaggcgcaccaagagaagcgccccttacaaacatggccgtctgcccctctcaaacatggtggccaaagaggcttcaagggaagagcccctcaagaacatggttgctcccccctcaagaacatagttgcccacctcgctcaaacatggcggccacaggtgcaccaagggaagcgccgttcacgaacatggccgtctgcccctttcaaatatggcgaacacagaagctacaaaaaaagcaccccccgcaaacataatctctcaggcctgccacgggcgtgggaaacatagcggctacaggggtgccaagggacgcgccctcatgaacatggccggccacaggccgacttcctgctccagtgtcccaccactggcccaaggcctgtgaccttcgcccgccgcttacgaaagagccaacacggggggggggggggggggaatcacatgacgagggtgctgcactgtgattggctgtgctgacgtcggacgccgccgcggcgcgctctgcagactccgggtcgccgctccgccgggacgcgttggccggggcgcgcggtgcttggctgcggtgctcacactcatgaggagccggaaggtgagggctgggtcccggcagcagctgcgccgggcagggcggggactctgggtcacctgctgtctggagaaccggggcggggtcacggggtgcctgtggcctaggagcggcctccgcttgggcctcgcccccggcagtagttggggggctccaggccacgctcccgggagaaggagggctgccaggtcacgcccctgtgaaaagggggctccgggccacgccctcggaagaagtggagctcacaggtcacgtccccgggagaagggggctcccaggttacccacccccgcagaatggggcctctgggccacacccccgagagaaggggagctcccaggccatgcccgcgggagaaggggggctccggtccacgccctcgggagaagtggagctcacagttcacgtcctgggcaacagggggctcccaggtcacgcccccttgaagggaggtttcgggccactttcctaggaaggtggggcaccctctccagaactggtttcaactcctggtagtgctagatgctgcagagctgagtttgtgcccctcaactgctgccactccaatggacgtcacacagcaagtgacctcagcttggccccatctactgaatgtgctaaaagtggggtgatgagggatccaccaagagggtggtgaggattgaaggggggtgccagtgtctggcaaggggcaagtgctcattgcgtgggtgtaacagttaaggcgaaggacccttttcacagtggacccggcgcgggtcccggtccacttgggaggctctgagctgcatggaggctctcctggtttgttcaaatggagtggccacttgtgaattccaactccttttactatttttatctttgaaccaaaacttgtctcctgtaggcacatatacttggatcttttttaaaatgcagtctggtagtttctgccttttgattgaattgtttagcccatgcacatttaatattattgatacactgtagttaggtttacatttgccattttactttttcttttctttatacaagtctgtctttttcttcccctgttccttctttaagtggattaaagtgaatatttcctaatgtagcattttaatttaatgattttttttccacaacttttttgggttttttccagtgctttatgttttaccgtatacagcttaatcttcatattctccatatacatcttaagcttcagatttgtactaggttaattccaagtgatacagaaatgttactcttatatggttatttttgtggtattttgttatatgtattacatctgataatgttacaaactcaacagtactgtgttatcattattactttctgtctgtggtcatttccttagccagcaggggtttgctttcacccactttgttttgttattggcaaatatagtacatgtctgtatatattatacacatattactgtatacaattgctttttaaattaagagaaggaggtagaggaataggcatttaaactatataagaacataattacctttactggtgctgtttttgtgtgtgtgtggttttgaattactgtctggggtcacttgctttcagcctgatgaacttcttttagtgtttcttgtaaagtgagttttgttgttgttgttgttgttgttgttgttgttgttgtttttgctttgagaccagagtctcactctgttgcccaggctggagtgcagaggtgtgatctcggcccactgcaacctctgcctcccgggttcaagtgattctcacctcagcctct

SEQ ID NO: 1879408 - DNA, 4001 bp, Homo sapiens
ctttagtgttattccccaaatattcctggagagccctttgagacacctggtaggattatagtgatctaaagaggcatggccatgtgactgctttggccaatgatgtatgggcagaagtgatgtgtgccataagtggatgctctgacagccatgatgttccgagttccttccccacagtcaggatagctgtgaaaaggggtatcaacacgaggcctccttcagcctgagccctttagtgactacaatgagcagagctaccctgccaacctacaacggtcatgtagcagaaatgaccaactttcactggaataagccactgatatgttagggttgtttgttagggcagcataacactgcctttcctgacagaactgggagtgagagataaggctggagagagaaggagttggattgtgaaaagccccttctccaaggcataggaatcggaactctcctgattgtaaggaaaagccaatgaaggcttccaagcaggggcgttaacatgaacagatttgttatttttttggatgaaatatgctatttctcaacataaggagaagatcagcctactaaaccacatgaggcagagaggaacacacagaaccttaggcaaaagatatatatttatgcaaagtcctaagtcttgaaatttctaaatacaagagctctgaacggagttacagtcagaggatcaggcaagaaaatttcttctatgccacaagcgctatttcctctgcagataactaatactccacaagaaagtttgccagagtagagaaaatacaaaggaatgtaacacagacctgaggtcaatttccagctgcctgtgtgacctcaacaaagatacttaacctctctgggcctatttcctcacatgttaaatctggataataatatatgtctctcaagacagttgtggggagaaaacagcgtatttaaattgcttaggagaatgcctggcagataataagtgtttaatacatgaaactgatttttattactgttattaaaaaatatttagaacaccaactccctgaatacaacagaaaatgattcagggcaacagacagaggagaatgttctctccttgaggaagcaactggatcttgtcatcactgtatacctacctaccccaccccctccccagctcagtgcctggctcacagtaggctttcagttaccctctgcagatcagtgaaagctaggtgagtgcccggagtgaagaaaagttggcaggtttcccactgataccagctgctgttggtttctgaacactcaaagccgcaaataccttagggctgggggcaatgaacccaaggctgaattccaagttcagaagcagcgaagtctgaatttagaacctaggaacttaaactgctgcaggtccaacttcaagccccagttttagacagaggcttgggaaagatctgacttctaacccggttccccctcccctcctcccctcgatgcttctcacaggaaagtacacctggtcctgccaaatcgcactcttatatcctggcatcctatccaggctctgcgaggatggaaactgcgaggcaggggagggaagcgggctgtttggccaccacctccctagtgctgcaggcgaccctgtcacactaactcctggcagcccagtgaggtggacggcaccggccccacctgcagatgagggaaatgaagctcggaggagttccgtgatttgcttgcttcacactgtggtagcctggccacgaaagaaccaggattcccgacttcgggattctttccaccacacactttcgtccctaaggggtggggggcggggggagaataaaataaccgcggaaaaggaaccacttacatgtgtctagcgcttcctagaggctacccaggatatgcgcccaccacccggccgggagtgcagagatttgaagtccaggttctaccccgggctccgagtactactgcgtgactttatgcgagtgtccgccgccttctgggcttgttttcccggaagcaactcggcgcggatggagtgtgtgtgtgcgcgcgcgcgcgcgttatgttgtgcgtgttgtgttaagcgtgtgcgtgttgtccgggggcgggagggggagtagactaacaccggggttccccgagtttcggatcgcctacacgcttgttcccatctggaccctgttacccaccaattgcgcccactataaaaactgcccctccgaggcaaagctgtgaacccccgcgccctttcccccacggtcccggaggatgaagtggggtgcaacggagactcagctgagcgtccagtttcgggcaatacaaatctctcggcttctacgagcagccagacgaccccgcggaccgtcgctcctgaacttgaccgagatgcaaacttcggagtgttctcaacgtggggggccgactctcgggagaccgcccctaaacttaagtccccttaggctcgcccccacctgggacttcacagagccaccttaagggcggtattcccgcccccccggaagtgcgggggggtggcagcgtacttggattctcagcctccagccccgcgcggtggcggccgccggtggatgacttcgggccccacaagtggggaaacaacaaccacccctcgcccgcacccctggcccaaaacaactggccaggttccctggcctcccgggtccctgcatcccccgcatccccgtccgcagccgtgaacttgagcccccctccatcagaggttgcgagcgtccgcccgctcgcggcagccaccgtcactagacagtcaaaccccaagacgtcagcccacaatgcaccgggcgggccgggaaaaacggcccggggaggggaccggggaagagagggccgagaggcgtgcggcaggggggagggtaggagaaagaagggcccgactgtaggagggcagcggagcattacctcatcccgtgagcctccgcgggcccagagaagaatcttctagggtggagtctccatggtgacgggcgggcccgcccccctgagagcgacgcgagccaatgggaaggccttggggtgacatcatgggctatttttaggggttgactggtagcagataagtgttgagctcgggctggataagggctcagagttgcactgagtgtggctgaagcagcgaggcgggagtggaggtgcgcggagtcaggcagacagacagacacagccagccagccaggtcggcagtatagtccgaactgcaaatcttattttcttttcaccttctctctaactgcccagagctagcgcctgtggctcccgggctggtgtttcgggagtgtccagagagcctggtctccagccgcccccgggaggagagccctgctgcccaggcgctgttgacagcggcggaaagcagcggtacccacgcgcccgccgggggaagtcggcgagcggctgcagcagcaaagaactttcccggctgggaggaccggagacaagtggcagagtcccggagccaacttttgcaagcctttcctgcgtcttaggcttctccacggcggtaaagaccagaaggcggcggagagccacgcaagagaagaaggacgtgcgctcagcttcgctcgcaccggttgttgaacttgggcgagcgcgagccgcggctgccgggcgccccctccccctagcagcggaggaggggacaagtcgtcggagtccgggcggccaagacccgccgccggccggccactgcagggtccgcactgatccgctccgcggggagagccgctgctctgggaagtgagttcgcctgcggactccgaggaaccgctgcgcacgaagagcgctcagtgagtgaccgcgacttttcaaagccgggtagcgcgcgcgagtcgacaagtaagagtgcgggaggcatcttaattaaccctgcgctccctggagcgagctggtgaggagggcgcagcggggacgacagccagcgggtgcgtgcgctcttagagaaactttccctgtcaaaggctccggggggcgcgggtgtcccc

SEQ ID NO: 1879409 - DNA, 4001 bp, Homo sapiens
caaaatatttgaattctgaattgttccagaaatgtgggacatgtgagcatagtaacctgttttcaattaacttgcaagctctggttgaatctctaaaaagatcactaacaataccaaatgatagattatgaatgcccaaagaatggtatggatgactaactcagcctcgagagaatggtcagcataggttttcaaggtggaagaccaagattacactgtaccttcagtagtgtgagagattgaggcaggggtggggcgtggtatagacaatgatgtatgcaggagataaggacatgagccacggagcagcagggtcacgcatgttcaggcatgcatggaatggggaccacgttacagggcagagatggggatcatgggcaagctgttgagggatccaggctgtagatttgctgatacttagagggcagtgagaagagtgaccctggagcacaaagtagcagcaacctaaaaaggcagatggggctaaattatgaagggtcttaaacattaggcaaaggagtctggacttgatttagtagacgaatgggggaggggatgtttcagaatgacctgagcaagagaagagctagggaatgaagtcttttaggaagggaactccactaacagtgggaagggtggtctggggatgggactggatagaatccactgcaaccatctagatagtaagaagcagccgatttggggactggatttagggagcaaagtacaaggaggggctgacctttctggacggagtgactgggaaatgatggtatcgctgacagaaatggagatcaagagctttggagagacactgggcttcggctgacattgaggtggtggctggacatctgagggagaggacagagccggtgggaacaggagcaggatggaaagacaggaggacagactatgcagatgagaaaagccactgtaaaacagtaaacatcaagacaggctacatgcataggacctctccaaggaaaggcagcctagagaaaagggaggaggactgaggagacatagtgcggggaacggggcacgaagggatccaggggcagcacagccagacaggggggtggagaagcctggggcacaaggaaaaaagacagggacacggcttccagaaggtggtcagagggctcagagtccaaggaaaataggaatttacagaggccactgggttttagtcaccttacaaacacggcatctgtatgccagaccctgggccaggcttcacggtgttgggtagaagttatcctcattcagcagacatctaccgagtgcctgtgatggtggcggtccctgagtgtggaagagggagactgaggccagattctttctcgagaaggtccaaaccacaatgaggaaggaagacggctgggggaaggagggagtggacggaaaaatacgtacagttgagagcagaccactaattcaaaaaaattagcacttaaggaaagtgagaactagaaaaataagttgagaagacaaaagtcttgcaacacaccccctacccctacccaccagaaaacttagacttgaatggttctcagcaagagaaaagacattgctgtagaatggaacttgttgtgggaggtgggattaccacggaaataaatagaagacagcctccctttccaaagagccaaaaggaacccatttcgtctagttaagagacgaggcaaagcggtaaaatggtgacaacacgtcctggtgagtggttctgaccgtgaatggttggaaaatgctgtgggaatcagaaaggggaaccgtctgggagaggtggtgtcaccgaaggcttctcggaggaggtggcctctaactcgagccttaaaaatgggcgaagaggcgaggccggggcctgccccgcgcggagtactcgggagccgcctccctcctttcagagctctcagtcccgtccccgggcctcgctttctcctctcgcctcgctcagctcagccgggcgcaggttcctagcactgacgacagcgagcgatgacctcagcgccgccaaggctgcgagggcgggggctggggtggcgggggcggggaaaagcgccggagcggggccgagcggagcggctccgggccccgcccccatcctctggccgcgaccaatgagcgccgccgccggctgcccccctacctccctggacctcctgaaaaacgctgcccggggaaagtccgggcagagcccgagcagcggccagggtaacgctgtcttgtggacccgcacttcccacccgagacctctcactgagcccgagccgcgcgcgacatgagccacgggaagggaaccgacatgctcccggagatcgccgccgccgtgggcttcctctccagcctcctgaggacccggggctgcgtgagcgagcagaggcttaaggtcttcagcggggcgctccaggaggcactcacaggtgagcgcatgccgaggggcctggcgccaccgggggtcggccccatccctgccagggccgtctttcttctactcctgcggcagggtgacccacgggagcagctttgggactcggtggccctcctccgacccccggggcggcccgcagtccccagtttcctgggtcctcctccccagccctgtgctcgggtctcggccgtggcggttctgatggggcgcgcccctctacgctctcggaggcgcagaccctggtcctggagtgccagcccgagtccccagcttatgcccctgtctcattacgggctcgtctccctcgctggaccctcgagatcttaagaccctcgatggatgttgttgcgggccgcccggtcggccgaggggtcccgatgagggaagaaggtgcagtcgagccttttcaacaatttggagtcccagtgcggttcttcctgccggtcggggtgcgctgtgcctggggtagtccactggttgctgactggcttcaagttggaatttgggccccctttgtgttatctttggttccccttagccatctgccacctattgtggtagggaggagagcctcgtagctcgtgaccctgccgtgcgggccttcaagttgggaggtgaagagataagcagcccgctcgctggctggggagagacctctctcccagctgtttctagctggttactgtcagttttgggaagcgatagccatctcggaacgcacccacacagaccctgccttctgaggaaaacagatgtttcatcaaaacaacccagttttcactcccttaggcactgctaaggaaggttctctgactcttctgaaggaagcagagggaacacagggtgggaggtccagtgacttgctgtggacccaacaatgttggcagccttcctggccctgaaacttcagctcacaggtctccagaggccctgcctggacatgccagtcccagtcacacccttcccttgctttgggggtgtgccaaaagcaatacactggccactagagagtaccctagagctctagaatcccctcccaacacgcacacacacacacacacacactctctctctcacacacacacactcagtcacacacacacacacacacacacacactctctcacatacacttgtcctggaagcaggaaagtggatctttccagcttccataaaattttctctgctaagtggaaagagggtcctagaactcagaggaatccacctcccttacttaaagggcccctttctctcctcctgtcccttgaccctccaccccgccctatggtagtatccatggcctagctgctctaaccagggcatctgcccctggtcctgtctccacagagcactacaaacaccactggtttcccgaaaagccgtccaagggctccggctaccgctgcattcgcatcaaccacaagatggaccccatcatcagcagggtggccagccagatcggactcagccagccccagctgcaccagctgctgcccagcgagctgaccctgtgggtggacccctatgaggtgtcctaccgcattggggaggacggctccatctgcgtctt

SEQ ID NO: 1879410 - DNA, 4001 bp, Homo sapiens
agcatgtgaggtgcccagcatgggatgtgagctggcatgcagcagggggccttgtgtttcctctctccttgggttgccaagcccctggagctgctgtgcctggggagcagagaaggggacactttggggtcttcaaagatgaccaggcaacaaagcaggaacaccgctaggtaagagcaagcaagcccagaggaacagcctcagggtccagatagagacgtacacgcctgcctccctggggtctttggtggcctcccgaacaagcaggtgtggatggggagatggactgccttggagagagctacatgagttccagctccaccagcccccagagcctgagcaggtgacttcacctttctgaatctctgaacatccatttcctccactgtacaatttcattaagatacatacaagaatatccaaagcacagtctttgtaatagaaaaaaaatcctagaaacaacatccaacagcaggtgactgaataagtaaccagtggtatattcataaaatgggacactattcagtagtaaaataaattacaggtatgcaggcaatcaaaatggatttttaaaaatataatgctgtatgaaaaaggaagtcacataattatggaatgactccgtttacacaaagtaaaaaatagcaaaactatacaatatcccacttagggatgcatacagaggtggtaaaactacaagaaaaagcaagagaatgactagcacaattaaagttcaggaaactagttcttcaggatgtgggcaggaggctgtgatgggggcacccagagggcctcaaggtactggcactggtctattttttaagttaggtgatggatacatggcttttttattattactattattctttaagctgtacatgtacagttgtgtctatggtgtcttttacaataaacaagtatttattataacactagcacttataggatacatgcctatgatgaggtagagagaatgtaacaaaggactggcacatagtaagcactggtggcatgtggctctgtcctccagcgtgtgggctctgtgttttctctctctctctctcactcacacacacgcacgcacacacacacacacacataggaagccaggctcccctctgccctcagtcactcgtggttcacaaaaatggcaaataataggagcactagaataggagctctccatcctggttcgagtctttccagctggggcagtttagcctttgcagaatttctcaagggtaacatcagcataatgacctctgtctgtaagcccgtgagtgtaagcctgtaaagtgctgtgctcatgcgagggatcaggtctgacctgggaaactaaaagcatcttcatggagcaagggtgctcctccagtgggggcgctcagtgagttctgcggtatgggtgacagtattcttgtgtggacagtattcatgtggtgattggggtaaatggccctcttttgcctggttttctgcctcggtcattgtgcatctgctgactgaacctgccttttggtcctagtaaagtacagatttcaggaaaagtgtacctggccccgggggtggccaacctctgtgtgacggctttaagcacagtgtgtcttgagggggcctgactccatctgaaaagtgcctgtctggatgtacctgtctataaccatggacctgcctccaaggtgcgtggaccaacctccgcgtacctgattcactcgatgcgcacctggccgtacgtagcttcatcaggcagggtgtacctgtcaagttcttaggtccgagtgttcgcggctttacctgtcctggtaccgccgtccgcacctcggtcagtgcgtccccggcaggtgcgtgtacctgattcagtccgtgcttatcttgcgcatacgggccgttcagtgtcccgctcggagctcgtcgccgccgcagccttgaggctccgacccccgcttgggccccgtccggcgcgcagcggccgcgggggcggggccgcgacgcgaggagcggagcaggaaggggcgaggcagccccgcccccggggcggtctcccgggacggccccgccccttgcccgcttccgcgtcagtgcctcaccaccacctgcccgcgcgccgccccatataaaggcgccgccgtccttacccccaggactcggccccatggagacgccgccggccgccgctggcgcatggcggggtgaggcgcggcggggagggtgcgggcctcggcggggaagcggcagggagcgctccggcggggtccgagccgagccgaggggaggggacgggaggggacgggaggggtggagaggggaggggacggaagggtcggggtcctgttccccggcccgccgggcctcaggacccctccaactttgcccaagttgggagagccggggaagagcaccaggttcctgatcgggatcgcgggccgagcaagcgcgggtctcgggccgggacagcctcggcgtcaccagctcccggcagccaaccaaagttttccagcaacttttctccccacgggtcaccccagaaacttgccctccccggctccgggagtccggccatgggccttgcgctgcctgggcctgagctctgagtgccggacgggtgggcgaaagtggtggcctcagtggggaagccttgggccccgcaacgcacttccagccccaggattccatctgagagccccgtccctgccttctgggtcccctgggttggcgtgggggttcgaggctttacagctggggtagttccagtcttagttcagactaagttccgatcttcgagccaccagctaacagctggatgaccttgagcacgtttttaatgtctgtgcctcagtttctccctttatagaatgggaatgggaatgcctagctgggagagcttttgagaggacaacctgaactaataacacgatgcagtgtgtagtgccaccaatccctcatcctgctggatgtggttttgggagggaggttaggagagagcgctattcaccgtccctaaccctgttggttgttcagtaggagctgtggcgcggggccttccaggagtctgagctatgagtggcccctgtggagagaagcctgtcctggaagccagccccaccatgagtctgtgggaatttgaggacagccacagccgtcagggcaccccaaggccgggtcaagagctggccgctgaggaggcctcggccctggaactgcagatgaaggtggacttcttccggaagctgggctattcatccacggagatccacagcgtcctgcagaagctgggcgtccaggcagacaccaacacggtgctgggtgagctggtgaaacacgggacagccaccgagcgggagcgccagacctcaccggacccctgccctcagctccctctagtcccgcggggtggtggcacccctaaggctcccaacctggagcctccactcccagaagaggaaaaggagggcagcgacctgagaccagtggtcatcgatgggagcaacgtggccatgaggtaagtgtcacttctgtggccaggacacatgaggttcgcatctctcctgtggccaggacacatggaaggatgactgtctctgcagctctggtgggctggaagaagtgacttccttcttagggactggtctagagggagggaaagccttttatgaggctagggtcgcgctactggtaagtgacagaggcagggttccagcccaggtccctctgtccgcagagcttaccttatgctgtgggtccctccctgaggccagcactgtgtctccactcctctcctgtaatgtgaggcagggctgtaaaggggaccagcccgtgggcagctgctcactcacccctcggaacctgatctcaggtgggtgttgtgaggagggagtgtgcggatcccggagaggagcaagcgttcaggaaccatagtagtggtagtaggcagtggtagtagcagttgttgttgttatttcaggggctgggcttctgaggccttcttgtctcagacctgggctccc

SEQ ID NO: 1879411 - DNA, 4001 bp, Homo sapiens
aaaaggaagaaaatcctaacttaataagtgaaggcagcaaggcatagtatttgaatggctacctttcattttaactctacttcttaaattcaaaattggatttgggttcgtttcaagttgttcacaatttactaacgaaatgtgcatctctcattcttcccccaaaagaaagaagtcatccactccagctacatataagtctccaatttctgtcttacaactaaacgtgaaaaccgaaataccactcattgaaaaaaaaatgtacagagaattggcaggctgcatgtttatgtgaaccttcagaaaacatggaaacacgcagccccaactcaccaggaaaatcaacacttgtgatcaaactattttgtgacattttatgtcttttatacatttcacttcatatccagtattccagttttgcaccggcttgcctgtatcaaccccaaatcgcctgagagcaatctagtactgtagcagaaccgtttcaacatgaagagttctgctcatcgcctgtggcgtggtcttcgaaacacctgaatcaaacattgattcccctccccctgctatttaaaaccgtgggacgtcaggcttgggttgtaggtaaagaaaagccacagtaatcaaacaagcaaccaaaatacccgaacacggaacacgctaagaacaaaggaaacacaagagtgtgaacaggaaatgaagcaactctacacccataaataccttctggggccgccaacataggtaaaagtaaaggtggagtctgagtatctgaatctgaaacagaaagtcctgtcaaaagctacccctggagtggatttgttttaaccccgatcaggacttgggccctccatttggtggagtcaggggaggcctggccgggcgggaggcgagggctagagggcggcgaggtctctccgcgcagcgtccgaggggatgcggcgcgcccccgactgggtgcagcggcaggccgcccccggcagcaagtgccgggtgccatggcaacggcgggaatttcccggtcggggaggccggaagcagccccagccgggctcgcggcagcgaaagcaaaatccgatctctctcccgggggagcaaaatggacgaacggcgaccccccaggcaggggcgctgggtgccttgggaatccgaggaatcccttctctttgccagtcggaggggactagatggagccgaaggggccggagatgggccgagcgctgccccccgggggtcctcggcgccgggcgcagcttacgagcgcagggcagcaggctccattcccggccgccgccgctcagcccattacgcaaacctggcgggtccaaccaaccccgctctgccgccgctgctggaacccaggaggcgtgcttgcaggcttcgggcactacgcggggctggaaataccacgcactgccccttcgcctagacccccgctcgggccactcgggttctgccttcaaagctagtagctgccccagacttgggggtggggggaggggaaggggcgaggctggcgccccctcccgcttttggctcccgcgttcgttgcagcagctgtcgccaaatgaaccccggaatgcggacgtgcaaaccctccaccccacccccagccacacacgtcgcggtcggagaactgagaagggggcgctgggtccgaggttctggaaaagcaagaactcacctgcaaacaggcagtcctcagctctggacttctggatcacgacgtcgatatccttctgaattcggtcttgccttgaacacatccccattaaataaatccttggaaaagaagcagccgctatttccaccccacccccctcgcacgctttcagctttcgtaaatattcagttaaaaatgaaacctctggccgaggcaggggctgaaggccaactggtttcggaagtgatcctgggtgagaggaggagaaggaggaggaggaggaggaggtggaggaggagggggaggtcggctttccatttccagatgtgaccgcccagctgctgctcgccgctgctggattccagtttcctccccttctggcgacggattggtgatgacaccgagtctcactttctccttcccccgcccggaccaaccgccgtggggggccgagggtgccggggacggccggagagcgatcaccggctgggcggcgggagccgacgaggggcgagccccgctccggctcaagcgcgcacacccctcacggcccgcactccggccttccacacccgtgcacactctcgcccgcgggcggcggcagccgtgcccaggctgctgcagcgccacccgcccgccgcggaccctccgcgccctccgcctagtcacccggcccggccgcgggccgccggggctcgcagagtgtcagccatcccgggcaggagtcgcgtctccccaccccgacctccactcgcgccgggagctgagcggcagtgtaggtagtgaagactccctggggctcccagccttccctctccgcgctctccccccgtcacttttatgaattcgactccactttctaaaggaattatgagtcttgtggcaaacacaaaccggagtggccgggaaggggaaaaggggggaaaagaaaatctttaaaaattaaaaaaataataaaacgaacaaatctttacttgttgccacatcagataacacggaaaaagccttgaaattactccagatgtgcaccctccccttccctcagtgcctgagtctttttcctccagatcgaagtatttcagcccttttggggcgccgtttgcgaaacacagccccttttgagggacttcctcctcttgaaaagactcaccagttctcccttcctaggtgtttctgttcatgagaaattgtcagaatcaactggcacgttccagggtcttcctaaaggatggaaacctgtttggcttgctttttaaaaccacctcctttgacagtcagtccagggaaagctacaatccaggtgttcagaaatgagatactgctctgattctcactttctgttctgcctaaggacacctcaggctgacgtagctgccccacctctatattggtttatgccctaggagaggtctccagcaggcacttttcttgttgatcttttctccgctgagaaggctcccgccagtagaccatgactcgttttgctttgcattctcagtgccacgtacagtgcctggaatacaggagggtggcctaaatgttggctgaatgcatgaatggtcatttcttgcagcctcttttcattaccctgtctcatcagctttcttatcagaataagtgcccaagagtgccaaactgtttcagacccttaatcaatttagttctgattctgaccgtgacaacatgatgttcagcacggtaggaatgactgccatctctgaaggagtcttaagattctgtagaatcaatgaaagattctatgttctaacgcctttatctttcaggaaagaaattacaaaatagtttcattgtccagtcatattcactatgagttataagaggaaacattctatctagaattagaaataccatttgacccagccatcccattactgggtatgtacccaaaggactataaatcatgctgctataaagacacatgcacacgtatgtttattgcggcactattcacaatagcaaagacttggaaccaacccaaatgtccaacaatgatagactggattaagaaaatgtggcacatatacaccatggaatactatgcagccataaaaaaggatgagttcatgtcctttgtagggacatagatgaaattggaaatcatcattctcagtaaactatcgcaagaacaaaaaaccaaacaccgcatattctcacttataggtgggaattgaacaatgagaacacatggacacaggaaggggaacatcacactctggggactgttgtgggttggggggaggggggagggatatcactgggagatatacctattgctagatgacgagttagtgggtgcagcgcaccagcatggcacatgtat

SEQ ID NO: 1879412 - DNA, 4001 bp, Homo sapiens
tcatacaatgttggaacatatattagcattatttaccaagatataacctaaagaagactgaacatcattttggcaatcccatgtacctaaacatgtcaaataattctgtttacctctcttctctggacacttcaggggccctgtcaaactactcaaaaagccaggtgccggggaagacaattttgaagctcaagtttgattttgggaaggctgttaaatgttcaaggtttaaaacacttgatattatgaaacagaattccagattaccacaaattatttgttttgcaaaaatgatgactcagaaaacgtaaagaagcaaaaaccttttataaccctttacagattttgccaaagagcagctaatgccataggaaacctttgttaggcttttatttcaatgctcaatttacagaaaaaccatataatacggttttttgaatttagtcaatatgttcacacagagaacctcttcggcaaggttaattttcacaattcttccatcacttctttgaaccctcagctttttaataatttaattcaaaacaatcctttaaccctaggcaaaaatttacattttcatgccttcttataaccttttactaaaaaacatacttcactgttcttacactccttgcatgcaaatctatttccagtagtctcaattacatgttataatggtaactcctagtaatttttaacaataatttaaaacctggtaaattgttttaattgtgtgctaactgtagccaaggtttgccttcttagttaaggaggtgattagttccatatgtccccaggccctaccagccgtgaagcagaggagacagacagttttcaaaacccaaaaagcagtttgtaaccttgaaacacttagcaaaccttgcatcttacctacattttaccaataatctttaggggctgttttgatttctcaaagattaaagtcatgcgaactgaaaggtaccacagcttttaacttcccttaaaaaatacttgatccaagtgcttgtcttctttaggacaaattaattagagatctttttaaagacagcacacacagtatacacacacacacacaggcattagaaaatccagttgctgggtgaggccctttaagagacagggctaggaaaacatgcagatatcaaaccagagagggctcatcctctgaggcaggattgctcaacaaaccttgccaagcagttactggtcacgcccccaggatgtaaaacaagatggaggcttgcagcacacaccatacagacatgcaaagcacaccaggattggccacggcccaagactagccctacaaatccttttccacaattgaagctttacagagactaagttcactgctgactgggtgtgaagaggagaaaaaaaaaggggtttaaaaatgcctggggaagaacctcttactcttacccaagtggttcctccaccagggagacaagtttaattgctgtgggtcagagctggcctccccggtgcagggaggaggagatcccatgagtgcgtggcagaaaacgccagccactcatgacgccttgagccaggtatcccagccccggcagggaagggagggcggtggggagccgctgctcacccgttccttccaaaaaagggagaaaaggctgtgaaaaggcccctaaccctaggagtaatagggggtggtggcatggtttcctctaccctcagaagccggaggatgagagggctcaggagagagagggaagggaaagaattattggcatgcatttcactcactgtttgtagagcctccacagtgcgtaccaaagatgtcgcaggacttttccttagttcagctgaagacggggtccttgtctgtcccatggccacaaaaatttaggctcacaggctgtttgaagggtgagagaagcaggacttttttgggtgaaaaggaaaaatgggggaaacagcgatcctccataaggtcagagtccctgctagagagcttctcacccacagcttgaattccaggttccacacagaaagaagagaggccaggctcctccccgctgcaaacagcatgaacttcctgaggttccaccccagtgtgcaggccggttggagtttttctggggatccgctcccacctggctgtctcgcatgctttttttctttttcctttttttttttagtgaaagttcatactctggctaaatgtacaggaattccagaatattaaattccagtggtgattgcctgtcagggaggtaatgggaggtgatagagagtgaatacagtcatggcatattttttctttaagctctatatcttgttatacaatttgttttcctgacctatctggaatttccctgctctcataacagcttccccatgatccattcataccagctggaaaattctacttggacttgttagtgttaagtctttgaggaatagcctccttaaggaaacagcagaaatgtcattttgtttattcttatggcatccagaatcctgttttactgaaaagtttaatgccacgttcttggatcattgtggcttccattcccagagcctctgctgcttgtcctcagggtgtttccgtggcttgaaaccctattaaaaatccttccctgcttaattgttttaagcagcttcttttgaggatctcttatctattagttagtaaagacaaatcttccttcccttcacattcccttgtttgaaacaactctttatgtatttttggcacttaattatttaattataagtgaatataattttttaaagaaagtcagttgacagtttctttgggggcatttattttttttattttatttttggtcggaggatgtttatgctgggattcattctgatttccttctccttccttgccctgacatgtccccagaatgcctcctcttctaaagtcaagatgatcaccttaatttcctgcccttctatggcaagttaacacaaccttctccaaatctgggcccaggccctgaaaagctcttgatcactcctatagtaagaaggctgcagatgttttccctaggcttgggcttgggtagatgctgttgatggctacaagttcagagctcttttctagagatgtaaactcatttttaagttttcctactcacccaccaggagactttttctatttactaggagcgggaaattaatgcagaaaagacggtgagggactgatttctgtagtgtagcaatgtagggggtaggggaaatgtgtaattcttagtagcctaagtgcctgcagtagaaacgttatggaccgtaccagtgtgcaaatgaaaaactctgcattaatacccatgcaatgttcatgttgtcaccagatttgattctagaaacatttcctacaggactgtttactgcattttattgttgaatactctcagcttcaggtgaaacacactgaagtgtgaaatggtcaattataactggataaacaaagttgcttggataaaatattattaaactgggtgggtggttgtttagtgttcatttttctttatctcagggcagggggtatacggagtagaagaagggtttggcactttaggaagatgactttgtgagcaaattcacagttaccaagaccaaaaagaccttataagtcaatttcatgctgagttgtttaaaaccattttcacatcaaatatttcataacttccctactctgtagaatctttcaaagtttgaatttctatgaggtagaccttacacgatattccccctttaataccattggagaattaatttaatcttgggaaatactctcaaacattgatactttggaaagtaaattcagaagggaatatcaggaacataattttaaatggtttttaatacatacccctgaagcttgagataggtatcacactttgatgcatatcctgtgtttgctgaaatatcacttatgaaacctgtgattccttgactgagagcttcatttagtatcttatttatgatttgctagctgatggtgctccaaagaagtgcttatc

SEQ ID NO: 1879413 - DNA, 4001 bp, Homo sapiens
aagccccccagacgtctctctcttcctgctgcaaccaaagctaaaaagaaaatttgccagaatgaatggaataactgacggtccccttcaatgagacgtccatgaggtgatgtctggtttttcctaaatacaatggccagtcgattattagttcatccagaaaaaatatagatgctgtcatcgtataaacatgagtctccacatagaactgagcctcagacccgctggaggtgctctgtctgggaaacactgaactagaattttgggtggaacgaagtagaagctttactttttatttaacagtagcctgaagacctcctgcagaataatggaaaggataaagacctgggagccaggatactaaggttctggcattagctctgccccccagttgtctgtttgacctcgaccagagggaaacagttttactacctctcacaatactgtgcagtctggattggtatctccatgtaatcaataaggaaataggggctccaggagtttacccaaggccgggcagcagatcagtggccagaccaagcttcagctgcacgtctgcccgactctgaagagcacgttgccttcacaagccatcaaatcccttcgtgctttggcctcttcatctaccgcttgaagggtctgtaccaagtggtcatggttccttccagatacagcaaaccgtgattctaaggtttcactgatcccttaaaatccagttttagtgctcacaaaccccatggtgataacaaaagagcctttaaaaaggatttatccacctataaaaaccattagattttatttggggctgtgggcaaagaacaccaaagcaaacgtgttggaacatcaaacctcctttaaaatttagggcagcagggacagaggagaaaatctgcacagggcaaggagggacaacttacagattccatggctggaaccagactgcgggacactatttatctgccattggcttcctgggggataattgcctcctgacaattgtttagacttgataaatacatgaaatgggaccgccaacagtttatctggctaccagttcagatccggacagaaccagatgaagaagtcaggcatatttgcaataacctcaaagataaaaccttcctatcagaggcagcttatctcctcctctgggtcatgctgcctagtaactgccacctccaaaagaaggaaggggagagcacttctagcagggggttcacagtgggccttgcttgccttgaactccccttcctgcccacacgacaggccacctgtctggcagcaagggagtggtactgtgccctgatctggaaggcttaggaaagatgttggcaaggaaagtggaagtaatgagcaactagatcccaaagccaaggtcacctaactctgagatgaatgcgttccttgtgggctcttcctctgtttcacatggacaagctaaaggaacttcaggcctccccagcaaagataacaccatgaatcgcagctcacaggagctgggaccctgctgggctacatactcaccccatgaccaaaggcaagtgggacctctgggcctcagtttcctcacctctcaggggtttgagctaaataatccctaagatcctactgagccattttatggactggaatcaaaccagccagacctctttatggtttaaaagaggccagaggtttcatcgaagaaccatctccctcccttacatttttcctcagcccgcttgcttttctcttctccctccccgacacctctcatttgccggccacaaacctccatcctccaactcctttccaacgtcagtagctggctccaccaggctggctaaggagcgaggagaccatcacctcagaaagcagccccgctgggaggtccacggagcagttcgccgagctgtgcacaggccctttattttccatctgtcaagaaaggaagctgcctgttgcttatttcctcctcccactcttctcccttcccgccagcagactcttccactttcaaaatattctgatgggggatcacaggagttttcctcaaacaagatcacttggggtcaactactgagcaactcccagcctcagccccacccattccctcaccctccagcttgagcaatagctccagttagtaaagcagttggatcaacaggacaacaaccaaaagtgaccttctacgtcctaaagcccttgcctgacaccacctctttttttttttaaattattcaggggccttttggggacccccagttgagctgtattctgcagaaagaacttccaaacgaaaggaataaggcattgttttaccaagagccttttctccctcaagaaacacaatgtaaactaggaaacttgcactttcttttacctttgggtagatgagcagaagggaagagttactacccagggtgaggtcattcctccatggtggtagaatatctggttctttcagtttccccatggtgctggcctcacaataggtgttcatgaggtgcaggctaattgggtgagtggatgcagtgctctgatggatttattcagtgtacaagattgcaaagccatgtgccagcaaaggcttaaccaccccaccctacccttcagaccagccccatagctttccatgtccctgtctgcccagcctcaggccaaagcaaaggcagggatctgagctgtacccactgtgaatgcccatctcctgacccctgtgctagtgtcttgtccctgcatgcctcggctgtcttctctctggactatgattcatggcagatattaaaaaggaaacagcatccttcaattctttctaccatttctcttatctttaaagggttcttattaagcagtatcttcaaacttatttatgtgatgtcatgctaggaagcagcgttgtcaatgtgccactttccatgagcactgaattcagtaaaaataaaagccaaataaatgatatattgtctccatgcagaatcttctctagtcatgactagctatccagatagtagggaatccctaaagataatcagataatggtgacttttgcttactgaggcaagctcccctttcctctgcgcttctggagtgattgatccagagaggccagcttcttgctggggcacagctgcaatccgctgtaagaagccagcccagaagcggggacacaaaatcatggggagccgaccatggccaaagcatcatgctattacccttcacttcacattttttagctcttttttgaatgttatgaaagatacacagatgtatatattttatgttttcatattaaaatgttttcatattaaaaatcaaagggcaggaggaagtgaggaaggggaagaaagtagcattcaaacgccaagcatcatgctgggaacttggagttctcaagccctccagtcttggtcactggggaagggaatgggtatcacccgcttagttcatatttgaataactgctcatacttgaaaatgtcttcaactgcaacaacatgaagtggggagcccccacaggatctccacgtcttccctgagagctcttggaccatgctccttcatcctccatgattttgatcttgcagttctgtttaccttcagtgccttctcactctttacaccctcatcccaaccccttccacttttcaagactcatttagacatcatccccaagaaagcttctgattccccactgtccagtcccatctgggtgggtacccatagagatgtcctgtacaccttgtccccacgtgttagaatactctgtatatctgtctgcttcctcaaggtactgtgagctctttgaatgagagtcttgttcaggtttgcatccccagtatctactggttcagttctaggctaccacttgcccaaacaacacctctgtgttctaagaaaaagaagaatgcagccccatccctcccactcacgccatacgcacactgtcagcctccaagcaaggccatgtgactcccttgttcaagtcagaaaaaggttctccctcctcatagtgggtgcagc

SEQ ID NO: 1879414 - DNA, 4001 bp, Homo sapiens
gagggtttttcagaggtgttaattgggggtaatgtttaactcataaaatgaggatagtcattctctaaaccaggaatttagataggacttcccttatcaatacctcctgctgctttttagctgctgctttttagcagcaggaggtattgataggtaaaggagtatctggtttggtttttagtcaaagggatggtttagccatactcacaatgagaatctttacaaactggactgactttcaccaaaagcgatgagatggacttgctgccacatataggtccatgccgatgagatggtgtagcagtatctggtgctggaaaggaaggggcctgtgtaagagtcccatcgtaccaacaaggaaactgacctgccccagtgttacaccgtttatccccagcggcacagccacatcctgaatccttcttcaagagtcctgggagaagaaaataagccccgttaccctctcctcctttctgtcttggagagaagaggcctataaaacactaatagtgcaggggaagttttttctaattccaaacaaggtgggaaaagcaggaaccttttgatttctgtaagatcaatttggtgaagggctagcacggaagtttagactggaccatgataacagttaccctttactgagccttttcacttgccaggaggacactgtagatgcataatagttcataatcctcaccacaactctgtgagctaggaagttgtattcccacttgacagaacaggaaactgaggctcaaaaagttaaccaacttacccatagtgctagagctcacaaacagcaaaggcaggattcagacacctcaaggcagtgaacaggcggcccctggttctggtcctccctctcccgttctcctctacccaggcttgatgctgggtccatcctccctttggcctcaccattaaagctaatgctgacatttccatcagcttcccagtctcacactcccaggagtagcaacatgtatcaagccctggcgcagacatagtccttacaaaaggcaacttctggggaagaaaaagaaactccttgttctccgctcactttcagaactgatgccctggcagacatgaagcgtgctttcggcacgaaggaggaagaagaggaacgcgcagggcttgattcccggttctccagaattcggaagtggaagaagcctgggagtgacaagggaccccagatccggcctaaaccagcgccctggggtcaagcccctgcgtagtcctggacaaaggagccgcgacctggaggggggaccgggagaagggaacggagaccccagtggagccaaggagcctggatgggcaaaggaaatgggcgacgggtaaatggagatgcagccggggatgggagaggacgaccatcgactgggaagcggaaacccccttgcggtttgagggccctgaggaggggaagcgccccgcacccgccccccagcccgcctccaggggtgaaggacggcagggcctcccgaggccgccgcgccgggacagcctgaccgagcagcaccgagacgaggccggcgcccaccgcccctgcccggcccccgtccgctcctcgggctagcactaggccccaccgtgcaagcgcactgtgcatcgcgcctgcagcctttcgaaaatagaaaaatagggagtatatgtagtaccccacacccttgtaatgatgccgctccaagcaaatgagtccttaataacaacagggtgctgggggcagcgaccgatggggagcaaacagcctggccctgtggtgtagaactcgcggcaatggagactcccgacactccatgtggcacaagtcccaggtcccggcgggccagcatccggccttccccggcgaggagccgggcttctgacgggagggcagggtggcgagagggcgccagcaggacgcctgaccttgcgtgaaaaaccagagaattccacagcaccgtggcgagtgctccccggctgcgaccgcgcctcgggccgcgaggatgttcctatggcgccacctagtgtcggaggtgcagacaacgctctggcgagggctgcaaggacggcctgcgaccagccctggaacctcagacttaggctgggaccttgggatgggtcatcccaggggctccagctgtggacgagtgatgcccttccaacaggcaaaaagccccccagacgtctctctcttcctgctgcaaccaaagctaaaaagaaaatttgccagaatgaatggaataactgacggtccccttcaatgagacgtccatgaggtgatgtctggtttttcctaaatacaatggccagtcgattattagttcatccagaaaaaatatagatgctgtcatcgtataaacatgagtctccacatagaactgagcctcagacccgctggaggtgctctgtctgggaaacactgaactagaattttgggtggaacgaagtagaagctttactttttatttaacagtagcctgaagacctcctgcagaataatggaaaggataaagacctgggagccaggatactaaggttctggcattagctctgccccccagttgtctgtttgacctcgaccagagggaaacagttttactacctctcacaatactgtgcagtctggattggtatctccatgtaatcaataaggaaataggggctccaggagtttacccaaggccgggcagcagatcagtggccagaccaagcttcagctgcacgtctgcccgactctgaagagcacgttgccttcacaagccatcaaatcccttcgtgctttggcctcttcatctaccgcttgaagggtctgtaccaagtggtcatggttccttccagatacagcaaaccgtgattctaaggtttcactgatcccttaaaatccagttttagtgctcacaaaccccatggtgataacaaaagagcctttaaaaaggatttatccacctataaaaaccattagattttatttggggctgtgggcaaagaacaccaaagcaaacgtgttggaacatcaaacctcctttaaaatttagggcagcagggacagaggagaaaatctgcacagggcaaggagggacaacttacagattccatggctggaaccagactgcgggacactatttatctgccattggcttcctgggggataattgcctcctgacaattgtttagacttgataaatacatgaaatgggaccgccaacagtttatctggctaccagttcagatccggacagaaccagatgaagaagtcaggcatatttgcaataacctcaaagataaaaccttcctatcagaggcagcttatctcctcctctgggtcatgctgcctagtaactgccacctccaaaagaaggaaggggagagcacttctagcagggggttcacagtgggccttgcttgccttgaactccccttcctgcccacacgacaggccacctgtctggcagcaagggagtggtactgtgccctgatctggaaggcttaggaaagatgttggcaaggaaagtggaagtaatgagcaactagatcccaaagccaaggtcacctaactctgagatgaatgcgttccttgtgggctcttcctctgtttcacatggacaagctaaaggaacttcaggcctccccagcaaagataacaccatgaatcgcagctcacaggagctgggaccctgctgggctacatactcaccccatgaccaaaggcaagtgggacctctgggcctcagtttcctcacctctcaggggtttgagctaaataatccctaagatcctactgagccattttatggactggaatcaaaccagccagacctctttatggtttaaaagaggccagaggtttcatcgaagaaccatctccctcccttacatttttcctcagcccgcttgcttttctcttctccctccccgacacctctcatttgccggccacaaacctccatcctccaactcctttccaacgtcagtagctggctccaccaggctggctaaggagcgaggagacc

SEQ ID NO: 1879415 - DNA, 4001 bp, Homo sapiens
aggcacctccacagacatcctcttgtaatcatctcaaggaccctgggaggcaggtgtattgatccccgtgctacagatgaggaaactgaggctcagggaggtttagcagcttgcctggagccacaaagctaaaaagatccaggttaagatcccaagtctggccatcccccagtccagcactctattcactacagagctttccagtgcagaggaggcagggaagggacttgagaaaggggagccccttctctgagcaatagaaaccatgtttgagctcagctcattccaggatgtgagtcatagtgagaagcccaagttaatcacgagacaatgaaggctctaacttggagaaatgactccacaggctccatgggagctgcaagcagtggctcaaaacaggcaggtccagccccacagcgttccacatcactagaggatatcgtccgtcactgctcctctgcttttggggccattcagatgtagaaccagacttcaagactacccttggacctctgatgccagttagggccaccccacaccaaactccaggtgagagtcagcagtgactttttaatctggaagggaccttagccaccatctagtccactattcttatcgcacagatgggagatgaaaacctcaaacagaaaagagttgctcggggtcacacagcgagcgaattcgccaccaagccagctctccagccaaagcgttctgcatgccgccttccctgcctcttcctcctgttagtgccagtgccctcctgcttctcactgccacacccccaacctggacgccccctgttctcttcgtagtcacacatgtcgcgtcattactttctccttatacacccaagcccagcaccaggaaaactacaaattagcactaaagagtgaccgctggtggctcatgcctgtaatcccagcactttgggaggttgaggcgggtggatcacttgaggtcagtagcttgagaccagcctggccaacatggtgaaaccccgtctctactaaaaatacaaaaaattagccgggcgtggtggcacacccctgtaatcccagctactcaagaggttgtggcaggagaatcgcttgaacctggaaggtagaggttgcagtgagccgagatcacaccactgcactccaccctgggcgacagagtgagagtctgtctcaaaaaaaaaaaaaaaaattagccaagcgcagtggtgggcacctgtgatcccagctactcaggggggctgaggcaggagaatcgcttgaacccagaaggtggaggttgcagtgagctgagatcacgccactgcactccagcctgggcaacagagcaagactccgtctcaaaaaaaaaagagtgactgctgggccctcacttccccagaatctttatattttaaaagaatcttagaatatctcttcctctccctctcccactctctttccacaacacacaggtacctcaacgacccctgggaaaggcaatcatgggttcacatatatcattaggtttggattcagataggcagacttggggtctatctaattctaggtctgacatttagtaactacatgaccttgggacagtcactcaacttttctgaacctcagttttttcatctgtaaagtggggacaagaatactccccttccaggctgggcccagtggctcacacctataatcccagcactttgggaggctgagatgggaatttgagatcagcctggccaacacagcaagaccctgtctctataaaaataaagaaaaataaatatatattttaaaatactcacctttcaaagacacggcaaggatgaagggaagttgatggctgtggagtcctttacacagtacccagagcagagtgaaccccagaaatgctgaggtagacagagagaaggagggaggaagggagacctacaggcttttcttttttctacaacagtcgtaattatttcatgcacgaatcttgtctctccactagagctccctgaggctgaaaacacaacttctgcttctgaacccctaccccacccagcacagggtttacatcatagtggggaccccaaaatcctttgtctccctgcttattacagaaagaccagcttgatagggaaacccacagacctggattgtggcaccggcaaacctcctctctggcaaggagttcagagcggcttttcacagggtccctgggaggcagtcaggaccagctccccctcatttcacagatgggcagactgagggccacggcctaggcagcagtgccaaagacccagagtcctgaccatcagccctcccccaccaccagtgctgcgaggccagctcagcctccgggtccacttaggtcctcctcctgtccacattcgagccctgtgttgtgatggcactgctgggatgctctcttgatgcctgctttatttttagatgctctaagactgttggggaagaagaagagacccactttcctgttcagaaacattgtcatcactttgaaaacgcctcctccgtctgtcacaaaaaggcagctgggccttccactttgcagtgccacagctccagagccatacacgctcccatatcctccaggcagcctggcccctgcccgagtactccccagtttatctcacaccctgttccttcactctcaaccctccacaaaacccctggggcctgggatccatcctattctccctccctccaccctggctttgcatctgcccttcgttcagcctggaagcccttccctcttgcctctctcgtgggaaagaaggaacctattcacccttcagctgcagcttaaatatcagaccaagacgatcccctggtctgcacccagaacttctcttttgtaacacagtccacatattagcaactacttaagaatttacaggctaggcaaagtggctcatgtctattatctcaatactttgggaggccaaggtgggaggactgcttaagctcaggagttcaagaccagtctaggcaatatagtgagaccccatctctaccaaacatagaaaattagctggacatggtggtgtgagcctgtcatctcagctactcggggggctgaggtgggaggatcgcttcagcctgggaggtcgaggttgcagggagccgtgatcacgccactgcactctagcttgggcgacacagcaagaccccatctcaaaaacaagaatttgctgctaatttctaaattatttttctcttttatataataatttcatccctgttaggttgaaagatccatgatgctaagccctcctccaccttgatccccgccatccccagtgcctagcagagcccctagcacattggaggtgcccaataaacatttgttgactgactgattcacttctaaggccaagatatgctcccccttgagcgttgcgatcagttcctgtacgtgattccatccagtcctcacaacagcctctgagcagggagtggttacccccctttcacaaaagagaagacaagcttggagaggtgaggtgacctgctcaaggtcacactaggtgtgagggttgggatgcaaattcaggtcccacagaagcaccctccccatcaaatccccttcccctgaaggctgttaggagaaggtggtcgtgccatccatcctcagtccttggggacagcccagacctgccccaggctccaaacaggctagaatcagccccgctctgcagacgacccagttgctatagggcctcctgcttctgcccacccacccccggtgaggtgcccatggagggtcttaggctgctaaatccctcccagggagaccgtggcgccccagcgccctctagtggtggcaggaagagtctgtggggagggcaaggaaggggaaagggaataggttgcgggagggaggaggtgaggaaggggagagaggataagagatgggaagagaaaggtggagctgagaaagggagggggagaggagcaagaggaggcaagtggggcactttgtcctgggccctggagtcccttctcctc

SEQ ID NO: 1879416 - DNA, 4001 bp, Homo sapiens
aaagagcccacatcgccaagtcaatcctaagccaaaagaacaaagctggaggcatcacactacctgactccaaactatactacaaggctacagtaaccaaaacagcatggtactggtaccaaaacagagatatagatcaatggaacagaacagagccctcagaaataacgccacatatctacaaccatctgatctttgacaaacctgagaaaaacaagcaatggggaaagtattccctatttaataaatggtgctgggaaaactggctagccatatatagaaagctgaaattggatcccttgcttataccttatacaaaaatcaattcaagatggattaaagacttaaatgttagacctaaaaccataaaaaccctagaagaaaactaggcaataccattcaggacataggcatgggcaaggacttcatgtctaaaatgccaaaagcaatggcaacaaaagccaaaattgacaaatgggatctaattaaactgaagaccttctgcacagcaaaagaaactaccatcaaagtgaacaggcaacctacagaatgggagaaaatttttgcaacctactcatctgacaaagggctaatatccagaatctacaatgaactccaacaaatttataagaaaaaaacaaacaaccccatcaaaaagtgggtgaaggacatgaacagacacttctcaaaagaagacatttatgcagccaaaagacacatgaaaaaatgctcatcatcactggccatcagagaaatgcaaatcaaaaccacaatgagataccatctcacatcagttagaatggcaatcattaaaaagtcaggaaacaacaggtgctggagaggatgtggagaaataggaacacttttacactgttggtgggactgtaaactagttcaaccattgtggaagtcagtgtcgcaattcctcagggatctagaattagaaataccatttgacccagccatcccattactgggtatatacccaaaggactataaatcatgctgctataaagacacatgcacacgtatgtttattgtggcattattcacaatagcaaagacttggaaccaacccaaatgtccaacaatgatagactggattaagaaaatgtggcacatatacaccatggaatactatgcagccataaaaaatgatgagttcttgtcctttgtagggacatggatgaaattggaaatcatcattctcagtaaactatcgcaagaacaaaaaaccaaacactgcatattctcactcataggtgggaattgaacaatgagaacacatggacacaggaaggggaacatcacactctagggattgttgtggggtggggggaggggggagagatagcattgggagatatacctaatgctagatgatgagttagtgggtgcagcgcaccagcatagcacatgtatacatatgtaactaacctgcacaatgtgcacatgtaccctaaaacttaaagtataataatgaaaaaaaaaagagaccaaaaaaaaagaaattttgttaaattaccgagatgttttaatttttaatacttatatgctggacacaataataaatgataggaatatctttctgtgttatatggggaagagctagagataaagcaggatattttatcagggtcagtttctagagtatacctctaattcaaaacccacagcaccaccagtttcttcctcacgaggcccttttcttttcttttttttttttttgagatggaatctcactctgttgcccaggctacataaaaatgtaaacttcttcagccaagtccattcaaggctcatcaaggactaccctttctacctttgtggacttctctctatgaaaaaccccttgtgtaagcccaggatttggataccaccctcctatcctgaaaataacgatagcagttgacatttattgaggacttaccatgtgccaagcagtattctaagtacttctcacatgttatttccaggacagcctgtgacgtaggtattaccattactttcattttactgatagggagcttaggcagagaggttagaatttgcttacgttgtacagaatggtaacttgtacagaatagtaacttaaagggccaggattaaaacccaggcagtctgtctccagagccctcactcttaatttctttataaacatctgcccctttcagccttgccctaagtctcccaaataaatgaagtctcatgtgggcaccttctttcccagttaatgaaaatattcatgtcctctctttaaaagaccacgtgttgcagttactagcaatgagtgagtctttggccatcctcaaagagagccacagtgtctgcttgataaaagccacaattttcctgacctgctctggggctggccccctcaaagaaaatgcaggcagacacttggcaactggactctcccagactctcaagcacagagctgtgttagtgttggcagtgggggacggtttgcttcctccccgtttcatgaactgtcacatcagcctctttgatcctcccagggtctcaagtgtgccaagatcattactccacgttattgctctgtttcagataattgccagagaaaacgctaaggtcggtaatgaccaaggtaaggaaatatcgctccctgcacggtataccatttatatattgcatactcagaaaggctccagagtggaggcattgcttatttttattgtcccaaagccatgaggggggaaaaaagggaatgaacagaaattgatacatctggaacaagagccaggcatgatttactcacatttttacctgacctgaaattgcttatttagaaaaaagaaacattataaagtctcaggaaaatgtcatgaatcagagccagcatgatttcacattggggcttcataaactgtgtgtgtgtgtatgttttttttttttttttaaagcaaagaaactgtccaggaaaatcaaatgagccaaaggtagccctgccaccatgaccatcaccatagcaaccgcgtaagagcatgataggacagcacgggagccccaccgctcaggactgcaaacggatggaaaactgctggttcattagaggccattcttactatgaaaagaggatgggcactgacttggcaatgtaacaaacaagagacagcagactttcactattacgctattgcctcaaaaatgaactaatcatacactacatcactgaaacacacaactacaggaagtcggaagagagagggaggaaaaagttgattaaagccttgcattctactttaatagttcccttacttcatgtgctcttagcactttgtaagcaatatgaacacagttttgaagcaattagataataaatgctattattatagctatcagctggaagagactttagagaccatcaattttttttaattaactgaattccaggctttatttggttttcatctgttttttcattaatgtcctctttctagtccgggattttacccaaggtagcacaatgcatttagttgtcatctctccccagtctcctctggtttgtgacagtttctcagtctttcctcttttttctcagtctttcctttttttaaaaaaaaaaaatgaccttggaagtcctgaggagtgctggcagggtatcctgtagaatgttctccaatctgagtttgtctgatgtctttctcataattagactgggactgggattatgggtttctgggaagaagaccatagaggtgaaatgcccttctcatcatattctattgagggtatatgataaccacatgacatctctggggatgttaaccctcatcacttggttaatgtcatgttggccatctttctcctgtaaaggagaaaagtgtaaagttactatttttccctttccctattctattgcttggggtggagtcgttaagcctagtctactctcagggtatgtgtagaggggtgtcaagtttcacctttttttagtggggggagtagttacatatattatttgaaattcttctgtaaga

SEQ ID NO: 1879417 - DNA, 4001 bp, Homo sapiens
tggaagcaggagaaaagttgccttccttgtgttggaagcaagtaaaactctagaaaaagaggagttgtacagcaaaataaactttagatcttgactaaattttgggagatcagggattctctggacggggtactctcagacctcagcaaattgtcctattggtttgagccataaagttagctcatgctggtaccatgcaccaatgggagatttgtcaaaagtcaggggcatctccactcagaatccctcaatgattaccaaaatgtgaaccctgaaaatttgagacaggtctcagttaattcagaaactttattttgccaaggttgaagatgcgtgcccgtgacacagcctcagggagtcctggcgacatgtgcccaaggtggtcagggcacagtttgttttcatacattttaaggagacatgagacatcaatcgatatatgtaagaagtacgttggttccgtccagaaaggcggggacaactcgaagtggggagggggcttccaggtcgcaggtagctgagagacaaatggttgcattattttgtttctgacaagcctctccaaaggaggcaatcaggtatgtgtctatctcagcgagcagaggagtgactgaataaaatgggaggcaggtttgccctgagtagttcccagcttgacttttcccttcagcttagtgatttgtggggccccaagatttcccacaagtgaaaggaaaatatctcaatcccccgccccaaatcaccaagctcaaaggaaaattcaggttgggaactgctcaggccacacctgcctcccattctattcagtcacccctctgctcatgatgaacaggatgctgctgaaccctggggtcgctggggccttaaatgactttgatgatgagagactgggcatggagagctagaggccctcatctcccttccccagcgagtcggaagcgtccccattactagttcctagaatatgctgagatgtctcaggttgcggtgtgcagctgggagttgcagcctggcaggaggcccaggttttagcctgtgaaccggggccctgctatgtaggccagggtggctctgacctggcactctgtggggccagggcagacatagcagcaaaggccatggggtcacaaagagagagactgcagaaggatcaggagtaacaggcataatggggctattcttccctaggcctgaacactgggaaggcactggcagggccccggttttgatggtggattcttggagtaggggccttggtaatagggctctgagtgctggggcagaatgggctatcttgacccttcatagtcagggtcccaagtgggcaatcctggagcctccaggtctttggtccagcggcggggttttccactcaagggccacaggtacagacaagcagagcagaaacagcccccccggcctttcacttcccacctgctcccgagggagagagtaaggtttctgggggtaagtgggggctatctgaaagaaaagggtgattttggctggggctcggtgccctacaagagcccttgcttgactttgacgcaaggcacagactgggctctgaaggggcaggctggggggtagacgtcgtcatggatgttggatctcccttccggccatggcccaagtacgacccctgttcccttaaagtcaggacctcgcagaactttcgcaagatgggtcctcggagtctgcccgcgattgcgctcccaaggggtgccgctgccgagggtaggcgcgccagtcgagatcaaagcggatgggatgacgccactggagggcgcgcggggccgcggggcagggtggtgctcctgctgcaggtttcaggcctcttctgccttctacagccgccaggtcagcagaggcggaggcccgggctgtggatggccgaggagccgaactcgtgaagccacgttcctcctgcagctcttaacccaggcgcggcggctcgccgggccgctccccttactccgaaaccgtgagcctcagcccttccctctctccccaatcccagggggcgccggcggacaccccagaaacccacgcgctctcgttcctggtcccgccccctctacgttccctccccctctacgttccctccccttttccttccagaggcggcggccccggaagctcccgccattctggacccgccccctccaagctcccgcccctttcccttcctgtggaggcggcctcggaagctcccgtctttctggacccgccccttccccaccctgctccgccctcggccccggcccccgctccgagctcccttagctctaagcggttccggaagctcccgcctttctggacacgcccctgcctcccccacaggattccgactctctcccggctcgtcgagggcttgacattttaccggggggtggcccagaaaaacctcgtagagatggtgactttaaaaaattctttttcggctaggtgcggtgactcacgcctgtaatcccagcgctttgggaggccgaggcgggcggatcacttgaaatcacgagttcgagatccgcctggccaacatggtgaaaccccgtctctacaaaaatacaaaaattagccgggcgtagtggcgcaggcctgtggtcccagctactcgggaggttgaggtgggaggatcgcccgagctgggggaggttaaggctgcagtgagctgtgatcgcgccactgcactccagcctggacgacagggcaagattgtgccttaaaaataaaaacttgttttggtaaaatacacataatatttaccatatgtactttttttttttttttaaatggagtctggttctgttgcccagactggagtgcagtggcacaccactgggttcaagcgattctcgtgtctcagccacccatgtagctgggattacaggcatgcgccaccacgctgggctaatttttgtctttttagtagagatgggggtttctgccatgttggccaggctggtctggaactcgtggcctcaggtgatctgcctgccttggcctcccaaagtgctgggattacaggctgagccaccgtgcccggccctaccatgattttttttttttttaaacagaagtcttgctctgtcgcccaggcaatggcacgatctcggctaattgcatcctccgcctccggggttcaagtgattctcctgcctcagcttccagaatagctgggattacaggcacctgcaccatgcccagttaatttttgtatttttggtagagagggagtttcgccatgttggccaggctggtctcgaacacttgacctcaggtgatcacctgccttggcctcccagagtgctgggattacaggtgtcagccactgcgcccagcctaccatggtatttttaatggccacgtaataccctgtgtgtgttatattgtgtggatgtgttatattaatttaaccagccccctattgattaacattgtagctgtttataaaatggtgtagtaaacatcctttctgtaggtctttgtgcacatatggagtatatttgtaggctgatttcttggaagtagaattgttggggtaaaagctatgtgtgtgtttaatttatgattttacctatttaccctcccactagtgacttgtttagctacatttattcaaattgtctgcactcgctttctccacaaccttacctcctactcactccacaactcattctaatttggcttctctctatcactgcaccttcaaaggctctaaggtcaccaatgatcttcatgttgtcctatggacaatcttcagatctcatttcactgcttctctaaaagacttcatacagttgaccattctctcctttgtgaaacattcttctcccagctttcatagtgccacattcgcctggttttgctctagccatgttgtctttcctctgcccactctgaaatgttggtgctgctcagagctttggttaccatctacatgcagttgatccacacagtgaagtctcccttcctaacctttattcaactgcttatttgtc

SEQ ID NO: 1879418 - DNA, 4001 bp, Homo sapiens
atttcaggatgaggaacctttaaaaaaaaaatgccttcattctcagagcacgaagaaccttttataagaagaaggtagctggagaatgcttattctcctggcaaatagcaactgtggaaacactattttcatatagacctggcaaacagcttccagtattttctgtccaaatactacatctcctcaccagctttgcatgtatcttggcactgcacggcccagtagtaccacatcatttcatggcactgagccaagagtgtgcccagccgtgcttagcaccatacagggagtctgcagggccctccaagctcccaccaccacactcctactggagcagaaggggagattatcaggcagcaagtcacggtgttgttattattaccctgatgtgtaataaatctgtgtggtgcaataaattaaggcaaggctctgttctcactttacaggctgccgatagttttattgtaacagctcaaagatgtgagttttcctttttaggcagagtagaggaagctgtgaaatttgaagagagaacaaaagcatactcgaatgtagtttgtaaaacaggtattgtacaagaactggctcatcaggacatccagcacctaatgtttttctatttaatgatattagagaacagtgaggccttacaatggccacaagagttcatttgaattcattttcttttatttatttatttatttatttatttatttatttttattgattattcttgggtgtttctcgcagagggggatttggcagggtcataggacaatagtggagggaaggtcagcagataaacaagtgaacaaaggtctctggttttcctaggcagaggaccctgcggccttccgcagtgtttgtgtccctgggtacttgagattagggagtggtgatgactcttaacgagcatgctgccttcaagcatctgtttaacaaagcacatcttgcactgcccttaatccatttaaccctgagtggacacagcacatgattcagagagcacagggttgggggtaaggtcacagatcaacaggataagaatttttcttagtacagaacaaaatgaaaagtctcccatgtctacctctttctacacagacacggcaaccatccgatttctcaatctttcccccacctttccccactttctattccacaaaaccgccattgtcatcatggcccgttctcaatgagctgttgggtacacctcccagacggggcggctggccgggcagaggggctcctcacttcccagtaggggcggctgggcagaggcgcccctcacctcccggacagggtggctggccgggcggggggctgaccccgccacgtccctcccggacggggcggctggccgggcggcgggctgacccccccacctccctcccggacggggcggctggccgggcagaggggctcctcacttcccagtaggggcggctgggcagaggcgcccctcacctcccggacggggcggctggccgggcggggggctgacccccccacctccctcccggacggggcggctggccgggcggggcctgaccccccccacctccctcccggacggggcggctggccgggcagaggggctcctcacttcccagtagaggcggcagggcagaggcgcccctcacctcccggacggggcagctggccgggcgggggggctgacccccacctccctcccggacggggcggctggcctggcgggggctgacccccacctccctcccggacggggtggttgctgggcggagacgctcctcacttcccagacggggtgactgccgggcggaggggctcctcacttttcagacggggcggctgcgaggcggagggtctcctcacttctcagacggggcggccgggcagagacgctcctcacctcccagacggggtcgcggccgggtagaggcgctcctcacatcccaggcggggcggcggggcagaggctctccccacatctcagacgatgggcggccgggcagagacgctcctcacttcctagatgggatggcgaccgggaagaggcgctcgtcacttcctagatgggatggcggccgggcagagacgctcctcactttccagactgggcagccaggcagaggggctcctcacgtcccaggcgatgggcggccaggcagagacgctcctcacttcccagacggggtggcggccgggcagaggctgcaatctcggcacttagggaggccaaggcaggcggctgggaggtggaggttgtagccagccgagatcacgccactgcactccagcctgggcaccattgagcactgagtgaaccagactccgtctgcaatccccgcaccccgggaggccgaggctggcggatcactcgcggctaggagctggagaccagcccggccaacacagcgaaaccccgtctccaccaaaaaaatacgaaaagcagtgaggcgtggcgtcgcgcgcctgcaattgcaggcactccgcaggctgaggcaggagaaccaggcagggaggctgcagtgagccgagatggcagcagtacagtccagcttcggctcggcatcgggagagggagagggagagggagtgaattcattttcatatcaatgtctcactgctgagttctgctgagctgacctcttgcactagacttacagtgctttcttttggtgataaacctgagcgattttaagatcacaaattggttctggaactcattaaagtcagcaaatgagcattaaaagatacttgcacaggctgagtttgtgctaatctgtctatttaggcaattacagctcagaggatgaacagaggggcggtgagaaagaaccctccaactcccagcaagatgatccatttcagatgtctgtcaacgatgcacatgccctggcttttcttcctttacaccttgaaccctgggtgcaggaggcaagggaaggatttgagaatgcttcacctctaccctttgccaggttcaaagcccaagtgagaccttcaatcaggtccctggcacacctgacacttcattattattattttttttaatcaaaagcccacttctttggtagcaaatgctatttctattctctgttttagaacttgacccttacttttttttacttaaatgttagtcattcaagatttcttaaccctttggttacagagtcttccatctttttcttctgtcttcatctaggctcataggttatttctccctaaactagacacactgggtgctggtgctccgctctgtgtcattgtggcccctgaacaatgggaggctattgagcacagagttgatattcaatatgtaaatattgattgacttttttttgttttttgagatggagtcttgctctgttgccaaggctggagtgcagtggcatgctctcggctcactgcaacctccgcctcctgagttcaagtgattctcctgcctcagcctcctgagtagctgggattacaggcacgcaccaccatacccggctaatttttgtatttttagtagagatgggtttcaccttgttggccaggctgggtttcaccatgttggccaggctggtctcaaaatcctgacctcatgtgatcctcctaaagtgctgggatcacaggcatgagccaccacatctggcctgattgactttcaaaattgccttctagtttattctgtaaccaccagctctactaatttagtttaacatcattcacgtactgctctgaaaaactatacgccccttatgaccttacagccaaaaatgattgactcccttggtaatcctccttgcaaaaccctaagactcaccccctcactcttccttagaaaaatactatattcctttgcttgagtctcatttattagcagcaaatgctaacacaggaaacttcattctctgagtttacatattcttgtgaattctatttttctctcttatttttcccctaatacagtctacccctggccaatctataacaatcctaatcagtagaaactctggaaaaactgaggt

SEQ ID NO: 1879419 - DNA, 4001 bp, Homo sapiens
ttatgactcatgctttaaagtcatattccaaaatgacaacacaaattgtagtgagtgaatatgttttggatgtagactgattcaatagcagtttctgaatgctaaatggaatggtttatacttaaaggaagcatattagagagtaaagcattaatttattgtgaagcttttattccttcttttatttttgatatttttgaaatagactaccatttttaaatctcttatcacaaaagatcattttcatcttactcttagcaatttagaggtgtttatcaaacacatttggtgtgatactggttctaccagggttatatagtacagatctaaaaatgttatttttaaaaaccatagttctatagataaataatatttgaataaatgaaaatttagaaaagtgtcctgagtctccgttacatctaagcagttttcagaacaatcttatatctttgatacactggcacctactgctattaggaaatgagctaattagtatagaataaggatataataatcatgacttctcaatatagacagaaaactagtacatgaagacatgttcctaggagaaaacatgtataaatctgcttatattttaatggtattaccatatgtaatattaaacattattccaattctctttactattcagcaattcttatgaaagtacagctacctttcacatacaacatggatgctccacaaagcataaactcagccctagactatcttcctgttaatagaagattgctttcatttcacttactatttttatagacttttttgaaaaactaaaaaaggttaaatttttattttatgcccttatgtaagttaatcaaaatcattctcccaatgcagacaacagttatgagtgtagcagatagaatgttcattatcagtagaagacaaatattgtagacaatggagaaataaagttaaactgctttcctttcattttaatagtaaggcccttgtaaaacctttagaaaactattattttttacataaaaattaatttctaattttttctaatactatgtatttatatcattcctttagaaaaaacttcttatatttcacaatgcaaaggagtttgagcaggttctgaaaaaataaataattggaagtatgagtctatttctctgcagtatttactagtgtgatacattgcccactaagcttgtcattgtataaaacagaaagttagcatatattttaatcttcctagcaccgaaatatttaggctcaaatattttgtaaaatgttatttagttaaagtatttattgagctattaacatattcaaagcaacgtgttggatcccttgtttttaaagatgaatcaaataaaattccgcgttttagaaggttatggtctaaaagagaagataagcacccataataaaaatgtaaaagaagtatgttcatagaagcagatctagtaaggtgatgttggagttgagagatgggatagattgcttcccaagacatgaggatacttcttggagtaattggcattgagttataatgtatggtagagttaaaatatatgatcatatagagaaagacttttcagacataatgcaaaagcaaaaggtgagtagtagttttctattgcagaataagaaattatcactaatttgcagtttaatataacacacatttattaccttaaaatttctgtgtatctggaatctgggaagagcttagctgagtcctctgtttggggtgaacaagattgcaaaaaggatttgcctggaagtacagtctcatctgaaactcaactggagaaagattcattttcgttggcaaaatttagttccttgcagttaaaggacagagaatttcagtgtcttgttgatgttcaactggagaccatcctcagctcctaggggccaccctaagttccttgtcacaatggtcacccaacatgcagcctacaacatggcagtgtagttctttaaatccagccaggaaaaaataaactttaacaagatggtcacaccatcttctctacataatcataaatatgtaatcacattccccctgtcttgtatcctattggttagaagcaagtcacaggtcatggtcatactcaggggaaagtactattcaaggccataaatgtcaggagatggggatgatggggggccaccacagagcctatccaccacagggtggaaggtgaaagttttggtttagctgaagggtgtgacacatgtacgtgggacaatcaggttggaaaagaaatttgggttcaggttgtggaaagaattgaatgccctacactggagttgaacgttatattttatatacaagaggaaaccattgttacatttttgaatagtaggggaaacttaatggaactaggcttcagaaagtttaatctggaaatgagttgtaaaatgaataaggaaaaaataattggtttaggaataaaagttaatatattaacttgttgaaagaatgaaataatgaatattgtagaaaatatgactatagaattggaatttaaaatgaagcttgtttcttaaactgaattacaaaaaggaagggtgatcagcaactcacccattccttaccaggtcaaaattacaggcttccctttatacacgcatgtaatgtaaaatgttctttgggaaatgtctctataagaaggagaggtaggtctgtgagacactcaggtgtggaaaatgagacctcatgatactcatcaaggggaagaaaggtgaaccttgtaaacataagataccatctttaaaagaccatatattaaaaaagagtaacagtagtatgtctaggaaaatactggatactggatgtgcattattttgtgtaattaaaaaaatttcactctattggaagcaccatcaaattaaagaaacactgacttttcatgagcatcatataagggaagtggaaatcaggataaagaaataggataggtggaaataaatagaacttgacagtaaagaaacatcagagagagataatagtaataattgacatttttaatgtaggcaattaggaggttagtaataaccagaaggatatgttggaaaaagagtaggttttagggctacaagaaaagtattggcttatatatactaaatttaaatggttttcagaactgttgctgaagatgtacaatgcacactagaacccacaggcagtcaggaggagacaggtggattcttggaagtcactaggtaaaggtgacaattgagagtataagactgagcaaaattaccaaggaagtgagtgtggttagagaaaaaacaaagactatgagcaaatctttataaagtatctatatctcaaagatgggatgaggaagcagagttggaagaacttgagagagaagaaaaaggaagagtgatcctaaaggtagttaaaaacaacaaagcgagtagagtagtagctcaaaggagagaatcatctaactaagagatgcaaagttgaatctttagagtggtcaagcaaatattgcagcaagccaagtctaaagtaataagaaggcatgggacaaagaaaaagtgaaatgcatgtgactcatataaagtaactgacttcaaaagaaatatattttttaaaaacaatgtccttacggaaaatacattgctatcttgatttggtccacagggtgcctgttggtgatctctagtctgtagtaatgtataatccagagaacagaagtagaatgaaattgaagaaaaccattgtttcacaagtaagagtttcttaatcatctcttcgtgagagatgttttattaaatggtggaagcagaaactgaagcgtaagatttaaggagaaagtgagtgatcaggaagcaaaaaccttgtctgattttatagtaatgtaaaacttgaaaaaactctgtcatgtagtcgtgaaaacagccatgagaaggttatggctggtcacagacaacaggggaatgatgaggctaaatactgtgtccccattggagacaacaaagagcttcatgaggctaatgcaaca

SEQ ID NO: 1879420 - DNA, 4001 bp, Homo sapiens
aatgtatcacactagtaaatactgcagagaaatagactcatacttccaattatttattttttcagaacctgctcaaactcctttgcattgtgaaatataagaagttttttctaaaggaatgatataaatacatagtattagaaaaaattagaaattaatttttatgtaaaaaataatagttttctaaaggttttacaagggccttactattaaaatgaaaggaaagcagtttaactttatttctccattgtctacaatatttgtcttctactgataatgaacattctatctgctacactcataactgttgtctgcattgggagaatgattttgattaacttacataagggcataaaataaaaatttaaccttttttagtttttcaaaaaagtctataaaaatagtaagtgaaatgaaagcaatcttctattaacaggaagatagtctagggctgagtttatgctttgtggagcatccatgttgtatgtgaaaggtagctgtactttcataagaattgctgaatagtaaagagaattggaataatgtttaatattacatatggtaataccattaaaatataagcagatttatacatgttttctcctaggaacatgtcttcatgtactagttttctgtctatattgagaagtcatgattattatatccttattctatactaattagctcatttcctaatagcagtaggtgccagtgtatcaaagatataagattgttctgaaaactgcttagatgtaacggagactcaggacacttttctaaattttcatttattcaaatattatttatctatagaactatggtttttaaaaataacatttttagatctgtactatataaccctggtagaaccagtatcacaccaaatgtgtttgataaacacctctaaattgctaagagtaagatgaaaatgatcttttgtgataagagatttaaaaatggtagtctatttcaaaaatatcaaaaataaaagaaggaataaaagcttcacaataaattaatgctttactctctaatatgcttcctttaagtataaaccattccatttagcattcagaaactgctattgaatcagtctacatccaaaacatattcactcactacaatttgtgttgtcattttggaatatgactttaaagcatgagtcataaagcctgtgaagtgctattgtcaaaaaagtcataacatacgttatttaaaggaacacattaaattctgcattattgtaaatatacttttcataatgctgtttgctaaaatactttaaaaaaatctacaaatttactttcaatagcttttcattgaatgggagatttttaaagcatatactctgattttgtgcttctctgcaaggtaataatttcaacattatcattatcatgagtacattctttaaaatttaaatgtcttaaattcaatatgcctataattttctgtgaatctgcacatataagtatccacatgtaattcttatgaatatagatttcatctcctttccccacctatacccactttcctgcagaacagctagagtaatccatttaaaatgaaacccagattatgccattctgctacttaaaacactccaatatctctccataacacttaggataaaccaaattacttggctgctcaacaccctacttgattggtccctgcctcagcctctctaatgtcaatgcctatcattcttccttagttcctatcatatcacaccctgaacttccttagttcagggtgtgatagctatactggtaacattctggcccttgaatgtccttgaatatctgaagatttacctctgcattatggtcacagctgctccccctttatcttcctatgcttatttccttcttgacacgtaaatcttagcttaaatgtcaccatctcagagaagtctttgtaggtcaccaacccaaaagtagctgccatcttccaagcattgcccataatgttacccctgcttaatttccatctgagctgtcatcctttgtgtatgtaggtgtatatatatatttattttggtttgatgtcagccacacccaaccaaaagtaagcggcataaacctagtgcctggcccttagtagatgttttgaagggatgagtggaacagtaagatacagaggccttgctgtagcttacctcctaactcttaagttttggctttttctctcatttgctatgtgactttaggcaattactcaaactctctaagcctatttcctcatcggtagaaataaaattgtcatacctatttcatgaggatttttgaataataatgagatactacgtattcaatatttaacttgttgattgatacacagaagtcaaaaattcttagctatttaaatgttgtatatatgtgtgtgtatacatatgtacacatatatgtgtatatatatggaaagaaagagtctcatcttcaatacaatacattatatttctgaggctaatgttttatgtcatttatgaataatttaaaacataaaataacatgagaaaaaataaagttttgaatgataaaagaaacattaaaggttatatatgaatttaaatgtaattttctcaacataatcgttagtgatttttctccataaaatgtgtccgtattttattgcaaatgtaaaacaatacataagagtataaagtttcaaaagtacttacttcataatcaccttaattttactattatagatttcatcttacattgtctgtttttatgaaagcatgtgattcaaatgctccattacttctattactctatagagtactgaaaatcaacatatttttacaaagtaaatgactagtgggctgatgataaatgttatttaatgaaagacaaatattactttttaaatgttttaaaatataactaatatgtgagaattgatatttttataaatatggagtttttatcctctggaaaatttaattatctcacctttttaaatttatgctgctataagggccttctgttttgcaacattattggaaatatagtccctaaatcttcgttttaaaacttggcttttaaattgaaaaatctaaaaatatgggcttttagaaaaacttctggagttaagggaagaaaatgtataagaatgaatgaagttacaatattctaagacagaaaatgacaggttgctgtcactgatgtacaagctagaccaatctgtttgggtcaatatgcgaatgttgacttaggaaagagatatagcaggaaagcaaaagttttgtacactagaaagccacatggcagtctgaacttttcagaggagatgggtggggcttatggattctttaaaaaagcaaagtcatcccacttttaatatagcatatagggctttctttagtaaaaacgtatctttctcctaaatcaacatttagacttatagtcaactataaaaagaaaggctgactaccaattaactgactcttttataccacccaggcaagcttctcagttacatttgttattttagaaaagtacatgttagacttaagagggaacccacatgagttttggcattcttcttttctcctcaaataaaacatgaaaagctgtattgaaaagaagatcaaatgatgaacaaactaaatttgttataattgttgttaacaatatctaataattttgtttcttctcacaaagttcaaaaaacagtgttaattcagttcataccatttgaattacagtgagatgcttcaaaagtgtcaagttaaacgagtatacaaaactgagttctaaaatatagatttattcagattaaaactttcattccaatgctatgttaaaatattaatttatagaataaatacacagagattactcaccatatgccaggtagtcttccaggtgctgagacccaaaactgaacaaaagaaaacccagccatggacaggttctacacgtgttatgtaaaaccttccatgaacatctctgtgcttggaattggaactttaaggagcttgccaccagaat

SEQ ID NO: 1879421 - DNA, 4001 bp, Homo sapiens
aagatggtaagagagctgagactttgtgccctaagggaatctgaggggtggtaggatggagcccctggaagccagtggggaaatggtaagtcaccgggtgagtctagagcaggccttcccagccttcatgtgcaggcaaatcccccaggatcctgtcaactgtgtgctccatgcagtcagtctagggtggacaaagagtctgcactgccaacaggttctccagtgatggtgacaatcaggtccagacgagaatatgtccagaggcagcacagccctaaaaacccagggagccagggaagccaggaggacaagcaggcaatcatctttgtagaccaaagctggaggaccccacagcttggcactgggtaaaacccccagtggtggaagcaggcagggcaggaagaacaaaagtcatgctttcccattagccccagaacaagagagccttgagagagacggcctaatggcgttacagaacggtgaaacagaaagccttatttcttgccactaaggaagacctgaggctcacaactccccgtctctcacctccctccatactcagtcagaaagctcctggatcctccacaggaccatctgctgggcagattcttctggccccagggcgatgagcttctttggccatggccttccatgggcttccttcaggcccccgaggcaggtgctcatccctgaaactccaactgagccctctaccgggcatggtcctggcatcctggaaaagacttgctctcatgacccagcctcctcccagcccccagctccccactccccacaggccctgggagccagagctcccaaataagtcttttgtgtgtttttgtttgtttgttttgtttttaagatggagtcttgctctgtcgcccaggctggagtgcagtggcgcaatctcggctcgctgcaacctccacctcccaggttcaagcaattcttctgcctcagcctccctagtagctgggactacaggcacctgccaccgcacctggctagtttttgtatttttagtaggcacagggttttgccatgttggccaggctggtctccaactcctgacctcaagtgatctgcccaccttggcctcccaaaatgctgggattacaggcatgagccactgtgcccagcctggaggccagtattctaagtgaggtaacacaggagtggaaaacccaaaaccgtatgttctcacttactagtgggagctaagctatgaatatacaaagacaaacagagtaatataatggatttcaaagactcagaagggggaggctggaggggtgctagagattaaaaaaaactacacattaggtacaattaaccctactcagatgatgggtgcactaaagcctcagaattcaccactgtataattcatccatgtaacaaaaaacaaaaacaaaacaaaacaaaacaaaaaaacacttgtacaccaaaagctaatttttttttaaaaaaagcagcaatatggagtcagctgtgttagatttctctcagtgttttaattttgcaaaggcagtttcaggagtcagatctccggtgttcctgggcttcaggtagatccctatgggaagagcagagtccagcccagatcttaagggataggggaagtacttcctagctgtcccctctaaacctcggccaccctggactgctcagcccaaatctcccagccagaaaaatgtaccttcctaggtctgcccgcaggacaggtgcacagagaggagtccgacccctgttataagcgaatgccggcaatgatgagaagtggagggaacctagaaacttcccatccactctttccgctctgcagatggaaagccgtggggcccagagatctccagatcattcagcaaaccaggagtgaaactgggagtaggaccaaggcctcagactccaacagggagctggttccaccgcctcagagaccagttgctgtctcctggggtcgtgtctcttgccctccactgcagatttaagcatctcactggaagtgtcttcgaatggaagtgggagcctgtgtgcgtcactcagggtctagtcatctccccaccctctcccctccctccctctccacgtggactgctgaggtctcacctgagctcttctggccctcccaggctgaagccaccaccttggggcagccccactgcagggatcagctgtaatctcctgcaggcttacaccccacctctgtgctgtgacccagaacctcctctgcctgttccagtgaaggacaatcaacagggagtgggctgctctccaggtttttgtctgccagccatgcccagggcaggaggtggggaggagggcagagatgacagggctgtgaaccccaaatatctgagacagatctcagtcaatgtagaaagtttattttgtcaagcttaaggatgcacccatcacacagcctcaggaggtcctgacatgtgcctaaggtggtcggggtacagcttgctttgattcatagggagccaggagacatcaatcaatatgtgtaagatgtacattggttcagtctggcaatgtgggacagcttgaaggcggcaggggtgcttccaggtcataagagacaaaaggttgataagagatgaaagattgcattgagtccttgatcagccttccactgaatacacaatttaatctgactcagtgaatctgcatttttacgtaaacaatagggcagaggaaacaatcagatatgcatttgtctcaggtgagcagaaggatgactttctgtctgcacctctgaagatcagctattagtttacattgccagggtgaaattcaacagaactgttttaggataaagaccttgaggcccacaacgaattttcttgtgggcagtttgtgagggaggtatgtagctatcttatttaggaataaaatgggaggtgggtttgcctgacatagttcccagcctgatttttcccttggcttagtgatttggggatcccgaggctttattttcctttcaaagggcccaagtcttcttctgcctggggcagcagagataggggtctttccccagaaacgaacctgttctgagaccttggaccagctgttcttcctttctcccggcctgcctctcgctcactggccctctatggccctttctccttggtatagcagagggcttaatcccaagggctcgacatcagccttgtttaccacttaccaagcctggtgtgccactcgcaatgaatttgcgacaggcaagttagttgactgctctgaacctcagttttttcatctggaaaatggggccttaaggccagttatgaagattaagatataaaaagaaaatatatacaaactgcctcactctcaccgctgctgtttgtgtctgtgtttctatccataggaactttccctgccagattgtattggtccctctgcttaaaacagggaccaaatctgcattgctgggtccccagtgcctaggttaagacttgggccggggcgtggtgactcatgcctgtaatctcaacacttcgggaggccaaggtgggtggatagattgagcccagtagttggagaccagcctgggcaacatggcaaaaccctgtctctacaaaaaaatacaaaaattagctggctgtggtggcacacgcctgtggtcccagctacttgggagactgagcaggaggatggcttgagcccaggaggttggggctgcagtgagctgtgatcatgccacttcactccagcactccagcctgggcaatagataccatgtctcaaaaaaaaaaaaaaaaaaagccttggcacagaattcagtaaatatttgtaggataaattaataaatggatgtcacagctaacatatgagatctgggatttagatcaactcctatctgacttcacaccctgtaggtatcctgaacagaaacatcaatggggcagaattgagggcccagaagcagagctgatagcaaaaactggaacatatcaccaatcaccaaagaaggtgaaggggacagagaagtgg

SEQ ID NO: 1879422 - DNA, 4001 bp, Homo sapiens
gctcacgcctgtaatcccaacactttgggacgccaaggcaggtggatcacctgaggccagaagttcaagaccagtctggacaacatggtgaaaccggtctctactaaaaatacaaaaaattagttgggcctggtggggggcgcctgaaatctcagctacttgggaggctgaggcagaagaattgcttgaacttgggaagcggaggttgcagtgagccgatatcataccattgcattccagcctgggcaacaagagctaaactctgtctcaaaaagaatttaaaaaaaaaataaaaaagaataaaaatgtaatagctgtttggtcaggatagggtcaatgctgtaacaaaccatcacaatctcagtgggttgtgactaagaaagctcatttcttgttcccatcacagtcccattcttccccaagtcacaggaaggaattagctccatgtagtcattcagggacccaggcaacttccttcatgaggtcttgccatctcctagggtattgaagtaccctacttctagccagcagatgaaaaagagcaggagaagaaaagaagatacagaaagaaaataaaagttactgggcaccgttggggaagttggggcaccaacttattactctaaaaattgttaattaaaggaaaagaattaagcattttttatgcctaactgcattttctggtaattaaatagccaaaatgaatgaaggaaagctcttctatgcagaagaatttcagctactacatgaagaaaaaattagaatcagaaaattatcattttttaagcccctaagaaaataactgattcaagcaatggttttcaatggatgccaaaatcactcagtgaaaggttgatggagaacttctcagtgaagggtaaggttgccattgcctgaacctaaagatagatcttagcatcattaaaagcaagaccagcagacatcatatgcctccaggtgtgatgcactggagacttacaaggtatcccatgaagtataaagaagcaagtgactgtatccctagtgtaaaaactctacatgagaattgacacagtttcttcaggaagtcaatagcactgagaacaaatataggaagaggaattaatttatgttaaaagagagttagaggctgggcacagtggctcatgcctgtaatcccagcgatttgggaggctaaggcagccagatcacttgaagtcaggagtttgagaccagcctggccaacacggtgaaaccctatctctattaaaaacacaaaaattagccaggcgtggtggcccacacctgcagtcccagctactcaggaggctaaggcgcgagaatcggctgaactggggagatggaggttgcagtgagccaagatcacaccactgcactccagtctgggtgacagagcgagactccatctcaaataataataatgatttttaaaaagtcaactaataacataaggtgatgagtctggaaaggatggcaagaaagcacacttcataaatatgaaggaaaatgaagaaaacacttgtgttagggttctctagatggacagaactaataggatatatatatatatataagggagtttattaagtattaacttacatgatcacaaggtcccacaataggctgtctgcaagcttgaggagcaaggagagccagtccaagtctcaaaactgaagaacttggagtctgatgttcaagggcaggaagcatccagcatgggagaaagatgtaggctgggaggctaggccagtcttgccttttcacctttttcttcctgctgtatattcgctggcagctgattagatggtgcccaccagattaagggtgggtctgccttctccagcccgctgacccaaatgttaatcttctttggcaacaccctcacagacacacccaggatcaatactttgcatctttaatccaatcaagttgacactcagtattaaccatggtaagtccaccccttgtcaagctgaacccatacacatctcctgagatcatacataatcttcaaataaagacaataataaggtcataattatgcctaaaataatacaactatccttggtacaactggaaacccaccaatccccaacccaaatattattacataaagttaataatacttaaatgttgatatgaagtcagtaaatcttatgtcacatgataaaggaaaaggaaataaaatggatatattttcttcgtacaagtgtatacatgcacaaacatgtttttagccaaagaaggaggaaatactcatgatagttacagtccgcatttctgcagctggtcacatggtcataggtggtattgatgattaccttcttctactacccattctgtattccctttgccttcagcaagcacctcagcaggttgtggtttttttcctggtggagtgacccaaaccttcattcctgaggggtctgggctatttgtagtcctgcctggattgcgctattgtagtttcccattgaccttaatcaaagggcatggtaatactaagagatgctctaaaggatgtcctgtattccatgcatactcttccttacctctgttatggagtagtagactgattttatcttgatagttcaccttcccactccatctcccttctggctcccccatctgctgagagctacttccactcaataaaaacttgcactcggtccctaagcccacgtgtgatctgattcctccagtacaccaaggcaaaaaccctgggatacagaaagccctctgtccttgtgataaggcagaggatctaatcgagctgattaacacaagctgcctacagatagcaaaactaaaagagcgctctgtaacacacacccattggggcttcaggaactgtaagcattcacccctagacactgccgtggggttgaagccccacaacctgcccatctgcatgctccccctagaggtttgagcagcagggtaccaaagaagcgagccacacccccattgcaggccctgcgagggggataagggaacttttcccatttcacttgtgctgtgattcagttccctgggtgactctgcagggaggctggagggagagagttctcccagagggaccatcccacacccacttccacctaagaacaccccagtggggcagagcaggccctccctgctccaccccaagcagggcttgtgccctggcctttctggggtgtgctcctgcatacttcaagctcagccaacatgagatactctgactcaagtgtagggtcaggtggggagaaatgaatgagaccggatcaagccaacccaagcctatgcaccgagttaagggtgtacacactcactgggcaatggggcagggtattatcgtccccattttatggatgaagatattaaagttcaaaagtttagatggcttgcccatggtctcacaactgctgtggagtgtggtagtgaagttcatggactctgcaaccagactgccaacctttgagcctgttctgctgctgatctgggcaagtacttgacctttctgtgcttccattttcctctgccaaatggtgaggctaacacatgctacttggtagggttgttatgaggactgaataagccaatacacatgaaaggctgaggataacttttcctttgcagtcacaactacgctgttaggtataagaggcctacctttcggcctattttggctttcaatacacttacctcactaagtttaatatttctagcttttgatttagagcaagggatgtgtgacattttcacttaaacatgtagagaccattttagggttattcattggcctaattttaatattgttgggtctcagggaattgagaggcctgaggagaaggagagaggagtagaggaaccactgattgatgtagtagttagaacacatgcaatatttcttaagttctctgtcttatatgggtgcaatttgtggcaccccaaaacaattacaatagaaacatcaaacatgagtgatcacagatcaccataacagatacagtagaaat

SEQ ID NO: 1879423 - DNA, 4001 bp, Homo sapiens
ttcttgttgcctgggtatttaagatgcaaagaagaggtctagagatttagtgaataagtctttggagaaggactctactaaagtttctaagtttatccatacatgttgaggtgtgtataattcaaaagatataatttgacattaaaattataatgcagaatttactggacaatactgaaaaacatgagaactgtgaggttttctacgaacttgaagtaattgcttttatccttgtcaagattcactgaaactggatttataatcaccaaagagggtcctgtaggaaataattatgtactctataagacctttccaatttgtactaattaactaaaacacccatggtgaattataaaattttgtgaactgaagaaataaataatatgattaagaccccaaggcaatgaatcaagcccagtgtcttcattgtacatagaacaatgcccttcaatggtgaccagactgtatcttagcaacacaataagctcttcactggtaacaaagaacatataatagttaaagcaaataattgctcatccccagttttgtattctagtcttggttttgctactaatttgtagatctagtaaatcactaatctaccttcatgtctctaggtctctttccataaaattaaaggaaatgttgtaggatatttagcaaggagagcaaagatctggactacgttaaataatattaatgtaactcaaatttgaggtcaatcagaaaagaaagaaaggtaaatgttaaagaaagctcaaatgtccccttaacattcgacatggttccacaaaacactgcttgttctttggatagtctccagagagcagccttcaaatctttattataaagtattgtcaaagcccagccacatggaacaatggtgattttttttcccctctctccactagcccttttggctccgtatttccttcttcctgccttgacagtgggatgatttcaggagcaaattagggccaagggaaaagattttggttcctcatctacctccctccaagctcctctcctaagtatctgtcccactctgaataccaccttgttacagaaagggcaagcaaaaccctggaaaactcccaccactattactccctctgccccatacccatccacctaaggaggccaggaaaccccattgtgtttggcatccactcctaggcatgtcataaaaacacactatcagaaggcatcagtgactttttttcatgtctattaaaggaatatgaagtttttttaaaacaaaacaaaaaaaaacttctctttgcccctctccagggtgttactggtggagggtgtcaaggttcttggcattttgaacaaagaattggacaaaatgcacaaacaaagcaaggaaagaatgaaacaacaaaagcagagatttattgaaaacaaaagcacacttcacagtgtaggagcagcccaagcaagcggatcaagagtgctggttacagaattttccagggcttaaatagcctctagaggtttcccattggtcacttagtgcacaccctatataaatgaagaggaaatgaagttacaaagttatttactcagtgtacaccctatgcaaatgaagaggatgttttctgccatagttaaggtaaagttacaaaattacttacgtgggtgaagaaggttgggatttagttctaggaagtccttagtttccctgcctccagaccctattcccctgcctcaagggtattatcttttgctgctaaagaatccaagtccaaacattgcaatgagccccagaaaacgcagctactaagaactacactcaaatcttaccaaaggtgtcaccgtggtggccgttctcgtggtcctttcatcagatgaaaatccatctcagagagaggcaaagcactcatttacaaattagttcccttgcagttaatatattgttgctagaatttaatgctatccttatctttcattacttacagccaatgtattaatatcccatgtttcttccaatatgatttcaatcttcttatttagcttgttctaaactcaaccactttgcagtaataaacctgcttcccctaattaactgctcatggggggcccacactaccctgcaaggaagtgattactaatgtgaagtgttcaaatggccccagtggggggccaggatgccagcaagctcagtattcacagttccatcaatttcttcataattatgagcttggattctcataatttggagtagcaaaaaccttctaactggtaccttaaaatctaccaaataaacatttacatgccgattcactccatggccaggactgcaacaatgaacactagaaatgtatttattattactaaattaaagagctcttattgatatgcttaccaaaaaacatcactatgcaaggcactgaagattaaagcacacataagccacagtcagttctccaaatctcactggcaagcaggggaacttcacaggaagggtatttccaacagaagataacattaaaagtcctgtgcacataaaaatatcataaaccgttacaagattaattgccaaataagtagattcaatgattcacaatagtaagagatcatttgggatagaacggactgggaaggtttcaaaattttgaagatgcttaggcaaaatattgactaaagtgtgggagttgagtggttaccaatggagaaggacattcttagtaactgcaaattgctcatttaataactattatgtgaataccaatcaactcagggcattatttatacaaacttatttatacttctaaacatggacaggtaggttttataccttgatttttttttttcaaaagagaacaggcatagaaaaatcatacagctaattagtggcagcaccataatttaggcactctgactcctaagtcagtttattcactcagctataatatgtcaccgtttaaagttaggtggaagaaactgagtgaggaagaacctgaagaccagatactttaaatagatcagtttgacgatacaaaagggcccaggaagttgaatcaagagaaataagaatacagaggcagactttggagagctctgaacactatgcaacatggagtcactgagtaggttgaaaagctcactttggttgttggatcaaaattcattacaggagaaaagactagacataggaaaacaacttagaagacaaatcattcagcaaacattgtggtattccacatacaacacaataagggcttgcactagcacagtagccatggaaatgggcaaaggacatggatgggaaagactacagaagaacaatctgcgtgatttggcaactggcagagactggccagcttccttgcatttgttccttttccaggacacacagctaaactatacattccaatcacctttacagttacattggtgaggtgcctaagttccagccaaaggagcataacataagtgaggggcaaggcaacacttccaggtctgagccgaaaacctcccacaccttaccctccttgttcttttccccttctatcaagcagccacagagcctaggacatgatagagtgaaaggatggaaggagctcaggtcccttctgcctgtttaaaggagagctacccagtgactagggactcttattagggatgtaatatgattgagaaatgtgctgctatcatgagctattatccatgataatagtttttacttattttctatatcaattagcattatcttaactaaaactgcaatagatcagatatagatatgagattaagtgagaaagataattctaataatttgcacctagtgccaggaatgatcattttaaacacagaattgataaaaggtaaataaagaagtgggagcattaattaattaattgacagtttcatgtcaaagagaaggcaacagcggagcagctaaattgaaatatccacctgattgttcatgttataggtaagatagagcaaggctagacagagatatttgggagttgctgcaaaagataatggtt

SEQ ID NO: 1879424 - DNA, 4001 bp, Homo sapiens
acccaggggccggctggccccgcctcgtcctgcactgccagcctccttcttgggacatcttcctggggatccccctcaagtccctttccagaacacgtccttagtccaacgcacaggtgcgtaaatgtctgaactccagtgatgaggccgcaacctttcccacaggatccctgggccccatgcaaaaaagggtttggatgcacacgggtctccacatccagaacattccatgatggccaaggagtgcaggaacatggaacatgctaaggcagggagccagtcattcaggacacacagatgacatcggtgcaggggagcagggcggggagaggggatgccaacctgacaccccgacgtccagccccaaatcctataaggtctgaatttatacggcgagggcgcagaaacagatcaaaacgtacccggagtaggtgaggctcgttaagagtcgcctcctgagcgtctcttctgaagcttgcttgctgccatcttcccaccaccccatcccgctggcctgggagcgggaggactccagtgtggccttggccggctccccgcagtgctaggccctcagctggtgttcgttctgttaatgaagcccttgcctgctgtctcccagctccccgtgctccccaagggcagggtccttctgcgcccgctgctgtccccatgcatcatgggccacagcacacaggaggccccgagatgccacctgccatcctccgcagctgtagaccttccctcctgtgcacatgagaaaggtcagcctacctgctcacggaaaccgccgtttgctgggtgtctttgactctcatcttcttagaatttcagataaacacgcttccttcacaaatgccgacggtaaagtgacggtcactccacatagcaaatgcaaggttgccgttaacggggtgcccatcaccaccaggacaaagctgcagcatttggtaaactttcctgcaggctcacagaatgtcctaggtcccccccaagagctgggaggggacagtcatgtgaggtgcccacatcacagacgtggcaggatggggcgttcacaccagctcctctgccaccatggcttggggacaacatggcaccactgctggagggacaggcctgctcctgactcactgtgtggtcttgggcaagtcacttcactcctctgacctcacctggaaaacaaggagggctgaactaggtgttctccaaggtcccttccagctctaacattttgtgccattttagatttttctaagagcctgtcactgagaggggttgaacagcatcttgcaaacatcgctgcctcttcctccccaatctgccaaccctggggcccctgccagcttcccagcagccctctcccctccctggtggccacagcctttcagacaggacaggcagatggggattggccgctccccatttggaaagccccctcagtgacctccctcggcctcctgtccctggccacactgcccttcttttggttgttcagcagccgtctctgcctcaccaagacttaccgcccaggagggcttagcttgggcatcacgcctcggaaaaggccgtctgtagcctgtagtctgagttaggtcctggtgtcccctgcagccattgctgcactcacccagaccagcctggaaagcgtggagggagggcctggctctgggtggtccccacagaaccccagggccaagggagtcacgccctcaatgtgtgcaatgaaggtgaacgcaggagccagaggccacctccctcctgtctgcgtctctccctgtctgggggattcctgaggggaggacattcctcagatccttctcactggggaggttcacctcaccctccttggcctcgaacccctcctgagcccaccgtctcctccccaggaccgcctgattttgggatccaacagcacctacctgtacgtggggtttccttcggagtggggcagtgaggacctgagcaggttcgattacgacttcttccagctggagagggcggctgcggagggagcgagtgcagacaaactcggtgagccccctcctgactgctggcctctcccgtgtgctgatctgagagcagcgatttcacactgtgtctctctgctttccttaagaacatcatcatttgttttgtcaaagtctgatgtttacaaaattgaattatgatttccatatagagtgactacatggtaaacattcaactcgttaaacgttccctgaggaatgagggtaaagatggttcaaaggggtagagaagagagtggggtacccagcaaatgagagaagaatgctgagctggagaagccagttagtggcctccggccgcccccaggggcctgctgggcctgcagaagcagtggcccaactccagaggggccggctggggcctgctgtgggctgcaaatgcgcggcccggaagaacgtgcagcccgaggcctctgagacagaatctcccctcctcgcccgaacgcagcccccagcagtagcccacgcgggccgcccgccgctgccggtctctgctggggctttcgcgcgccttccccgcccctctccccgccccgattcaccgcgctccgggcggctcccccagaatcctggccaggccggagcccgctgcgatctgagtgacctgcgggcttcccggaggggccccacgctttgctcggcaccgggactctgcctgaactcgcagtaatgaaaccgctggtggaaagtgggcagatccacctgtgtgtgtgcaagagctcctccctgtccccacaccacagtgtttctctcagaatttcagcaaaataaatcgattagaaattcacctccttgctcttcttctgctgaagttttcgacttttaaaaatgaacaaggccgggcgcggtggctcacgcctgtaatcccagccctttgagaggccgaggcgggcagatcacgaggtcaggagatcgagaccatcctggctaacacagtgaaaccccgtctctactaaaaatacaaaaaagtagccggatgtgatggcacacacctgtagtcccagctactcaggaggctgaggcaggagaattgcctgaacctgggaggaggaggttgcagtgagctgagatcgtgccacagcactccagcctgggtgacagagcgagactccatttcaaaacaaaacaaaacaaaacaaaacaacgaaccagtaagactctgtcataccaggcccggaaaagccatctgttcattgacctgtcctcagaggttgaccgtgccactgcccctgtggccctggtggcgccatgaagctgaaccagccccagaccctggctcggaccctagggaagacttgggtccccaacaaggcagcagctgtgtgagcagtttggggtcagacctcagggccaagggcactgtgtgcacccacaggccaggggtctctaagagttgagatttcctgattagaggcagtaccagcctgggtttgggagggagattgatcctcccataatctccacgagcccctccttcaagccaccccaagtataagagaagcacaggtcacttgctgtgccagcagcagcttgaggatacctccaggccttccgtctagccagccatgtttcacctcgccccaccctcctccagtctggagccaccttgggtcaaggaccctgagaccaagaatgggaactgggggcagaggacctcctgcctgcggccaggattcatgggtcgagataagcaaccacgtaaggagaagccaggcagtgtcattttcccttgtttgtttttaaattacatgcttgtaattttaaaatgtagatatttgatgaacagctgaacaaatgaatgaacaaataagcatacacatttattcatggcggctgggcgtggtgtctcatgcctgtaatcctagcactttgagaggccaaggcaggaggatcgcttgaacctgggagttcaagaccagcctgggaaacaaagtgagacctcatctctacaaaatattttaaaaattagccagg

SEQ ID NO: 1879425 - DNA, 4001 bp, Homo sapiens
gcaggattccttcccgccttgtgaacggggtcccgcccagtgtggcccctggggtccagaacccgcaggctgggccctcccatgacctggaggccgtcccattgcagagatagggccctagagttcacctgcaacactgcaagccccaggccccccaacctgtccccagacgggcaggtccgtcttcagagagcttctccctaagttctcacaccgcagaatccccccagacctcccccaagcacagcgtgtggtgccccagccctctgctgtggtgaccattgcctgaggcaccgacagttgtgtctgagtgggccaggccctatgggtcactccagccaccttcgctgccaggtgggaccaactgtggccatcccaccgcccagaggatgttcctgccccttctcctttccttggccttttgtcacttttttttttttttttttttgagatgaagtctcactctgtcgcccaggctggagtgcagtggtgtgatctcagctcactgcaacctctgcctcccagattcaagcaattctcctgcctcagcctcccgagtagctgggattacaggcatgtgccaccacacccggctaatttttgtatttttagtagagatggggtttcaccatgttggccaggctggttttgaactcctgacctcaggtgatccacctgcctcggcctcccaaagtgctgggatgacagacgtgagccaccgcacccagccagcattttgtcttttctaaaatgaatccccaggccgggcacagtggcttgaacctgggaggcggaggttgcggtgagcggagatctcgccctgagaccccccgcccgccccctgctcattcccaccgggcaggaactcgtgggcacgacctcctctcgcacagccctgtcctgaaggcctccatgggctcctgggatgggaagacacccctgaggcgtgaactccctccaggccacacaggacgtgagcctgaacccagaggctgggccacacctgagcatgtgcctggtgggagaggaggggtgcgaatcccttagggaaccccttcctctgagagtcctcactcctgctggcaggctcaggggtccccactgcaatggccaagaccccctgcagggcccaccccactcactgctgggggaaccagacctcctggacagaggaccccgggccccgccccaggacccagccaagggctgggctgggagggagagggggagggaggcggggagggtacacgcccagtcgcaagccctccaggctttaaagctgtccaatggcagcaggctgctgtgaatggggtccgacacaaatttgtaaaccttcttaaaacataaaacataatgggatttttttggcaatttttttttcgctcatcagctatcgttagtgtattttatgtgtggcccaagacaattcttccaatgtggcccagggaagccaaaagatcggccacccctgctttaaagcacctgccctgttcccggaaacccccagccgggactgacgggtgacttcagtccagagggtgcacagcctgcgggttccggggaggggccgcgtggggggttctcgaccgcagccctcccaccccagggccacagagagcctgcggggggcggggctgagtgtcccgggcccccaaaacccggcccagcgggggcagggtccccgcatcctcgcatcctcggggtccggcccctcgtcgcgtgtcccgggctctgggccccgcccgcccccctggcgcccccaccccacgccggcctcgacccccgccacggttcctccggtctttccctgagtgtgcgcaggaggacgggagctcccaacgcaccgcagagggggcagggggacccccaggacccgccctcccggcaccgcctttgtccccgcgcacctggcggggctcgggtttcccgggcggcgctcgctccggccgcgccctccccgccctgggctcccccagctctcggtgggcgccgcgtcgttagctggaaaccaaagaaggggcgcgaccgagccaggcaggtggcccagaggcccaggtgcagcccctgccccgcccagggcccgaccatcccagcccagccagcgggggtgtggggtccccaccatcccacaaaggcacgtggggccaggtcctcaaactgaccacccggccgcccctcctgctgcctccccccaggccccgccagtgccagggaaagggttaagtccacctggcgaccgcacctttgtttgcccgagagctgcacctgcgccccaattaacgtgggcaaatgaagtgagaccgggtccaacaggaaaggaaccgccctcctgtgtgccaggcggcccgcagggacccagggcagggccggctcgacacgccctgcagctcccacctgaccccctcctgcctcccatcagagaagctgaagctccctgtgctggatcctactttctcagaaggttttaggctggccactcagcaccccacacaaacacagcatctggcctagctcctctgccctgcccagcacccacagggcctccacctccacgcccaccgtccccagtccccaccctcacccccatcaccgtgtttctcaaagccctgtcccttccccttccctcgaccacaccataggccaagggttgcagtagcccccagcccagcccccaggcacccagagggctgtgaacagtgggccccaggcacacagggggctgtgaacagcagcaggctccttttggccttggccctctcagcatgcagccccctgtctcttcagtggagtgagaggggccggcctcttagccaggactggtttgtgccaccagggaccacaccaattccagacctgggttttggcccctggacagagtacaaaatgcaaaagcagaatttccagaagccggaccctgtgagctgcagaagccgggccctgtgagctgcagacagaatgaggcgtgtcgggatgggagacacccgtgcttccagcattgcaaggagaatgtggaacgctccggaacccctcaccctcagccttgcccacgggagctggggcagtggcccctgcccacctgcactcaccagctgtcctggcagcgtgagaccagcctggttgaggtctttatgtcagagacctttgaaccagagcaactccatcttgcacagggcctgggtaaaatgaggctgagcccggctgggccacgttcccatgaggtcaggcatccttagttacaggatgagataggaggttggcacaagactggtcacaaagaccccgctgataaaacaagatgctgtgaagaagccggccccaaatcaccaaaaccaagacagccagtcctcactgctcattatgcgctgattataatacattagcatgagagacacgcccaccagcaccaggacagtttagttgccacggcaacgccaggacgttaccctagatggtctaaaagagggaggaaccctcacttctgggaattgcctgcccctttcccagaaaagtccggaataatccacaccatgtttagtacatatcaagaaacaacaataagtattctcagtggagtagcccaggccgctgctcagcctatggggcagcccttctcttattcctttactttcctattaaacttgctttcagtttatcagtggactcccccaaactgtttcttgctcgaggtccaagagccctctttgggatccctttccggtgacatttacgcccagggaatttgtgcccaaatgcacagatcaggcccctaccctgagggcccccactgcctgcgaccatcccattccagactctcccaggcccctccctggggagggaggtggcaagaccctgtatccaggcccccgtggtggagtggggtctcccgaaggcccaaaggatacgggaggagcccccgggtggtcagagcatcggggcggggaggggacggtgaccccgggggatggacaatggctgcagccaagatatctgcctgggggagg

SEQ ID NO: 1879426 - DNA, 4001 bp, Homo sapiens
atatttcattgtgtctgggatgcacaactattttctacaccactcagaaacactgccggctaatgtgtgccatggcatgaagacccatgtgaaagcatgtgcatctttccagttgtggcttatatggtaataggtagtattgcctagcactgtaaaaggacttcagatatattatctcactgcattcttgcaccaacaatgggtacctatgagacaaataaattagttccccattttacagatgtgacaaccagtgcacagagagattaactaacttgccgtccagtgggcatgtggtggagcccagggtgaaacccaggcagtctctaaagcattgccttccaacatgcaatggagtgtgaaatgcggaagccatggggaagcacaggaaatcggccatgtaagataggaagcaatggttcgatttattcagtggtgacgtccaccacagctgcattccagtaatctgcacccctcatcccaacatcctcaccctgctctgcctgtgttggacaactcgtcttcttgaccggaggtgatctcccacagtgaggtagccctacccttttgtttcagctcttggaaaaccccaaacctcaaggccatacactccttgtggccaagtgagcatcttggcaacttcccggcttttccaaagagaactaactcctgctgggggccccccaagtcacccctcatggcccttacttctagtgctctggaaatggctgaaaccaatggattaacttgctttccctattaaatatttacataaacacgctcgggaaggtgtgtgtaagttatcaataatgcaaggccagcctaggctcggtgagagctaagagacccaaattgtatcatcataatccattattcacatataatgcgtctattctcctccattagcgcaggcaggaaatgcccctgagtgccgggcagggctttggaaagcgcaataaatggcggacagacacatggcgggagggcggcagctgtagttaaacaagtgtaaattagcgcccagcctcgctccctgcctgcagccagagcggcgggcacaggcctggcagggaggggttacaggatgtggggaactcgctatcaatctagacagccctcatggcctccctggaaacccttccggaggagccctccagctggccgcgtgggagaccacgcctcagagagcacaggcttctgctctgcaggccttggctggaatctcagctgcaccactgagtggtgacctggggcgagagggtggagggggctgctgcgcaagctgcccccacactgagctccgagccccatctgtaatacagggatgagaatcaccgtctcacaaggttgttgcgtgaaggaaataaaatgagaaaggagaagttcccagcatacggcacacgggaggcccttagagaatgaaagaacactcctctccctcctcccgctaggcggtttcagacttaggaataaaacgggagaagctttgcaccgtacccaaatggatgtggtgcaaaggcaatgcgaggtaaagacagaagtggctttatgttgtcctctcgtcagctttgctgtccctgcaggaggctcctctcctctggaccccacccgagtgcccggtgctgcggtccgtctcctgggctcagcaagcacactcaccatcgccaccccgtctccaggacttcttcagcccttagtccgtccacaccctcttctcagcactaccgtattcccctgggaggcaggtcctgcacagagacgagcacatctgctgttgaaacgaccccagaccaaacgaaagtttttgattacccgtgaactggaaggtggacttttggtataaagagcaccagactgggagttgggagagctgagttcttatctctgtcaccgctgatgctctgtggtttgcggagagtcccatggcctctggacctcagtctgcctacctgtaagagtaagggaattaatcaaatgatttgatgatcacgcatgacttagtgaatgtgaagtgctaggtgtgtctcaggacccttcctggctccagaaccctcaggatcagaggcatcatgagattctagaatcaatattctggttcaagtcattgctttgtcttgtctccacagctacagctggattttttctagcaccgaagctgtgtcgtggtacagagacccagtgccctggtgtcaggtggatgggcatgagcttgattcaccttttacagaggaatcacattagcagcccctccttacccctcccctcccactgtaaggggtcatgagcccaatgcctaagggcatggcagtgatggctgttcagtggaggccacaaaataaaatgtgaatttggaaaggcagggagcagatgaccaggttttgtacttttcggacaatggtgtccacatgtgggcggtttgtctgggccagaccagttcttggctctgatgccacctcctcagagaggccctccctgccctatctaagagccgccccactactctctttcccccatccattttatttttcttcccatcactacctgacattttattgtgtacctactagttttcttgctcattgtgtgtttcctcgactggaatgttggctccataaggacaggtatcttgtccgtcttgttctctgctgttcccctgaggcctggcccctagtagaaattcgatacgtactgaatgaatgaatgattgtagattcaaatttagcacacatatattgagcacctactctaggcccatcactgtgcaggtgcttttacatatgttacacatttaatcggcttaacaatgacatctattcatatatattaagaccagtgggcactaacattaaatttcaattaagtgagcctggtaggaatgcttcacatctcctcccctgcttcatgtgtgccagggggctaatcatgattgaaaggctgaagcagttgaatgatgttgtgttcctatgtcctgatgccttctcccaggctttcctttttttttttttttttgagatggagtctctctctgtcgcccaggctggagtgcaatggtatgatcttggctcatcgcaacctccgcttcctgggttcaagcgattctcctgcctcagcctcctgagtagctgggattataggcatgcggcaccacaccaggctaattttgtatttttagtagagacggggtttctccatgttggtcaggctgatctcaaacttccgacctgcttcggtgatctgcctgctttggtctcccaaagtcctgggattacaggcatgaaccaccgcacccagcctaaactttccttcttgtccttccttcagttcagctcatctgctctcaaactcaagggtgtttaggtaaaaatgactgtactaggttatatacaaagaaagccagggagccgatttcaaggaattgaagagaaatttgaactctatgcaacttttgcctgatgtaccaattttggaatcaaatgctcatatgctatataagattactgtactagctgcgtggctttgggcaagttactaaccctccttgagcctcagcttccttatctgtatatgaagatattaatagctaccttacagagtatataagatctgcatatgatctgtatatgataagcaataggtgggtttgaatcctactttcagcgctaactagccatgtgaccttagacaagtttacgtaatccttctgttcctcagtttcctcatctgttacatgggtgatattaatagggtgtaccttttgattgggctggaccctgtttgcattctgccctgaaggagagcggggctgtgggtcaaagctgccctaattataggtgcagcatccggagcaaggtgttgcttggctctgcactgctggcaggtgtggaagtccttgccccatgggtgaattccagcgcagttactgcctgtggggcagtagttggcaggtggcaaaagaaaaactttaagagaacacagatggtcacacttgacaaaaaatgttc

SEQ ID NO: 1879427 - DNA, 4001 bp, Homo sapiens
cggagtctcgctctgtcgcccaggctggagtgcagtggcacgatctccgctcactgcaaactctgcctcccgggttcgcaccattctcctgcctcagcctcccaagtagctgggaccacaggcacccgccaccacgccgggctaattttttgtgtttttagtagagacggggtttcaccgtgttagccaggatggtctcgatctcctgacctcgtgatacgcccaccttggcctcccaaagtgctgggattacaggtgtgagccaccgcgcccgaccatattttttagttaaatgttatttggtttcacgcacccataccttttacatgaagtctgaaatgcctaaaacaccacacctcccctgcttgtcatgggaattccattccctttgttttgtttgttggtttgttttttatgagatggtgtctggctatgttgcccaccctggagtacaatggccattcgcaggcaccatcattgcacattacatgctctaactcttgggctcaagcaatcctcctacctcagcctcccaaatagctgggactataggcatgcacctctgcacctggtcccatctgtgtttcacaacccatcctaggcatcagcttctgaaggaagactttcttcctattctatctcctggtcagtccttctgctgtgctttctctatgtcttgcatctagtacgtgcttctattcatgtacttatccctctgactacatcatacagtgtgtttctctgattgtttacctgtcttctggattatgagtctctttggggcagaggctgtacctatagcacatggcccagtgcctagaatatagtaaaagatcaatatatttccactgaacaaatgatataacagagagcagaagtctaaatagcccctaggtttttgatagtaccagtctctaagactggaacaaaggacagctggtttaggaattaaattcacccaatgaaagtctagcaggcagtttaatacgtgtgtctgaaaatcagatgacagataaggacctcatatgcactttggagagctaatcccaccgttttcaaatccatgtctacatggaaactgaagtcatgattttggttatcaatgccccaaaactgtgaatagagtgagtaaaggaggaaactaaggacttccaggaatacccatttcaaagggcagccaaaggaggtgaagattaaaagataatcagccagaaatacagaacaagaaccaaggaagagaggtgtccccaaaagccaaagaaaaacagaatttcaagagatgcggatgctccatagttacaagtggatttggaggtcatcaggaatttagtggaagcgatttcagcaaaatatcaggggattggggtggttgggattgcagatggctatggaaaagagaaaaaaggaggaaaaggaggattcacctacctgatcactcagaaaaagcctctcttccctgctaacagattttaaggctgtatttgtagcttcccaaaggacagtcagctcctctagaagtccatggcaagaacaacttcatggtggactttttgcttccaggagatcaaataattttccagtgtgattgatgcctctcctcacttcaactcagaagaatagtcttcagtttatgtaaattgaatcccacagatggagtggcatcttcaaagcacgtaacagatggatggtacctgaaccctaattccagaccctctcagaggtccctggaaaaaaaaaacaaaaacgcaatgtgcgtatattttgccataaactagatgaaatccaaaaaatggttaaggaggaagagctaggcctaattgatcttaaaagcctcagtggtctctagggtagataggtgccaaagtgagaacataggaatcatttaccacaggtgctggtttctacaatcttaatatgtcatacatgtaagccttttctctacagttaggctatgagagccttggagagaatgggcatccccaaagtactagacatgcagtaggaacttattagacaatagaatgtttagacaaaggaatgaccttagagaccatctggctcagctgtgccaaatcatcctttgtaagtgttttcttgttgacttgtcaggctttgccactcaattataaattcttctaggggagatccctaacttgtctatctttcctttggcagtgcccagcaagcaaagggtttggccgtaaaaggtgctcactaaatttttttaaaaagtatttcatctatatactaccactagatgtttgatgaatggagaaatgcactcataaaatctccaaagcatgaaatgaagcaatgaggaagccttccttccagatactggatttaatgtcacttcctgaaagaggtctttactgagtgggtacgcactttaattgttccacagaacttctcagcttacctgtgcttcgtttgttttgtattatttatttatttattttttgtagagactgggtcttgctgtgttgcccaagctggtcttgaactcctgggctcaagtgatcctcccacctcagcctcccaagtagctgtgactacaggcaccaaccaccatgtctggctcttgtttatttttcaattgtctgcccttctactagaatgtaaatttccagaagttggggatcttgcatatcttgtttaacactgtagtcaatttacagccctagcaagcctggggcatagcaggaacttaacatttgtggaatgaatgaatggctgaatgagtaagtggagctgaaagtaggttagaatggaagactcagatccagtgaagggagcaaagccatgggccaggtcctcctgcctagggctcttttgtccccagaactagtcacctccaagccttatctccttctcccctcacccactctcccatcccacagcaatgggggcagggcctctggcttcagagcttattaaagtctccatagataagtaaattctgttgggttgaattgtgccccaggctaccaagattaattaggtgagcccagctaatgagttaactgagtttttacttttccctcatttgaagttttaatccccttctgtctccagaagcccttaaaaggagagctaggaaaaaaatcattagggtgtttcaagtccccacagtgatttcccttacaacaccatgctttgactacaagttctgcaattgctcctccacacaagcagaaaggtttttaggtttgtttttaggtggactggtggatgagaagacttcccctccagcttcctagtccacatgatgccagagagtcgcagcaggactgggtgagaccaggttctggcgaccttctgccttgtttacttaatttactgcttgtgtcaagacggttctgggaaagttgcttatgtcacctcctaagagtaagggaaaatctctggctgctgaagctgcttatccctactgtggccgttccgggttacccacttcttcctaatcccaatttgccttccttgtctagctgctaggggctagatggctcaagggatttcttttgttgatattgctgttggtgagattgcattttgctttgtctttctcctaactcaaaacagatggaacagggaaataaagaatggttgataatcctagtcacttatctttggtaaatttcaaagggtaagtggaggcaaataaacaatcattcagtaaacaagtatagttgttttttttttttttttgagacagagtttggctctgtcacccagactggagtgcagtggtgccatctcggttgaccacaacctccacctcccaggttcaaaccatcctcccaagtaggtgggactacaggcgcatgccaccatgcctggctaatttttttttttttttgtatttttggcagagacagggtttccccatgttgcctaggctggtctcgaactcctgggctcaagcaatcctcctgcctcagcctcccaaagtgctgggattacaggtatgaaccaccatgcccgaacacaagtacagtatt

SEQ ID NO: 1879428 - DNA, 4001 bp, Homo sapiens
gtcacatggcctctgtgtgtgcttgcgcatgcctgtctccaaacctccccttcttagaaggacaccagtcctatgagattagggcccatctgaatgacttcatgtcaacttaattctgtcaagaccctatccccaaataaggtcgcactcacaggttctgggggtaaggacttcagcatgtggatttggtaagggggtacacaattcagcccataacaatctctgagccttcatcttctaattaaaaaaaaaaaaaaaaaaaaaaaaaaaaaaggccaggcacagtggctcacacccataatcccagcactttggaaggctgaggccagcggatcatttgaggtcaagagttcaagactagcctggccaacatcttgaaaccctgtctctactaaaaatacaaaaaaaaaaaaaatagcagggcatggcggcatatgactctatagtcccagctacctgggaggctgaggcaggagaattgtttgaacccaggaggttgcagtgagctgagatcgagccactgcactccagcctgggtgatagagcaagactctatctcaaaaagagagagagagagacaggccaggcgtgttggctcacgcccgtaatcccagcacttcaggaggttgaggcaggcagatcacttgaacccaggagtttgagaccaacctgggcaacatggtgaaaccctatctctacaaaaaaaatacataaattagccaggcgtggtggctcatgcctgtagtcctagctgctcgggaggctgaggtgagaggatcacttgagccccagagatggaggctgcagtgagctgatagtgccactgtactccaggctgggtgatagtgacaccctgtctcaaaaaaaaaaaaaaagagagagagagatagcacctgccccaactctctcccagagcagacccactggattgggcccaaagggtgccctgtgagcttcagagggctgtgctgtaggcgccacccactttcctctcaagtacaggcagcaagagagacagggactctcacctcccagtggccctcagaaaatcagaggtcccgggcaggatgttggcatgtggtccactggctcctttaagaaaagccaggtatcctcagagacccgcacataaggtcagtactctctcagcagaccaatccatttctccccactaagtagcatctgatggcgttagatgctaagactctctcttcagaagtaataaaaaataaaaataaaaataaaaaaggcagtcccttagtgggagggtgtttggcatttcatctgaattccacaatgaataatttatatgaaaattttatcggagcccagctttccacaataaacgttccctgagaacacacgcaaatgcttctgcagccatctctctctctgctggattgggctgacggcccaaatcagatctgagttgctgcatcacttatttacaaaaaatatcataatcttacttttatgtgcatttttcccagcatccgtgggtgacaagtttgagaggcacaggcagcagcggccgctgcttctgttggatccaggagggaagggaggttctgagctttggagcgggaagtgaggagcctcagctgtccgcacccttttgcctgcaacacaacaattaggagagggactaggaggaaaggagccacctggtttctggggcatagaagccctatgcagccacgtgtcccgagcagagtgaggtggggagggggccagaaggagacctcagttattcagcgtcaggagggggggtccagagtgtggcttggggacagggagacccagcttgaaccctcctcctagctaggttatgtggcttctctgagtccttgaccttatttggataatggaaaaaagagaacccacctttcaggactgtcctgggaatgtactgacctgttgtgggcagcgtggtcatcacaccaaccttcacatccaacaaatgcttgcagaactgacaggcacatggcacgagcacgccgctaaccaggactgtgctttctgatattgctgtttccatggtggcagggagagggctccagcccagctgcagcgtccagaggcacagcccccgcctcctgcattcgctgcccaggggttcacgtgtcctcagcttaatgtcttcttaatattttatacactttctcctttgtgaattcatctcttttcatggaggaattgcctgtgtgtgcccagtgggagcttgaaggcatcagtcatcgtcacatcctcctgaggatttctcagtcagctgctctaggcaggtcctgagggaggggatggaggagaccccagaacctggcgctgcccttcctgtcccagccaggtgggtgtcctggtttagggctgccagggacatggcctgtcccagggacacaggcgtcagcaccggctctgttgctcaccagctgtttgacttggagcaagtttcttaacttctctacgcctgtttccttatctctaaactgaagtgatcatgatcccctccccaagagaagtcgggaggctccgggatgggacggtgcacacgcagccttcacatcgtgctgaggcagcaccaagcatgcaccccagaaatgccagttgtcttgtgcagctagtcctgcagtcctcccagtctgcaggagcaggaagggagcctggtctgggagctgcccgttgcccacagtgacgtgctggaggacccaggacaaggcctggctctccacccgctgcaccgtccacctctgcctggttgacagcttcgccagccattctgtttgccttctccactccctccttccctataggaaccagttctgggtttggcacccaaaaccaaaaagattggccccttctctgcgctgcccatggacttgggaggctgagcacatctctcactctggacggatcccaattagccaatcacagtatgtcatcctccttgccagggattatttcagccaatcagcacacagactccctctggtgactctaataggtccaggagcaggcacatgccctaggctggccaatcagagaggtgagaaggactttcactccacctgtccttctcccaccagctgtgaatgagcaagctcctctcattgcagcaggcaggcggccatcctaaagccgtgagggagggggcctcaggacaaggggaggcagagtcaaaggaagggagatgcagccctgatcacatggtgcctgcagcccaccttgcctcagaacctgtgctcacatgagataatagatctctgtggttaagctagttcatgttggaccttctgctactaactccagagaaatgcccccacatgtaaagttagagggtctccactgtggccagacctctatgaccccttcatatgtccaaccctgggagaaattcaagtcaatggaagaccacacaatgggataaggaagtaaaaagttaatgactaaattaaggttatcaccagaagtttaagcttcttgagaagggtcacatctgtttttgaagacccacagaaagtactgtcaaattccattcaaagacagccctcggtgtcctggaatggcccctgaaaaaagcctcctggagcttcctattgcagcatgacacctgcccaccaatagggcaggacagcggtgtggccaagagccccactgaccagggcttgagtggcgattataccactaactagctccatggcctctgcaaaactcagggacctcatgtggaaaatggtgtcataatatcaccagcttatgcaaatcaatgcgaggattctacagataaaaaaaatgaagttcttagcactgcatctggcatgttgggagtgctcagtaaatgttagtgttattttcctgacattttcaccctgattaaatgattaggcagagactaatgcttctggccaagtgtagtaacagagattggatgtaccctcccaaccaaccaaaacaacaacaaaaaaaagtatgaagcaatggttttcaggccatgagacaccaggcag

SEQ ID NO: 1879429 - DNA, 4001 bp, Homo sapiens
accactaaaagaaagactccatttcaaaaacaaaactaaaaccaaaaacacaacacaaatgtagtatacaaatgaaaataattactgtgttaaacacagtttcatagaaaataaaagaccaatcaaatacaataagctgcctttttagatgggtgttattcttctttcacagctaaagaaacgggctcagagaatgttatttgattggaccgtgttgcatctctggacagtgcagctgagatcagactttgtgtgtaactccactagcctaccagggtgcctctcataaaggtaagaaatgtaaatttgggctaatatacaaagttgccagggcagcactgggtcaattctacatacagtacttctatgttcatcaagggaaaccttaagggaaagtgaaaatgcttctagaaggcgactggacaccagcgcctttgcttgttgcctttgggctcttcttctaaggccaacagtgacctgagattattgactggcttttccaatcaagtggacaaaatggtaccaaggtcgccaacatcaaacaaattcacttgagggccttatctatgtcctttgaaagacaaaactgcttttgtaaaggacactgtatttcagaaaaacataatcatattaacaaataataacactgtaaaatgctgatgtattgaatgctactttagaaaaacatgctcaaatctagggaaaaaatttgatacaaaactccgtatcaattatctagctagctagctagctagctagctagagacatgctttcattctattgctcaggatgggaagcagtgggattatcatagctcactgcagccttgagctcctggcctcaagtgatcctcctgcctcagcctcctaactagctagggccacaggtggacacagttatgcctgggtttttgtttgtttgttttgtagagacagggtgtcactacattgcccaggctggtgtcaaactttggagtctcgctgtgtcgcccaggctggggtgcagtggtgcgatctcggcccaatgcaacctccgcctcccgggttcaagtaattctcctttatcagcctcctaagtagctgggactacaggcatgcgccaccacggccggctaatttttgtattttttgtagagactgggtttcaccatggccaggctggtctccaactcctgacctcaggtgatccacccgcctcggcctcccaaagtgttgggattacaggtgtcagccactgagcctggcggagcactttcttatgttattaagtagcctaacccaggtggggcgctgtccctcacacctgtaatcccgacaactctgatggccaaggtgagaagatcgcctcaactcaggagttcgaaactggcccgggcaacatagcgagcccccaccccaccccatctctagaaaaaaaatacaaaaattaggccaggtgcacaccgcgcccggctaatttttgtatcttctgtagagacggggtttcgtcatgttgcccaggctggtctcgaactcctgagcccaagccatccatcctcccgcctcggcctcccaaagtgctgggattacagtagggcccagccagcctcatgttttattgcacacctggatagttttttaatttttttacacagggtttacctcaatctcgcaggctggaatgctgtggtgggatcatagctcactggagccttgaatctttgggttcaagtagctggggggctgaggtaggactacagagatggggttgcgccatgttgctaggctgctcttggcctgaagggtcctcccgcctcggccgcgccatagttttctatttttgaccaacataaacactgtgctgggtctgaatttttcagctacccttcttcagccggcaacacacaggacctggcggggaggtcgctctcaccagtccccactctgacgagaagaccgcccagctccaggcaccgtagcgccccagtgacgtaggcgaacacccgcgcctctgacgtcgccaaaggcccaccgctatggtgtcggcgaaggcgcgcccttgtgacgtcacggaaggcgcgcccttgtgacgtcacggaaggcgcgcccttgtgacgtcacggaaggcgccccttgtgacgtcacggaaggcgcgcccttgtgacgtcacggaagcgcaagaaccgcttgaacccgggaggcagaggttgcagtgagctgtgatcgcatcactgcactccagcctgggccacacagcaagactctgtgtaaaaaaaattattttaggccatcgaactgtatacctgaaattagcaaattttattatatgtaaattgtatctcaataaagctattttaaaattataaaacttggctgggcacggtggctcacacctgtaatcccagcactttgggaggagaggcaggtcgatcacctgaggtcaggagtttgagaccagcctggccaacatggtgaaaccccttctctactaaaaaatacaaaaattagctaggcatggtggcgctagcctgtaatcccagctacttgggaggctgaggcaggagaatggcttgaacctgggaggcggaggttgcagagagccgagatggcgccactgcactccagcctgggcaacagagcgacactctgcctcaaaaaaaaaaaaaaattataaaacttaaaaaataatgttaatgataacagaagtttgagaatcagagataaattgtgtaatgatttttaaaaagggggcccaatttttttacggttcagtttctagaacaggagttattcacctgtaagtcatttgacgaatagagagataattttttagcactctttccaattactagcatgtgttttctttgtcccaaatcatgtttaacacatcatttatactaaaaatactaattaaaacaattatggcatacttctaataatgttaaaagtgagtaataatacttaacctaaaagggtacatttataatactacagtttcaagtttcagaaagcagagagggaaggatatttcaagactggaatattcctgccattccttaaatcacattcctcagcatctattcatttaacaaatatttattaaagacctgctacactccaaactctttctatatgcttctgatccatcaatgagcagaaaacacagatatgcatcaattaggttagtttgcagaatctcagtggcttctagcacaatagttcatttctgacccatgagacctgacaattactggttaactacagctctgtgacagattgtcatctttctaggacccagcctgatggagtagccattatctgcaactctgaataaacacattgtagttcagtcacattttggaatactattcagcaatgaaaaggaacaaggtgtcataaactcaaaaatgggtgaactcaaaaatactactgctaagtgaaagaagtcagatgcaaaaggcattatggcaggataaagaacatggtaaaccacacgctggctcctgtaacttctgcctacaagtaacaatgcttttgcttctatgtcagcaatcagacccagtcacgtagccatgtccaaggccaatggggtggggaaaggataatcctcctgagagggtcagagtatgtatttgaataatagcgcagtttaccggttacctgtatatagtaacatagaaggaaataagggttgtagaaaaaaagaatcgggcgtgcagggttggaatgcaatgatacggagcaggatgtggtgttagacagttctcagttcttcaaaccccgagaagacttgaaggaggtgagggagttggctaagcaaaatatgaggaaagagcatttgaagaagatggaacatctagagcaaagaccttggagtaagcgtgcctgagatgccggaggagtggtaaggaagccggggtggctggagtagattagaagcacgtagtagctactcctcctactggaggtcatcacagcaatggggtgggacaaacaaagaggactttgtcatcgttgtaaga

SEQ ID NO: 1879430 - DNA, 4001 bp, Homo sapiens
aagagtcctgcttgctgtgccaggagcattcctgtggtcctgtcagggtgcctgggtggggcttcactctgggctccagaagctactgctcaaatgccgcatcctctcagcaggacaaccaaaagctggggagaggaaagggagaagactcaagggaacatgaccctgacttcccagaaggatgaagccacagatgccaccgcacctggctgggagccaaaagtcatgacgtgatgtgggagcaaattccagaaactcttgggcaggagctgagggcttgagtgtccaaatgagatacagcctcctcttcctgatcccattcttttcctcttcgaaaggttctttgtgcattttaaattcaaaggaagggtttggacaaaagggaggctgttccatccagaaagcgcatacttgtcagaacaagccgtctgccagggcgtctggcagggaagggctgggggccacgggctgacttacctgaagtcctcgggcagtggcaggggcccagagcacctccccactgtgaatcagaaggagggcattcctccactgttaccagcatctccatctccaccaaaacaagccaagcctttccctttcccacgttcctgggtcgagaagcaggtgtggtcctttgcagcaagttgacatcaacgaaaaacacattccttggcccttcgattcctattgacacacgcagtttctgaggctgagttacacctgacctctgggtcagtccctgtttactcatccgcacaacccactcatttatcagataatgacccagcccttggatgtgactcctgctcggccccaggaggagtgggcagtgtgtcagggagacctccctcaaggggctcgcaggctgccccgcactggcgatggcacccaggaggacctttgcatggtatctactcatataaaacatgcccctcctgacccccgcctcctcttcatttatttccttgcatttattcattcattcaaaggatagatattgggttcccctggtgccaggctccacaaaaacttttcaggggagcgaggtccagtggctcacacctgtaatcccagtgacactagaggctgaggcagaggaatcccttgagtccaggagttcaagaccaacctgggcaatatagtgagaccccacgtctacaaaaaaaaaaattgagacagggtcttactctgttgccaggctggaatgcagtggtacgatctcagctcattgcagactcaatctcctgggctcaagtgatcctcccacctcagcctccacagtggctggcactgcaggttcacactaccacgtccagctaattgttgtattaaaacaatttttttaaattagccaagcatggtgatgcacacctgtagtcttagttactcaggaggctgaagcaggaggatcacttaagtccagaagtttgaggctgcagtgagctatgattgtgccactgcactccagcctgagcgacagagcaagactctgactctaaaataaataaataaatcagaatagaaaagtgtggaggatgtaatggtgaaccaaagctggcatgattccatctcccacataacttacctttcagtaagagaagacatcagaagcaagcaagcgaataaataagccagataggttctgtgaataagaagggcctcggagaacatcaagactgggagaggggcttagtcctctctgaggaagggacgcaggccttagggatgaagggcaagcacatttcaagctcggtcccctgaggaggggagcccaaaaggaagccgtgatggggggttcgagctgccggtgtgaaatggaaggctcagccagacgaggcatgtcctcgctcatcagacacaggcacgctctggcccagagcaggatggcctcgggcctggcctccacccatggggcttcctcctctgaggcagagaactttgaaaagaagtcacccacgtggcttgcttctaactctcccagaaaggcagcaaatgtggcttgttatactagggagagaggccgtctcggtgaggacactctggtggctcacgattggcctgatttcctcagatgacgctggatggtcagaggccgctgaccctccagtccctgtcccctagggaccccggccagcgtcagtggccggtcagctcctgccaacgcctcctggaaactgcaccgttgccccactcgtgggtaagaccccatgtagtccttgagctctttttctcaggaggggctgatgcatgcacggccagggccctgggcctggctgcccagctcatcctcgcttccagaaactccccttctccctgctgcatgggactggtgccaggctgcatcgtggtttggcttgggagcagcgtgcctccctcctgaacgtcgcagctccgtgtgcttcccgaggtgacgaatgaccttgattcacattggtgaagtaatggctttcctcctcaaccttctcatccattagtcacgttgcaacacggccctgcatggcacagaatgcattcccaggagccagctcagggaattgcaaacacctgccaggctcggcttaccaaactcacagtcacacagtcagcccaggtgcccggaactgccttggcccgctgccaccaaaggccccacagcagggacttgggaaagtctgagagcaaaggccaaggactggagcttaggtccaggtctccccttgctccgtaactttgggcaaatgacttaacctctcttagcttctgcatctatacatcgccaataacgctacgagcactggggaaaagcaaatgagaaagtggctgcagaagtattttgtaagctgttataaagcaccagacaaatgacagtggttcagtcccatggaaaaactggtcacaatgggtgaccgctgggtcattacccaaggagttttttgtttgtttgtttgtttgtttgtttgtttcttgagacagggtcttgctctgtcacccaggctggagtgcagtggcacaatcacggttcactgaagcctcaacctcctgggctcaggtgatcctcccacctcagcctcctgaggagctgggactgcaggtgcataccaccacacctggctaataattttattttttgtacttgatcttagctaaaaggctgagaagtgatataattttatcttttgtagagatggggtcttactgtgctgcccaggctggtctcaaatggctgggctcaagggatcctcctgcctcaaccttccaaagtgctgggatcacaggcataagtcaccaagcccagacacctaaagatggctcatttctatgaggaatagaaatgatgtccctgaatccatttctgggacatggaaagacataacacaatgtttctagtacaggttgaatatgcttctcatttaaatacctagggggctaggcacagtggctcatgcctgtaatcccagcaatttgggaggcccaggcaggaggatcacttggggccaggagttcaagaccagcctgggcaacagggcaaaaccctgtctctactaaaaatacaaaaattagccgggcgtagtggcgcatatctgtaatcccagctactcaggtggttgaggcacaagaatcacttgaacccaggagatggcggttgcagtgagtcgagatcacaccactgcactccagcctgggtaacggtgcaagactccatctcaaaaaataataaacagcttgggaatcacagtgttttggagtttgcatttttttggattttggaatatttgcataatatgcttatcagttgagcatcccaaatccaaaaatccaaaatccgtaatgctccaatgaacatttcctctgaacatcaggctgatgctcaaaaagtttcaatttctggaggatttcgggtttttggtttggaatgctcaacctatatatcagtaactaaacttcctgtgtaaaatctgagaaacaaaccccatgccacattgcaaagcattgtaataagatgccaagaaatatctataggt

SEQ ID NO: 1879431 - DNA, 4001 bp, Homo sapiens
tctgtgtggtagttctatgggtgtatttacatgtaaagagtgattaagctgtgcacttaagatttgagcactttactgaatgtatattatatctcaaatttttaaaacaagaagaaaaaatcctgttcagaagtttatatttggagattcaaaatttaagcttacgcccaagatgccggctcttcattggtaatacattagtgatttgatgatgctgcagccaataattccctgcaaatatagtttttggcacacaattttagaaaaatgagcataacaggaaattgtaatcaaaataacttttccatacttattggtatcaatagtaataatataagctactgttcattatacatatgatatacagtatacaatatggtttcatttactttcaacaaatatttttgtcttttcttatagtcctgagttaaagaatcttcttcaagtacagtaacctgaacaaagcaaacagcccattatgagattgtcataaaaaaatttatttcagtctggatgttccaagtgcattaccaagggagattaaagaaaagggggaataagcctttctactataatggttttacttcaatttttaaaaaatagaatgctttcccattattgcttctttgcttctggtaaccagtcttcaggagtaattagtttgataattagttcgagatgtcatttaaaaagaagcaatttttaatggactaacttgaaaacaatcttttatcttatgctggatgatttttcttaatgaattaaataaacaatttctatgcttacagaaagtaaacagacccattcccaaaagtataaactctcttgccatctagggagtttcagatctgtttagggaactaagatagtgaaacaatagcactgaggaggctattgatagacgatgtgtcactggggtgttgtagacattaatcatgaatgctgaagaaattcaagaggtaaagtctgttgggggcaatttcattttcaaatgaatataatttcgttgggggacattcttcatgggataaaactcgacttctttaaagctgtaccctattaatccacagtgcaacccaaagactggaaaagcaaagtgaaaggcctctggttcataacccttgtccctgatttagtttcaaaaccatttctgctgttcggaattatgagaaaacgtcaattgagtctcagcagtagtcatggagaaatcacaacttaacccaaaacactgaaaaagagcttcagtgtcttatggagcctcaagaagccaaagcttttagaagtcccagcccctaaggcttgatgggggtggatggaagtcatcaagggagatctgtctaacagctatttagagtgtactcttgattgctgtttcctgaaaaaggagtcttgtaccagctacttgcggaaattagtgggtaaatttatgaacattaatatgatgttgggaaaaaagctgtgaatgttataatgtaaaattggggtggggaggggtccaggatggctgagtagaagcagctgtggtgtgtggctctcaaggagaggaatgaaagggccaagtgaatacagcaccttctattgaaatatccaggttctcgcattggtactgatgaggaaaacaactcaacttactgagaagaaagaaaagcagggtgggatgatggcccacctgggagtgacatagagtcgagggaatccctactcctagctgagagaagcagtgagtaaatgtgtgaccctggggaaccacgctcctcccacagatctttgcaaccctccaatcacaatcccttcgtgagtccacaccaccagggccttgggtccaacacacagaactgtgtgaaattttagcagagtagctgctcaggcgcacacagaaacccaggagctttacatactttggctcaggatcttcagcaagacgggaggtccgtacatacccctaggaagggggctgaatccagggggctgagaagcattggtctgtgggccccatttccatggtacctcacaagataagaggctggaattccactggcttggaattccagctagccaccggcaacagggtggagcctgcctgagacagaatggaggcctggtgggtagaggtaggccaccatctctgctgtttggtagactcagccattccagcctgcaggctttagagagtccgaatggtcctgatgaggaagggtcccagcacagcacagaatgtgacaagattgcttctttgatcagaaccctgatttgttcctcctcactgggcaggacctcccagttgggaccttcagctacccctgcctgcccttattctatggacagagctctgctctctccctgggatggagtgccagggtggggagttgcaaccttgtttgtttggatgactcagtcgttccagcctatggttttagttcaagccaataatggggcagaggcagttccccagcacaacatggctatgttgctgaggcatggccaaactgcatctataaacaggatctggattcactccttctcactgggtgggtcctcccagtcagaggacccccagcaaccccacccatgttctaccactgacagagttctaatatccccctgggatggaggtcctggggggtggggcaggccaacaccttggctgtttgggcatctcagccagtccagcctgcaggccttggagagcccaaaccagtcaggggctgaagagatcctcaacacagcatagctgctccaccaaactgagactaccagactgagactgctcttttaagtaggttcctggtcctgttcctcctgatggggtgagatcttccaactggggtctccagccacctcctacaggcacattcaggcaggcaacaagtcagtaccctcctgggatggagcattcagaggaaggggcaggctaccatatttactgtttcacagccttcactggtgatacctccaggtactggaaaaactgagacaattagggtctgaagcagacccttagcaaaatcgcagcagtcctacagaagagtggccagactgttaaaagaaaaaagccaaaacaacaacaaaccccacaaaaaccccatccaaagtcagcaacctcaaagatcaaaggtagagaaatccacaaagatgagaaaaagccagcacaaaaccactgaaaactcaaaaaaccagagtttctcctttcctccaaatgatcacaacacttctccagcaggggctcagaactgggctgaggctgacctggctgaaatgacagagttaggcttcagaatctggataaaaacaaactttgttgagctaaaggagcatgttgtaacccaatgcaaagaagctaagaaacatgatacaacaatgcaggagctgacagccaaaatagctagtatagtaaggaacataactgacatgatagagctgaaaaacacactgcaagaacttcacaatgcaatcacgagtattaatagcagaacagaccaagcagaggaaagaatctcagagcttgaagactgtctttctgaaataagacagacagataagcatagagagaaaagaataaaaaggaatgaatgaaacctccaagaaatatgggattatgtaaagagaccaaatctatgcctgattgggctatgtgaaagagatagggagaatggaaccaatttggaaacacatttcaggatatcatccgggagaacttccccaacttagctagacaggccaacattcaaactcaggaaatgcagagaaccccagtaagatactccacaggatcatccccaagacacttaatctttagactctccaagatcaaaatgaaaaaaaaaaaaatgttaaaggcagccagagagaaaggcaaggtcacctacaaagggaagcccatcagactaatagtggaaaccctacaagcttgatgaagaggttggggaccaatattcaaaattcttaaagaaaaagaatttccaacccagaacttcatatctggccaaactaattcataagcc

SEQ ID NO: 1879432 - DNA, 4001 bp, Homo sapiens
cacttctctgcagctgctgagagtcatttaggatgctggccacctggtacctgctcccccattgtgcctgtagatagaatttctgatgttagaatgataggagcttcttgctcaagagcttacggcgttttcaaattccagcaggtctgaggccaaccagtgtgaagatcccccacccacccagaaacagacttagaacaaaaaatgtagtttcttcatctccctgtcccaaggtatcactctgagcttctcgtctaatcagtgattcccacacttcaaccccagttaatacctcttaaaaacaaccccaaaactcttggggagacatagttgaagtttcctctggtctcctcattcagctgccctacaggtattaaactctgtctctgctgtatcccaagtgtctcagtttattgactcactgcacatcgggcaaatgaacctattatggttacaattagataaatgataattttaaagttcctaatttacacagatcagattgacaataagtagaaggttagatgatacaaatgctggttaagaatacattcttgtctaggcatagtggctcatgcctgtgatcccagtactttgggagaccaaggcaggaggattgctcagcccaggagtcaaagaccaggctgggcaacacaacaagactctgtctctacaaaaaaaaccaaaaaattagccaggtgtggtggtgcatgcctgtggtcacagttactagggaggctgaggcaggaggctgaggtgggggatcgctggagcctgggatggtgaggctgggtgaactacgtttgcagcactgtactccagcctgggtgacagtgtgaccttgtctcaaaaacaaaagcaaaagtaaacaacaaaaggaatacacttcccaagagagtccagactggcacagctatttggaaaagcagtctggcagcatagagggaaatttgatctgtatatactatttgagccaaaatgtacactcctgtttatttactccagagaaacccatcatatatattagaatactcaatccatctttctggtagccggcaactaagtgtttattactagaaaatggataaaggacacactggaagaatgcattagaatattccattgcagccagaagtaatgacttaaatagacatgcagcaacatggatacatctaaaaattcagtgctgagtgaaaaaaataagaaatggaatttgagcaatgacgtagtatcatttgtctggattaaaatgtataaagatgcaagcaaatattacaattttttagagatacatatatacctgatatatattaaacaaaatggaatgagtgcctctgcaggaggaaggaaaatgggaatggggatgggggtgaagagaaaaaaatatattaaacaaggatgagagcttctgtgagcctgtggagatagcatgcgatgacaaagaagcaggattaactcaactgtgtgcccttgaggttcaaagaggaatatatgaatccagcctccctctttttagccttttatctgaattgcttacagctcctaagaattttctgtgttctatcctctgccatggaaattgggaaacagttcctatgatatgttgatgccttggctgaattttaatttttctagatgggcctcaagaaacaagtaaatttatgtattgtgagaaaaaaaatctaaatgttaattagcccaaaaagaaaaagagttaaaggggagaatcgctttatgattgaattcatttgaatatctggcagaaagtagtaaaggtgagtggggaagggaaagtatggtaatttccattcagtgactggttcactggggttcagtcttgctttgaattaagtcttaggggaggcatattaagtttctaatctcattctcaggccaggggttaatgtctttctcctaccttatagtcctgagttttgggatatccctgagttcttcattgatcactggggcatgaccagcctttcaagaagccttggccttgcctgaaagtactatagcagcagcatctgtgcaaatgtgggtggtctttatgatgtcagaagacaaggtgaatattctattttcacaataaagcaccatctttgttgaatctgtgcctgtattggctagaagaaatcatgtgtgtaagggtctcagcacaataacaaaaatttctcatactaatttttaaatgcaaggttctaatgttttgttaatgctcagaccttctatttcagctctaaaagctgaaatttctattttagctataaagtctaagctcactatgcttgagaattcagccttttctgtggcacctctgcagtttgaaaatctctgcttcgtttggtctgaggagagaattgcatctttgtttctcattctgaaatttagacatgctgatttatttttgtggctcatttggggagttcatgtttatttcttttttaattgccactaagagacaaagtataaacttttgaaaaacttctaacacatcataatgaagaagcattaaacaatcataatgaatcataatgaagaagcattaaacaagaagtttaatgacataatattatttagcaaccatacttatttgtgttggaggacatatacacaaatgtaaacattatctgctgagttacaacagtacagaaaaaaatgaaacttctggtgctgttcaggataagctatttttttcttcaaatatcccattataaattttctgtgcagttttctttgcagacagaattctgtgcaagatttcagatttgaaatcctttaacccttaaaatggagtaagaaagctatgtggtaactgtaccaaaattggggaagcaacttgagcttccaattagcttaaattggagaattatagcaaattcagaaaataaaatggagacaatggaagaaccagttttcagtcagaatatgataagtgtgatttggggcatgctgtgtttaagattcccgcaaaatatttaaatgttgctgtggttgtggtagagcaattggctcaacaggacaaagtatggaatagaatatctatttggggggtcatctctgtggttcactgagctattattatatgcaaagcagtactgcatatatattaatcatcttataaatgggaaactgaggtaaggaaaagttgaataaattacctaagatcccagagttaatataaggcagagctgaaattcaaacccaactagttcttgagatgttatgtggttatcaaataactttctggaattaaaaaaaacctagcaggtcagaacatagaaaggatgtgctttttagtttctatcaacacacatcttatatgtgtactttgcccactatttatagtgaaagcaatttaagttttgtgccatgatgtgttatagtttcaggtgaaagcatattttattgagctactaaaagaataaatttgatttagttgagaagtacaagggctccaatataaattccatatagagtcatcccctggtatctacaacgtattagtcctaggacccgtgaagacaccacaatccaaggatgctcatatcccttacataaaatggcatagtacatagtgtcactgaactatgggaatttgttctgagatgcgtccttaggcaattttgttgttgtgtgaatgaacatcatagagtatacttacacaaatgtaggtagtatttatctacttaagcatatctaaacatagaaaaggtacagtaaaaatatggtactataatcttatgggaccaccatacgatatgcggtctgtccttgacccaaatattgccatgcagggcttggctatatttgcatgtaacctaagcacatcttcctgtgtactttaaatcacctctagattacgtgtaatacataatgcagtgtaaatgctgtataaatagctgttatgttgtattatttttactttattttatttttttaaggctactcaaatgaagcagtgggagtggagaaaaaacaaagaactctgtactggttgt

SEQ ID NO: 1879433 - DNA, 4001 bp, Homo sapiens
tatatagatagttgagaacaaacatattttgtcttgcaatatgccacttgactacctctcttctgaaattttatactactgatttctagaatactgattttctaaaatgaagtttatcttaccaataacattttagtattatacatttcagatgatttttcagtcatcctgttttcatcaggaatgcattttgtgccaattagcttattctttgtcattaaatttagaggataataaattgcagtaggataataacaatagacaagaaagtttaatttaaatgttttaccagtaaaatatattttataattaaaaatgcaatgatttttctgagagcaaatctcccttaattttgtgcatcaaaaatggtcagcttactcttgaaaaccaagttcacacaatttgcaaaacatgttattctctacacttaatgacatatgatgtaagcacaatcaagagccgtttggcttcttccctactgctacaccaatccactcttcacattgtgagcgtgcacaggctgggggtgctagagactcatggaaaaccagagggctttatgaatttgtagtaccaccacaatatgccattgtggatactactaatttgtatctggtgcaataattggaaccgagatgcacatttaataagtggtttctatagctttaatatacctgcgaaatgtgaaaaataaccattcttaattttggaactgaaattgtatttcagaacatggccaagacatactaaaagcatagacatgagcccactacctaaaactcttttctttattttcagaaaggaaagacagttagtaggaaataagggaaatacttaaataccacttttggaaacaaacagggatttaactgctttatctgtctttgagtttttaatgcaggatataaaggaccttaaagcgttcatattgtctccttaaaaccctctacttcaatttcacccttacaagctactactctcctagggaagaggaaaaaaaaatttccactgacccagctcgtgatttacatacagagagcaaataaatgaatggagtgggggatggggcagtgagaagcaatctgtttctttttcaaccgcagaaaataagattacttaccaagaacatttttatccagggcaaatgtttattccctctatcattcagcgcctcagtctctgcaagaaatcaatttccactctacctttccctcctatttctaaaaaagagagtgaggcggataattcttaagcttcggggtccggaggaagatagagctagagcggagggcaaaagactcccacagcgctctttatacagatcccagctctgagagcgaacccatggggagggggcgggggatcatctctaaggagagtactccgagtagggagggggattcattctgcagccaaaatataaatcatctacaaacagattactagcctctcagtcacacaggcagttcccttgggaaaccggtttcaaagaggaagaagttcctggagagagagagagagagagagagagggagggagagagagagagagagagagactggggtttggacttgcagagggaatggggccaaggagaggaatagggagaaggaataaagctaatcttaccgatcgatcaggcgatcgtttgttcagtattgggacacgaaaatggcaagataatgcattcggcagcaaagccatttctggcacactctctctcagttactgcaggaatcagaggggaagcgggcgcctcgaaacctaccacttgctccccagggaccgtcctcagaacctccaaagctctagcttctaatgcaaggcgttcggagctgagggttcaggtggaagtcaattgtcttgagtcacaggcagcaggaacgccaaagaagtgggacctgggagggctgctgccgccgctgctgcatctaaccacggttccccgtccccttgcctaagcctcaccggcacagcgcccccgaaagcgcctagcgactcggcctcctccgcatcttcagcccttcgatcaccgcccgcaccccccaccccccaccgcctcgtgcaaatcgctgatgatttggtcatcgtaatgtgaccggtcgtagtggtttatttggggagtgggggaattggttgtgttgggcttccttactacgcctccctcagttgctgcaagtgaaaatgttcaagggaaatactagtgaaatgcactgatggaatactattaatcctaatgataatggtcccaacgcaggtaactcttaaagaactgagagtgggaagatcagagcaggatttccgaagtggtgccctcttgaattctcattggatcctccccagcagcctaaatcattcttgctgctatatctatcaggatgactacagccttgctcactagttctctctttatctcgttgtcttcaacacatccttttacttctctttgcagatttatctgtattccacctcctgttctctggggttacacagcttctgcctttccccactgtatggggatgtgcagcctgtaaattttcactttgcttaaggatcaccacgaatcaccccccaccattccccacccccccatataaagcattttcacattctgctttcttgccttgggggttcgtggctctctgtgtaactggtttttacttggttacatgccaccaggaactgctgattattttaaagtcctactaccctgcagctcactactttaccttgatttggaagatcatggaatatctatttgaatcctggatgtatttttctcacagtcttcttgcttcctgaaatttcctctggtaagttattctctttatctgttactagaaacttaactattgctatttttaataagctctgttttgttgaagtatttcatttttcacatttttgttactttcagaactgaaagatccatatggccatatttattaattagtatgttagtggcaactgcactgctaagacataacccatgtaatgtattaccccaatatcccatgtattaccccaatatcttttaccttctttatttttaaaatatttgtcctcatttatattatgggttacacggacattaatcgcccccacccccattaacccttcttggcacacattcctgtgccatttgaaatgtcacattttataggtttatctaagagagagcttaaaagagaccttctgacaattgcaaggtctggaaagttcgctagtcggatattcagaaggttgttcaggtcagcatttgttcatgataagcaattacatgactgaaggaagactttgttgcaaagtgtatttttatgaatttagcaagaccttaagcactaaaatgccactgaatggtaggaagaggactgtgagttttgagggcaccatttttttttcttaaaatatttcaaatcacacataagcacgttattttaggcattgtattttaattcaggcatagtatttgtcagtacatttctgattttgtgaattagctggtgaacagttaattggacacagagtactcatttcagagaggagcaatcagaagaaacccctgattatcttggttctgataaattgaaattcaagaatagactttacatgaaaaatttaattgcctcactcttcatacttgtctgcccccaacccttgtgtttaataggcatgttaatatggtcagtgccttttgcttttatgaacatttctatggacttaactgacaagattatcacctcctcttccgtatagttgtgttgagaaacattttaatctttacttttacttcacaattgacacataatgaggaaagcacgatattcattaaatgccaaacctgcatgtatcggtaatttttaacacccactgagggttttctctgaacatccgccccccgccctcaaattaaggacaagttcctggtctctacaacatttccttttcttgggatacatggaggtaagaacctattgttcacgcttttcttttcctttttt

SEQ ID NO: 1879434 - DNA, 4001 bp, Homo sapiens
ctctctaactctcacaattgttaaggtttatttgcaatgaaagtaattcagaattttcatcctctttatgtgaacctcagatcctcttagcagcatttgccagcctctctaaaacacagagacatacacagacatcatcctcttgttaaaatgagacatcagaagaaacacttctgctctaggacatcattagagctggacaacagcctgaggagagaaagaaaaaagtgttataccaacatgcccttagtgaattttttttctcttgcaaatgttgatggctataaagactatatagatagttgagaacaaacatattttgtcttgcaatatgccacttgactacctctcttctgaaattttatactactgatttctagaatactgattttctaaaatgaagtttatcttaccaataacattttagtattatacatttcagatgatttttcagtcatcctgttttcatcaggaatgcattttgtgccaattagcttattctttgtcattaaatttagaggataataaattgcagtaggataataacaatagacaagaaagtttaatttaaatgttttaccagtaaaatatattttataattaaaaatgcaatgatttttctgagagcaaatctcccttaattttgtgcatcaaaaatggtcagcttactcttgaaaaccaagttcacacaatttgcaaaacatgttattctctacacttaatgacatatgatgtaagcacaatcaagagccgtttggcttcttccctactgctacaccaatccactcttcacattgtgagcgtgcacaggctgggggtgctagagactcatggaaaaccagagggctttatgaatttgtagtaccaccacaatatgccattgtggatactactaatttgtatctggtgcaataattggaaccgagatgcacatttaataagtggtttctatagctttaatatacctgcgaaatgtgaaaaataaccattcttaattttggaactgaaattgtatttcagaacatggccaagacatactaaaagcatagacatgagcccactacctaaaactcttttctttattttcagaaaggaaagacagttagtaggaaataagggaaatacttaaataccacttttggaaacaaacagggatttaactgctttatctgtctttgagtttttaatgcaggatataaaggaccttaaagcgttcatattgtctccttaaaaccctctacttcaatttcacccttacaagctactactctcctagggaagaggaaaaaaaaatttccactgacccagctcgtgatttacatacagagagcaaataaatgaatggagtgggggatggggcagtgagaagcaatctgtttctttttcaaccgcagaaaataagattacttaccaagaacatttttatccagggcaaatgtttattccctctatcattcagcgcctcagtctctgcaagaaatcaatttccactctacctttccctcctatttctaaaaaagagagtgaggcggataattcttaagcttcggggtccggaggaagatagagctagagcggagggcaaaagactcccacagcgctctttatacagatcccagctctgagagcgaacccatggggagggggcgggggatcatctctaaggagagtactccgagtagggagggggattcattctgcagccaaaatataaatcatctacaaacagattactagcctctcagtcacacaggcagttcccttgggaaaccggtttcaaagaggaagaagttcctggagagagagagagagagagagagagggagggagagagagagagagagagagactggggtttggacttgcagagggaatggggccaaggagaggaatagggagaaggaataaagctaatcttaccgatcgatcaggcgatcgtttgttcagtattgggacacgaaaatggcaagataatgcattcggcagcaaagccatttctggcacactctctctcagttactgcaggaatcagaggggaagcgggcgcctcgaaacctaccacttgctccccagggaccgtcctcagaacctccaaagctctagcttctaatgcaaggcgttcggagctgagggttcaggtggaagtcaattgtcttgagtcacaggcagcaggaacgccaaagaagtgggacctgggagggctgctgccgccgctgctgcatctaaccacggttccccgtccccttgcctaagcctcaccggcacagcgcccccgaaagcgcctagcgactcggcctcctccgcatcttcagcccttcgatcaccgcccgcaccccccaccccccaccgcctcgtgcaaatcgctgatgatttggtcatcgtaatgtgaccggtcgtagtggtttatttggggagtgggggaattggttgtgttgggcttccttactacgcctccctcagttgctgcaagtgaaaatgttcaagggaaatactagtgaaatgcactgatggaatactattaatcctaatgataatggtcccaacgcaggtaactcttaaagaactgagagtgggaagatcagagcaggatttccgaagtggtgccctcttgaattctcattggatcctccccagcagcctaaatcattcttgctgctatatctatcaggatgactacagccttgctcactagttctctctttatctcgttgtcttcaacacatccttttacttctctttgcagatttatctgtattccacctcctgttctctggggttacacagcttctgcctttccccactgtatggggatgtgcagcctgtaaattttcactttgcttaaggatcaccacgaatcaccccccaccattccccacccccccatataaagcattttcacattctgctttcttgccttgggggttcgtggctctctgtgtaactggtttttacttggttacatgccaccaggaactgctgattattttaaagtcctactaccctgcagctcactactttaccttgatttggaagatcatggaatatctatttgaatcctggatgtatttttctcacagtcttcttgcttcctgaaatttcctctggtaagttattctctttatctgttactagaaacttaactattgctatttttaataagctctgttttgttgaagtatttcatttttcacatttttgttactttcagaactgaaagatccatatggccatatttattaattagtatgttagtggcaactgcactgctaagacataacccatgtaatgtattaccccaatatcccatgtattaccccaatatcttttaccttctttatttttaaaatatttgtcctcatttatattatgggttacacggacattaatcgcccccacccccattaacccttcttggcacacattcctgtgccatttgaaatgtcacattttataggtttatctaagagagagcttaaaagagaccttctgacaattgcaaggtctggaaagttcgctagtcggatattcagaaggttgttcaggtcagcatttgttcatgataagcaattacatgactgaaggaagactttgttgcaaagtgtatttttatgaatttagcaagaccttaagcactaaaatgccactgaatggtaggaagaggactgtgagttttgagggcaccatttttttttcttaaaatatttcaaatcacacataagcacgttattttaggcattgtattttaattcaggcatagtatttgtcagtacatttctgattttgtgaattagctggtgaacagttaattggacacagagtactcatttcagagaggagcaatcagaagaaacccctgattatcttggttctgataaattgaaattcaagaatagactttacatgaaaaatttaattgcctcactcttcatacttgtctgcccccaacccttgtgtttaataggcatgttaatatggtcagtgccttttgcttttatgaacat

SEQ ID NO: 1879435 - DNA, 4001 bp, Homo sapiens
cccataataaatctctttacatatctatccaatgggttccatttctctggagaatgctgactaacacagatccccttcgatcaagcacgagccctgagttggccatggtcctacctgtcataatgagagaactcttctcatttgtgttatgggtcctggaggcatttgattattggtctggtcattcacaggaaacccatgtagaaacagcaagcatacctaggaaaactaggagagaattcccagagttctaagggcttatagaagtgcagtgtcaatgaatgcaggattgaaccaagctggagagagggaggctggcctgcagaagaagatatcctttactggtacctgaattggctcctgccaagtttatctctgctgatgaggaagctttgcctctagtttctctcctgagaagggagagtttcaatcaaccttggcttttcataaaggacttggggctgctggctgaatagcctgtgtgttggggttcacccatggggattttcaaggaggcctgaatcttctgatccatccaatctctcattttacacttgaagaaactgaggctgagaaaggggaagtgacttggccaaggccacacagcaaggtcaagatccaagactaaaaccaattgcttctctgttttgcttattactacagcacagaaataaagaaatagagaatgggagaggagaggtaggtgtggggaggcgatatgaaaacatggaacaagtgctctgcttttagaataactagaactttgagcccagaagatttcttttcttttaataaataaatgttttataatcttacttctgtggctggtgggaaaaaaagtccttcaagtccccaaggaatgttaggaaaacctccattaaattctagtcttcaaatctgagtcataataactataataaactctgggagtgtttccttagagtttctcttttagggtggagaggaggcagcaaaaagaataggcaagttttcacaagaaaaacttgtaaataggcaagtataacaagaaaatgtataaaccgggatggcttcataattaggcatagcctaattgtgcttatgtgtctagtcaagaaactctatctagagttccaggggaagaaggtgttggggatgagggagtaggattggtttgagggtagtagactatataaggcatcatgctccttcccatggaggggatgtatgatggttaatattaggtgtcaacttgattagattgaaggatgcaaactattgttcctggatgtgtctgtgagggtgttgccaaagatattaacttttgagtcagtggactgggagaggcagacccaccctcaatctgggcgggcaccatctaatcagctgccagcacagccagaataaaagcacacagaggaacatggaaggagtagacttgctgagtcttccagccttcatcattctctcgtgctggatacttcctgccctcgaacaacagactccaagttcttcagcttttggactcttggatttacaccagcagtttgccgggggctctggggccttcagaaggctgcactgtcagcttccctacttttgaggtttggggactcggactggcttccctgctcttcggcttgcagacagcctattgtgggacttcaccttgtgctcatgcaagtcaatactacttaataagctccccctcatttatacatctatcctgttagttctgtccctctagagaaacctgactaatatagcatgtgtatgtgcttttccctttgcttggaatgcttgtccccactctgaccctaagcaccaccacaaccttccttcctggagctcaggctgttatcctccagggctctgctgattccctgggcaccccgcactctgcttcacagcactcatcacatttgtcacttgtgtaatttgttgcttatcccaggcttccgtattacatgataagctccattaatgacagtgttgtctgccttggttttgttcatgatgagcacagtgcctggcccacagtaccagctcactaagtatttagcaaagggctttatgaggtcatccctggctccagcacctcacaatctttatggtgactgttcagagggcagctaagcagaaaagaagttttcaacaaggctgtttctggcctgttttccctctcagtactacatggcaagtcacgtctccaaactgaggagtgtgcctgaagagtcaggtctggcagagaaaggatttcttgccctaggtttaaacaagcaatgtcaacataacttccaaaggcatcggctgcttggaagaagtgaatcccttgggtcattcccttgattattgtgaacccgtggctgagcaggacagaaatgtcacacaggtggactgagaacaaaatgatttcagatatgggagccccaaagtggcatcccaaggacaagtgctcagaattgcatgacttggttttctgttgagctattctgtcttggataattacagcatgagctcttggccagtggtgggaattaattggttttaattctcccgcaaagattctcttaagtaaaagtaaaacatttgcaaactggagttctttgagttattggtaacaacttactttgcacctcatagcacactggttaatagcctccgccaaataactaatatttaggcactttgctaatgtatgcaaagtgcttttaagtattatgctattaaatcttcacaacatcacaggtaggtattagcaccatcttacctattttatggatatccaaacagaggtcttcaaaagttagaaaatctgcacagtcacagagccagtggagccacagctgaggcatggacaggctgctctcctaccacctgccaggccgctcttgcccagctcatgaggtccaaagttttctcaacaaactgcttggtgtcgatgttgtaacctggagcattgccctgcagcagaaaggcaggcctggacattcgcatgtcagcatggggcgaagctgataatttccagttgggatccaagaaaaagaaaagctctccacatgccaacaacattgttatgaagctctcttgacccagctacccaacagtgatctcaaacatttggtctctccagtgtgtgtatgggggtggggggcagctgggcgtgtagccttgtacactttgcacttggagaggtagggacaggggtctaaattaagggaaaccctgcccaggggctggctttgggaagcatgcccagcagccatgtggaagttcactgcattacggtgaattacaccaggtggggtgagtacaggacaaggaagtagaagtcagagcctgcttttcaaaatcaccctgcaggctgttgtccccagaagaagagatcaacctcaggggagaccagagtcctaaacacaaaacaaaagagtaataagggaggaagcaaatgaagttgcttatctcatttatttatttttctctcccatttccgcctatgctcctccaactgaaccccccctagtctctggtttcctggccactatctggccaataacctccacattagcatccccagcccctctgtgccccctgtaatctcttctccaggctttgctgaggactgtatttactgccacacaggatttccgtaggtgataacagcagggcctggttggcttgaccctctgttcagagccaacccttggcttcttatggtgtcctcttacagcaagggaagaatcttagtttctcccaagaatgtgactctctttaagtgtcttacctacactcaacaactaagcaagcctcttgatgagcagcccttcactctcacatcctcaacactgtggactgagaatttacatttttttaaaaaggcagggcacagtggctcatgcctgtaatcccagcactttgggaggctgagatgggagaatcgtttgaggccacaagtttgagaccagcctggccaacacagggagactccatctctacaaaaaaatttttaaaaattagccagg

SEQ ID NO: 1879436 - DNA, 4001 bp, Homo sapiens
tttccttgtctgaaaaatagaagtaaaagtattaatcgtattgattcttttttttttaggcagggtctcactctgtcaccccaggctggagtgcagtggcaggatcacagctcactgcagccttgaccttctgggctcacgcgattctcccacctcaacctctggagtagctgggaccacaggcaggcaacatcacacctggctaattttttgggtatttttttgtagagatggggttttgccatgttgcccaggctggtctgaaacttcttgagctcaagcaatccatctgcctcggcctcccaaagtgctggaattataggcatgagccaccgcacctggcctgtattgttcttttgaagataaaaggagatcacgtttattaagcattctgcacatatgttcactctttccacaatatttgcacacccagcgcatagtaaacacattaaatagtggcttttattactattagcagtggtagcagtatcataaaagtcctcaaggacaccacatggagagttagtcggagtcaccaggtgttccaagtttgcctttggcggtctcctgcctctcagctttcttcgaggttgctctggtacctcatcacctccaccacctcctccaccatcccgacctcagcctggcctggaagaaagtgcaatgagtgtggaagcacaagaccgatgcttccaccccagctttgccctgccctgggccattccacccttctgagcctccatttccttatcactgaaatggggagaatactttctggctggcttcgtttattgtgagagtcaagagaataaacgtttgtgaaaatactttgaaaacagcccccacctatcagttctccaccaggtgaattctcccctctcatcctcggcaccagctcctaccccattcctccccttcgagtctctctctgtagattttcatggctttgggcattttgttcacagctctgttgacattcccttgacctcagaattctggaggtgccttaattccgacttcccctatagacgcctcctcagggcaggaaatatgccttattcattcatcctgtgattccagtgccaggcccaggaagggcacatagtaggagctcagtcagcgctgattccctttcttctaccagcaaatcccagggatggaggcctgaaaaagaacccagtagaatttaggggagcagactctgtcctccaagagagaggggttggggaagaagggagacaggaggaaaggaggggagtggccctttgctatgcaggccaaaggatgcccgctgtcaccacacacaggcgcaaggtaataccagtctccatagggtgacatggtgctgactggttttactcagcgatcccaaggctgggagaacctctgagagcctcagcagagggccaagccactcttcctggtaggaaagcagacattctgcctaaaagggaagtccttgggtaacaagttccacttcatcacagccagggcactaacctaaaaccctaccctctcctcctcccccaccgcacaggcaaaccatttcctcttctgctgagctcatggaaacaaagaacagctgtcctctcattgattggtttaaaaataagagactcttgctttacctccccaaccccccacccagacctctgatgaccaaacatctcagcacagtccccctcaggcctccacccactcccctggggacagaggggcagcccctgggccgcccacaggctccctcctcctccctgtggggaccagcctctgcctgccactgagccacacccgtctaccttcggtggggtgactgcagctgcccagccactggctcttaccagtgtggccttggcattcacactttggccaccataattttgtctctgcagtgggccttgcacaaggctgggaggaaacagcctctgtagaaatcaaggtttcctgctctgtgagggctgatgcggtgccatggagatacttcctgtgactttgccaggcaaactggaggccaggggaaagatcgggagtgtgaagtcctgacttctcagctactcagaaacccctctaagcctcgatgttttcatctgaaaaatgacagtggcaaactgcttatagagggactgtcaggatcaaacgagatatggttatgaaggcgcattgaaaacggtgccaccatggacacacgagttgctatttctgcctgccacctccacagaccccagttcaccaccagctgcaatctctacaagtggccctgccttcctgaaaaccccaaaccaagacttgcctccctgggcatctgagtccaccccatcctctctcctcgggcttacttactcaacctacaccacagggaaatgcaccagttgcttaagaggtgtggaaagtttcctccagttttttccatggtttgtgtgcttgtcttacctgtcccgcctccttcctagcaccgtgggagtataagctggctcctctgcaatggatccgtggccagtacctctgttccctcacagcacaggataacaataagtgtgccaaatggaagtgtgcgtgtgggagagggcacacagccagatggctccttggggcaaagccttatttctaccacataggactttgtagacaatcactctctggctatagaggggttttgtgctcattttctgttgtgaatcaagctaattttggattcactgggatacaatagtgaactgaaaggcagctgcctgcaggaggagctcagagaaccaagcagagccaagccctgggaagccttttagaggaagatttgcagagaaggagtgtgacagtcataagtgtcccacgctctcagtcctcagcaggctgtccctcccagtcccaggttcaccttgcagaggtgtggtggagaacaagcgtgcccagcagcttcccgtctgaaagccaactggcacagcccacctccagtgggccacccatgtttctggggccaatgagcctctgagctgggaggtcctggccaaagaaatgccctcctgcctcagagaacagaaagttccagaagatccagggtagctttattcctgacttagcaagcagacctagaagtgggatggagaagggcttttgaatctccctccaaaggtccagagaaatctccttggaaatttgattgattattgattattgtaacaagagtttctcctcccccaggaagctcaccagagtggtcttcttctaatagaggcggaactgtgtgatgggtggtcggaggttccggctgctgtgccagaccgcttgggttcaaatcttatctttaacagttacctaatattcgctgtgcttcagttgcctcatccataaagtagaaattacaatgatatctatcacattggattgtttttgattaatgagttactatgtgcaaaacacttagggctcagtattgttattataagaaagaactttacttaagaggcttcctagtttaatttctctaccattatgaaaagaaattctctccctgattccgacacctttgtttctttctttttctttttttttcttttttctttttttttttaagagaaggggtctcaccttgttgcccatgctagtctcaaactcctgggctcaagccatccactcacctcagcctcccaaagtgctggggtaataggcatgatcaatatataatatatatgacattatatataatatattatgtttctcctggcctctgagctccaggttcagcaagaggagaatgctcagttccttcctgtggactaaaagccacaggagacattcatcaacagcaatggggtgatgagagccatttgggagtattaggaagtggaaggtctgagaaccttttcaaactaagaaacccacctggccaaggtgtccctgacttgactcattcagtccctatcctgccatatatttattataactatattatatcccagaactttcacatttattgtgttatttaatcttcatgatgatcccacaga

SEQ ID NO: 1879437 - DNA, 4001 bp, Homo sapiens
gtccccagggcctcccaaccatcccttcacacccacagtgcttagccacccacattcgctcctctatctaaggtctacttcctctctctacttcccctggcccagtctctccacggtagagagttgtctggggggacaactcaccccatccccaagctctgggtgctgtgatagagtgggagtttgaggcatgaaaaatagctagtggccctccttggcagggcattggccgaggatgtggcaagtttgctttggctgtgggcacggtccctgtctctgaggcttaccctcacggtggctggtgaacatggttttatgcctgggaattttaaaggatgtgggaggggccttccttcctcaggagccagtgtcctgggactggatgataccaaaggtgttgaagaataaaaacaatggggtaatgtttgtgtttctgcctggacagtactgcatagcggttatgggtgggctttggggtcagatgggaccttagctctgccacttgctggtaggtcttctggcaagttcctaacctctctgagcctcaatttccttgtctgaaaaatagaagtaaaagtattaatcgtattgattcttttttttttaggcagggtctcactctgtcaccccaggctggagtgcagtggcaggatcacagctcactgcagccttgaccttctgggctcacgcgattctcccacctcaacctctggagtagctgggaccacaggcaggcaacatcacacctggctaattttttgggtatttttttgtagagatggggttttgccatgttgcccaggctggtctgaaacttcttgagctcaagcaatccatctgcctcggcctcccaaagtgctggaattataggcatgagccaccgcacctggcctgtattgttcttttgaagataaaaggagatcacgtttattaagcattctgcacatatgttcactctttccacaatatttgcacacccagcgcatagtaaacacattaaatagtggcttttattactattagcagtggtagcagtatcataaaagtcctcaaggacaccacatggagagttagtcggagtcaccaggtgttccaagtttgcctttggcggtctcctgcctctcagctttcttcgaggttgctctggtacctcatcacctccaccacctcctccaccatcccgacctcagcctggcctggaagaaagtgcaatgagtgtggaagcacaagaccgatgcttccaccccagctttgccctgccctgggccattccacccttctgagcctccatttccttatcactgaaatggggagaatactttctggctggcttcgtttattgtgagagtcaagagaataaacgtttgtgaaaatactttgaaaacagcccccacctatcagttctccaccaggtgaattctcccctctcatcctcggcaccagctcctaccccattcctccccttcgagtctctctctgtagattttcatggctttgggcattttgttcacagctctgttgacattcccttgacctcagaattctggaggtgccttaattccgacttcccctatagacgcctcctcagggcaggaaatatgccttattcattcatcctgtgattccagtgccaggcccaggaagggcacatagtaggagctcagtcagcgctgattccctttcttctaccagcaaatcccagggatggaggcctgaaaaagaacccagtagaatttaggggagcagactctgtcctccaagagagaggggttggggaagaagggagacaggaggaaaggaggggagtggccctttgctatgcaggccaaaggatgcccgctgtcaccacacacaggcgcaaggtaataccagtctccatagggtgacatggtgctgactggttttactcagcgatcccaaggctgggagaacctctgagagcctcagcagagggccaagccactcttcctggtaggaaagcagacattctgcctaaaagggaagtccttgggtaacaagttccacttcatcacagccagggcactaacctaaaaccctaccctctcctcctcccccaccgcacaggcaaaccatttcctcttctgctgagctcatggaaacaaagaacagctgtcctctcattgattggtttaaaaataagagactcttgctttacctccccaaccccccacccagacctctgatgaccaaacatctcagcacagtccccctcaggcctccacccactcccctggggacagaggggcagcccctgggccgcccacaggctccctcctcctccctgtggggaccagcctctgcctgccactgagccacacccgtctaccttcggtggggtgactgcagctgcccagccactggctcttaccagtgtggccttggcattcacactttggccaccataattttgtctctgcagtgggccttgcacaaggctgggaggaaacagcctctgtagaaatcaaggtttcctgctctgtgagggctgatgcggtgccatggagatacttcctgtgactttgccaggcaaactggaggccaggggaaagatcgggagtgtgaagtcctgacttctcagctactcagaaacccctctaagcctcgatgttttcatctgaaaaatgacagtggcaaactgcttatagagggactgtcaggatcaaacgagatatggttatgaaggcgcattgaaaacggtgccaccatggacacacgagttgctatttctgcctgccacctccacagaccccagttcaccaccagctgcaatctctacaagtggccctgccttcctgaaaaccccaaaccaagacttgcctccctgggcatctgagtccaccccatcctctctcctcgggcttacttactcaacctacaccacagggaaatgcaccagttgcttaagaggtgtggaaagtttcctccagttttttccatggtttgtgtgcttgtcttacctgtcccgcctccttcctagcaccgtgggagtataagctggctcctctgcaatggatccgtggccagtacctctgttccctcacagcacaggataacaataagtgtgccaaatggaagtgtgcgtgtgggagagggcacacagccagatggctccttggggcaaagccttatttctaccacataggactttgtagacaatcactctctggctatagaggggttttgtgctcattttctgttgtgaatcaagctaattttggattcactgggatacaatagtgaactgaaaggcagctgcctgcaggaggagctcagagaaccaagcagagccaagccctgggaagccttttagaggaagatttgcagagaaggagtgtgacagtcataagtgtcccacgctctcagtcctcagcaggctgtccctcccagtcccaggttcaccttgcagaggtgtggtggagaacaagcgtgcccagcagcttcccgtctgaaagccaactggcacagcccacctccagtgggccacccatgtttctggggccaatgagcctctgagctgggaggtcctggccaaagaaatgccctcctgcctcagagaacagaaagttccagaagatccagggtagctttattcctgacttagcaagcagacctagaagtgggatggagaagggcttttgaatctccctccaaaggtccagagaaatctccttggaaatttgattgattattgattattgtaacaagagtttctcctcccccaggaagctcaccagagtggtcttcttctaatagaggcggaactgtgtgatgggtggtcggaggttccggctgctgtgccagaccgcttgggttcaaatcttatctttaacagttacctaatattcgctgtgcttcagttgcctcatccataaagtagaaattacaatgatatctatcacattggattgtttttgattaatgagttactatgtgcaaaacacttagggctcagtattgttattataagaaagaactttact

SEQ ID NO: 1879438 - DNA, 4001 bp, Homo sapiens
acactggttagtaggtagcaggaaaaccagtcttgccatttggaaacaatagtgagagctgtattttcttcctctttctctccctgcctcacacatacagttgcccaaaccattgctaataggcaggtcctattgctaacatcagcaatcatatttagacacatcagatagctattccaaggaggcatttttaatttctctcccagctaaagctgtcaccttggacaggaagcggtgggttctgtgcaaaaccacaggaaaaactttccctagaacactggatttcaagagatgcctatgccctttctaagcttgtagacactttaaagcagtgctgaaaactgtgcctggcacttaatggggacacagtaagcgctcagcaaatatggaatatgcacaagtagcatcagcttttgaaaatgctctttgctttataatgtcagaagaagtccaggtgcagtggcttgtacccacaatctcagcaatttgggagaccgaactattgggattgcttgaggccaggagttcaagatcagcttgggcaacatagcaagaccttgtccctaaaaaaaccaaaaaaacaacaaaaaaaattagtcaggtgtggtggcatgtacctgtagtcccagctacttgggaggctgaagcaagaagattgtttgagcccaggagttggaggctgcagtgagctatgtttgcaccaccacactccactctggagtgacaccctgtctctaaaaaataaacaataaacaattaattaattttaaaattaaaaaaataaaatatcagatgaaatggtcagtgtattaaacacttatcaatggattcgaccctaaagcttaacttttagtgattctttctaatattagctttattaaccaaagtgtgggattttccggttgctcttttgacggctagctgataggatgaggtaggggcagggacaggagagagttgggtgggggcaatgaaagccctggcctggcggacatagtttcagtctgctctgcagaagttaaagtacgcctgggaagacaaggcagataacgtagcacgcaactgagctcatgagtggaggagagaaaagagaaaatgtgtctctgtgggtaacccctgggggagcccattttgcagtaaatgcagaaacagtattattaagtcaggatgagcgtaagaaggactgccagaaatagaccccgcccccaccccccgcaccgccccaggtcactgcacctgcccaaaccttgattctctcccttgaaaaacagggacgatgatagcacctccctcagcgggctgctgtggtgaggattcagcaagataatccacgaggcttccaggagatgaaggatgctcagtaaatatttgtgatgattattcacagagatgaacctaaaagctaaatgccacgagtgactggctggatgttacaatgtctggggaatgcttcgcagcctgacccttattccagaaagttctgtgagtatcctcatgacctcactgaacgtcagcgccgactgctcttacttaacaggggagagccacagactctgcagtgcgtggcaggcagggcctgtcactgtctactgttgtcgctgtggctgtagcagtggaggtggccgggccttctttcccacctccccttcttccccatggtcagccccgctcccaggctccgtctgtgcccctgcagctccccagcggtggcctttttgttcagtgcttcctcggcggctgggactcaccctgatttaaaagctccagacgtgttctcggcagcccgggagcacaggagtcaaagcaagaccaggagcgggttgctgagaggacgccacgctgactggggatcgagagggtggcttccttcaaacagagaaaggaaaaagccccttgaaccaatctgaatgtaaaatccaaaagctatggccaccgcgaggaaaacaacagtcatgatgcgggccaggaggccgtcgccgtgggaatgcagtcggccctgcgcatgtggtgtctgagcagggcccgagaccttccagggaggggagaaatactttttggctgactctcctgactctgtgtttcctacaattctacaacaaagatccaggaacatgagaaaaggaaaatgagaaaatgagtcctgtgatccaaatttaagccaagaacaggacaggcaatgtgagccaaatagaaatgaggccaagagtgctttcttggggccccagcttttttttttcttttttcgaatgcccaaacctgtttaactgcttagtgtgaactctagttctgggatacagttcactatgggaaaggaaatttaattagcactggcgacctcaccttcattcttaggtcaatacagtaaactggcatatgaatagtgatttctaccaattgattcctgaaggaaaagagagagaaaaggagagaggaagacacacacacctacacacacacacacacacacacacacacacacacacagagacagagacagagagagacaatgaggcacagagaaacaggcagagacagagagacagagagacagagagaggggaagagagacagagaaacagagacagaaagaaagagacagacagagaaagagagacagagaggcagagagagacagagaagcagagacagaaagtcagacagagaaagaaagagaggagcaagtgacatactttaaaaattattcttgagagaggtcaacctgcatcagctgcagaaatcaacaatcacttggcagtgtcagctgtaatacattcccacattgcattctgcacgggcattgactatcttgacccacactctctatatcatgttcacagtaacgtaagtggtcagatttctacaattaggccttgcaagataataatgacaagccgtattcgtatattgctttactgtttgcaaagcagttgcataattatcattacgtttggttcctcatgactgtgctgtgaggaaggcgttcctgttcccattttagaagtgaggacacaaagttacaagtgtccaagccagaacctgatgccaaatcccatgacatttctgccgtactgggctctgccatgccctgggaggatggccacctgcaaacacaacctttctcctaacagagagagaaactgagacgcaagctcgagtagcaacttgatggaatggcacagtggggaccactagctcttagaatacgtcaattttgattggctgaaattgacaggagtatctaagacaaaagatactccagaaaataaagggatcggggagggatgatggagaagtgaccttacggttatcatgaaaagggctgtgtgtcaagacagcattacacctagtgggaattggaaggatttagctgtactttatgtctcagaatgtgctaatgtgattacctcatattagctattatgtgtgccctatgaataatgtcatcccagtgcttctggagaataggagtggagctgcaggcccttcaaaacaatcctaggcagagtctgagtaatcctgcacatctgaatcaccagcaaaagacaagtttcaatttggattcagaaaatacatgatgcaaacctttctcagccctggaagggagggaaggcatgggaagaagcaggattggactggaaggactggctgtctttcctgcgtgctctccctttgacctgcttggcacaccctgcttccaaaatggcccatgtggttgacagtctgcagggatgtgaatagaaacccaagacgtcgggctcggtgcatctcgaagcagggccgcagtcttaagcacaagacaggcacattccgctcacagcatttctttctagtctgagcaaaatcttcccacaaggccaaaatcccaacggctggacatgaacagggcgtatatgtttttccccttccaagctcttttgttgcattttattgtttttcctacctagatattaggctgtctccttgatgcgaaacatccttcctttctagaatttccaggaagc

SEQ ID NO: 1879439 - DNA, 4001 bp, Homo sapiens
caattaagtcagaaaaaaggaagtgaatgttaaatgattattagtagtataagctttaagtttaaaagataagggttatttaattcaactgttttcttggttataggaaattagcattcaaattaacttcattaagataggagaaaaaatactgaataattcatctggatggagttagccaggaaatgtctttatattttgcaaaattataaattgaaaccaaaatctgatatacttctaggttagcaaacaaaattctttttatttgcttcctataaatcattaaacaggtttgctgtactcactcagtgacacttcaactccctttgaaacccaagtgacagaactaggtcactactttgggaatggaattgtgagtagctagatcagagaaacactgagactgacaaaacttgcttttttggaaaatggaagaaaaagtcatcagtatgccataagagttagagcattctgaccataaaatcaggcagttatccttgctgactggtcctggattccaaatgacacattccttctcaatgtattcaatccatcagcagctcagaagcaatccacactggagaccatttaaaaacgtgcattttgcaataaccattatctatcttagcagctagaaaggcaaaacaaaagttagcatatcaaactatctttaggggctagagcagaatatgaattcattaacgataaatataattactagaaacaatgaaaactgatccagaggaattttaagaaaacaaaaaaaccctcaaaatgtctattatgccaagtacggtcaaagtattcaagcatcctcctccctctccacaacttctatttttttctctcttcttttttcttaaggggtgggagtcttgctatgttgcccaggctggagtgcagtggctattcacaagtacagtcattgtgcactacagccttgaaggcctgggctcaagcctcagcctcccaactagctgagactagaggcacataccaccgtccctgacttacaacttctattttcaggttagattccagaagtgtaagaagtataaaatatcatggatgatatttagtattcactaaactggaaggagagccaatgaatttacttatactgcccaattaaataatcaacattgaactcatcttcaatcccagaaaaatccatgaatgaaaactggacatagcaacaattgctactgatgccagactgaaatagcaaagggcaagaggaattcatgctacctactcttcactttataaagaaaaataaagaaaaaataaatttaaaaaagaaaaggaatttcattttttctgaggaaaaaaactgagaaattaagtaagacagagtttgcaaatatatgaatgctgggctcaatgtttcttagtttgcagttaaaaagaaacattcacaaggaaaacaaatgtacatgtaagtcactttcaaagcaaaaagatactgcttggccggggatggtggctcacgcctgtagactcagctacttgggaggctgaggcaggagactcgcttgaacccgggaggcagaggttgcagtgagccaaagtcacaccactgcactccagcctggaggactgagactcagtctcaaaacaaaccaaacaaataaaaaaaccaaagcaaaaagacactgctcaaagctaatccatgggcagtacctgcattaaaactgttatctgcaaataaggcaaaaataaatactgtttgttgcagagtggaaatgcatcctagattggattaagctaagaggcttgagaggtggcaaccacggacttctgctcttagacatcctggtttgtaatattttgttgttctgacagccaacttgatcattcttccttgcattataaattttcacagtaaatcttaccttcggggtcagtggtaacacctataatacttgtttgtatttaaaatcctctaatatccaatacatttaatcacagcctcactgacatctcaattgcccttgagactcaaaacagagggggaacttctgagaaatgtaattattatacctctgtgcttaggttgaagacaacttcatgatctggagaattaattactttttgtttctcttcatgcctggtttataagaaactgaacattggacatgagaaaaagtagaggtcctatcactttacaggtgtttttatcattcatttgaagtctattccaaagacatcagttatcccacatataaaggtgcatataaactctcacttcaaagttaaactactctgagctattcatatttgcattcttctctaatggtgtaaataatcaagaaccagagaagttacgccttcatcgtaacagccatatttctctggcctatatagcaaatccagttacattttaaagtgtgtgcgtggttctttaaaacattaatttcaaacacatgaataacattattgttttatttaacccaatattcagtgatccctgactgggttgggctcagtaacatgtctttcaaaaacaaaaaaaatactagactcatatatattttttgagtaaagctgctggctttgtctccatacttccactctgttctcttgactcagttctcaattcagggccaaagtcaagagcaaaactgaacctgtaggctagtccttggtaaaagtaaggcaaaatggcaactgacttggcaatctctcccaatttggggatgccctggacacagtaagcagagtcaaatgtaaactacgtcctaagaaaatggcaatttctgtagtctcaggtcatgaaaatacatttttaaaaactaattgtctgttaaaattattttagttgtgaaatgttaacaatatcaggataaggagttagacaaaaaatcttggacataatttccagttttttcctatatatactttctcaacaatctaaagccaccaaaattctcttcatgaagtcttatcctatctgttgcctaatgatgatgaaggagatcagatttgggatttacagatgtcctcctctggagacgcttttgctctgggactgatggataccagtgctgttagtcatttctgctacctggatacagagcatctggtgtaaatttgtgcatccagcctggctcccattttcccccaacagcatgcttaaggaatgaaatgctcatttcatgttagttgtaagcaatctacatacaaagcatatcagggtacaaattacttaatatgtatttttatcatctcctacctccctaatgctgaaccccactccattccctgcaaacttttgttttaaattttaatttgagaaaatatttttcctacataattgtcttctcctaacatctgtggacattcttcccactttctttgaaaaagatattatatcatgcttctggaaattaaggggaaaaaatcagtgctaaaactagaggttgaaactagaggcagatctatagtagaagtatatattacttttcataaaaattctcacccaaaaagtcctatcaaaggggttgcaaagtttatctggttaccaccctcctccctttcttcttgcctttggtcccatgagtgagccttagaaatcatggtcaccagcagactgccagggacaaagtgaatggaagttacttttgagaagggggattcaggctgggcatggtggctcacgcctgtactcccagaactttgggaggctgagacgggtggatgacctgaggtcaaaagttcgagaccagcgtgaccaacgcagtgaaaccccatctctaccaaaaagacaaaaatcagccaggtgtggtggcaggcacctgtagtcccagctactcaggaagctgaggcaggagaactgcttgaacctgaaaggtggaagttgcagtgagccaagattatgccactgcactctagcccgggcgacagagtgagattcagtctcagaaaaaaaaaaaaaaaaaaaaaagagaaggcggattccatcttccctttaggtagagatgtggcatggaagcagtgac

SEQ ID NO: 1879440 - DNA, 4001 bp, Homo sapiens
cgggaggcggaggttgaggtgagccaagatcgcgccactgcactgcagcctgggcaataagagcgaaactctgtctaaaaaaaaaaaaaaagaaagaaaaacagaaacttacaatctgttacaggagacagcaaacaaaaataatacaaggttcggctgggcgcggtggctcacgcctgtaatcccagcactttgggaggccgaggcgggtggatctgaggtcaggagttcaagaccagcctggccaagatggtgaaaccccgtctctactaaaaatacaaaaaaattagccgggcatggtggtggtcacctgtaatcccagccactcgggaggctgaggcagagaattgcttgaacccgggagatggaggttgcgatgagccgagatcgcgccactgcactccagcctgggcgacagagcgagactcgtctcaataataataataataataataataataataataataataataataataataaggttcacgtactacaaagcagagaacagggaggggaaggaattagaagagaatttctatgggcagagcaaagtcatgggtcacgggaatcacgaactggggaaaattatttgtcaggtttaattaaaggaagaggaacaaatagagtttaaagattagaaggttacaggtggcaccccacaatccccaaaacaaaccccacctcggctcagccccagtcacctcccaagggggtatatcttgcccagagagcctgaaggcaggggcatttgtttttacagcccagtcactattcttccagacaaaaaaagcatttcctgtgaggatgaagtgattaccccaggtcacctggccacattcctctccgggagctggtggccacaccacctggccgcccctccactagcgccgcgctccgaggtcacgcagctgcctgcgaagccctcagtgaggccgcctcccaccccctggagacgtggtctcccctcccgcgagggtccctccgaccccacccgggcaactagggcaccgcgggctgttacccaactaaccattaagcgcggagccgagcgcgtgcgtggcacggagaggcggggcgggtctggtctgcgctctcggcaccatgcggcccccaagacgtagagcttccctgcctcggtttgaagggaccgctgggctgcctgattacgcgcccccggccgagcctgcgcactggggacgcagtcggccctcgcgtcctctgctgcccgaaacaagcgcgtggaaagcttggtcggggcttctcacagccgcgcgcacagactggttctccccccgcgtctcccgggagcgtcgccgccacctgcacgcgtccggcacacaaacgtcggtctcaccccttagtttctggaagagaaaaaggaaaagccaccgagaggcctgaccctgaggggtcggggggagatgcgggcgcgtagtagagggaagcgactgaggagcggggactgggcagcatttgaatggatgcgggtgccgctggcacccgggaagacgcctgggagccggcgctggggagccgggcatgggctgggatgtgtttggattccaatctgggcctgacaccagttcagtgacctcgggaagttccccaaccctgcgggcctgtttcctccctctgaagtggcgacagtaatagaaccgacctcgtaggctcatcgggaggtcctgatgggagaacccatgcaacttgccaccacagagccaggcccgcggcgactggctcctggtgggtattaaagacgagtcgggaaagaagagcaggtaagagggcggggagactggcccagtgggttggggtgtgcacctcggccacgtggaaaagcgagaatgcaggggccggacgcttatggacgatgcatatgtggggccggatagaattgtggcaggcggcgctggggctgatgcgcctcacccagattatcctctgtaatcctcacagccctgtgaagtgggccctgccatgaacattttgtaaataaggcacccgaggctcagagaggtgaagtaattttccagacagcccagctcgtcagcggccagcatttgaagtcacactccagagcctgtttttatcataatagccgctgtgaccgcataaccaacgtgtgtgttgaagtgatcaaataaccatggggtggtctctgatgtccaggacttttgagaaatactgaaaaagtatgaggcaaggcccctgccttcaaagagctttcaagtttatgggagagactgagtcaggcgcaaattaaccaacatctgttgagcacttactgcttgccaggaccctgcccttctctcactgtcttcctcccttccaggactcaccccctcacttacccttcccctcaattctcacaagagattgaagaagggtagagactggaggatgaggctgggcgcggtgtcccatgtctgtaatcccagcactttgggaggccgaggcaggtggatcacctgaggtcaggaattcaagaccagcctggccaacatagcgaaacccccctctactaaaaatacaaaaattagaagggtgtggtggcactcgcctatggtaccagctactcaagagcctgaggagggagaatcacttgaacctgggaggcagaggttgcagggagctgagatcatgccactgcactccagcctgggtgacagagcgagactctgtctcaaaaaataaaaaaataggccgagcgcagtggctcacgcctgtaatcccagtactttaggagtccgaggtgggcggatcatgaggtcaggagttcgagaccagcctggccaacatggtgaaatcccgtctctactaaaaatacaaaaattagcctggcgtggtggtagacacctgtaatctcagctactcaggagactgaggcaggaagaattgcttgaacttgggaggcagacgttgcagtgagccaagatcatgccattgctctccagcctgggcgactctatctcaaaataaataaaataattaaacagataaaaataaaaaatggtggtgggacaattgggtatccatatgcagaagaatgaatttgcatgaaattgacttaaaattcatcaataacaaagagctaaactgtaaaactcttagaagagaatatacagataatctttttttttttttttttttttttttttttgagatggagtctcattccgtcgcccaggctggagtgcagtgtcgcaatctcggctcactgcaagttcagcccccgggttcatgccattctcctgtctcagcttcccgagtagctgggacgacaggcgcccgccaccacgcccggcttttttttttttttagcatgtgggagcaacttacccacatttcggttacactagtatggctacaaaaaaattttttttaaggaaaaaagtattggtgagaatgtggagaaattcaaacttcatactttgctgatggggatgtaaaatagggcagctactgtggaaaacagttttgtggttcctcaaaaagaaagaattaccatatgatgcagcaattctgctactgaagcagcgtcgttttctggggtaaatacctgaggttcctcgtctagtgccaagaagattaaggacatggatacacgcaaggagcgagtttaggagaggagatttcataggcaaaaaagggagaaaaggtctctcatgagagagtggggcgctcgaatgggaattccagcctggggcagagtgcacccgattttataggcaggcttaagaaggcagtgtctgatttacatagggtccaaagattggttggaccaggtgtgacgtttacataacacgccaggtaagctggcttctccaccctaatcttattatgcaaatagaatctttgcctggctggcaccatgttgcctgctccttactacacacgcggctagcaaagagaagggaagatggagccgccattttgaacatgcgtagtcccaggtgtagccttttcctattgccacaactgctggcgttcacccc

SEQ ID NO: 1879441 - DNA, 4001 bp, Homo sapiens
cacctttgtcaggcattgttctggccagttaggccgcatcaccttattttaaccctggttactctatgaccttgtctcacttctgacctttgcactggccgtccccaggtctgcctacggttggctttttcttttcattcttatttaaattcaaaagtcattttctctgagagtcccaccctgaccacctgatccagggatcccaacctgattcccccacaaagtcattctatatcccagggtcctctttcattctccccataacacctatcaattcctgaagttagctttttaatgaatttattgatttgtctattgtctgtcttttccagcccctttcccaattaaaatataagccccatggtggcaggggttagcttgtcttttttgaggctgtgtctgcagcttagagtaacgtctgacacacagtaggtgctcacttatcattcagtgaaagagtaacctcaagcggaggctattactataccattttttttttcgagattgggtatcgctctgtcacccacgctggagtggagtagcatgaccttgtctcactgcagcctccacctcccgagcttaagcaatcctctcacctctgcctcccagttagctgtgtccacgggcacacccagctattttttttttttttgtatttttggtagagatggggttttaccatgttgcccaggctggtctcaaactcctgagttcaagcaatccaactgcttcggcctcccaaagtgctgggattacaggcgtgagccaccttgcctggcctatagcagttttggagatgaggaagctgaggttcatgacaaggcccatgtcgacagatctgagatccaaagcccttttcaaagcccaagtctcttacaggacgagagactgccacttaccaagcacagtggatacgttgatagaaatatgatgcttctactttaatcagactttctgatgtttctctttttcccttgtctgttttgaaactgtagacaaacaggcatgtgagtctctaattccagaaagttttatttactagcataataataaaaataatagcttcaaagtatgctaagaactttgtatacactatttcacttaatccccacaacaagcctattagaaggataatttaatctcctttatacacatagaaaaataaaattcaggaagataaaataccctacctaaggtcagtggtatcaaaacaagaatcagaagatacaagcagtagctgaatgtagtggctcatgcctataatcctagcactttggaaggctgagataggaggactgcttgagaccagaagtttgggaccagactgggcaacatagtgaaaccctgtttctacagaaattaaaaaaaaaaattatccagaggcattgatgtgcacctgtagtcttagctatttgggaggctgaggcaggaggatggcttgagcccaggagttcagggctgcagtgagctatgattgcaccactgcactccagcctgggtgacagagtgagaccctgtctctaaagagagagagagaaaaaaaaatacaaatggcttaatttgagaagtgagtgataaaagactaaggaaaccaagactcaaactcacatctctttgcctaaccacagtgctagagtaaacactccctaaaggcaggctctgaactgggtaccaaggatacgaagactcattccctgacctcagcaagctcatggtctagaaaaggaggacccaatttggacaggaaacaaaccaggcacaaaacaaggggaagaggagaatggagaaggaggcctatggggacatgctgggctcctgcaaccttaatggtggtaaatataaaagggactgaccttctagtttttcagtgtaacaccagagctgtagagggagaagggccactaggagattccatttcagtgatgtagccagcaggaaagcccccataagtgagagcctggagaagtatctcctaccctggactgtggcaggagggaaaaagagcagtcactgtagggtgaatagagtggtccttagatttagtgttttacttcccctcccagccttgagccagctgctgtgactcatggctctttggctgcaggaaacccgttacaacctaactttctgcctaggtcaattggttttggtttcattttctagtctggagtatgatcatgttgtctattaaactcagaaattttcttgacattttcagtttcatgcagaatgaaaaagaagtggtcttgtgacaatgtgatcaccttgctgaatgttctagagctaaccagtgggacaagggacaagggcttccttatcaggatggagtctcggtctgtgaagccagcagtcccagtatttgaaaaaaaagttgtctcagtcagtgttctagcaaaaaatggatggtacactcaaactgtgtaacttggagggaatttaaggaaaagatcatttacttagatgcaaaggaaactctggggcttataacagcaggcagtcattaccttccctatctcttaaaaggcaagaagagggagcagttcctggaacaaaaagacgggagttgtagggagagggctccccaaaaagaggctgccttcatgagaagaaagcagccaagccctagcaaaatcctaaaaggagggagcagggagaataaatcccccatcctcactctcctgccactccctgcatctcttgctggtaacttgcaaaggctgggcacaattgggagctagaaggcaagggagatcattgatggggcccatgcaggtcggcctcctagggtgcagaggtgggtacagaagggtagggagatctggagagccatggaaactcatgtaacatgtaacaatagttatggctggttgacaataactatacaaagagtgtcgattgtggtagacaactgccattgactactcaggatacatctggccctttcaaagcacttttatgaactagctcttttgattctcacaacaagcccttaaggtgggcactgtcctggacccattttccagacagggaaaccagggatgaaagaggttaagcattcgctgggaaatgaaggagtatgaactcaaacccagatggctgtggttacagatccagtgcttgttgtccactggatgggcccatcttacccaaaatgataaccgaggagctaggtcctcaatcattgctgaagggtagggacatgagtatggcctggggaacaagaggaaatagttccataagcattgtttagcataaatgagatcaaacaaacatgcttcatttaaaagatgttaaaatatcacccaagtgggtgggggtggggagacagaaccagagagaacgagcgagagcgagcatgcaccaactgcacgtaggatacgagccaaatgtctaattatagctgataaggctcctcctgatctgtgccctgcctactcatctttccctgttccccgtggggcactgtgtcccagccaaaggaaactctacttagttctcaaaatagccctaggtcttctgcctgggacagttcaccccaccttgtattcgcccacctcaaatcctatttatctattgggtcctagttttggcctttctcttgcctttcttcctctctccctccttccttcccctagcaaacacttatcggcatcgggtgtgtgcagatatagtggtcagtgttgcagacctgggtcaatactggtccctgcctttatggagtttccacgaggaaatcttccctccacgcccaagtgtaggctggggagtcctcctttgtgtttttgcggcctctcttactctgttgtctatcacctggtttcgtgcctgtctcctctctcagaccatagactcatgaggttgggactctgtctgattctgtgggtgttcatttcctatcactcctgtaacaaattaccacaacttcacagcctaaaacaacacaaattaataatcttacagctccagaggtaagaagctggacacaggtctcactgggctaa

SEQ ID NO: 1879442 - DNA, 4001 bp, Homo sapiens
tgggtgagagagaccccatctcttaaaaaaaaaaaaaataactacaaagctgcacactccagtcctgtttaaatagcaatacttccggacacaatttttaagttattcaatagggctttggttaaataaatgtacaatggaatacgaagtagtgatttaaaaacacgtatggaaaatatttttccatgatatttgattcaaaggaaaaaggtgacaaagcattgtgttcgatgtgattacatataatgctatacatcagattgttaacagtggttttctgggtggtgggatttccatttattttctgattctggaaaaaatctgatttttctgcaatgaataataattatttttgtgatttttaaaaaggagggttttttttttggtgggggggcggttggatttttgttttgttttgtttttgagatggggtctcactctgtggcccaggctggagtgcggtggcgccatggaagtttttgtttctaaagggtcctttcctttggagctccaactctactaagaggccattcatattcccaacattccagggtgcccaaaggaaagacctggccagttatttcagcatcaattcacaaaatggggcgttggaaggggaaaaacagctgctctagttgggcagtgattattaaacccctcccaaaaatggagtggacaatttccaagatctcatcatgttagaaaactttcattcgccgatttcacttttcaagtgaatcctaaagcctgtttccttaatcttcataattttggacattccacagcccgacccacgcgtttatctttcactgggctgcagtgattccccttgttaccaaaaggggcccagcctccgccagcagaggcctcctgcggagctgggggcgggacctctgggctgggtccccctctccctgtgcgctggctggcggcgagtgcagtgactgatttcctctgctcgccttcccggaggtccccacccacgccactgccaacgctcggaggaagtcacgttcaggccccagagctggtctgaatcttccaggaggaaaagagggggtgcatgtgtgcgtgtgtgtgtggtagtgtgtgtgttgtatgtctaagaggtagcaagtgtgtttgtgtgcgtgatatgtgtgtttgagaggcagcaaatgtgtgtgttgtatgtgtgtttgagaggtagaaagtgtgtgtgtgggggggggggtatgtgtgcctgaaaggcagcaagtgtgtgtgcgtgtggtatgtgtgtttgaggggcagcaagtgtttgagtgtgagtgtgtggtatgtgtgtttgaggggtagcaggaaccctagcttggtgtctgtcagtaactagatggtgatgcaggtaagtgattttcccgttgagtggattaaattcctagtctgtcagagagggtgttgacctagaatgactgcgcaggtctcctgtccagtgttaaggagcgtgagtgccctgatgtccccaggagtgctgcaaaaagagcaaaatggcatatatcaggcgtccccgagatgctggcatctatgttaaaactatcttatttcatcttccaactactccttacaataggtgccctgatcccaatacaagattgaaaactgaggctcagagtctgcggtatgctgtccaatatgtatgtatacacaaacacacacacgtatatacgtatgtttgtgtgtatatacgtatgtgtatatatgcacatatatgggtgtgtatgtatatattttacagcccatttgggcaaatgagtgagccccagccagaagcaagcgcccccgctgcccctgggcagtgggctcggtaccgccacgcacccgtcctatgtgttacctggtcgctgctcactggagtgaaagccatttagtggctgatccaagggaagtatgagctagtggcatgtcgagacaaacctggatttgattcgcagctctgccttctgtttgactacaagcaagtaacaagcttttggagcctgtttcctcacttctaagtgacgctaattatagtatgtacatcacaaggatagtgacataagtgatgactgtgaccaaacttggatcaccaagcctgcacccagggagcgctcagtaacgcagcgctgaggagtaggccaccccggagggctccaggtttcagcgcaggcttccgcggagccagctggatgcgtcaccatccgaaagtgcgagcctggccggcggcggcggaggcgggggcaccgcgcagttggaagcccgggcgctcttaccgaaagcgcgagcccggacttccccgccacgatcgatgtggccagtctgcgcctgccgcagttcccgctcgcaccccggcccctcgcagagtcccaggaaagcgctgtggcgggcgggcagtctctgcccccgggaggggacgcacgcacgcgctgctccttccaggtcccggcggggaagcgatgctttcttggcccgggcttggggccagcgggaaccgggctgtccggccgcgccgtcgcgcctcgcacggcgtgagacaacctagctttttttttttttttttttttaagaaaagcattggcaccgcagcagcctcccccgcttcttccctactaggacgcccgcctgactcgccccattgcacaattcttaccgtggaacagccgcgtgactcggcgggagcccaaaagtttcccaggtttcctcagcctagaaaagcgtgggtgggtgtcccggcctggctccaggcgccctttaagttgtatttcttcgggtaactgggttgccctttaaaatgtggagattgtcctttagaaagaaagaaaatctcacgagctcgctggcccgccaggtctaggttggcgccgggtgactgcaatgaaacgcgtttcttttcccatgtacattttcagacggtaaaagtgtttcgatttgtttgggggagaagtcaggcgctggttttaaaggaggaaggggaatgatgcttaaaagcagagacacgatttggagctctccaagaatcatagtgtttattaacaatgattgtgcttagtagacactgagaaaatatcgaacgaatgagtatttggaggagggatttaaatgggtgtctataggccaacgctttcattctgctgatgagaaaacctagaggttaagtgatttgcccaaagtcacctagctaattaatgtggaaggcaggaatggaatctgtctcgttttgactccaaattcttgttatgagatgggtgcgttttcccctctttatgaaaaaaaaaaatgccttctgtagtaatctctgtaaagccttactccactccctctgtctacgcatctaaagcaaacatacaaaacaaaaaagaaaacagcaatccccaaatgcaatccatgcactcaaataggctaaatttggcaatgccaaaacaatatattaacaaggcattttagttcttattcctataaataacacttttttgttttgttttgttttttgagacgtattctcgctctgtcgcccaggctggagtgcagcggcgcgatctcagctcatggcaacctctgcctcctgggatcaactgactctcctgcctcagcctcccgagtagctgggattacaagtgtgcaccaccatgcctggctaatttttgtattttagtagagacggggtttcaccatgttggccaggctggtttcaaattcctgacctcaggtgatccacccgcctcagcctcccaaagtgctgggattacaggaataagccaacctgcctagccaatagtactttcttattcacacaaaatatgtgaagaaaaggaggaagaggaggaggaggaaaaacagaataagcaaaacagtgcttctccaagatgatatggaaaataccaagctcccactaaccttacttttgtaagtaaggtgtttggtgctctgcatagaaactgctggactcgtgagtgaccatcagggttgatctaagattgtcagttatttcactcaggctttgactggat

SEQ ID NO: 1879443 - DNA, 4001 bp, Homo sapiens
actttgcatgtcagaactgaaactctaaatcatttttttaattttatttttaattgacaatatttaaatatactaaataattttaatgagcctttttggttttttaaaattttttcaatgatatatgttgttctgtgtatagtatgagacagaaattaaattatacttttgcactaattagaaaatacaattgtttagaaaatgcgttctgttattccctgctccagaatagaagctaaataaggacagatttttatcttttgttccctatgtttttcacagcctataaacagtttctgacttagcaataactaaatatttgttgaataagtacatattattgaatgaatgaatgtgaacaaggacctacgtctgagttcttaggaatttgatttactgccgctttggtttattttctttccctatgtcaatacattttttttaccataattatttcatattatgttaataattgttaatataatatttctgcatacattttagaatcaataaaatttcaggggaaacaatatatcaactcatttgaaaagcacctatatccttttaatagtaaaccttttctgtaagagtgtatttctgactttatttagatctttatttatgtctttgttatgataacagtaaagttgcagaaaacataaaacatccaaactattttaaacagaacaattattcaattgttaacaaattatgggaagagttggaggagcaatgtttaggctagatctccagaaatggctctttggacaaaatcacattactgacctggtgaacttctacccttaccataataagaaacttggtacagaggacatccacaatctcagcccctggctttatgttcactacacttttgccattttgcctggatcagcaaggtgataccataaatgttggcttcaggagaacaccagctttactgcgtgcgattcaggttcagaaagctgttttgagaattcttgactccagagccaaactggttctaaaagaaatgcaacagcaaaaataaatgccttgcacactggcaaaatccccaatggaatttgactccaaattcaagtccaagttcagttgggtacaatgctcaaatccaagttggattgatagagcttaaatatcttctggaatctaaactgcaaaggaatgtgagaaatgtggttttcagttttttttaattaatgcaatataataatgcacatttaccagaaaatttaaaaagtggtggttgacctaatttatctttctgctacactctatcaaagacttttgtaattatctccataaatgtgttatcttttgttagatttccttctgatatttttactgtttttgttcctattctaaaattgaacaaaataaaaataacattttctagtttactataatttgttatctattttataactatttaatatctgaaaacgggagaacttactggttctattgtaaatcatgcttaaaatatttgtgtaggtaacatttcatgtataaataatgcattttttttactatttttatattatttattatttatatatgcatttatttacttgtggggttttttttgcactggttttataggtaagacctaaaattaaaaatccatattttgtgcttctttgacatctggtaaaatcaagggggacttaaaattgcctaattgcaagttctcctccccatttttttttcccatggataagttccccaagccaaaatatccaccttattaaagggaacaggtatagtttttgcctattgctgaatagtaggttcagttcacagcaagcctgaagaattattaaaacaagacaatctcatcctttaccaggaaccagaaaacatcccaacctaccctcttaatactaaaaagcttgccttccacatcttctagttgttcactctctttctgagtgtaacatctatgcatctctctgtgatatgcagtgtccttttctctcaggctgttagtgcaggtgaccagtaaactgtcagtctacatctgtatagtgtccagtggtttctgtccaagtcatccccacagcactagggaagaaatacctccctcaataataagggatatggtcaaaatatgttttggttatggttaaaatatgttaaaatatgttttggctttcaattcaacttgtttaaaatatagttaaaatatgttttggctttcaattcaacttgaaaacataggtctttttactgaagacaatggtctttttactgaatcaaatttcattttgagaatctccttttaatcttaataatttgttttattattcataatttacttgactgtatgcttcctttatttcttaaattggatgtctatcttgaattttcaaaaatttttataatagttgacattataaattttattatatcccatgaagttgttatttgatagttttattatcattcaattctaagtatgttcaaatgtccattttgataacttgactcatgagttatatggaaatatattttctgcttttttataccttcttttatatttaaatccaatcaaaattctactatgaacagaaaacattgtatttataatactgaatctttgaaattttttgaggcttgctttaaggctttgtgattatttacattttgtaattatttcatgtaagctttgaacttacgtttcttcaagttattgtacacctgcttcttaaataacatattaattctatgattctatacctgcttcttaaataacatattaattatgtttctcaaatgtcttatacatttcctaattatttctactttattggtcaatattttacagagatatattgaattgttctatgatatatagtttcttcttataattctaatcatttgtctttatatattgagaccatagaattaactgaaattaagtgtacaattattaaatctatctgaataattgaagctttcaaactactataaccatatctacttctaaagacactattgagtttaatgtctattttgtaatattcatatagttattctagctttattttggtgaatctacaccagatgcattttttttccaaatagttttatataagctttccaagctcttacattatagatatttctcctgtaaattacataattcttatggtaatttgtttcatttcaaactgatctcttcctttcagctgataaatgttgtactttaatatttattatcatgattgaaatatatggcatttttgagaatcatcttacttcatgtcttttcctgtaatgattatcgtaagcttttttcttccttttaaaaaaatttattgattgagtcttattctgtttattgatttttttcttacattcaacctctatcattgttgaaaagtgcaacaatttatatttaatttaaatatttattcggaaattttacgtggcttaaatagtgtagatcaaggttaatctatgctttaatcctgccactcctgtttccaaatagggaccttacaacacttttattttatgattaattgcccatgctctaatgtcttccacatactacaccaagtgttagtggtataaaaaaatatgtatatttgacctgataattgacttgtttaaaaatttctaataacttcccaaatttctttaacttacctaagccaatgagggttgataatacccctaataagatacagcaagggagtattgtaagattcagtcaactttattgtgtcccagcaggtgtaatattaatatatctttgcttagtcaaattttgcttaatgattgtctcagatatctcgaaaatcacagaatactggatgaagttctgcactaggtaatactaagttttttttttctttacaaatgtggagctggtgtttagcgtgcaaattaaatgtttataagttttagttacatcagtttgtgtttaaaataacattgtgataaaataaatgcaagacatccctaaagttatcatagaaattataattgatgaa

SEQ ID NO: 1879444 - DNA, 4001 bp, Homo sapiens
caatgcccaaagcaaaatctttatgagactgagcgacagaacttggagaagcaaaccaggtgtccactccttgatcttaacacacagcatttgtatacacagcagaaaaggaaagacaagccaagaaagacagatccctggggaacatggagaaagaaagtagagtgagaaatcttaagaggctgcgggtcctcgtagtgtgttcacacaggcatgctgaacaataagtccaagattatattttcataagggaaatagtataattggctatttcctaaagtcacctaagcccaggccaaaggatacgttttcagggataacaatagcttaagtttttatagcactttatattatcttgtttgatcttatctgatctgcacaacaagtctataagataggttacaattattcaagaagaacttaatactagagaggtaaaatcactttcccgtaagccagaatcagtctggcagtctgttgctataatttcttgtatgatatattactgaaccaagcagatttacactaaaaagtaaaattcacagccctattattctcagaataaatatgaaagagttatctaccttgcaatgaaggaaacatgttttataagaattgatattatgaacttaaagtaaaatatagaaaatcagagtaagggctctttctggtgaccacacccttagggtgagtttagtctatccttgttacataaatataatgtaactttcacgttccattgctcaaatgtatcattcatgactatcttattacttctggttgctgacattagactgtaggccttactcttatgcgagagagaaaatcaacaatactgccatcattaccatagaaaatatttagtgaggcctcaatctgtgcacctgttgttgttttgcaaagtgggttattagacgtggttcttgtccactgggatcttaaagacaaaggaaaggacatacagacaactaaacaagcaatgagacttgtacacaggcacatatgtgccagctcctatttgcatatggaaatctcgactttgtagattcaagttaatgatgttttgcttttgtcaatccattatgaattgtcagctattaaaatctggccccaagtggtatctcagcacagtgacttgcctgatcctgctgttctgttgtgtaggttaagatctcaacgttcctatcaagcttcagggaattcttagcttgtaaagaccttgcattcagggtcactgatgtttcaagaaacagcttagccaaacatcaattttttttcttcaaattttaaaaagttactttaacaattaggaaaccaaatcatctgctggcttctctcagaaaatagaatttagaggaacattatgaattgaaaatgaagcttaaaacactttctattttgagctctgataaacttgagacaaaatatagctttccttttttcagttctcagcactatgagaaggcttatttctatcttaggaatcctcatatcattaaaaatatgttatgcttcatggcatcatttgatgcataaatatggatgggagtaagaaaatagaaagattgccgatcttcacctctagaaatttgtttttaatatggtacctatgcacaacaatggactaggtgctatacataatctcatttaatattcacaattgttgcatggaatagaaactattttaccataccccaccctcccttttaccgatgagaaaatgctaaatgagttgatctaggctgcacaaagagcaagaattaccaagaatgttcaaaccacaatttatctgactccaaagctcatctatttaatctgtgcctatctactttatagaataattctaaaaggatgcaagtctttaacttctttctttcagagaaggtatgcctttgtggtatgcattgaatattgagtaccctaagggaagagtgtaccataagcctttcgtgtcttctcagcctcatctcttccaccagtcagctgcaccatatagtctgtcgtaggttctggccaagctcacacaggtgaacctgacagtgtccttcttaggttccacagggactccctgatgctgctgcatggcacgtctgtgccagtcacacaacttggtagtgtggggaagttcacgtccattaggtcacgcttgacaataggagagccggagcccacggaaaaaaaaaaaatcatttccattttatcttccaggtgaacaattctgaaatacatttcataagcctccttagaaagtctggcaggatggaacaccatttgcctatagtggtggccgatgcattcatttttggtttggctttccctcctgcgtttcattctctctcattcctgtcccttgggttcctgtccctaatggtctgcatgcaagctctttttctaggttatgcattcagagtacttcaagctaagacacaggtaatttgttttattaattattatatgcccatcttctagtaatgtatctgacagagtatatatataatcaatgatgataaaactgaaattttttcttatatttttacattgcctaaaatgtgcttggggtaaagggagttaagaaattgttatttttttcacatttgagaaactgtaatgatgcttagttgttgccatggatgtgttgccttggaagctgaggaattggacagggttgaatccattctggtcatttctaggggtgttaaatgggcacacacatccagaaaaagtaacttctaattcccttgatgccaagatcaatgtaatcagtgctattattttctaattgtaaaagccatattcctattactgaaatttgtaatacaatttttatcactcattcctttttccccctagtgcaaagtgaataccgtagtaaattccttgctttttcagatatgggtaattatttttaagcaacaggatagctcatactctaaattgaaataagcccatcttattgattcatatccaatttgtcatcagatagatatcagcctttaaaaatagaatcataactaggattaattaaaacaatttaagaaggtcttgtaagggaagccaaacagtgaaaaacggttgaaattgaaccccttctctctgttactttctgatcaatgttttcaacgcccgtgggctttctggcaataagtgttctggtgtcaaggattacaactgggatcccttcaagagcaataaattcacttaaaatatataaatatgtttcacttaccactgacctggaggtgaaaagttctatatcaaattactcacagcctgagatacccattctcctattctgattctaattaaaaagggctgagaaacaagctatgtaagaaagttcatttatagtacagtaaaaaagtaaggaagatttactaagtgttacttgccacacaaagctgcaactacagcaaaccaggaggaaaggagacttcaatgtttcttccaaatagaacatgcttttccaattaaaaaaaaaattcaccaccataatccaagaacttgtcacttcatgtcgatcttttgtgaaagctttctaattggattccctgagtcttggagtttccttcatgggttttcacactgctggagtaaccattatgaacattgtgatgcacatgatattcctatgccctcaaattggcagggatccaccattgcccaggttagatcattcaaagtttttcgtcgaagcattctagctatcttccaaacttccatctcacaactgatatggctgccaggagaggcaaaaacaaattcttcacaggcagtgaaatgccttctaagtgcattgtggcgtgatggtcaatctcatttcatttattttcctggtctactggcaagtgtgaggccaggaaacatctttcatactgtcttttttacagacaccaggcactcaaacaatcttttattaattgaatgagaattgtatcccgttcaattgggtattgtttagatgctgtcctacatattttacctttaatatactgtaggttcga

SEQ ID NO: 1879445 - DNA, 4001 bp, Homo sapiens
ttaaaaagttactttaacaattaggaaaccaaatcatctgctggcttctctcagaaaatagaatttagaggaacattatgaattgaaaatgaagcttaaaacactttctattttgagctctgataaacttgagacaaaatatagctttccttttttcagttctcagcactatgagaaggcttatttctatcttaggaatcctcatatcattaaaaatatgttatgcttcatggcatcatttgatgcataaatatggatgggagtaagaaaatagaaagattgccgatcttcacctctagaaatttgtttttaatatggtacctatgcacaacaatggactaggtgctatacataatctcatttaatattcacaattgttgcatggaatagaaactattttaccataccccaccctcccttttaccgatgagaaaatgctaaatgagttgatctaggctgcacaaagagcaagaattaccaagaatgttcaaaccacaatttatctgactccaaagctcatctatttaatctgtgcctatctactttatagaataattctaaaaggatgcaagtctttaacttctttctttcagagaaggtatgcctttgtggtatgcattgaatattgagtaccctaagggaagagtgtaccataagcctttcgtgtcttctcagcctcatctcttccaccagtcagctgcaccatatagtctgtcgtaggttctggccaagctcacacaggtgaacctgacagtgtccttcttaggttccacagggactccctgatgctgctgcatggcacgtctgtgccagtcacacaacttggtagtgtggggaagttcacgtccattaggtcacgcttgacaataggagagccggagcccacggaaaaaaaaaaaatcatttccattttatcttccaggtgaacaattctgaaatacatttcataagcctccttagaaagtctggcaggatggaacaccatttgcctatagtggtggccgatgcattcatttttggtttggctttccctcctgcgtttcattctctctcattcctgtcccttgggttcctgtccctaatggtctgcatgcaagctctttttctaggttatgcattcagagtacttcaagctaagacacaggtaatttgttttattaattattatatgcccatcttctagtaatgtatctgacagagtatatatataatcaatgatgataaaactgaaattttttcttatatttttacattgcctaaaatgtgcttggggtaaagggagttaagaaattgttatttttttcacatttgagaaactgtaatgatgcttagttgttgccatggatgtgttgccttggaagctgaggaattggacagggttgaatccattctggtcatttctaggggtgttaaatgggcacacacatccagaaaaagtaacttctaattcccttgatgccaagatcaatgtaatcagtgctattattttctaattgtaaaagccatattcctattactgaaatttgtaatacaatttttatcactcattcctttttccccctagtgcaaagtgaataccgtagtaaattccttgctttttcagatatgggtaattatttttaagcaacaggatagctcatactctaaattgaaataagcccatcttattgattcatatccaatttgtcatcagatagatatcagcctttaaaaatagaatcataactaggattaattaaaacaatttaagaaggtcttgtaagggaagccaaacagtgaaaaacggttgaaattgaaccccttctctctgttactttctgatcaatgttttcaacgcccgtgggctttctggcaataagtgttctggtgtcaaggattacaactgggatcccttcaagagcaataaattcacttaaaatatataaatatgtttcacttaccactgacctggaggtgaaaagttctatatcaaattactcacagcctgagatacccattctcctattctgattctaattaaaaagggctgagaaacaagctatgtaagaaagttcatttatagtacagtaaaaaagtaaggaagatttactaagtgttacttgccacacaaagctgcaactacagcaaaccaggaggaaaggagacttcaatgtttcttccaaatagaacatgcttttccaattaaaaaaaaaattcaccaccataatccaagaacttgtcacttcatgtcgatcttttgtgaaagctttctaattggattccctgagtcttggagtttccttcatgggttttcacactgctggagtaaccattatgaacattgtgatgcacatgatattcctatgccctcaaattggcagggatccaccattgcccaggttagatcattcaaagtttttcgtcgaagcattctagctatcttccaaacttccatctcacaactgatatggctgccaggagaggcaaaaacaaattcttcacaggcagtgaaatgccttctaagtgcattgtggcgtgatggtcaatctcatttcatttattttcctggtctactggcaagtgtgaggccaggaaacatctttcatactgtcttttttacagacaccaggcactcaaacaatcttttattaattgaatgagaattgtatcccgttcaattgggtattgtttagatgctgtcctacatattttacctttaatatactgtaggttcgatgaacaaactaaaatatttcaaatttaattaccctgagaaactacaataattagggacaaatggagaaactgagggctgattccgctctcacttaaggccacacttatgattgtgcgggtgatacacttcaaaactctagaagcctcagctacattatagtggatgtgaataatgccccctgccctcagaagggtttcaggcaacacttgctgagccatacctggcagccatgctgacctttactagccttgtagatttggacaagctctttaacctcctaatttatgaataggggacagtgtacttctttaaaggattgttgaggataaaattatgtattatttcttcctagcattgtttacaattatgaatttggttagtgtctaacactggaatatgtacctttcatgaatgtagggagcatgtctatttttgcttatcacaagagtgcacttttttgtaatgtgccagctgttgaaaaatattggttaaggaatgaataaatgtcaattaagttatgcagagtacctggcacataactggagctaagtaaatgttggtgccttcttatcccccttctattgtaattaaagataaaaaatttctagggagatatcaacagcattaaaattgtttaccacttaaatctatctatatgcttctttagcattctaagaaaataagaatataggattaaatatctcaatgatcaaaacaagaagtgctaaaccttcaaagcattgtctctggaattgattagatctgattttgcgaccatgctcctatcgaagtaactgagcaagtccgaattcttttgtaattaataacacctgtagccattagctaccttacaagttgatgtaagaataaatacaacattttgccactgtgacagaggtttccaaatgtggcttcatagaactccaaggacttgaagccaagtaatataagcaacaatatcaccaatattttattttatttactttttttatttttatatttatttatttatttatttaatttatttatttattttttttttgagacagagtctctcctgtggcccaggctggagtgcagtggtgcaatcttggctcactgtaagctctgcctcttgggttcacgccattctcctgcctcagcctcctcagtagctgggactacaggcgcccaccaccactccaggctagttttttgtatttttttagtagagtcggggtttcactgtgttagccaggatggtaggatggtgtccatctcctgaccttgtaatccgcccaccttg

SEQ ID NO: 1879446 - DNA, 4001 bp, Homo sapiens
agtattcaggaagaaggtcttgcctcagtagtggagagtatttagccctaggctgagcactgccctgtttccacctaacaaatcataaaagcaagaccaaaaggatgaaactatttccaagtaactgcattccttccattccttcttctgcttcttctttgtcttttctttttcttggtttttttttttttttttttttttgagacagggtgtcactctggtctcccaggctgagggcagtagctcaatcacagctcactgcaacctctgcctcccaggctcaagctatcctcccacctcagcctcctgagtagctgggaccacaggtgcacactaccacacctggcatgtatataaatttttttggcgggggagagatggggtttcaccatattgcccaggctggtctcaaactcttgggcttaagtgatccacctacctcagcctcccaaagcactaggattacagcggggagccaccatgcctggcctgcatctcttcttgagaaacaaagcttaagaagatttattgtaatataaaaatatctatcacccaacgatatgtaattcacaatgtctggcatccagtcaaagataactaggcaggcaaaaaagcaagaaatcatgactcagattaaagagaataattaatcaattaaagttgactttcccaactcagaacacacacagatgttaaaactagcagaaaaggacatggaaacacatgttgtaagtgctcggtaaatgttagctttcattattatttcattttttccctcaaaaatgtttacctcaaagaagagattatcatccacactgacaaaaagtaaaactgtgttggccaggtgcagtgactcacgcctgtaatcccagcactttggaaggccgaggtgggtggatcacgaggtcaagagatcaagaccatcctggccaacatggtaaaaccccgtctctactaaaaatacaaaaattagctgggcgtggtggcccgtgcctgtagtcccagctactcaggaggctgaggcaggagaatcacctgaacccgggaggtggaggctgcagtgagccaagatggtgtacactgcactccagcctggtgataaagcgagactctgtctcaaaaacaaaacaaaacaaaacacaacaaaactgtgtctcagagtggtggagtggcctaaccaagttcccaaaggaagctacctgcagaagagcgactagaattagtttcttcatttacatattgtgtcacttacctatgagctctagttgaaaggtctttacatccctgggtactgctagcatccaggaagttgagcagaagcagcaattcagagccagttactataatcaggctgaaggggaaaaacaaaacagaaacacaaagagaaagagaatatttagcttaaaatattgatttgtatgattagaagggtggaataagaacaaattactttaacccattacaataagacccataactgaaagcattatacatatggaaatatataaaatcattagagttaatttattttgaccatgtattttgggggggaagagtcaggtatagatgtaaaaattcatgcccactagcccctgttgggtcactggaaatatgctagatggattacaccttagtctttttttttttttttttttttttttttttttttgagacggagtctcgctctgtcgcccaggctggagtgcagtggcgggatctcggctcactgcaagctccgcctcccgggttcacgccattctcctgcctcagcctcccgagtagctgggactacaggcgcccgccactacgcccggctaattttttgtatttttagtagagacgggatttcaccgttttagctgggatggtctcgatctcctgacctcgtgatccgcccgcctcggcctcccaaagtgcagggtgatccaattttgctaagcaagaagtcaggacacattcaggctcttccgttgcctggaatgccaagatctatttctggtgcacataatgaactcctgctcatcctttaaaacccagcccaggtgtcactccttcttggaagcctttctggccacggtcccacctccagactaaatgaagttaatcactgtcccttatgattccctgtggttggaacatattttgattgttacacatgaatcactaaattgtaattattgtttaatttgtaagatccttgagggcagggattatgacatattcatctccaggtccctttggcctaatttagggactgacgtgtcatagccagtaaatgttggttggattggattgaatggtaataaagagcattttcttacttgtgaattcaattctatgaagtcttgcagatacataaaatgacttcccatttgttatacatttaacaaattgcctttattaaaaacattaaaattacatgaaatcagggtgccctggaacatcctagacatatggccatatggcttccaaacagcataataccagcagcttggatttatctaatttgacaaagtgaggtactcattggcatttgaaagaaatgtcaaacaaaaccacagggggttggaggggagttgtttaaattaatttcagttgccaaagggaagtgattcacttccaagtgatttgttttgactctgatattattctcctagcacagatctcatcttatatcttctagtaattggtttaatacctttgggtgttatttggccctttttcacattttgcactgaacaactcacttttaaaagataacaaaacacttataagcacttgctaattaaagaactagattctcctagtgtttacattaggttcttaggaaaattaggagaactattagaagagcattacttcatgaaaggtaaaaaattataggagttaaaccaatgtggatgatgagaggacaggggatggtggtgagaatttaatctttctaagctggagaaataacaactgcagcattagagcatttcattgatttatttgttcattccacaaacatatactgaggctcaccaaaaatattacaatgttatggtgcaccacagagccccccagaaagggcttgaaaggatgtctcaacagcttggaaaattaaatgtccttctttaaaaactcagctgaatgctgtcactccttttggtggctgaggcataaaacaaattatacgaggggtcttacaagtttggctaatacaaaatttaatcccaggtgaattggattaaccctgacattatttccctaattgagtatatcacagcagacagaactcaacaagaagcccagatattatcaagatttgtgtgtgcagcattcaaacctaagtttgttttgttttgctttgtgttgttttttaaccagctgtacgctttagtacgacaaaaataggcatgtaaaggtttagaatctggctccttctggatttcaccctttgttttcaaaaacctcagaagcagataattgaccgtgggtgttcatctgaaccaacaagctatcagtattaaacaacattaattttgtgtcttttatgtctatgaggcaataggatgccaaaatgtataagttatggttcctatttcactgggcatgtagactctcaaagaatgaagtatgtgcataagaaaataaatgacatcagaggtgcaggcaagatgcaaaatacaatacagactgtaagttcatggatggggatcctggttggagaaagaggggaaggagaacttgacaaaggccttgaatttaggagacttatggagaaaagtgggaggatgggagggtacagtatgggtaacagcaggaaggaggaaatataagtagtgttggagaacaatgaatacactggttttgtgagagtggtaggttagcatagaacagaggttagaaactagagcctaatgcccacttttgggcggtataacatgtattatttggcctgaacttagtgtgaacattaaaacactggtagcattcacatgaaaatctggatccctgat

SEQ ID NO: 1879447 - DNA, 4001 bp, Homo sapiens
tcattaagctgcatgtttcaccacagaataacttttggaagaattatttaaaccttctacagtaattcacttgcattcctcttctatttttaataaccaaaaacatacataagagatgtaaatatacctctagaatttttgaatgactggacaaagcagagtcaaaaattcaacagcactaattactagctgagcagtataaaagcctctgaataaatgtcagcctaggagataagctcttatcttaatctaatgactccacagacttaatttgtcaggccagcctagttgatgaaaaacaggtttctattctccagtgttagcaggaacatcttcccaaatctttgaagttggatagtaataacatcagtgtcatcctgtaaaaaatcttgtgaccaagccaatttaattcctattgtcctgttacactaattaaagttgttctacccctcttggacaaatatctaaaagtgaagccagtgtatttttagatttgccacattttgaactaaccctcaaatccccgtgttttgtgatttttttttctcatagtattggatcatcagggaccatctatcttcttttgagaaagctgagctttccagagaaatccattaattcagaggaatcctttaactgagaggctgtgtagcagagtggttacgagtacggactctgagagagaaaggcctggggaaatttttgctctgtcatttgcaagctgtgtgactttgagtaaactttctaaactttcctaacctcaatttaattatctgtgaaatgggggataatcatagatattgtgagggttagataatataatccatgttaagaatttagagtgcctgagccttatacttaaacagttattcattcattaactcattagttcattcaaccaacaaatacatactgagtactaaaaaggctgtaacacatgctaggcgttataggacataagaagaaccaaaaggcgaggccctttgcctttgtaagactttgaataaacttcctgtttgaggaagcccaagcctgacataacgagctgatctcactatgcctgggataggattgccacagatttatcgggactttccacctaaactccattgtgaaccctgtggctggcttttcagtaaaatggggatgtaaatttccatctccaaagtctattgtgcacatggcatgagataatatatgggggacagccagatgttggtggcctctcagttccttgtctctctcatccctgtgacccacaatcacacgcatggtacttatggtgcaaatatatctagtgagttctcctgtcttgtttcatcctagtattgtcagacaatgtaatgttccttgcagcagtccataccctctctgctcaatcccctcctgatgactcgaactgcaccctactgatgctgttttattgcatggcacttgaagatacttgttgatcattgtttctttgatttctcattgtaatggaatatggtgatacaatttctttccaacctcttgaaattcatgcatgtacttaaaaagtggcacacacctgtagtcccagctactcgcgaggctgaggcaggagaatcgcttgaacccggggggcagaggttgcagtgagctgagatcgcaacactgcactccagcctgggcaacagactgctactccatctcagaaaacaaaacaaaaaaaagtatgcactgagaggctatactaggaatcccactaggtattcagatacctaaatatgtaagatgcagaccctgccctttgggaacttggcagtgtgaggtacatgctgtgacagagatgcctggagttcagggggagatattgggtagtgggaagggggacattcaactcagactgggcactcagggaaggttctccagaggagaggaatagggcttacctctgaaaactcattaacagtcctttgaggaaaggtgtagggaaatgattccaggttgagaaatcagcgtgtgcacatggaagaaagtggttcagtagaagagtgaagggcctgggtggcggtgtgctgggagatgaggtgacactgaaagatcataaaggtcttatgtgatgaggagttagaattccatcctgcaagcaacaggacccattgataaattttaaggctgttaattttcattaacgtgggtcttgggcccagaaagcagtttatgtctgtgttttggggtttctgttcaccattttcttttcttttttttttttttttgagacggagtctcgctctgtctcccaggctggagtgcagtggcgcgatctcggctcactgcaggctccgccccccggggttcacgccattctcctgcctcagcctcccgagtagctgggactacaggcgcccgctacctcgcccggctaattttttgtatttttagtagagacggggttttactgtgttagccaggatggtctcgatctcctgacctcgtgatccacctgcctcggcctcccaaagtgctggctgttcaccactttcatgacctctgattacattatcttccatccggctctcagccagtccctctcttcctggtctcctgtctgttctgctacacccagagctgcttctgctttgaaaactccagcagcagcattcccgtccctagtcaccatctcttactctccaccttgtcctttccttctctcctgcaaaggctgctcccaccaagcctcagagtcacagtcattcctttgaccctgtctactctcccagtcctcctgccctttctgggctttatttcccatcctacctgggcaggatcctatggtggtttctcctactaccttgttaattccctcccacccccaatctttaacttcatccgttcctgtcattggctggagaaaatggaataaccttggctgttaattccacttatcatttatggtatccagttttaagttgagttctcagtatggcccttttccttgactctagtagacttccatttctattccttactgacacactgttttaggctattaccgtttgtacaagacaggtttggtgggcatgcctaatgtgctctgggaactgtcctctaggtagctacattcttcagtgtgtaacccatcccctgccccaaccctgacacaggtatttggacaaaagatagacacttgatgcccaaatcccagtgaggcaatcagattttcttttgacaatttgttcctctgttatttacatagactgcctgttacttgagttaccttcaatgggtctattacttttgactcaaaacggttggcaagatcaccccatccctgaagtctcaaccctactcttgcccgcctcactctctctattacattttaggaagaaaatggaggatctctaaccagaagcccctcaggtttcccctggctcttttcaattatatttcttgatagttgaccttgtctcagagacttgtacctggtttctttctcaaaatacaatgagaatttatctacatgtattgacttattattgatatttcattttatgctttctatttattatgtttttcttttattttgtttttctcctttcttgctattttggggttgagttttttgttcgtttgtttgtttgagatggggtcttgatcttgtcacccaggctggagtgcagtggcacgatctcggctcactgcaacctctgcctcctgggttcagatgattttcttgtctcggcctcccaagtagctgagattacaggtgcctgccaccacacccggcaaattttttagtagagacagaatttcaccatgttggccaggctggtcttgaactcctgacctcaggtgatccacccccatcggtgtcccaaagtgctgggatcacaggcgtgagccatctagcccagccttgattgaatttggtttattcctttgtcttctcccatttgtttggaatatatacttaggatttctattcttttagtaatttttcttagacttttaacagacacatttaaatttacattttt

SEQ ID NO: 1879448 - DNA, 4001 bp, Homo sapiens
cgggtggatcacctgaggtagggagtttgagaccagcctgaccaacatggagaaacctcctctctactaaaaacacaaaattagccgggcatgttggtgcctgcctgtaatcccagctatttgggaggctgaggcaggagaatcatttgaacctgggaggctgaggttgtggtgagctgctgagatcaggccattttactccagcaggggggcaacaagagcgaaactcagtcaaaaaaaaaaaaaaaaaaaaaaaagaaaagaaaaaaaagaaatgaggacattcagaaggtgaaatggagtaggatgacgccaacactgtttttctctccacttgtttagatactagcagagttgagctgggttggagttggtgtgtggtccatggtgtggggtatctgtgagtggggttctgggagtgtgagacagatatccatgtagtcaagagcaagcttgaggtatgtgtagggttgccagataaaataaatctgctaaatctagcaaccctaggtatgtgagtttccttggactcatgcaagaagcttctctccaagacctttttccccggacagtctgtcacccaggaaattccaattccagggctactagtccctgtccaatttgctgtccatggtttgaggacgagatttctcttttttccaatgacagtttatgctggaacagcacattaaatggatccccttggtcagaggtcccagagggggcccaggcgacttcctctcaaaggacatgagtagtcagacctgccttccatttttttctgcccttaccttggggggatgaagaactctattttgaggattctgtgaaaagggttgcaacccaactctgttctatttctttgcaggagcctgggtgagttctttctccctatcctgggcctctgtagctccatctgtggaatgggagagttggattaacaccaggctatcccgtagattggaggctgctgttagatgaaactgcaaagtgttctcagtaccctttcctaaatggcctagaatatggctacacttatacatcagttctgaggtaggtgttactagcctcatttttacaaaggcagaaacaaagcgcaaagaaccttgcccaaggtgacagatagggtaagtagtgaaggcaggattggaaccccaggagcctgacttaaggtcgctgctcttaactactatgcagaccaggaaactgaggctccgaagcggggaagtcacctaatgagggtcacacagccttgctacagcggaggcagctgggattccggcctcgcacgcccgagctttagccactgtgcggcgctgtcggggcagcagcccaggcatccgctcagttcctgctcacgtccagcgcccatctccccttccgtgccccagaggctgaaatgggcccaatctgtgttgaagctgcttgtttctgggtcctggagggaggccgggggagaaagaggtctaataggatgggcaggaacccggctagcgagaaacaaggcacagggccaaccttagttgcacaagacttttgagagatgaaggcaacacttggtggaggtcagggttcactgagggggtgtcgggcagggggcggaggaggtcctgccgcctgtcggtggggcccagaaccctgggagccaggaaggtggggggtgtccagtcctcagggcaactggggccagggagaggggagggagaaattaagcggattcccagacccatgaacagacatccagacaaatgccgtttccacagagactcacggagagtgagatagtcacagagactgagacaaacggatgccgagatccagagggtcggagaacaggcaaactcggagcagtagaccggcccgcgccccgggaacgcggccacagcggccggcgctctgcccggcctctccgcgcggagaggggtggcgggcccgacagcggagggaggagagggcgccgccgcaatctcacctctcccaggcccaaggctgcgggcgccaagttcgctcctggtgatcactcgaatgcgtctcccctcgggctggaagccgtgcgggctcgggtgggcgccggcgggccgcgctggggcggcgtgggtcccggcgtctcagcctcgcgctcccactgcgcttcggcccggtggcccgggcgccgccttggggagaggacgggtggggaccgccgccacttccctggctgcggctggcgcccgagtgagccttaacatccaggggctgagcgttctgaaggcggcggcttcagggagcacagggtgcaggagcggcggcgaagacaagggcccgcctccggccactcgagcccagctcccgccgcggcggcggtttgttcccgccgggtccctcagcggaggcgctacgcccgcccctgtcgcctcgccccaccccgcccagggagctccgccctagcccgcagctcttccgccttaggcagccgctaggcgggagggacaatcccccaccaccaaccactgccaccccgaggggactaggggctgaggcccgcccaggtaagggaaagcctcagctccttccgttgcgccccagcggcgggtcccagctcggattcccggggtagtggcgggggccgccggcgggtcgtgccctggaaggtgagcgcggccgagctgggccgccagggggcgctgcggagccgggggacacccctccctgcctgcctcagtcccccgccccctccccgcccgcgcgcaaaacgcactcgccccagaggcagcgcggccgagcccgagccgctgccggagcggagccggagagtggcggcggcggcggcagcggcaccatgaccctgggcagctgctgctgcgagatcatgtcctccgagagctccccggccgcgctgtccgaggccgacgcagacatagacgtggtgggcggcggcagcggcgggggggagctcccagctcgctccgggccccgcgccccccgggacgtgctcccccacggccacgagcctcccgcggaggaagccgaggcagacttagccgaggacgaggaggagtctggtggctgctcggacggcgagccccgcgctctggcgtcccggggggcggcggccgcagcggggagcccggggccaggcgccgcggcggcccgcggcgcagcggggcccgggccgggaccgccgtcggggggcgcggcgacgcggagcccgctggtgaagccgccctactcgtacatcgcgctcatcaccatggccatcctgcagagccccaagaagcggctgacgttgagcgagatctgcgagttcatcagcggccgcttcccctactaccgggagaagttccccgcctggcagaacagcatccgccacaacctctctctcaacgactgcttcgtcaagatcccccgcgagccgggcaacccgggcaagggcaactactggacgctggacccggagtcggccgacatgttcgacaacggcagcttcctgcggcgtcgcaagcgcttcaagcggcagcccctgccgccgccgcacccacacccgcaccctcacccggagctgctgctgcgtggcggggccgcggcggcgggggatcccggcgctttcctgcccggcttcgctgcctacggcgcctacggctacggctacgggctggctctcccggcctacggcgcacccccgccggggccggccccgcatccgcacccgcacccgcacgccttcgctttcgccgcggcagccgccgccgctccttgccagctgtcggtacccccaggccgcgccgccgcgcctccacccggacctccgacggcctcggtgttcgcaggcgcgggatcggccccagctcctgcgcctgcctcaggctcgggcccgggcccgggccccgcaggcctgcccgccttcctgggcgcggagctgggctgcgccaaagccttctacgcggcgtccctgagtcctcccgcagccggcaccgcggcgggtctgcccaccgcacttctgcgccagggcctcaagacggacg

SEQ ID NO: 1879449 - DNA, 4001 bp, Homo sapiens
ccgcccgtcggacagtcggtcggtctttcgtggccccgcgcgcccgcgctcccggctcgtgcgtttcctttgcttgctgcctccggctccgctccccgcaggcctggccgcgcgacgggcacccagcgggttgttatcaattattcaggccccaagttcacgggcactgcatccatttccctcgcgtgcgcccggggccaactcaggccgcaggttgcgatgctcgagcccttggacccggctggagagaagagcgcagtgagcggcagcgggctggactcctggggcttcctgagccccgaggccccccagcgatctgggaagaaaccaaacgcctgttccctttgatctggttttatagagacttgaggttgacaataaactttgcatgcttactagctatttcgatcttttattcccattttgggaaggagtcaccaacgcggcgaacaatccctgcgggctggcaagggtgtgcggaggacccgtgcacggggatctgcgcccggccacgcgagggtgcgggggcgacgcaggacgcacccccttccccacatccacgctcaactcccgctcgccccacatacctctctctccttcccctacacgcgccccggacctttccgcaaagcgggagcgggaggccgaggaaaggtcgcggcgtggcggggagactagggcgcccggaggcacagggtgcgaagctggagaggagctgagagccgccgccactgccgctgccgcgcctggaccctccctccgcagtccccgcacccacgccgagactcaattactttcaggtgtggaccatttaataaaataaatcttccggggcaggaggcaagtttttaggggccaaactcaaagcagccgatttctaatgaataaagaggggcttccctaaaatatcatacggttttggcggagggggaaccgaagttggggaacagggagtgtctcttcctgaagtgatactgtcattggctgggtggagaggcccggagagacttactttctgtcgctttctgactctccttgtctctgtctccagccatctctgttcttgagtacatcagaatggaatcaacggtttttgcatcgaatcaccattaaaccagccagatcctccccaagcggagacccagtgaaactgaaagctctttccctcacctctttctctttgtttctcctttttctccatcatccattgcccaacattctcttcatctgagatttccaaacccggctttgcaatactccagggagactccaatttactctagggctttgggaaatgctcaaaatgaaataaactttaattgactttaattatttaactgcaagttatagacccctgattggtcaggggaagcagagaggatgttggtgaatcaaacaaaccatcccaggatgtcacagctccctggaggtgaggaatgctggcttcagcatttcggggctcaggaacgaatctgggctccggaagagaaaaccaagttcccaggagagtggggatttgatttcttaaggtttggggtcaaggaaggctctcactgacaagagggactggacactctgtcctaccctgggctgcctcccacacccccttgctaaccatctccatcccggtttttggaggatgaagggagtgggtttcttccttcccactgcatgtaaaatccttcagtaaggtctagtgacactggacaaactgcttccttctctgtttgctagaaaattcagaccacaacacaacttttgtatgaatttcccaggaatcggagctgatgtaaacacagtctattatggttctgctcttttagaagagttactcaccccaaagtctcagagggctccttctgcctcctcacacggccagatctaggaagctggtggagggcaactcactctgatgcagcacctgacaagggcccacatgtttcccgtgcagagaacaaatttgccccattaaagcgttactctgttggggaaaagactgatgcaatattggaaacatgctgggcccactgtgagagccggaagaagaggcagatcttcccaggaaggcagcaaaggccagtgggcgaaactattcttgccacatccaccctcacttggcctggtaaattaagggagggattattgaccaaaacatctgcacagagcaagactatggtgctggtggtgtcattacagggagggcatctggggacagacaggggaagatggtgccagtgtcttggggagcagccaggggagtgtgacttgtccacctgagcttggggccagactggaaagggaccatgtagctaccaagtccacttccaagagcctgaactttaatggaaaataattccatagtttgggtcccagcgacactactgatctaagtagcttattaacaaatggaaaatatataaaccacacaacaattgcctctaagaaaaaatgtattaaaatccccccaagttatttgcaaaataaatagctgagaccatatgggtgagggggagagtggctgtatcctaactagctgtgtgctcttggcaaaagttccctctctaggcctctgttccctcatttctaagtgaagatggcaaactagatcaggggttctcaaattttagagtacattaagatcacctagaagcaacttgtgaaaacaaggattgttgggccccaccccgagagtttctgatttagtagctctggggtagggcccaacaatttgccttttttttttttttttgagatggagcctcgctctgtcacccaggctggagtgcagtgacaagatctctgctcactgcaacctccacctcctaggttcaagcgattctcctgcctcagcttcctgagtagctgggattacaggtgcctgccactgtgcccagctcatttttgtacttttagtagagtcggggttccgtcatgttgcccaggctggtctatgaactcctgacctcaagtgatccacccacctcggccccccaaagtgctgagattacaggtgtgagccaccacacccggccataatttgccttcctaacaagttcctagctgttgcttctgctgctggcctgaggcctatactttaagaacctttggactcgatgatgtttaagctcccatccagaaccaacattctgttctatcccatactcctatatttcccctgcacaccctagagtgtttacagccaaatacgagaggccgatgtttttacacccaagcttgtaccccctgtcatcaatgcagaataaatctttcagctggcccacagagactggtcaccctgcccactgagggattcctgacctctcaggaaagatattccaatttgaactcctccttcagctggctgactacagcgcccgaatcctccaacagtggctaatgctggttttcttttatgctaagcgtagctgggcctaatcctagctcaatcccaggcaggcctggtgtgtagagggctgccttcagaagggttggcaacagcccagggtacatctccgggcccctcgatgtggcctagtatctgccaaacacttgccccaacacacacaaacacatgtgtgcacacacacatgttcacatgcacacacatgcacacacacttccccacacacagagcacccagtcatcaagaaaactagttttactttgatgtacctctcgctgcacatttgtttcagctcctctcctgcagccacagttttatttatcttcttggcatggcttcttaggatacttccattcagacaacagcaaaaccactcagctccactgttttatgaagtttatcaaacagcaaaatatctggcatctttgtccaacaaatctggtgtgaatgtgcctacagagctgcttttccccagacgtcccaggggctgtgtgtggttacaaataatctcccctgtgaggaccctgcaagggcttgcctgcttcttgctgcaaggggcccccaaagcatatgtagggctacaaggcatctcccaaat

SEQ ID NO: 1879450 - DNA, 4001 bp, Homo sapiens
tgtaacttggggctgaagatcacgtctgtccagctgcaggatgagacagaccctcagaaaccgagggagcaggtgggagggactcgggctccggctccccagtcgctgtggggtgaggggcctgctcaggtctgggtgtctgtgcccagaattcacggggaggagccagcccctcatgcgggtgcctgtgagagagcaacagggtgggtcactccagcggaggaatttagctgagaaacaggagcattcccagggtgaggggctctagaaaagctgggactaagggccctgactaggacgttacgggaagggggtcttgaattctgatctcgtttctgcctaagacctatcgcctttttgaacctcagtttcccctttggctgcatagggaaggggtgcccacatgcccccgcccgcattcagttcgaaggaccagccagtaggccctgcgccgcccagggaccgcccggcctttgcgtccggcccagctcaagccccttccgccgcgcgcggcctcgggagcgctgggcaggcagcccgggtgggagcgcccacgtctcccgcggacacggacggacggatggacgggcggccgcgcaggcccgcgccccgctcccgccccgcctgccgcgcctcccggggcgcccgcattaaagcgcatatgcaagccatgaattatcaactgaaaggagtcaattaccggctctaaaaacgagtgtctgcgctcgcagcgccccgggccatccgcctatttacggagcgatctaccccgcccggctggggagggggcctcgggagggagagagacggagaaacggagcccgagaccgggagagagccggagaggcagggactggagagtctgggacacgaaggagaggcggggagagaccgagattcagcgagacgcgcggagggccggacgggagccaaggcggctcagttcctcttctcccccgagcaggcgaggagaggtggggtctcaggacctccaaggccctgttccccttccattggcatttgtgtaaggacgcaggccctccgcactgctgactgtggcactgggcagggagtcccctagactaggggtttggggttagatctggggctcaggcagcgctgggctgggcgtagtttgcagagggaccggccgtcctggcaggaaactggggaggaggccgcggctttgtccagggtggaggtaagaacgatggttggacagcatgaccacgagtaaagggaggagggcttgaggatagggacaaagtgatgtggagcttatgtaggagatgatgcgcagcctttcagcattgagagagaaaccgggagaccagccagcctcagtgggcccaggaagtcctgcttcctccccacccgctcaagctgttccctcctctggaaatgcttttcctgccttccctctactcattctgtgattcctgccctccccagcctctgtgctaccttagcctcaacacaatacactcattattattattattattagtgacagggcctcactctgtcacccaggctggagtgcagtagtgcaatcatagctcactgctgccctaacctcctgggctaaagtgatcctcccacctctgtctcccaagtagctgggactgtaggcacatgccaccatgccctcctaattttttaaattttttgtagacatgggtcttgctgtgttgtccagcctggtctggaactcctggcctcaagcaaccctcccacctcaacctcccagtgttgggattacaggcatgagtcccacgatacctggcaacacaccccattcaattccatgatccagacctgactttaccatagggccagaccttgtccatgttgctcagtattgtgcccttggaagaaggtccttgaatgtttcctgaaaaaatgaatgaaggagtaagctgagctggaggacacattggcctggacagaggctgtgacaaagatggcagggctggtgagcccagatatgggcctcccatacagatcagatggaaggctttaggcaaccacagtactggggtgaggtcacagaagctgagtccagcccttgcttggggagacgggtacaggaagtagcaggggcagggagggaaggggtagatggagagttgtcatcagcaccagcaagtcaccgcaagagccccggggctttgatttgaatgcttcacggcccctgaaatcctaggtctcttctgggggaagaggttcagggaacccccagtgactttgaggaaggaatggggcctacactggggcagtgagaagattctcatcttgggaatcaaacagagcctttctcttctagctgtgggatcccaggcaagcctcaacttctgagcctcaggttcctcatctatgaaatgttgctggccaggggaggtgcctcacgcctgtaatcctggcacttttgagctcaggagcaacagactttgtctctataaaaaaaactagctgggcgtggtggttcatgcctgtggtcccagctactcaggaggctgaggtgccatttttgaggctacaaaataccaagcactatgataatggattatctctctactcttcacaacagcttctttctaagattgctaagtcattttgcaaacaaggaaattctaagacaggcagggattgggaaatggcagataaagttttgaagccagttcttactccagagtctctttaacctgtgcaccatgaagcctcctagacctggtccatataccccctgccctgttccctcagcccttccagcctggctgagtccagactgggggaagtgggggctgcacagcaggcagggcagctcaggtccagcagaggtggcccctggggtcttgttcctgccatggcgtggggtgggcgtctgtccagcttgatgagtctccagccccgccatgccattagcgggcagccagagggggtgtctgcaatcgccaacactggggttcccactgctgcttgcctattagtggctggtggcttcatggtgatttattggggcttcttcatttccccttggtccgctataaacatatttataccaccagagtgaccgataaatttcccttatgaatcctgttatctcccctattaaccatccgtcaccttttatgtggccacagtgggccaggccagggcaccagggctgggtgggaggcctgcagcccacagccccggagcccagtgaactcttcacctcccccactgctccccagacagggcagctgctgcctcctcggagctgcctctaggataaggatatggtcctgggaacagactgaacttacgcggggcctttgaaatgtggcttcctccagggtctcagtatgggaagtccctctcagggttaacctgagtctctcctactgtagctcagccttcatctcttctaagtgatcaggagcctcctgaagctgctactgctgctgctcttccttctctccccaccctcagctctcatccttatcctctaagtgcagcagaaaactgagacacagttagatgtagcatggggttggggggagatggcagctggcatttgctgagcatctcctctatgccagtcactttgcattcatgacttcatgtgatcgtcacacaatcctagacccaggcatttatggcttcatttgccagatgaggatgaggaaataaggctcagagacattaaatgaagagcccaagatcacccagccaaagggcagagctgtgatttggggcttttctggccccaaagctggtgctttcaaccactgcactatacagcctctttgaatgctcttggctgggagaggttaatcaaagaaagttttccagagtgctatggagcaggagagggaagtaaagagaggggaggagagggggccccctgtggaaggctgatcgggagaagtgggcagggatgtggagtagggagtaacctcttttgctttccagtcagggaaacttggacaactgttcagtcaggccccatgttgctg

SEQ ID NO: 1879451 - DNA, 4001 bp, Homo sapiens
caaaaagaaacaatgcggccgggcacagtggctcatgcctgtaattccggcattttgggaagccggggcgggcaggtcgcttgaggtcaggagtttgagaccagcctggctaacatggcgaaaccctgtctctactaaaaatagaaacattattagctgggcgttgtggtgggcgcctgtagtcccagctacttcggaggctgaggcaggagaatcgcttgaacccgggagaaggagtttgcacctagccgagatcggagatcatgctcctgcactccagcctgagcaacaaagcaagactccatctcaaaaaaacaaaaacaaaaaacaaaacaaaacagaaaaaaacaagacagaaagaatgcccctttgtaaaggtttttttaaattcacagagacttgatagcatcaccattgtgtttgttatttcccagaagccagcagggaacgttctctgctcctggagctggtaaaaatacaggaagtagccaagggcattataatcattagtcactgagatacaaaccttcagttctgttacccagggaacctaaagtgctgcttggtgtaggtgggagatgattaatctctccgtgcacgataaaaagacagagctgccacccggaattagtctgtttatgtagaatgaggacagccccaagagtagatgggatttaaaaatagtaacaattctcccccaaccccaaatacaccatttctgaatgttgtagaacattcaggaaacaagaatcattcataattctacccctagaagttaccaatgttaacattttgattaatactgtaaacagaaaaatcaaagtctgtaaaatatctgaaagagaggcttagtcaagccagtatgagtaacctccgcccccggaaaacaacccaagaagccttgagtaagtggtcccgaggcagccgcatgtgtttggttttatacatttcaggagggcaggagttacaggcgaagacagaaatcaatacagggcacatatacattagttcagcagaaaaggcaggctatcttgaagtagggggcttacagaggtaagcaggggttttatagatgataggcagattcagagatttttaaaatttgcattagaggagtaaggctctaaaacttggagtcagcagaaaggactgatttttaatttttatttatttatttatttatttatttatttatttatttatgacagagtcttgctctgttgccgggctggagtgcagtagcgcaatctcggctcactccaacctccgcctcccggattcaagtaattctcctgcctcggcctcccagacagctgggactacaggcgcttgccaccatgcccagctaatttttgtatttttagtacagacggggtttcaccatgttggccaggatggtctcaatctcttgacctcatgatccgtccgcctcggcctcccaaagtgctgggattacaggcgtgaaccacagctcccggccgaaagaactgattttttaaatacacgttatttgaatttttcacaactacatattattatgtattatctccctccctcccttccgtccttccttttttgcaaaaccaatgcaatcactcttggggtctcgggggcaatgggatcacgtcaggctcaggcgctcccctgggcgcacgctgggtgaacaagccgcctccgggcgagggtggagctccagcggggaggctctgggcgcaggaggcttaccaagaggagtccgcggcagcccgggcctgccccgcgggctgctctgggctactgggatctcaccccgcgctcggcgaggcgggcccgcggcgccctctgcagggaagcgggtggcgcacgcatgctgggcgctccagtatttgtggcggggtgggcttctggttagggtaacatctgcatctccgcttcacagcgtacaaggtgccttccactttgcgctggctctcccgcgaccctgggatgccttctgtcctccaccggagaggacgctgagaatcgccgttcctggcgaagggctagaactcaccagcgcccggctccatagcgccctctgccggggccgaggggcggggcacgcgggcggccgagcgggcgggcagggagggcctcagatccccctatccccgcgggaggggctgccagcctgggtcagccacgcgtggcttcctgagactgggttatggctatttcccacctccttgcctctccctccttatttccctccacctgtgtgtgtgtgtgtgtgtgtgtgtttctaaagcaaaaacaatttttttttctattctccaaagtaatgcgtattcattataaaaaaatttttttgggggggtagaaaacacagcataaaaaagaaaatgaaatacctttaatctcatcattcagagataaacacatgtttagggtattttctcctagtgtctttttctatacacaattatatatcatggtaagtatatatttaaaccaaccaggcaatgctgtcgaggagtcaggccccgtgtcgaactggcgccgttgaagagaacacagaacggccaaatggcagggagtaggggctccctggccttaaaaacggggccttgctgcttcttggtttgataaactgctctggttcccaagaaagcttgtcttttcctcctcagctgttggctgggggtaagtaggtggcggtggtcagtgggtcccgggaggaagaaaacttggtctcaaagttcactttcataactagaaggctcgggccggacgcggtggctcacgcctgtaatctcagcactttgggaagccgaggggggcagatcacttgaggtcagtagttcaagaccagcctggccaacatggtgaaaccccgtctttactaaaaatacgaaaaattatctgggcatgatggtgggcgcctgtaatcccagctactcgggaggctgaggcaggagaatcgcttgaacctgggaggcggaggctgcagtgagctgagatcgtgccatcacactccagtctgggcaacaagagtgaaacaacgtctcaaaataggaaaataaaaaactagaatgctcagagagtatttcatcatatgatggaacttcagcccccatcccaacccctggacccatgcttcttcctgctgagtttcactgactacatgcctccctcctaggctgtgagttcccgactgggggaacagtctgggcctttgcacctttttccttcacctggcagagtgctgaagtctctttggtcactgtctttgtcttttttttcctccacacaaacactctttcatatagtcatgtttctgatttgccaatgtcaccccagataagcacacaagctaaatgaaaacaatgtgtttgctttgcacatgcagtgtcaaaacaatgcacccccattccttccagctagattgggccccctaagtgacactcttccttatggaaattctgaacctgcccctctctgcaggatgtggttagagtttggattacagtcattgatttgggagtggtgtatctacttcactgtttacatgtagcatcctaggctctgcttctatctctctctcgctctctctctttctctctttctctttctctctctctctctttctctctctctctctctccccttcttttctccctgtctggtcatctgcagcctgatagaggctgaggcagagagaagagcctgtaggaaaaaaaccatctttggtggtgatgatgatgtggtgtgtggagatacaaagtcaaattctccaatgtttctatccccatgaaatgaagtctctagtgagatcaacattgctcagcaatgcttagtagagtatattttcctgtgtggaagcatgaggaaggggtgcattccccttctgcttggtaaaaataaaggcatcaggaagtattgggttggtgtaaacgtaattgcagtttttgccattaaaagtagtgaccaaaaccgcaattaattttacaccaacctaatacaagccagcacctgggtgacac

SEQ ID NO: 1879452 - DNA, 4001 bp, Homo sapiens
caatggcatgatcttggctcactgcaacccccgcctcccaggatcaagcgattctcccgcctcagcctcctgagtagctgggattacaggtgggcaccaccacgcctagctaattttgtatttttagcagagaaagggtttctccatgttggccaggctggtctcaaactccgacctcaagtgatccgcccgcctcaacctcccaaagtgctgggattataggcgtgagccaccacgcccggcccatgtcttttttttttttttttaactggatgtgtggtatcccatgatatagatgtactgtagtttaatcagtcttttgttattagatatttagattctttctgatctcatactattttgatacttcagtaaatgtcctttatatcgctcttgatatcctggttaagtaaggagaatgaagtgcaatcacaacagtatgtccagttcaggctacagtgagctaaaagccgtggtgggaacttggcctgacaagtctcttgccttcaacagatttgccttacttatggtggctgatgccaaataggctctgggggtaaaatgacagggtggtgcattgggaaacacatgccttgcttcttgtaggtctgatataacagcagctctctttctgaagagacccatagaatgacccacgcactcacccctgcagtggctgccctcacaccctctgctttacacaactggatgggttatgaagcaggtaaaatctctttaacagcgctctgcggaaaacaggccttgagtggcagctgtggatccagctccacttggcaaacttttttccaagagaatggatcttttgagaatacctctgatgttgtggttacaatccatttcagagcttctgtgctcaatttatacttccctggagagctcagtgggctcagtaatgctgaattatactggctctgcttccagattttctaaaatgagaaattgaggaagaagttacattaatgaccttccttcttcctgaaatttcaatcaaatgataggaaagcaatctgcatagtaatgacaagacccctccaagaaaatccctgtgccccagccaaggagaagaacatggaagttgtatctataatgaaattcagacccttccacttctaaatcacagggaggttaattcagcctgtgcaaacacaatcagaagtagcataatatagtggtcactgggacagctcacattgttcttctccgtatggaagggcaatagaaaataaactgtcacctggacaaggcttgtgctgacagggaccttaatctgggactggttgttaaggactttatgaaggtaccactgaccattctgaactatgaagggaagccctgcctttttcagcatctaagcagaaaatataatagccagagttcttgccctaaattctcaaaccaaaggattacacaactagtggatgctaatggtgctaatgggtcacactttagacgagttagagttgttcgggaagggagagaagtacacattcctaaccttttgagagtgtctacccacagacctccattgatacctctgctagccagaatgtggtgctgggggtatttactgttatgacctggcgtggcatttctcatgctttcattgattgctccaatgaaattacatggagcctttactttctgtgattaaataatattaacttctcaagatgaaatagatccgcactcaatcctcagggctgttaatggcaactaaagagccaccacttggtgtctacaacctgctggcattcagcaagattcctcggtctccaagttgttccctaggagccctccttgtctctccattgctgagttatctccagttcttcccaagccagcaattagaggaggccttggccattgaatatgcccattgtccagctgggtttttcaaaaaaagaggcaagctttattccttttctgtttactcttgacaagtgctccagccccagaaaggtttcagagaatggctttcttcctagagttccaacagaactcttgtctgtgttgagcttgaggttctgattggtccttatgcagagctttgtgaagggtggtgtcatgtgtgaggtgggcctgtgtggaaatgctgagtgagaggcactgaatgacaccagggattccagtgaactaagacatttacaccataaaatactgctgctggatggcatgcgctttagtgctggatttgaccctgtatcctttgtttcatcaccttgggggatgtgtgtgtgtgtgtaagtcagcatacctactcctatgtcctttccaaactgttacatgctgtattaatttcctgtggctgctataacaaattaccacaaatttggtgacataaagcaatagcaatttattctctttcagttctggaggccagaagtctgaaatcagcaccactaggccaaaatcagagtgttggcagggccgtgctccctccagacactctaggggagaatccattctttgccttttccagcttctggcagctgccaggattctttggttcgttggctgcattgctcccatcttcaaggctggcatcttcaaatctctctctgctgcatccttacatggtcttctctgcgtgtgtgtctaatctccctctgcctcttttttgtttgttttttgttttgtttttgagacacagtcttgctctgtcgccaggctggggtgcagtggcacgatcttggctcactgcaacctctgcctcgcaggttcaagtgattctcctgcctcagcctcccaagtagctgggactacaggcaactgccaccacgcccagctaatttttgtatttttagtagagatggggtttctccatgttggccaggatggtcttgatctcttgacctcgtgatccggccccctcagtctcctaaagtgctgggattacaggcatgagccaccgcgcccggcctgcctctctattttaaggatacatgtgattgcattttgggcccacttagataatcccagataattttctaatctcaaaatccttaattacatctgcaaagacccttttcccaaatatgttaacactaacatatttgaaaaatagaggttaatcatagagattaagacctgaggcccttgggggatattatgcagcctattacacatgcttcttctatgtatttctcatattgctctgcatgcaaaatagacactttatagattcttctttaattaaatcaaatctttattggaatgaaccccagaagtctgaaagattagcctgtgtgaactcattggtccagtacctcccacccaccagatttcccactttggttttttgttttgtttttgagacggagtctcattctgtcacccaggctggagtgcagtggtgcgatctcagctcactgccttcgcctcctgggttcaagcaattctcatgcctcagccactcaagaatctgggattagaggcacgcaccaccatgcctggctaatttttgtatttttagtagagacaggttttaccatattggccaggctggtctcgaactcctgacctcaagtgatctgcccacctcagccttccaaagtactggtactacaggcatgagccaccacacccagccccagatttcccactttgggaagaagaaaatcacctgagtttcatgttagacactgtaccaggctttccccatactctgacccacggagttcttactctagcttgtgccacccactggagcaaatccccaaagaaggaatggaaagagaatgaggcaaccaagtagaagaggaagtgggaaagcagtttttatggtgtcgttcttttgctcaaaaggtagaggatgaaattgaagccatagggaaatggactagagcatggattcacattccttctgctcatctgcccatcaaatcctattcacatgaaaaagttaagtcccgtggatacaggaacctctgaacataatggtcatgggcatacagcacatgtctggaatcaggccctggacc

SEQ ID NO: 1879453 - DNA, 4001 bp, Homo sapiens
gtgcattagtctcctaagagcccttcttgcccccagatctgtttcccttaggtcattctcagaactgccaagtgaattattatttaaagtgtgagtcatctttttactcctctgtattacatccttcagtgtttccaggaaatgccttcaggataatgcccaagctccccttgagggatcagattccagactatcttgctggtctggtgtctggtcccctgctttgccttttatgctacccaaaaccccactgtgagtggtgccctggacatatccctcctggttcactcctacttatcctttaagatacagctcaggacacaaaaccatcctcccactctcatgaggtactgaggagttcccctctgctgcactctctccagggagatatccactcaagatacaatcaattacctgggtgtctccttttatactgagttcatgagggctcgggacacagcaggtactcaataaatattggttaaattaacttaggaaatgcagaggaaccctccttaaagttactaatgaccacaatactgccagcgtttttctatatattgttttctttataacatttgaacttccttggaattctctccttcctaagggtggcttttttttttttttttttgagacagggtcttgctctgtcacccaggctggagtgcagcggtgctatcaccactgcactgcagcgtcaacctgacctcctgggctcaagtgatccccgcttcagccttctgagtaactgggactacaagcacaccaccatgcctagttaatttttgtattttttatagagggagggtttcactatgttgcccaggcttgtctcaaactcctgggctcaagcaatccacctgcctccgcctcccaaagtgctgggattacagacaagaaccaccatgcctggccttgatatcttcttgatattgactctcaactctctgtctcttcactccataaaagagccttttcttccatatttgccttttcttttttctttttcttttctcttttttctttctgaagtagagacagggtctcactctgttggccaggctggagtgcagtggtgtgatcatagctcactgctgccttgaactcctgggctcaagcaaactttctgcctcagtttcccaagtagctgggactatatgcatgtgccaccatacctgcacatttgatttttgaatgccagtgatacccaagtctctaccttctgcttctcattctaccatctgtctcttttttgtgacctcatgtatgcccctagcttcaacagccacttatgtattggctctcagatctcaatatctatcccagacctctctgttgagctccaaacttatatatccaattgccaacagtaggcattcacatgggtaggcactgcatacctacctgaggaaccctaataaaaacccaagttcatccacacgaacttgaatggctcagagacccttaaattcaatatgtccagaacaattcattatccctgtgtcaggggtccctaagatcacccttaagcttgatgaactcacatgaactagaaagactcacaggactcagaaaagctgttatacttatggtcatgatttattaccgcaaaaggttacagattaaaatcagcaaaggggcaggcacctgagcaaagtcttggaaaaagcaagcacaaacttccaggtatcctctcccagtggagtcacagcaatatgtgacaatacatgtgaagtgttgccacagaagttcacccaagacttggtgctcaggatttttattgtttttattgggggtcatcaggtaggtatgcagtgcctacccaggtgactgatctcagctactcagactccagcccacaggcaaaaaaggcattcaccataaatcacattgttaggataaacttacctagtcacaccggtacagcatggcccgaggcctcaggcatgcaaaatcactcttagcaggcagaatgtgtaagactcagaggtcattttccagtcctgaagacagacctttgctgggttaacacacaggcaacccaggtctgctgactagactatttcctgctcaatcccctaaagctgttcttctgtaagccctttcatccaccgctatctgagccagagattgttttacttaacaccgacatccaatcagagtctacctgtaggaacatgcattcctctcaatcacttcttgcttggattactgcaacctggtatcatctccactttgctttcttttcagcagttctccatatggaattagaattgtgataaatgctatgacagaaggatatgcagttaaagcatttgtaataaatgctttaatagaggtatactcacaatgctatgacaaggagagagagggaacactctgggtcacagttgtgcttgaccaagcacatcactaagccttcagggtaagttcaaaacttcttgaatctgagacccttttaacctggctcctctctacccctcccactgttctcccacaccactttgttcttacaaagctatttgtaatttccctggaggtcatttggtttcatacctctgatcttgtatgttctgttccctcttcaatacttaactcaagcatcctctctgacctcctattccgcaggctaaacatgcttctccccctcttccctgcctcagagccctccaaaacctttattggagcacttactcaggtgccttaagtggcccattggcttgtttgccgcagtagtttgttagtttctgagggcaatggccaagtcaccttccatgttagaatcccagcacctagcatagcaatcctaataagtactcaataaacatttgctgaatgaataaaagggagaaagttcaattctgagagcagagttgtgactgcctccccacagagtcagaaaaagctttatagatgtaagaaccatttaagttgatattgaaggaaaataaaatttcatcaattttttatttgcacataaccaaaattgtattgaaaaacaccaaaataggagatcactgctgcataccttacaaaatcaaacacacttacttatcttggtagatgaaccagaattactgaacttatgataagcctttctgggacataacaaattcaggatgttgtgtggatcattagtgttgctttcttttaaatgaacactcttctgtgagcttggtgtttcatcctgtaggctggcacaacactgttgaagaacctacacaaagatccactgtctgagtgtaactgccaaatgggttcattttgcccactgcctatatagaaccaatttatcaagacagaggcactgcaacacagaaagagtttaattcacacagaggcagctgaacaggatactggagtcttatttttactcaaatcagcatccctgaaaatttggaggctagggtttttcaaggatggtttggcaggcaagggaatgggtgctgctgattggttgggggtgcaatcagaggggtgtgcagaatttgcttcttggtggggccacaggactggttggcaggtccaagtggagccatggtagtcagaaatacaaaagcctgaaaagacatctcagaagaccaatcttaggttctacaatagtgatgttatctgcaggagtaattgggggaagttgcaaatcttgtgacctccagaataatggcttgtaattgtttaggtctaccccttagcagagttcgtgctcctctcatccacctagcctggtggtctttcatttgctttacaaaggtggtttagttttggggaagggctgttatcatttaaactataaatttctcccaaagttagcttggcccaagcccaggaatgactaaggcagtccggaggttcaaggcaagatgggagttggttagatcagatagatccctttcactgtcattgttttttaattgttatgatttttgcaaagatggtttcatgggcatggctgaaaaacatggtaatcttgtggcaactaggacatgttatatccacaa

SEQ ID NO: 1879454 - DNA, 4001 bp, Homo sapiens
cagcgtccgcatctctttgatgcaaattccatccttcagacactcccaagtgagtgtctgcccagtgagaaggagggagaagtaaacaaatagtaagccagagccccatctaaaaatcagcccctgagttactcttcagctagcgctccttatgggccaatgtgcaaagaagcactagaggatgagaatctagccctaaaattccagggctttgttgttgttgttgttgttgttgttgtttggtggaaaaggatttggagctatttctttgctgacgtgcaaagtagtgtaataggccgggcatggtggctcacgcctgtaatcccagcactttgagaggccaaggtgggtggatcgcttgagcccaggagtttgagaccagcctgggcaacatggcaaaaccctatctctaaaaaaaaaattacaaaaattagccaggcatggtggcacgtgcctgttgtagtcctagctaccagggaggctgagatgggaggatcgcttgagcccaggaggttgcttgagcccaggaggccaaggctacagtgagctgagattgcaccactgtgctctagcacagtgagaccctgtctcaaaaaaaataaaataaataaacatttttaaaaagtagtgtgataagtaataattttgtggctcccatgggggtttgaaggacaagctgggaaacttgggagaaccacagggacacagcctttttctgttcatgggactttcagcaagcggttcctggtcagcatgcctggtcttgctgggaactgggcaggtttccaggttcagttcacatgttgtaagcaggcatggttctaaattaaacctggagccaccgctgtccacccagcactcactgccatggccactgtgcaacgccgcagaccactgattctcaaacatctgaggtgaaggaccagggttgtctttttaaatttgtttcactttcctatctgtcataaaaatgaaatattagaaatgtgaaataaagacagacttctgttattagattcaagagacataaaattgctctgtccatttgccctaaaagtttctaaagactgactcaattcctgaacatgagtttaccaacagcaaagaagttagggccatcgctaccagcccaaggactgtgctttgggcctcactgcccagaggcccaggatctaaggccagaagggaacagctgccctccccacgctatgtcaggacagtcctgaaggagaatgaggaagctctccgctgggaagagagcaggctgggctgctgtgtcttgctgtctgtacatctctctggcccttcctgcccagctgcttgagtagactggtaaaaggaacctcttggtggactctcctaccatagtccccatgtgcaggtgaaaattttattacatggttgcggccggagaaacgaaaggtcacagctctttgtaatcattatccaggctcccctacctgaatgcaggctgtagcataactggttggattagtgaagcaggcggtcacctccagctggcatggcctggtgtggcctgggcagggtgagctcatggttgactctgtgttgcagttctccaaggagaggcacatcatggacaggacccccgagaaactgaagaaggagctggaggaggagctgctcctgagcagcgaggacctgcgcagccatgcctggtaccacggccgcatcccccgacaggtacctggtcttgtcccttccagagcatacacggctgctctcaggcaatgtacagattgatgacccgcagggtcccactccgaggccacatgggcggaagcacctgtgtaaccaaaaacaaatactctaaaaatgacttcatttagacccttctctaagaagaccttgggaagagctgaggtcaagaacccaaagcacacatccacatgttcaggaagtgaagggacagccagcgctcctggggtctgcaagcacagcgttgtgggaggcagcagccacagagtcagtaaccggaagaactaggagggcgggctgtggcccaggtaattgaactcttggccagctgccagcagcctcagaccatttgcagcccctccttctcaaggcagtggcttagcttcgggaggagagagggcaggtggcccagatcaacaaggctgcctctgccccattgagctggcagttattcacactctccatcacttccctactggatcctgtgacccagaggtgggaaaaaaggggaattaaacccatgaccacagactcatggcccagaatatactttgtgatcgtcatttgggtgattgccataaataatgttttttcatttaatactgtaaaaattgaaaaatagagtaagtctgcagaattgaggcatagaatttcccttgggtttttattgtaaacctgatctggccaatcattaaccaaggacaacatgacaggaagtgtgtggacaggggctggggggaagggcatcatgtcgtaagttttttttcttttttttgagacagagtcttactctatcacccaggctggagtgcaatagcacaatctcagctcactgcaacctctacctcctgggttcaagcgattctcctgcctcagcctctctggtagctgggattacaggtgtccaccaccatgccctgctaacttttatatttttagtagagacggggtttcaccatgttggccaggctggtctcgaactcctgccctcaagtgatccacccacctcagcctcccaaagtgctgggattacaggcatgagtcactgtgcccaggcttttttttttttttttttttttttaatgtagtagatttcttggcacaatcaaataaataattattattctgactttgtttttttaagtttaaaattgattgtagaaaacatagatagcaaaaagaaggaaattaaactcttatccataattctcctcataattctcctggggataaccacgatgaatacttttgtgtacatacatcctcccgggctttttgaaatcaagtatgagattgtactacatatacttttttggtagcccattctactcacttactatgtcctgggaattttcacccactgtagaatattcttctgcaccagcctacattgtatgtctgtccacggtatgcatgcactacaatttactggacacatagggtgtttctaatactctgaccaatatcctttaagattgctgtgttcatacctacaattattttcacaggctcaattctaagaagtggcatttctatgtgaaaacatttttaaggcaaagatgcaattttaaagtaaccatggtagcctactattttgacctaacagaagtatactgttgatcaaatgttggaatgttccagaaaaattgtcagaattataaaaccgatactatcaccaccgtccgtctccttatcatggtcattacattcgtttactacttgcatgagtattaattttcagtgataaatcgttccaaactggataactgaacactataaccataaccgtaataacgagttattgctaacattttagccccttaaatctttgtagccattctataggtaatattatcatttgtgtttttcagatgatataagtgagccacaaggagattatgtaatttgtccagagtcatacagctgagccaggatgcaaacccaggtggtcaggctacaggaacagccaggctgcaccacattataaattctccagttgctgtaagcagcagcatcatgcttgttaactatttttgagcatccactgtgttccagtgcttacatatgttatgtatacaaatacataaccctgatagtaactgtaagatgagggaccccagcctgactttgttctaggccttctagccagtaattggtgtgtccagaatctataccccagtcctgcatgtggactcctcctccccactggccaggcctggagaggggcatcttaggagagggcccctaggatgacttctagacaccaacaaatacccttcttt

SEQ ID NO: 1879455 - DNA, 4001 bp, Homo sapiens
gccaaatctctcagtttatgtccttgccaagggagcaaataataagcaactaaacaaatatagaaaaatatgataataggacaataaattgtttatagaaaacaaagcagagcaaaggctagagaatttttcatgggatgatccacagaggacagttgaatagaactctgaatacagtaagaaaatgagctttatggggaatgaacattcctggcaaagaagaaataaagtgcaaaatctgaaatcagaacaatcttagcttatcaaaagttaagtcagaaataggtgtggcaaatgaagtgaataacctagaaccatatgagagacaaggttggaagggcaggcatgtgttgggtcatgcagagcttccttggtgtggaaaaatttgccttttgctgtgagtagataagaaggctcaggagatctgagtggaggagtggtgtaatctgatgtacaattatgaatgatcagtctggctgctgagtggaaaagtgtcagtaggtggaaaggagttgaaactgtgtcattaagaagacattacctggtttaggaaagatgacggtcatttggaaaagggcagaatcaatcatggtaatgagaaaacacagtttcgggaaatattttgaagatgaaacaaacgacttgctgagaaattgaatatacagtataactgaacattttcaaaaatggtttataggatttaagtttaaataacaatggaaaacctaatgtcattttccaagatgggcaaggcaagaaggaacagatgtgggtgggtgtgcaagaggtaaataaaatttctttttagacatgttaagtttgaaataaagtttaaatgttaaaactagtaacattttatctaaagagttaattttttttctgtttttctggtaacctttagttactgagcttaatgtagatttttgtgggtttttaaaatttgtgtttcacttttgataggagggtgttgtatccgcatttctatatatccccaatgtattttttttttaaatagaaaggcactttattacactgcccactcacaccaggccaggacaggagtcactctttagaactctgaggggccgtccaggctgatggaggaggggacccactcacctgccacagagccggccccctcacatggcttcctccctgaggagcatctcccatactggggcttccaacgaccttcgctctgcgcgtgctgaaaggacagagttcagaatcagcctcagcctggacttctgttactatgggaggataagcttgtcatgctcagtcctagtaccatgcctctaaacgtccttcagacggcgtcggggctctcgccagggagcttggttactgtttcaatcccccgcccggcaggcctcacggccaactttctcaatgtccacagcagacaaaaatgtccacagccagagctccaaagccctgccggccctggtgccactgccgcctctgcgtccggagcctgtggggctcagctctgctgctctggcccaagtctggcctggagtccccggtgccctttgcaggcacggaggcagctggacatccttcgcttcaccagcctctgggcctgcaagcgcttctggagcgtttcattttccttcagagtgaggaagagtttttttcttcagggaatctaagtccaaaagggcatagctgtgatcagatggctgcttgtcggggggccttctcaagcctgcagggccggccggccggccaacagtctctgctgcttgcggactccgtggcgagatctgttttacggggcctttggcatttgggggcaactgaagctcttcaagcgcagtgtccatgtttctcccagggctgtcctctccggcccccgcctcagggaggaccttttctttctgagaagagctggcatttcctctctcactggcagtgtgtgtgttctccctcacctgcggtggaaggtgagctgcttcctgcggctgctgtagcggttgcagcactgccaggccgcgcacgacttcggcatctccggccaggcctggctgcccgtaacaaagatggcggcagcggggccggatgtatttattttgttatcttctaagccacagaaaatagttttttgatataaatatataggtttatcacagatagtgttttttttttctttaaatacagcattatctttctaaggctaggtagctaaaaaataaagcctgtaaaaaaagtaagacatgagtaaattaatttatggaggcctgcctttctcaaacaactagtaaatactaacaaatactattttaagacactaacacttatatttaaaatagaacttttcaatcttgtgacattttacttagtctaattcataatatatgtacaacttgtgggatcgttttgtaaaagtatatagtttgacataaggattcaaagttgttctctaaatgtttaaagaagcaataaatctaggtttgaggatatttggtacataaattcactgggaaagaaaaagtctgtaataaataatgtcatggtaaaagtacaagctatatattcttttactattatttgctagtattccacatactactttttgatcctttaattgaaaatggaaacaaaatgaaaaagcaggtctgtatttacaaagtttgtcctgcagtattttgccacaggtccctgtaaaattcattcctttaaggtaacacttgaattgcaaacattatctcagcaaagaaaggcagcattttcttacccattgggatcttaggaaaagcgatctgtttccgagcagatcctgaagacatactaagttatataaatcgagaaaggggaagatcaaaaccttggcatattcctcaggatctgctatagtggaaagtctggaagttcttttaaaatctagaaaactggggctgggcacagtgggtcacacctgtaatcctaacactttgggaggccaaagtgggtggatcacctgaggtcaggagttcgagaccagcctgaccaacatggtgaaaccctatccttactaaaaaatacaaaaattagccaggtattttggtgggcgcttgtaatcccaactactcgggaggctgaggcagaagaatcacttgaacctgggagatggaggttgcaatgagctgagattgccccattgcactccagcctgggcaacagagcaagactccatctcaaaaaataaataaataaataaatacaaaaataaaaaaaattataaaactggtagacaaggatgagaaaggaagtacatagagggtaaaggcaaacagaaagacagtggcctgctgcattatgcagtctggggttaatctttttcttgtacattattctgacttcttaaaggatcattatgaatagtttgaaaacaattattttcggtcatttattgtcttctggaactcaattgtgtactcataaaacaaagaaagtaaaaatataaatgagacatttcccaatatgtcagataagtgaattttattgtactctaagcaaggaaagtacattatattatttcattatgctaaaacaaaaattagtgactccttgggtttagtgatacaacactgatttacctctaggtcatctgataattttaagtgacctgtggagactaaaaatgttttatgtcattttccatgtctgtgacagcaggacttggggaaagatgattaagaagagcctttatgcatgaagataagcgaatgtaaaagaatagtttatattcatatctcaagaaacagatgacaaatatgttttattataacatttaaaattatgaaaatcaaccacatccttagagagctggctaattctaaaataggccttttatatttgactctgaaatagttaacatgtgaactgtggtcaaataaggctttaaaaggaacatgtttattaaatcttgtgttaaaacctactaatagtgatacacttactaaaattccaacaataaaggaaacctctaaaaatttatgtacttcattttttaaaaa

SEQ ID NO: 1879456 - DNA, 4001 bp, Homo sapiens
ctggaggtgctcctgggagaccccagtggccctggcccagcaggaggtgccctccagggccttctgcttccttcagtccagagacctcaggggtggcacgggggtggcacgggcatgctgggcatctgtggcaggtgtttatccgcccccggctgtcgccctgagcttcagaacacgctgagacattggcaattgctttaaaacgtgaggcggtgtggctttgctttatttcaggtctgactcatgtccgtgctctctcgaagcctccttctctccctcctctccccagggcagcccgacctctgtgccccaaagcccaaagggtgtgaagtctggaggtggctgagaacattccagtttgtgtttgtggcaggtggagcagggtaggaaggcagcatgtcccactgctcgggctggcccagtcccccatgcacgacccccgggacggaggccacggtgaggcctgttggctgtcctgccaggtgaagtccagctgggaacggcgggggtgctgcgtgagcacagctgcccagggtggccgggtcagagcccgtctcccacactccccacacgctcacccccagcactgggcttttgctgcaaaagcggcagacttagagtctcgtggaaatggagggtgagactacaggctgtttcggggtcacagcagggcacgccacctgcttccttatcagggatgcgagggtccctgggctcctcctgcaggggtggctggagactcaggtccttgcccgccagccctctctgggactttcgagtcggttggtgcacttgcgggggcccagcaggggtacgttcgtgacgggctatttggcaaagacagccattctccccttctcctccggtaagagtctttgccagcacattgcgcttcttgtctctgtgtggcctggtgtggccgggccgtgtaaccaagctctgagcaatggcagtgagtgtggcgcccccagcaagcttctttagaagcggaggggcccgaaacccgcttttcttcacgtgctggttgcttcgcattctttagtttcatctttctgaactcatcacaatcacaggggatcatattcatatgcttgtcaaaagccttgaaggtgccaatgaagactcggccatcttgtaggatacgtctcattctgtggtccgtgtgtggcagcatcttgctactcttgcccacggtcacgactgccgttcccccagatccaatgtccacagttaaacttggagcttctgaacctggtatgaggccacccacgggcccaccaattgggcttccctctgctcgagggacaccagtaggcatgccccctccaggaatgagaccccctccaccaggaattagaggtccacctcccctaggaatgagtccaccaagaccctagcatactgttgatccatctcagtcactttttcccctgcaatgtgtcttgtgaaattgtgtagagtgtttgtgagctttttgtcccctggttctgcattaataatagctaataataaatgtatagagcaattaaaaaaaaaagaagaaggggagggtgcttctccttgccacttatgcttccccctttctcctagctggaataggggcatgacggctagagcctgtgcagccatccaggaccatgaggtggtgcaggaagatgacagtggcagaataggcaacaggaactggggtccccagtggctggggagggagatcacctctccctcttgagctcttatgggagcgagaagtcaccgtggctgggctgaagccactctagtgttgtttgctaaaagtagccacatctcatcctaagcacatagcctgcttggaggaagccaaatgtggcagggcgttggggaagcctgtgccacgcagcacagggtcagcggcggggagccacctgaggggcttggtgagagccgtcctgctctctgactgtggccaggctttgtcccaggtgggtgttcctagtgggcatagtctgtgactgcagggagagggctgcccagacctggagcttccaccatggatgtgcatgtctcagccactggctcaggagagtcctcggaagggacttcggcgggcaggtaccctggagattttctggcccaagtttctttcaggcctcatgttggattatcttctggcctgaagctctctggcctgatgtctgtgccctgtaggtgagtggctgtctgggtaggagatcctgcttggtggctggagggcgtgtcacggtcggtgccaggcgggcaggtttctgcaggtgcggtctctgcagccacggggcaggagtctcaagagacaccctgcgtcccatggcccccagccctctcccaggtaagcacagaggtggaaacttgaggctgggaccagcacagctgcctgcggtcccaggacgcactgcaggccaggccagaggcttcaacggggcccacctctttgcatgggtctggccagagggaaggacgcctgtctgggagccaagcaggcagcgctgtgactgggccagggacaaatgtgagcaagggacttcggtttcgtttttttgagaatgcgaagttcatgcttacaaggaaatgattcctagtgtattttccctggacacgctggacagcctcagaacgccacccttttgttttctttcaggatgatggctaaagccggcccccctgtccctgctggctggttgtgaggtcttgcttgattctagggcctccgtgcagctgggcctgagcctgtctggaactggcccacccttccaggcctgagcaggggttgctgactgagagagggtctccgggagctgcctccgacctcggggtgatgctggtgggtccaggtagacagagctgtgttcctgacagtgaggctgacacctctgggcctcccggccaggaatactcttgctgaagccatgattactttagttttctcctacttggggatgaatgctgtcctggctggaactgaaacttagaaatgattccgtttcctctgcagggctcctggccggagtccccgatcccctaggggcctgagggctgtggtgggggcctggcagggctccaggtaccgagagaggccctctgcccagcaccctgctgtcccggggcagggaggccacatgtccccaccatgtcccagggtgctgtgaaggccacatgttgggggcagactttcaatgggagatgggaattgggaagaaaagtttgtgtcaactcctgcatggaatgaagggtaacaattcatggatcatggttgggaagcagcaagcccgataaatcagtcctaaatgggattacggattacgtaaagaagggaagataaagactaaagaggccgggcatggtggctcacgcctgtgatcccagcactttgaggggccaaggcgagcagatcacgtgaggtcaggagttcgagaccatcctggccaacacggcgaaaccccatctctactaaaaatacaaaaattagtcgggcgaggtgttagggttagtcctgctgggtccttggcccagtcgctgagacaggagacagacaaagcaaggaccctgccgaccgtgctctggggaaacctgcccaaccagccccttctcgtgaggggttatacagttttaagaaaaggaaagtaaaagcagcctgtaatcccagcacgttgggaggctgaggcgggaggactgcttgaactcaggagtttgagaccagcctgggcaacatggcgaggccctgtctctacaaaaaaatacaaaatattagccgggcacggtggctcgtgcctgtggttccagctactccggaggctgaggtgggaggatcacctgagcccgggaggtggaggctgcgatgagccgagatcacgccactgcactccagcctgggtgacagaaagaaagtagaagcctacgggagtgcccctccctgaccctggcctccccctcctcttctcagtgtggacttgactgcaccagaccccaggccacgctcctctcctccgggg

SEQ ID NO: 1879457 - DNA, 4001 bp, Homo sapiens
gaattatgtttacgacaatgcggagggtgaggtatgtatgatactacattaaagaaactcacactgcctttactatcccatcccaaaactaccaatcatttgccaaatttcaacagatttttaagccaacagtgttttgttttgtttttcctgatgataaaggcccacctctaaaattcatcaagctacagcctattacaatgaaccaacattctagaaccctgctaaggtgattccaggttttaatgagcagggcagggctctaaaaatattttcctcctcttgcttgtattcatgcttcctcacctgctcactggagtagaggagtgtcagcctgaggctcaaagaaagaccccttgagagtctgctgactaagcttgcagcagggacccacatggcatgacagaacgggctccttgcacatatgcagttccatagttagttacatacccacgcataggcgtggatagccatggacggatgaatttttgtatgcatgtgctgtgagccagcattggtctccctctcctttatcccgacccctgaggaatccctgcagttccctggaattcagggaataaagaacgagatgaggcaaatagtcctttttcctaccctggtggctgggaccgctcagtgcctggaatctgcaatgcctcctctcacaagcagctaataaagacagactgaaaagatgagcaagagaatgcatggatccaggaaggggccgctgtacaagagatgatgcttcgggagctactgggctatgatttctattattatttgtatatacatatatatatacacaaagccctaggaagctgcagaggaggcaaagaaacctcgctgagatttttctaacagcgcctagaaaccaccgccaggctccagccccgggctgggtcaaggaattcgagggatgcaggctgaacgcaccggttgaaactctgggcgccgcatcggcactttgcgccttggtgggctttgcgctcggaagacgcgtccacgcaccattttcccaggcgttgtgcgggtttcttaaacctctcagctggtgcctcggaagagtttctggaagctccatctctactgcctcccctcccccccttttgattttacccccgccaggagcttctccagccccacagcgtccgccctgtgaggggtacaggtgccgctgtcccgccggctgccgccccgtccgcccacgcagcgcctcctccgggctagcctgggggattgacccagcgccgctgcttctcgaatggtctcgtgcaggggcgcagcggccgctgcccgtcgcccgggactccccgccctccctcgcgaccccgcgccggggcgggcggcgcttgcggcgggcagggggcgggcaggggagagggggctcgtccgggggtagccgcctcctctgcagcctgccggcgcctcgaagcccggacctgcctccgcctcttcctccagcggctccatcccgcctcccgtgcctcgtcctcccgccgcctccgccgccgcgcccccggtggctgcctcggcggaccggggagggggcccaccgcgtcgaccgcccgctcggctcggctcggcccggcccgggaggcgtgcatgcccctgctgcccgcggcgctcaccagcagcatgctctatttccagatggtgatcatggcagggacggtgatgctggcgtactacttcgagtatacggacacgttcaccgtgaacgtgcagggcttcttctgccacgacagcgcctaccgcaaaccctacccgggcccggaggacagcagcgccgtgccccccgtgctcctctactcgctggccgccggggtccccgtgctcgtggtaagcccgggggcgctcgccctcgtcgccgagtccctgatctcgcccctcgccttcggggttgaggcccctctaagggttggggcgcagtaggttttgccttctaagttcctccaagttatgggcagccccttccccagaggacattctagggcgcgtgagggtgggtgcgaaggaagcccccagctcttcccacacgtcacccccccacaccccgcggtggcttcagcgttgggtgactgggcggggatggaagggaagaggggccgtaggtggtgaggagtggggatccgggttgcaaaggaggtgagctttgggggtgaaccttgattccatccactctgtggccttgactcgctcactgcctcctcttcgattgtgcctggaagaagagcagcggcgggcgggccggcgaggagagaggggatcaattgctggggtgtgaaagggactcccacttcccgagtcggggcacgtatttctatttcgccacctccctccttttcaggtgaaagtgccaatgggactaagctgaccagggaacaaatatctgaaaaaagaatttgagaatttctaaatgaagaggcctcagcaccagtgctttgctgaaaagcaggagctgtacctcaattacaagagcacttcagatttatttaaaggctgctccgctccctgggcaatttaagtccttttctcttagaacctcacagagcatgccttttggatttattgagtgtatgtgtgtgtgagagaaagaatgactatacagatacactcacgtgtatacacacacctcacatatatacatatgaaattattggggataaattacacataataatattaattttattatagtaatttacatatgtgaatatgctacatatttattcttaggagaattgttggtgtttctttagaaaacctgatattttatggttcctttaatattgacaaagtattggaggttcccttcctgtgatgcgcgctctctctctccctcaacagataacaaacgggaaataagaaaatgaaggggaaaggaagaatgaagttttattttcagtagctaaatgtgtaaattgaatgttaagaatgtctgttgaatccattaagtttggatgttcatctttttttttaattttaggagcaatgacttactaatttgtaaaataatgaaaagttcctaacacataagatagaaatcagtgaacaaatcaagtaatttcttgataaccttaaagtaactttatcacatgtcctgtgatagttgacttcaaattgcctctgtcataatggtttgaaatgtgttagaccttgccccagataatgttttacatatatatatatatatatatatatatatatatatatatatgtaaaataagttgctaaaatgtgttagaagccccaaatccagccttcatgtttgtgttctcttttctccatttgacaagctggcagagaaaaaaaaaaaggtcgatttttgggggccctttttactttctggagatcggggtttcccatgtacagttttccaggagactaaatagctcagatatttttcaaggattgttttaaagaaaaaggaagagcctgtcactttcagctcattggtttggtcatagctataatcaataatgtctgtaactcatcctttaattcccattctatgtcttatttaaataagatagcacttttcagtcctaaccatccaatcatggtggcaggtgctagttagagacgagagcacactcacccaatgatttggatgattctccacttaggaggaatgtaggacggagaaaaagaatgaattagtcactatttagtgcctactctattttgggtaccgaatagtcatagtcacgtatatttctcagagcagctctttcaggagatattatctccaattaatatttgaagaaagtgaggttcagataataaggaatatctgaaaacaaaaaaaaaggtgggtatggcatttgtatgcctataggacggatgcctgaatgccatgcgacttacattgcttccaaagagcttgttctctgaaagaaggtggaagctggctggtcaggcaggcattgagaatataagtggatagatttttctgaagtcagaatccaacttgatttcgatgttttggcttttagttc

SEQ ID NO: 1879458 - DNA, 4001 bp, Homo sapiens
agatagagccctccacagggcaacggctgaactgcagccggcatcgatgactccatagtcaatgaccatgactccttttgcatacctcactccagattggcaaaaaaaaaaaaaatgctgacaccagggccaggtgggttgtggggcagccgctgtgcagagtgtggctagacagcagtttgaagtgtcaggcaggatgcccctttcccaagtatgccgccctgggatcctgtccggggttggggaggcatgctgtcagcacatgtgagggccttcgcaaagggaatttcacctctgcaagaggcctgacaggccacgtctccctgggaaccaacctcctggggtacgaggtgaggagctgcagatgtgcggtggttagcccctgccctttgcgtgtcatccctatcaagtgtgagaaaggacaggcaggctgcagctaactagtgttcctgaggaaaggggtcagagaaacaatgcagatgctcaagacctaaggctacgtgggagctgcacatagatggatatacttgcaagtgtggggacaatggctgtgcaccccaccatgcctgggtgagggcgtgcagtggcccagattccttggggagtgggacctgtgggcccccataggaaggctggaaaagtcaggccctgctgtctgcacagactctagcctgggaggacacagagtgagggaacatgatggggcctaggggctcctccagcacgtgcctgccctgccctgggcttgcaattgtgattggctggaatccatggaggtggagacaggagccccaggtcaagttgttgctggctgtggcaaaaccaggctccctgcatcctgggggctgtggcctccggagaaggtgcctcccccagggaccaagaccatcctcatgcttgtgcctttccgcctgctgacccagccgaaggggcagctccttggccagctaccctgaagcccacatcccaggtctggggcatccctgagagccacatccaaggccacatccttccctttgctcatccatgctccagagtgtcaacctcagccctgtcccccatccaccactgtgggtggttttggcaggtgattgtgccagcgtcccacagaactgcaactaccagctgcaccttgggtccccaggcagaaagaaggcaggccctggtttccaagtcagtgacttgttccactggcctagaagccaagggtagggaccaagatgtccagtgtcctgttgtctgtacccccaaagtcagcagccctggaggcaggaactccagggacctgggcctctcactcctgcctggggtctgaccccagaagtccccttccacaggccccagttaccctcccactgcaggctctgacctacaggaaaacagctggagctgggctcctaccctgttcctctgggagagccaaaccctgtcctgaagctagaggaaaatccacgggcagaatcctgcagacgcacaccccagatagaccccacctggggccccacgccctaatcagaccccgcctggacccctcgccccacctagagagccgcagctcgtggatcctggccttcctctgcagcctgccgcccccctcccctgcgtgaaggcaccagagtgtccacccccgcggccccactcagagatgcgtgcctgctcccatcggaggccttcggctccgcggcagggcctgcctgctcccgagaccgttcccctcgcctctcctgtcgggaatcggggtcttgggtattaccttcaaatccggccatcttcccgccacagcgaaggagaatcagacagcccgtgccagggacgtgggccaggtcctcactgcccttgcttctgggaccctgtgagggcaggaaccggagccttgccctcatgactttggttgggggcagtgccaggtgggaggtttcctgtcgggcactaggttggggcgggaggcggggcggggccgggagggacaggcggggagggggcgggaggctggatcgagagggcaggggcgggaggaaggaggcgggaccggggcgggagagccaggtggggcggggctgggagggaggcggggagaggacgggatgggaggggcaggcggggcaggcagggcgggcggcggggcccaggacgaccctggggcttccctggcttcaggtcccttctgagcacagcggggcccgccccccccgctccggtggcaagcaccggccctgcagccccagccaagaaacccagtaacaacccttccctacccttgtgttccgggcagcgggacgcccagggtccagcgaaccctgcaggtgcaggagcaatgaggcgagcctgggaaaacctcctagcccggaggtgcccgttgactcaccgcctgtggttccagcagggactctgtgcgccacagactgtacaaccccaggtccttgttctcccagcccggcaggctgctgtctgttcagaaggaactccaggcaacttaaatatgtggaatcaatcagtgcacttcaaacttatgaaaaggtcgaagaagaaatgaaaagggacattagaaaatacactgaatggccgggcgtggtggctcaggcctataatcccagcactttgggaggccgaggtgggtggatcacctgaggtcaggagttcgagatcagcctaaccaacacgatgaaacccccgtctctactaaaaatagaaaagttagccgggcgtggtagcgcaggcctgtaatcccagctacttgggaggctgaggcaggagattcgcttgaacctgggaggcggaggttgcagtgagccaagactgtgccactgcactccagcctgggcaacggagtgagactgtctctaaagaaaaagaaaacgaggaggtctgagaagttcccaggtatgtgcagttatctcttcacgtcacctcatgggtcccatgtgcaaactgagggggagttagtatgaaacatgcatcgaaattcaggccatgaagtcaacaagctcattctgtggaaattccggctggccatattggttccaattggtttcaggcagttttttcttttttaagagacagcctccctccatgttgcccaggctggggcacagtggcctggaactcctgggctcaagcgacccacccacctcagcctccctaacagctgggaccacagcatgcccgaccacgctagacttatttttactttttgtagggacagtgtctccctgtttttttctccctcaattttttttcttgatatcataacatgggggagtttcagggtttcagcaagttgtttattttcttatgtgccatcctgcaagctcaagaatttctgctagtcattggtctttggtgtgaggttttgagactatgttttctgaagaggccatatatgcaaagtgactcccaaacacagaaggaactgagaaaccaaagaatgaggcagacaaatccagtttgtcacttggaggtgattttttggggaactcacagaagcatggtcttgggcagccacaagacgggtagatctctgcactgttaccccctagactcagggcttatatatttttggggaaaaagtatatgtgtcctggaaggaatgtgcaggcaactgaaatagtgctatgggcatcacagtttatgatgtatgctgtagcatcgagggttgttttggaggaatggcgagacttacggtagataggtgtttctacatagagtacgacttcaactagacatcttggaggcactcccagactcatgcttagttaggcatcagtgtggcagattagaatctaagaggagtgactcttgtccccatactaaagatggaacatttttcaaaaaagtacaagaagacagaatccagcaacatatagaaataattatcttccatgccaaagttggattcctcccaatacaagattggttaacagccaaaaatcatttaatataatatgccatatcaatacaatcataaacaaaaccacatgaccatcttaacaaatgcagaaaat

SEQ ID NO: 1879459 - DNA, 4001 bp, Homo sapiens
ctacagtgacagatttttttgtttcattttggtttttctaacaaactttcagaaagcaaattaatacttgaaaatttctcagaaaccagctctgtgactttagacagcaacatttcaaaatagcttccatctcatctttaaaatgatgagattaaactccatgattcctaatttccttccagctcaaaaatatattgacttctagggtgcataacatgcttttctttataatttatattacaatatcataatttcattaaaagtggtctagatgacaggaaagagagttccactcattctggcttatgctaagggagcgcatttccaggaaataaataagagaatcttgtgagcggccataaacacatgctgaaatacagccaagccccaaagagaaaacccaaggctgcttcctgcctctttctcatgggccgtgagggtccctcacagcttctgctcttgtgagcacgtctgaccccattctccccgatctgcagcagccagctctcccttttaacacataccaggactcctgttttctcatagccccagtttgcaggtggcccatagttaccaccggggccctgagtctgtgtaatgaagtaagctcagctcccatagccaatcccctctcaatttcccagttccaaaatccaaagagagaaatatgattggtgtagctcacctatggagtcaggtttcacagtatagatcattagcagcctgtgattggctgtcctgggggccggtaactgcctgtggtccaatcaggtgggagggtaaggtcatgtaacacaaaacatggccacttaattgtgggtggggcacattctgttagtaagggttaacattagactgtaaagacctgtgctgtcaaataagacagtcactagccatgtgtagaatttgaattcatattaattggaataaaatttaaaaatcagttctagtttacactagccacacttcctgctcagtagctatatgtgtgtctagtagctactacattaagaacgttcccatcactggagaaagttctggtggacatcactgacctctagacaatagagctatctaggggagttatttaatgtagaagatgatgataacagagaattattttactatcttgttttctatcttggtgtcacaacttagattcttagagtccttggagaagaataagaggcaaagcagatgtaatttttctcatgtactagatgcttattgagtgtcctaaggcagccatagggacattctatcagctatcactttctcaaactgcggcctgggtcactgactctggatcggcaagatctgcagaaacacaatgggaaaaattagaatatacattttttaaattcatgtgaccctttcacataaggcacaaatagagttaaagctgtgggatttggtacctgttcaaacgggggtttcattgtctcctccactaaggtgactctcaaaaagtagtcttgaaataggaatggtataggtgctggaggcacagtattcagtcacagcagaataagaaaagcagtacataggtcagggccctattgcctctaatgtccttgctcttattttttggccaaagcgtaaccggggtaccattcactgagtcctgaagtggtaggggtgatggtgatatacctcactagctggttcctatggagtgactttgctctgtgacctgcttcttcatcctcaggcctgctttggctgctgtctgtttaccagcctggctctccagcctcatgtctttcccaggaacccctgtacatagagaagacagtttcccctcagaagaactaaaaaaatcacatgagcctggacctgctaggggctatcactacactatttaaagacaacctgatagaagtgcatcgaattgaggcacgacagagaaagaggggaggagggagacggagggagagaaggaggaagtagtgagtagagagatgcattacagtgacttcatttgtactcttggattcagcgatgccggaagtggcacctaggacttccaggttacgtcagccagtacacttccttttactcgaagggagtctgagctaggtttcacttgcagccaagggaatcttcatttcttcacatcctgaaaccagctaatgacagcagcaaggaaaatgaactaataatttatactaagttataaattactcatgacttaatatttcctactccacgattaattcaggttttggaaagcactctgaagactcaatgcccctctttctataatgctctctctgtaatattttgaaggctatttctccctttatttctctttcaatagagtttaatttttagagaagttttaggtttacaaaaaggatgagcagaaagtacagagtttccatatactcctcctcctctccctgctctccagtttcccatagcattaacatcttgcattgctgtggtacatgtgctacaattggaacattattgatatatttttattaactaaagtttatggtttccattggggttcactctttgtgttgtaatttctatgggttttgacaaatgaatattgtcatatatccattacagtatcatacagaaaagtcgttctgccctaaaaattgcttgtcctctgctattcatctcctcccacacacccctaatccctgacaaccaccgatcttttttactgtctctatctatagttttgcctttcctagaatggcatatgttagaatcatacagtatatagccttttcagattggctcctttcacttcggaatatgcatttaagtttccttcatgtcttttcgtggtttgattattcatttctttgaattgctgaataaggttccattccctggatgtaccacggtttgtttatccattcacctactgaaggacatcttggttgtttcaatatgatgcaattatgaataaagctatagattggatgacctctttctgttatgccctgtatgccctgcctgtcctatttcgaaagctgtttttcgttttccgagagtcactcagatgtcatctgcctaaggaaggcttctcatctcctccagaaggtgttcttcgcaccttgctgtcttccttccctgtaagagcacttcttacatgttctgtaatcgcattatcacatggttgtgtggtttctttgtgtctgttccccaccagagtgaattctttcagaatgtcttacctctagtgagttacttaacctccttttgcctcagtttccttgtctgtaaaatgaagataatttttattgtgagaattaaagaagtatatttatatacacacataccccatctagcataaatgtatatattctaaatatatatgtatatttaggatagtacctggcacacagtatacactatatacatattattctttttattgctattaatattaatctttgtacccatagcaaccagcatgtagatgccacttagtaaatacattttgggcctggtgcggtgcctcacgcctgtaatctcagcactttgggaggcccaggcaggtggattgcctgagctcaggagttcgtgaccagcctgggcaacacagtgaaaccccatctctactaaaatacaaaaaattagccaggtgtggcggcgcgcacctgtaatcccagctactacggaggttgaagcaggagaattgcttgaacctgggaggtagaggttgcagcaagccgaactcgtgccactgcactccagcctaggcaagagagcatgactctgtctcaaaaacaaaaaataaaaataaataaatataaataaatacatacatacataaatacattttgaaccaatagtttccttgtggatgttggttgatacctgactagatgtgatttataatttaaaatcataataactatgccagaagatcaatacctattatcgtaggggtttttctcatgcgattactcagcaattttaatgaaacctgtagactcagggttaagctgccttctgtgaggagggcatgacca

SEQ ID NO: 1879460 - DNA, 4001 bp, Homo sapiens
cctgccgcccgggctgggccccaggtacctggcgaacaaagggaccctgaaattgccgcctttcccctgcctcttgggctctgcatatgatttcagccaatccctgctgcccagcctcgcccacccgcttctggggccacccccgcgttaagcagggctgtgcagcatgggggtcctgttctcattcagccaccggcacggccaccccagtgtgattcctcagcagccacacagaagacagatggtccataggagactcagaaacagagaagcctcacgccaggtccacagaggcacccacgcccgccaaaaggatgccacgcactcaccctgccctctggggagcacagtgggagtccaggacaccgccttggatggggtgaggctccgtctgtgacctcagaaagtcagtctggggctggacttgacatgggaaacagaataaaactgcctgtccacctgagcttgccgccctaaaaatccctgacatgatacagaagtcagtgctgacagagggcctgctacccccagtgaccctgccggtggggtctcaacccacccacttcttctggagcagccggtcacagctgtggtcctgctggcgcacacgggtatgagaccctaaaacacacagcgactgcacagtgcaaccctgcatatcccatttgggtacaagtttcattacaggaagaaacacggggagggaccccagagcagctcacgcgtgggtaccctccgctgtgttagcgtcccggccctcacacggcacccaggcctcgttggggcaaggccttgtgcagacacggtgggatctgcatgtgcactggggcctgtgcctgggctgctgctccccggccaccggtgtcaggatctccaggacccccatgagtggtcagtggagcagagatggcacagacgccagcgacctgggtcattctctacctgggatgtgggaccccagagaccatgctgtgggtctttatctgcctcttcatgcaggagcaggtgcgacccccgcctgccccagccatgaggctctgtcacaggggacctctgtggcaccctgtgctgcaggcaaggccttaggacagatgccacgccactgtccaggagactgtctcctgagactgacctccccttgcactgggcaatgtctgctgaagataaggacgtcttcactgggccaggcctggagttctcccagatcgtgagctttcctctctctgatgaagaggatacctgtggtcaaactcctacagagcactggggacaggaaggcaggcagagtcccacctgggcaggtggtaggagtggaaggagcaggcaggcagcagggctgcccagggctaggagtctggctgtgagcagggcccaccctcccctggacacaatggaggaccccgtgtgtggttttcactgactgagcacctatctcgtgccagacatgtgggattgccggtgaattaacaaaagccctgctctcagggggctcccatcccagcacatacaccgtcacatctggggtccagcctggacccccccatgcagttggagagggtctcagaaccaggtctgagaacagcaacttccagccacggcaccccacccctccccagctggcctgggctccagctcctcgcacctgaggctgcctgtgcagggcccccggctggtgcccctctcctctgaagctcgggggtcgccacagcctggcaccctcatcgggcctgttacgcacgttctggtctctccgtgcccacagacccgccaagctcaccagccaatgtgcagccagcacaagcccgacctgctaggggcctcagaacaagcggtgtggcccgaggccgtcacacagcacctgtgctgagagtgagctgacgtggacggcggcaccgtggccgtggcagaggcaccatccctccaccctcactcatgtagggatgtggggcacacggactggagcccaaggccttcgtgctgggccctggctctgcactcggctcccagagtctcccacccaatgtcagagagggtgccgcaacagtgcttcgggggctcctgtcatgagggctgaggaccacctaggcccacgtccgcccagcaggtggcagctgcatccccggtcccctccacaacccgggccaggtccaggctgcaggccgcagtgttggcagggggaggagagggtgaaattggctgagcccatccattgggacagaccctcccgctccttggggctctggagaactctattccttctctttgcttaacctcaaggtgctggggcctctggctgctgcagcatttacagaggaattgtctgggatgtgccgggccgagcactgtagctctcgccggtgtctgcgtcagcacgctagtgacatggcaggtgaggaccacggcaccgcccctgcgatctggcagtcagagcccacctgtgtgtctgcaggagcatccctgactacacaccacgggacggcagggaagggtccctcgggccccacccctttgttctttcaatggtaaaggttcaggtcggtggacagactggacttggaaacaccttcttgcgtcctcgaaacgacgtggcacgcagccagctcacagcacccaaaggcacgggcaagttgcatcacggcagcccctcctgtctgaccaggagcaggtgcgttcctgaggtcctggccacttctgcaggagcgtccgagggagcccagctgatataccacagcccctgacctcccaggttagcctttccatccaacagcaccaggactggacaggccaccttggctgaggatcacgtgtgcctgggtctgggcggtgctgatgcccacaggccctgagtctgtgttgcgcacaggccttggaaagcagtgcacatcctgtctgcaccggtgtctatagtgaagccatctttgtccgtgtggccatgggagggtctgtctgtgctgtgtgtgtgtcctgcgcgcgtcgggagctgctgcgccacacacaggcacgcagggtgtgggcacacctgtgcttctgagcccacgtgcccttgccggtggccaggcacacacacagctgtgcatccttggcccaagatcagctgtgccacacctgcaggctgcaggatcttttctgtatatctccctccatcaccagaagtaagctcaggactgaggctgacaggctggtctgagcgctgctcacctgcacctcctggctgcacctgtggccccggactcagcttccccatctctctcctccccaccccacctctgggtcatctccggctggggctgtaccacatctgggctcaataaatggttgattgattgatgaggggatggatgagaagggctctaagagaaatgctggggagcctgggcaggcactcccggatggcggaggcggcatgcgggctggggcagcggcccctggcgcccccacactcccccaggacgtctggggtcaccgtctgctccatggcagccccagggttatttatgacctcctccctctggcggcgggaggcaggctccagcctcagcccagcggcggaggggccccagcagggggacccggagcagcgacagaggcaccaaggcccaggcaggcggggctcggtgggccggaggaggggcggtggagtccacaccgccaggtccctgcctcgctcaggatgattccagcgccagaactccgttcctctggcctctgccgccagcctgaggagtgcaggggagagtggggcccaggtgtcccagaccaagacaggtgtgtgagtggacatgggacacaggtgtggtagtggaggacacgtgtgagcaagtgaacacatcacacagatgtgcgagcagacacaagacatgggacacaggtgcgccagtgaacacgggactggtgtaagccagcgggcatgagacacgggtgtgagcgagtggacacgggacacgtgtgagtgggcacggacagtacaggtgtgagcgagtggacacgagacacaggtgtgg

SEQ ID NO: 1879461 - DNA, 4001 bp, Homo sapiens
taaacttgttaaggtcaagataaatttaggcaccataataaatctttaaatcaacagtaaactgacaaaaaaaaacaaacccaccacttcataaagtatttttttttttttgagatagagtcgtgctctgtctcccaggctggagtgtagtggtacgatcttggctcactacaagttttgcctccagagttcaagcgattctcctgtctcagcctcccaagtaactgggattacaggtgcccaccaccacacccagctaatttttgtatttttagaagaggtgaggtttcaccatgttggccaggctggtctcgaactcctgagcttaagtgatccgccccccttggcctctcaaaagtgctggtattacaagcatgagccaccatgcccagcctgaagaaaatttaattaaaatactgtttttaatcaaagaaattttgttttgactaaatttagtagcactgaaaaacaagtgtctacacttcagaaattaaagaaccagtaagttgtcctgcagaaaatgctaaatgaaaaaatagcataataaactgtaatgtcttcttgagagcagcatatagggctcagacagaacgttttaagaaaacactgtcaacaagccagttgccatcatatgtatcaagagtaatgaatctgatgaaccaaagtgacaaaatggatttcaacagtgtcttgtttagtttttagaaattccaacatcccactatttatagtatagcctcttcttccacatgacagtatgacagactcagtttttttactttttttttttttttatcttttttgagacaaagaatcttgttctgtcacccaggctggaagtgcagtggcacaaccgcaactcactgcagccttgaccccctggctcaatcgatcctcccacctcgccctccagagtagccgggactacgggtgcctgccaccaagcctggtgaaaaaaaaacccgtgtttcatattgtcatatagaagaggctatactataaacagtgggatgttggaatatatatttatatatataaatatatattatatatatatatatatatattttttttttttgtagggacgggtctcactatgttgcccaggcgggtcttgaactcctgggctcatgtgatccccctgcctcagcctcccaaagtgttgggtttacaggtatgatgagccacaacgcctggctgacacactttttttttttttaaatgcaatttctgtttagaccttgacacctgttgatattactagtcactatggaaagaagtaaaaacagttgcttaagatgctctaacacttttttcccctgtagaagccaacatggaatacaacatgaaaactgtctaaatgggaaccttctaatatagctcattgtatgccatgcatttccactccatttccactatgttggaactgacttctgctttcctacttagccattaggcgacttagttgcctctaggcaagtaacttctctgaaatgtttcatttttcatgaagtttaaaaaaaaaaaggtgaaggactttagagagctttgaaccgaataaggtctatcagacatcttgaaaagctttttctccagacgacgcagaaacaggcacacggggttctgctttccccacctcccacccccaagcccaggtcccattcttctcactttcaatcctcatttgggctcctaaaggaatagcaaagagagttattttatcaataccagcgctcctctgtccccaaatccagctagggaaggtttcggaggcctcagctacttgagagagggtagagacgatccttcctcgcctatctacccagccacccaccccttcccagatgtagcgtccgggccccagaccaagcgcgtgcttggagctctccggtacagtgaggcgcgcgcttgcctggctagggtccctgtgaaggaatgggatcccgaggtgcttgccaggaccgtagcaggcggaagctgctggcagcgcgaacgggcggctcccgccggcgtgggtgggggaagggcggcagccacacccggaagtcggtccgggagggagggggaaatctgagggaacgaggcttccggtggcgcaaagggtgtcgggagcggcttcctgcaaaccttccctggcatctggagggaccaccgttgccgcgtcttcggcttccacgatctgcgttcgggctacgcggccacggcggcagccactgcgactcccactgtgcctggctctgtccatattagttcccaggcggccgtcgccgttccagcagcggcagcggcagcggcagcggcggacatgttgtgaggcggcggcgcgggtgtctgaaggatggtttggccgaggcggcggcaacggctgctggcggcggcggcagcggcagcggggcctcgggctctatagagccgagcccgctgggtacccgcccggtaccgcggcgaggccagtgcccctggatcttgcctctgctccgacgccgttggggaccagttaggcgacagcgcccgcccctctgaggagacacgaaggtggttccccagccgctcaaatttccggaccaccgcgctttcccctcctcagcctgggctgtgctctctctagaatcctcgggcccccactttcttcccaaactcatcctaaatctctcacacacgcgagtgttcccagccctcaagccagctgctcctccgttcattttctgcaccctcttcgcaaagcaccccccgggatcactctccgagggcgactttttgagaaatctcggtggagtagtggaccagagctggggagtttttaaaagccggggcgcgagaaacaggaaggtactatggcttcctcgtctggcaacgatgatgatctcactatccccagagctgctatcaataaaatgatcaaagagactcttcctaatgtccgggtggccaacgatgctcgagagctggtggtgaactgctgcactgaattcattcaccttatatcttctgaagccaatgagatttgtaacaaatcggaaaagaagaccatctcaccagagcatgtcatacaaggtaagtcgtgtgtgagagctggtttgaatgaggttctagggtagcagtctgctaatcgcgtgaccctttcgtgtcaaagcctccattcctcttccctggtaagtaacttaatgaaaaagccagactggcatgtaggcagccggtgctttaaaaacaatccctttgtagcatttttgcagtacttttcatccagcgaatacatgtaaggagtgcaaacatttaggtcagcgtccccaaaacgtaaagaataagagtgatctcactttacagccaggtaagccgaagcaacaagaattacttgcctgaagttgaacttagataataattaaggaacgcagaaattctcctttggaaagttaaaattcagacggaggaacttcaacgtgggtggagacagagcacccccttccccacctgacctttcaccaatgtagaggaaaagatttattttctgaacacatgagttaaaaaattcttaacatacaatgtgttcaacgttgtcaagtttatcgttgttaaataaaaggtgtatgttttctgctctaaaaatggtttgatggtacgttcatgaatgagttaccaaataactcctgttccattctgtaagaatagggtgaactttaaattttcgtttttttcttttcgtttgcttttatgtcgtttgctttgttctattctgtggagataagttttgaaatctttgattgaaagtttatgcaagttttttttttaacggaaaatttccccgtcctttcctgctgtcattcctatttgaatgtatacacttaggcttttatggaacagcacttctgaaaacttcaacagtttcttttatcctggaaaggatttggtcccgtaatagggatttgggggactgtattctggtggtttcagagaggagaaacatatttactattcataatgtttcgggaacgtaccttttgcga

SEQ ID NO: 1879462 - DNA, 4001 bp, Homo sapiens
cttgtaatagttaggagtatttcttcattattttgagatgaatacatttggttatatgttaaccaatacttttcttgagaattctcgtcttccatcatcctcgctatcatattcattaataattaacttttagaaatctcaatatttaggttacaggatagcaaatatggaatgtgatctagctaaaaaaggagtgaacatcattcaaagacaaataaaagactttatcctgttggggaaagggttggcatattttcactgaatgagaaaaagtatgattttcctattgtctttatctgaaccttaagtatggctttacaaggaggaaaaaggaggaagaagagaaagaagaggatgaggaagaggaagaaaaaaggaggaggaggaaggtgcacattgatgccactttgagaagaagtggactgtggtggatttgtaatgtatcagttttgccaagctgaatgcacatttcccagatttgccatctttagatagctctaggttagcctgggcaacaggagacacttggaagatagaattcgagtggctgttacacgcttttgtatactgggaagggcgttgttacagctcaggcatgatcttcatcttccctgacccttggactggtgggtgttttgcttcttgatctaacattaaggttagaagttgcaggattccagcagggttttgtcacatccaatctggtttaagttcccatattattaggaaagctttagggtgcttcaggaaaacgctttttaaaaaatcaaatttggaaaatatcaaatggaattacaggcaataagcataacccagtggaaacatgaatcaaaccctctagagcagggttgtctaaattttggcttccttgggccacactgggaaaaaaaaaaaagacacttgtcttgggcccagcataatatacactaactgcaactgaaccgtgcgtgtaaagcttgtaaacaaaatctgtctgtaaagtctgtaaacaggccaggcgcggtggctcaggcctgtaatcccaacattttgggtggccgaggcgggcggataacttgaggtcaggagtttaagaccagcctggccaacatggtaaaaccctgtctctaccaaaaattcaaaaaattagccgggcctaattttttagtggcctgcgcttgtaatctcagttacctaggagatcgagtattctctggctgaggcaggagaatagcttgaaggcaggaggcagaggttgcagtaagccatgcactccagtgaactgtttgctgttaataaatgtttacagtgggctcccatagggaaaagaaaagcttagttttatttctatagaacaaaaaaaaaagttaagagattagtagagacgggtccaccatatttgaccacactgacatcaaactccagagctcgagcggtattaacataaagttatcaatgcatctcacagactactgagattacaagcgtgagaaccaaccactacctgacaaaatctttactttgaaagtaagtgacagatgggaacaaagacctgtttattagtttatactaacgcgttgtatatgcttccacagcaaacaaaatccacttttaaaacgacagcaatccaggggaaagcacaaacagttccccactgccacaaattatgtagtcgagattccctcatttggggaaatcacaggggtcagcacatccagagtaaaattgctaagccttgccctggaaaaaccaccttcgtgatcataacatttcttctgccagataaatataagtataagctcacacccctccgccccgccgcagcctcatattcctcaccctttacacgcaaggtcacttgcgtcacgcgcatcccggagccatcctagccctaacacacagctgcgactctccggtccgaccagcggtcccagacttgctcccacggcacgggaactctttcgtggcaaagcagcagcccctgcgctgcctcatctacatagaaatcgccctctccgtgatgtcaccgacaacgccttccggatccccgtctgctcttccgcctcacccaacgcccctcagcggacctacccgctgtcggagccggcgggggaagtgacttatgcctgtcccttctttccctcctgtccccgcccctcgtctgccgcaatgaagcgggtacttaatctgtgtcctgtggaggtcccacttggcagccagctggaagcccgtgcacccttcttcaaataatggctttcaatgagcagactaggacgtttaggattacaaaggaaaccgattcctttcaaacctggttatctttatgatgtggcactgtgtgcatatcttcgttaaaacgcattgaaggccactgcactccaccctgggcgacaagaggtgactgtgtctcaaaaaaaccaaaaacactcccccctcaccccaaagcattagacgtcaaggctggcagggatgtctgttctcttgaaagttcaatatcaaaatacttggaaattaaactaaaatagtagaagcaagaacaaaaattaagttgaagataatgtcaagaatatttcccacaaaccaaaataataatgtaaaaacaggagagaaaagttcaggaaggtagatgtccaaggtccatacgattagcatgcgtatcagaaagaggatagaaaaaaatcagtacaataattcaaaacactttccataccaatggattgaaactacagtgaatttaaagtattgaattgatattgaactttcaagagaacagacatccctgccagccttgacgtctaatgctttggggtgaggggggagtgtttttggtttttttgagacacagtcacctcttgtcacccagggtggagtgcagtggcctttaatgcattttaaggaagatatgcaaacagtgccacatcacaaagataatcaggtttgaaaggaatcggtttcctttgcaatcctaaacgtcctagtctgctcattgaaagccattatttgaagaagggtgcacgggcttccagctggctgccaaaggggacctccacaggacacagattaagtacccgcttcattgcgggagacgaggggcggggacaggagggaaagaagagagaggcataagtcacttccccgctggctctggcagaggtttggtcccctgagtgctcctttcttgtaagcagttcttgtttcatattttcactatctctgacactgttaactgtacgattttttttcttctgtacacaaaaaaaagtttgtttcaatagtgaactatgagccagggtggtggcttatgcctataatcccagcactttgggaggccaaggcgggcagatcacctgaggttaggagttcaagatcagtctggccaacatagtgaaaccctgtctctactaaaaatacaaaaattagccagatgtggtggtgggcacctgtaatcccagctatttgggaggctgaggcagcagaattgcttgaacacaggaggcggtggttgcagtgagctgagattgcgccactgcactccagactgggcaacagagcaagactccatctcaaaaaaaaaaaaaaaaaaaaagtgaagtatgtaccttctacagtatactcttccaacttaacagattctgtcattgacatacgatgttgcatcaatacttgtgtaaggggtttaacactactactatatataatagatgtaatatattttatatatatatgtatatatatatatataacactaaggtttattaaaacaactctcagtaaacagatgcccctgatgttccaacaaaataacctactattattagaaaccaaataaactcctcctcctatgagaaagaaagtaaacaacttctggcttggcgcggtggctcacgcctgtaatcccagcactttgggaggctgaagcaggtgctcatgatcacctgagtttaggagttcaagaccagcctggccaacatggtgaaaccctgtctctattaaaaatacaaaaattacagcgcgcctataat

SEQ ID NO: 1879463 - DNA, 4001 bp, Homo sapiens
aagcggggcttgggaaggccgccgggaggcatgagctgggctgggccgaaagaggccactgggaggcaggaggagctgggcctggagaggctgccgaaaggcaggagcttcgcctgaggatgccacagtgagacaccatctgggtctggagggtccactgtgaggcagaggctgacctgtagagtccgacagtagacagaagttgggcaaaagcctgatttgaggaagttttgggcttcaagagtcagccacgaggcaggcactaggcctggaaatggcctcacagtcatgagttgggcctaaatgggccactgtgagggaggagctgtgcctgttgaggctgctggcaggcaggcagaaatttggcctggggcagctgccatgaggcaagagctgggcctggaaaaagcccctgggaggcaagagcagggcctgcagaggctgttctcaagtcaaagctgggcctgttgatgccaccgggaagcagaaggtgggcctggagagtttgacttgaggaagttttgggcctacattggccgccatgagctggacaggaactgggccaaaaaaggctgttgtgaggcagcagttgtgcctgtagacccagccaagaggaagaggtgggcctggagaagcccccatgaggcagaggttgggcctgtagacgctgacaggaggcaggagctgggcctggacaggtcaacttgaggagattttgggccttcataggccaccaggaggcagcagttgggactagagagtctaacttgagtaagttttgggcccggagatgacgtcctgggacaggagttgggcctggagaggccaccgtgaggcataagctggatgtagagaggccagtgtgaggcaagacctgggcctgtctaggctgctgggagacaggcaggaatctggccagggaaggttgccatgagacaaaagttgggcctggaaaggcccttgtgaagcatgagcttggcctaaagaggccactgggtggcaggagctgggtgtgtagaagctgctgaaaggttgggagcttggcttggggggtccacagtgaggtagatgctgggcgtgaagaatctgctgtgaggcagacgttgggactgcagaggccgacgggaggcagaggctgggcctggaggggccaccaagatgcaggagctgggcctggagaggctgcaaagaagcatgagctgggcctggtgaggtcgacttgagaaagttcagggcctggagagaaggctgggaggcaggagctgggtctaaagaggccattgtaacgatggagctgtgcctgtggaggctgttgtgaggcagtagcctcatctgcggaggctgccgtgacgtagggtatgggcctaaataggccattgtgagtcatgagcttggtctgtagaggctgactggagaaagttctgggcctggagaggctgccgggaggtaggagctgggccaaaagatgtaagcacatttgcatttattaggcactttatttccattattacactgtaatatataataaaataattatagaactcaccataatgtagaattagtgggcgtgttaagcttgttttcctgcaactggatggtcccacctgagcgtgatgggagaaagtgacagatcaataggtattagattctcataaggacagcgcaacctcgatccctcacatgcacggttcacaacagggtgcgttctcctatgagcatctaatgctgctgctcatctgagaaggtggagctcaggcgggaatgtgagcaaaggggagtggctctaaatacagacgaagcttccctcactccctcactcgacaccgctcacctcctgctgtgtggctccttgcggctccatggctcaggggttggggacccctgctcaagtgcatccaaagcgacccttcccacaccagtcttcacagtggtcaagggcagcaaccacttagctcccaaggcatgtgcctcagctggcatttcgtcacaatcaacagtaagtggtagcttgagtcactgtgaggtcacctactggaaatcaccagcaccccatttcccactggcaaagagctcagcactgccccctgggaaaccaaacctatgcccaaatcccatctgtgtgggtttacctcctgggacccttcctaacatattagtcagagtccaatcaggaagcataaaccactcaaaagtttaaagtggtaaaatttaatacagagaattattcattataacaggtgaacagcataatgagagattggctagcacagagtaaagagaactctagagaatatgggactagcccaggccaggcatggtggctcatgcctgaaattccagtaatttcagaagctaatgcaggaggattgcttaaggccaggagctagagaccggtctggacaacagagtgagaccctgtctctatccaaaagaagaaaaaagttagctgggggtggtggtgcacacttgtagtcccagctactcggaatgctgaagtttgagcctgggaggtcaaggctgcagtgaggcatgattatgccactacagtccagcctggtgacagagcaagaccctgtctcaaagaccaaaacagcaacaaccatttacagacagaaaagaaatagagctaataagctgaggaaagatgttgaaatgtgacaagtaaagtaatatgagttcttttgtctatgtaaaataatcaaacaaaaaatgacttactaaattataataccctgtgctggcaaaggtgcagtgaaatgggcaccttcttatactatgaggggtgtttaaattgtgtataagccttcccgggtaaagcctgtcaattttttaaaataatggagacagggtctcaccatactgccatactgcctcctccaactcttggcctcaagcaatcctcctctcttagcctcccaaagtgctaagattatagctgggaggcacccaaaaccctgtcaatttacatcaagggtaaggagaatgtccattcaccatgactcacagtaatcttacttctggggagacaattcaatctaaacaaaaggtcatctgtacacacacagtaaaaatctgggagtaactgaagacagagttggtaagtgaaataagaaacagttataagaaattaaactatggtatcaataggcacctggtaaaaggtcagttgatgttagctgctacttttttgttgttttgagacagggtctcactctgtcacccaggctggagtgcagaggcctgatcatgactcactgcagtctcagcctccctgggctcaagtgatcctcccacctcagcctcccaagtagctgggactacaggaacatgccaccacactaggctaattcatgtatttttctgtagggatggtgactccccctttgtttccaaggcctatcgcaaactcttggcctcaagccatcctcctgcctcagcctcccaaagtgttgcgattaccagtgtgagccaccacacctggccagctgctacttttatcaatattattcttattccactcaattaaaagttattattttcaaggctatgcaacagtatgtatcccacagcataattgtaaaaacatatagtcgtcgtccctcagtatacagaattagttccagccccccatctctgcatataccaaaatccatgcttactcacgtttcgctgtcacccctctggaatccacgtatacgaaaattccaaatgttagttgggcatagtggcaagcacctgtagtctcagccacgtgggaggttgaggtgggaggatcgcttcagcctggaaggttgaggctgcagtcagctgcgatagcactactacactccagccttggacaacagagggagaccctgtctcagaaaaaaaaacaaaataaaacaggttagaaattgtaatgaggtctgctgggcaaaattccatataagcaaagtataaattaataaagcaaatcgtgataaattagtacgattgactttctggagtttctgacaataaaa

SEQ ID NO: 1879464 - DNA, 4001 bp, Homo sapiens
ggatttcaaccaggagggttttacagaagatggacttcacctgtgagggctggggttggaaccgagcaccaaagaagtggccactgtccactgatggccgtctccctcttctctgtagccctcccccacccctaagcagcccagcttcagcagaggaggcctgggcacaggaatggattgttgctagaaacctggcttcagctggaggaagtcagaagaccgggctgatggccgcgcagacagagctgtgtttatccaggaaaagaggtaggacgtaggcagcggaggcccctgccagctcctcccataaggactgcgctgggggagcaagctgcagagaaagctgctcccctctggctctgaaagtttcagggcctgaggccagaacccaaaagcgacccacaggtgaggccagcactccgggcgcgcgacggagagggtcgctagctcggatcccagggcagagggtcggaacacggtgctcttggtggctccgcgcaggggtgaggcgagcgcgtggtggcggagccttccggagaccgctctgagggtggcggagaatcaatgctgcctttgtgctcggtggtttccgagggagaaaaggagtggagagtaggaggggcgacccaacggcccggccccgccctgcagacgcgggatgcggtagggctgggaggcgcgggagctggacggtcagggctactgggggtgggattctgtgtccccgggaggtgcgtctccttggaccagcccagggtgtcctgaggtcagcagccaggtgtgtcccctggctgccaggagcagaagtgagtcctcttctggcttggagcgactcgaggaggggaaggaggagccagaggaggcaggtggggctaggactgagggatggctcaggccagagaagcttgagccggggcagcctggcaaagggaggaagtcccaaggggcgccagactggatcccagaggaaaacccaagtcttcgaaatgggcgggggaggagggcgtgagcccgcctagggcgcagtgtcccaggggggttgggatctgagtccttttgctataatgcggttattatcctatttgtcctaatagtaccctagggttctggtggatactatatgggccctctaactgtaaggtgaatggggcatctttagtaccagtgggagaatctgtgtacttggtgacggaggcccgtatatgaaaatgtgactgactggccctttgctccctccatttctccccagccccccagactgcgccgccctttctttttctgctcaaataggggtccgcgctcccagtgggtccggagaccggggcgcggtggctgaccgcccggtgtacgccagcatcactcacctctgactcctctgcgctcctcgcccagccccgctccgccgagcactcccatctgagacgggatttggaccctctcggccctgcggaattcggaattccattaccccacccaccgcatgtggctcttggaaaaagctggctataaggtgggggccgcggagcctgcggcccgttgggcgccttccggcctgttctccaagcgtcgcgccccgggcccgcccacaagcgcctgccccaacgtcctcaccccggatcgcatcccgcagttcttcatcccgcctcggctcccggacccgggcggcgcagtgcccgcggcccggcggcacgtggcggggcgcggcctccccgcgacctgctcgctgcctcacctggcgggccgcgaaggctgggccttcctgcccgagagcccgcacacgcgccggcgggaatccctgttccacgggccgccacctgccccggccgggggactccccgcggcgcagtcccggctgcacgtctccgccccggacctgcgcctctgccgggcccccgacagcgacacggcctcgtcgccggactcgtcgcccttcggctccccgcggccaggcctgggccggcgccgggtgtccaggcctcactctctgtccccagaaaaagcgagctcggccgataccagcccgcactcgccgcgccgcgccgggccgcccacgccgccgctcttccacctggacttcctgtgctgccagctgcggcccacgcgcgagagcgtgctgcgcctggggccccgcggcgggcagctgcggctctccaccgaatatcaggccgggcccgggcggctgcggctgcgcctagtgagcgccgagggcctgccccggccgcggtcccgccccgggagcggcggcggcggctgctgtgtggtgctgaggctgcggccccgcgtccggccgcgggagcagcagagccgcgtggtcaagtgcagcgccaaccccatcttcaacgaggatttctttttcgacgggctcggccccccggacctggccgcccgcagcctgagagccaaggtgctagacaggggcgcgggacttcgcagggatgtgctgctgggggagtgcgagacgcccctcattgcgctgctgcccccgctgggtgggggactaggtcccgggtcatccctggcgcccacccatctcagcctgtagcctgagcccctggcttcctcaggacgtctccactgtgtctgcagtccacattctttccaccctgcccggcttgtatttatttttgctaataaaatgtccccttgtccttagccagatatttccccttactggcaccttacacgctcgggcatagagcctaccgatcttccctctatcccggccatacgcggggggaagatgctcattcagacggtctgagtagagcagaccttaagcagtggttctcaagcttgaaggagcatcagaataaccagacatcagaaatcctggaagagctttttaaatatgcagggtcctgggctccatccctatgagatgctccttcagtagatctgggccaagtaggtcctaaggtccccggccaacaaggcccccgaacaatcagggagccctgcaatcactgagtcactctgacagaaaccaacacaagccaccttccacttgaggctgcacagaggaaattaacactcccttcctgtgcccctctaaaacccacatctgtcctgaagacagatgaaatttctggctcttgagagtgagtcaggggatgtcagatgaacacagagtgccctttagtcttccttcttccctcttgcctcttccacacctgtgcgtcccttgaggggtggggcaagtctggagccaagaaccagagaggtgcttgggtaccaaatgaatgagatataatgtcccagggattgaaaggggggaggtggggtactaccaaagtgtgagaactgttctcaggaatgccagaagagcctcctccagccagaaggaggtgggggtggggggaggtggataattgtaggtcacattgtgtttacctctacctgaatgtccctgacgtcagcagtgaccttcttctctctccctccaccttcccaggagccggttcctctggactcaggccaggcttggaggagggagggaggaagtgaggtaggcactaggctaacccaacttctttctccctctcccttgggccctttctcatttttcatggtgccagctgtggcctgcaccagggctaagcttgcgggatctgacaaaacctcaaaagcctcagcacctggacacgttaaattccaacacacacacacacacacacacacacacacacacacagagacacacacacagagacacacacacacacacacacacacacacacacacacacacggcttcattcagacagctctccagttccttctcccttccctgattgggtccgcaccacccagccctaggccagagaactcttgctccaggtgtccaccaggtggtggcattgaccaaacaatcctaagtgctaactactacacatggattataaccacatgaggaactgttccaacaattagtcaagccatttattcctcccagcaccttctattagggtgtaaatactattattatccaatgggatcttggg

SEQ ID NO: 1879465 - DNA, 4001 bp, Homo sapiens; identical to SEQ ID NO: 1879463

SEQ ID NO: 1879466 - DNA, 4001 bp, Homo sapiens
aagcggggcttgggaaggccgccgggaggcatgagctgggctgggccgaaagaggccactgggaggcaggaggagctgggcctggagaggctgccgaaaggcaggagcttcgcctgaggatgccacagtgagacaccatctgggtctggagggtccactgtgaggcagaggctgacctgtagagtccgacagtagacagaagttgggcaaaagcctgatttgaggaagttttgggcttcaagagtcagccacgaggcaggcactaggcctggaaatggactcacagtcatgagttgggcctaaatgggccactgtgagggaggagctgtgcctgttgaggctgctggcaggcaggcagaaatttggcctggggcagctgccatgaggcaagagctgggcctggaaaaagcccctgggaggcaagagcagggcctgcagaggctgttctcaagtcaaagctgggcctgttgatgccaccgggaagcagaaggtgggcctggagagtttgacttgaggaagttttgggcctacattggccgccatgagctggacaggaactgggccaaaaaaggctgttgtgaggcagcagttgtgcctgtagacccagccaagaggaagaggtgggcctggagaagcccccatgaggcagaggttgggcctgtagacgctgacaggaggcaggagctgggcctggacaggtcaacttgaggagattttgggccttcataggccaccaggaggcagcagttgggactagagagtctgacttgagtaagttttgggcccggagatgacgtcctgggacaggagttgggcgtggagaggccaccgtgaggcataagctggatgtagagaggccagtgtgaggcaagacctgggcctgtctaggctgctgggagacaggcaggaatctggccagggaaggttgccatgagacaaaagttgggcctggaaaggcccttgtgaagcatgagcttggcctaaagaggccactgggtggcaggagctaggtgtgtagaagctgctgaaaggttgggagcttggcttggggggtccacagtgaggtagatgctgggcgtgaagaatctgctgtgaggcagactttgggactgtagaggctgacgggaggcagaggctgggcctggaggggccaccaagatgcaggagctgggcctggagaggctgcaaagaagcatgagctgggcctggtgaggtcgacttgagaaagttcagggcctggagagaaggctgggaggcaggagctgggtctaaagaggccattgtaacgatggagctgtgcctgtggaggctgttgtgaggcagtagcctcatctgcggaggctgccgtgacatagggtatgggcctaaataggccattgtgagtcatgagcttggtctgtagaggctgactggagaaagttctgggcctggagaggctgccgggaggtaggagctgggccaaaagatgtaagcacatttgcatttattaggcactttatttccattattacactgtaatatataataaaataattatagaactcaccataatgtagaattagtgggcgtgttaagcttgttttcctgcaactgaatggtcccacctgagcgtgatgggagaaagtgacagatcaataggtattagattctcataaggacagcgcaacctcgatccctcacatgcacggttcacaacagggtgcgttctcctatgagcatctaatgctgctgctcatctgagaaggtggagctcaggtgggaatgtgagcaaaggggagtggctctaaatacagacgaagcttccctcactccctcactcgacaccgctcacctcctgctgtgtggctccttgcggctccatggctcaggggttggggacccctgctcaagtgcatccaaagcgacccttcccacaccagtcttcacagtggtcaagggcagcaaccacttagctcccaaggcatgtgcctcagctggcatttcgtcacaatcaacagtaagtggtagcttgagtcactgtgaggtcacctactggaaatcaccagcaccccatttcccactggcaaagagctcagcactgccccctgggaaaccaaacctatgcccaaatcccatctgtgtgggtctacctcctgggacccttcctaacatattagtcagagtccaatcaggaagcataaaccactcaaaagtttaaagtggtaaaatttaatacagagaattattcattataacaggtgaacagcataatgagagattggctagcacagagtaaagagaactctagagaatatgggactagcccaggccaggcatggtggctcatgcctgaaattccagccattacagaagctaatgcaggaggattgcttaaggccaggagctagagaccggtctggacgacacagtgagaccctgtctctatccaaaagaagaaaaaagttagctgggggtggtggtgcacacttgtagtcccagctactcagaatgctgaagtttgagcctgggaggtcaaggctgcagtgaggcatgattatgccactacagtccagccggatgacagagcaagaccctgtctcaaagaacaaaaccacaacaaccatttacagacagaaaagaaatagagctaataagctgaggaaagatgttgaaatgtgacaagtaaagtaatatgaggtcttttgtctatttaaaataatcaaacaaaaaatggcttacgaaattataataccctgtgctggcaaaggtgcagtgaaatgggcactttcttatactatgaggggtggttaaattgtgtataagccttccagggtaaagcctgtcaattttttaaaataatggagacagggtctcaccatactgccatactgcctcctccaactcttggcctcaagcaatcctcctctcttagcctcccaaagtgctaagattatagctgggaggcacccaaaaccctgtcaatttacatcaagggtaaggagaatgtccattcaccatgactcacagtaatcttacttctggggagacaattcaatctaagcaaaaggtcatctgtacacacacagtaaaaatctgggagtaactgaagacagagttggtaagtgaaataagaaacagttataagaaattaaactatggtatcaataggcacctggtaaaaggtcagttgatgttagctgctacttttttgttgttttgagacagggtctcactctgtcacccaggctggagtgcagaggcctgatcatgactcactgcagtctcagcctccctgggctcaagtgatcctcccacctcagcctcccaagtagctgggactacaggaacatgccaccacactaggctaattcatgtatttttctgtagggatggtgactccccctttgtttccaaggcctatcgcaaactcttggcctcgagccatcctcctgcctcagcctcccaaagtgttgtgattaccagtgtgagccaccacacctggccagctgctacttttatcaatattattcttattccactcaattaaaaattattattttcaaggctatgcaacagtatgtatcctacagcgtaattgtaaaaacatacacagtcgtcatccctcagtatacagaattagttccagccccccatctctgcatataccaaaatccatgcttactcacgtttcgctgtcacccctctagaatccacgtatacgaaaattccaaatgttagttgggcatagtggcaagcacctgtagtctcagccacgtgggaggttgaggtgggaggatcgcttcagcctggaaggttgaggctgcagtcagctgcgatagcactactacactccagccttggacaacagagggagaccctgtctcagaaaaaaaaacaaaataaaacaggttagaaattgtaatgaggtctgctgggcaaaattccatataagcaatgtataaattaataaagcaaatcgtgataaattagtacgattgactttctggagtttctgacaataa

SEQ ID NO: 1879467 - DNA, 4001 bp, Homo sapiens
tgatgcgtcttacaatgaatagcatgttgaatttgatgaattgtgtgtgccaagcactgcttgaaatgctttataatatacttttcctcatccagtcttcatagctgatgttaccaccattttgaaggctcaaagatgctaaacaataggttctaggactgctgtcaagtaagtggcagagcaagaatttaaaatcaggtctgatttccaagatcatgctcttattgttatctcagcacttaccttgggtgatacaaaggtgaataaaaacctatccttgtctgaactgctcaaataaaggtctagctcaaatatgatctttctgaaacctttccaactccccaggaagaatacatcttgttttcatctgtaccccctcaacattttaagaatacctctataatacctataatcttattatattatataatctccctgggcccttagaagtcaggaatattctcttaaccatccttttgaccctacagtgcctaccacagttcttgacatatagtagaagctcaataatgtttcttaaaaaggagacagggtctctgttgctaagtctgggagacaagaaatgcacataaagctaaaaaaaagtcaaaagtagtgtttaggagaattatatatttaagtgcagtacagtttaaaagaaccaatgagggccggccacggtggctcacgcctgtattcccagcactttgggaggccgaagtgggtggatctgaggtcaggagttcaagaccagcctggccaacatggcaaaaccccgtctctactaaaaatacaaaaaattagctgggcgtggggacgggcacctgtagtcccagctacttgggaggctgaggcaggagaatggcttgaacccggaggcagaggttgcagtgagccgagattgtgccattgcactccacctgggcaacaagagtgaaactccatctcaaacaaacaaaaaaacaccaatgataggaggaagtacaagaggatacagctcagccagcttccaggttttcacccatacacacacacaccccagtgtgaaaaagctgaaaccgtctacaatggctgaaaccacgctgctgagacatttttgaattttaattagttagcaacacttataaattaagtttcacataaaacccaggatttctggattttcctgagaaacgaagacatctcagaaactgggtgctcattctcctagagaaatgggttggatttgggtatcaaattctcctttcagatgaacttaatgctcacttatccatcgtagtaacttccaccatttgtttaggctcagcttgcataagataatttattttctctcgccagtctaggcatctgggtttaagaccccttctctagatacattactcactgcactatcacactatgaattttcaggcatccgtgctttgacttccactttgcctagaaagtcctttgctatctccaaaagtactcctactcccctaaggcactgcttcaattcctttcattagcttcttctgaccactctctcaaccgtgtcacgcagcactgtggtaatacctctattaaaacccttatcagagcgtatgcacaagcttctcctcttcgcgctgacgttcgctccttgaggccagcggcccacaactaactcatttcgcggttccagcttcacgtccatgccctggcacctacacccagtcgttcagtacctttgcggaagtcagtcttcttacttcacggcaaacccaagctaaactaatattacgaccacagaagttgggctgaggtagaagtcaagactatcccaataactggattctggccgagaaaaaggcgcgcgccagcaccccagtcagtaaaatctaccgggcaaagttcgccgccgccactatcctcctctggctctgaaatagttccaattctcgcgagattcggcctgactaccagcccttcagctccagtgagttgcgggttggtttcctctagactctcgtggccacaccgttctccgatacgagcctttccggtgctatgccccggaagcggaagtgcgatcttcgggctgtcagagttggtctgttactcggtggtggcggagtctacggaagccgttttcgcttcacttttcctggctgtagagcgctttccccctggcgggtgagagtgcagagacgaaggtgcgagatgagcactatgttcgcggacactctcctcatcgtttttatctctgtgtgcacggctctgctcgcagagggtgagagcgggtatttctcagacgtttgatcagtccccgggaggaagggccccggggtcccctgtgccaccaggggaaagatcgcgagccttacttgcttgagaggctcatctactccacttcagggaatctctgggcaactcgtgaacaggagcaggaggggagtatggagtcgattgccgagttttctttggtctcaggtagatttcacttgggtatttgtggagacaccttcacatcatgttactgttgttttggctgaagagtcagttgtattagcctttgaaaaaagttaactatgggtaaatacaaagcgaaaagttggaattcctccttctccaacagtaaccactttgtttgttgtgatcattccagtcatttctctattaacatgttgcttttaatgttttaggcataacctgggtcctggtttacaggacagacaagtacaagagactgaaggcagaagtggaaaaacagagtaaaaaatgtgagtatggcaacacattagaaataatttcaacacgtcaagctcattaagtccatgttcacaataaatattttaagagcaccagctgatacaaagatgaacctgacttgaagcctatttagaaatagaagacttttatgcaaaatgtgtaataccaactagagggaagtgaggggcgtagcagatacatgttatgtgctgtggtggttctaaagaagaggttcaatctggcgcagtggcttactcctgttaatcccagcactttggaaggctgaggcaggactgaacttaggggtttgacaccagcctgggcaacatagggagacctcgtccctacagaaaaaattagctgggtatggtggtacacacctatagtcccagctatttgggagactgaggcatgaggatcccttgagcccaggagattgaggctacagtgggccacgatggtgtcactacactgcctcctgggcaatagtgagacttgtctttaaaaaaaaaagaagaagaggcttcattcagttgtgaggaaccatggtagccttcatgatgctgatggccttgcagttccttgtggatagttagaatttggatagagaatgaaatggggaaaggaaattccaggtaaagaaataacatatgagcaaaaatatggaaatcttaacatttaaggcatgtttggaggatgatatgtcattatgactggtgtcaaggtaagtggtgtcttcagagataagccgagtttcagttgggttagaaagttgaagaggtgtttaaggaaaagattaaaaacaagaagggtttgttacctttgaaataaagcaggaattccacaggactcagctaaaggtacagggtgaatggttccttataggcctgatttagttttctctcttctttttttccttataaggattaaatataacttttgtttcttagaattcctacaactttctgtattctgtgactttttcttatatcttcataggggtttgaagttttttttcttaaattaccatatttgatctacacagcaaccatttgtggttactcgtataaatattacctccatgtcataggaaagaaaattgagcctcaggatgataatgacaacttacgtcacagagcaaacaaagaattagagaccagactcaggcttttaaaattacagcttactgttccttaatttactcagtgttgattatgtacctcagcatatctgggccaaactcgttatctttaccttcacaaacgtgatattct

SEQ ID NO: 1879468 - DNA, 4001 bp, Homo sapiens
acaaatgtagtacacaaatgaaaataattactgtgttaaacacagtttcatagaaaataaaagaccaatcaaatacaataagctgcctttttagatgggtatgttattcttctttcacagctaaagaaacaggctcagagaatgttatttgattggaccgtgttgcatttctggacagtgcagctgagatcagactttgtgtgtaactccactagcctaccagggtgcctctcataaagctaagaaatgtaaatttggcctaatatacaaagttgccagggcagcactgggtcaattctacatacagtacttctatgttcatcaagggaaaccttaagggaaagtgaaaatgcttctagaaggcgactggacaccagcgcctttgcttgttgcctttgggctcttcttctaaggccaacagtgacctgaaattattgactggcttttcaatcaagtggacaaaatggtaccaaggtcggcaacatcagacaaatttacttgagggccttatctatgcgctttgaaagacaaaactgcttttgtaaaggacactgtatttcagaaaaacataatcatattaacaaataataacactgtaaaatgctgatgtgttgaatgctactttagaaaaacatgctcaaatctagggaaaaaatttgatacaaaactacgtatcaattatctagctagctatctatctagagacatgctttcattctattgctcaggatgggaagcagtgggattatcatagctcactgcagccttgagctcctggcctcaagtgatcctcctgcctcagtctcctaactagctagggccacaggtggacacagttatgcctgggtttttgtttgtttgttttgtagagacagggtgtcactacattgcccaggctggtgtcaaactttggagtctcgctgtgtcgcccaggctggggtgcagtggtgtgatcttggcccagtgcaacctctgcctcccgggttcaagtaattctcctttatcagcctcccaggtagctgggactacaggcatgcgccaccacggccagctaatttttgtattttttgtagagactgggtttcaccatggccaggctggtctccaactcctgacctcaggtgatccacccgcctcggcctcccaaagtgttgggattacaggtgtcagccactgagcctggcggagcactttatgttattaagtagcctaacccaggtgggtcgctgtccctcacgcctgtaatcccgacaactctgatggccaaggtgagaagattgcttcaactcaggagttcgaaactggcccgggcaacatagcgaggcaccccccgaccccatctctagaaaaaaatacaaaaattaggccaggtgtccaccgcgcccggctaatttttgtatcttttgtagagacggggtttcgtcatgttgcccaggctggtctcgaactcctgagcccaagccatccatcctcccgcctcggcctcccaaagtgctgggattacagtagggcccagccagcctcatgttttatttagcagtccctccctgttgcacacctggatagttttttaaatttttttagacagggtttacctcaatctcgcaggctggaatgctgtggtgggatcatagctcactggagccttgaacctttgggttcaagtagctggggggctgaggtaggactacagagatggggttgcgccatgttgctaggctgctcttggcctgaagggtcctcccgcctcggccgcgccagacatagttttctatttttgaccaacataaacactgtgctgggtctgaatttttcagctacccttcttcagccggcaacacacagaacctggcggggaggtcactcttaccagtccccactctgatgagaaaactgcccagctccaggcaccatggcgccccagtgatgtagccgaacacccgcgcctctaacgtcgccaacggcccacctctatggtgtcggcgaagacccgcccttgtgacgtcacggaaggcgcacccttgtgacgtcacaggggactaccactcacgcagagccaatcagaactcgcggtgggggctgctggttcttccaggagcgcgcatgagcggacgctgcctactggtggccgggcgggatgtaaccggctgctgagctggcagttctgtgtcgctaggcttctgcccggccgccgccgcacataagccacgaggaggagctttacgacttcccggtcttcggcgccgggcgcagcaagggccagactctgcgctagcaggcgctgcgcgccaaccggccggcacctgtcgcagaaggtgcaaccgatcgcactgtcgcgcagaagctcctcaatggccagcgccagctgcagccccggccgcccactcgcctcatctgagcctgggtacgtgcgctccacaacgcctcccccagccagggcccggggatccccgggagcgtccccggctacctggcgccgctcatcctgggtagggtcggccccctgaggctgcccggcatgagggagttgcacccctgagcttgacctctgacggtcctttgtaatagcattaagtctttgaaacttgtagcggggtagaaggggctaggaaatgaagaaaacatctttttaaaaatataagcagtcggctgggcgaggtggcccacacctgtaatcccagcactttgggaggtcgaggcgggtggatcacgaggacaggagttcaagaccagcctggccagcatggtttcactgaaaccccgtctctactaaaaacacaaaaattagtcgggcgtggtggcaggtgcctgtaatcccagctactcgggaggctgaggcagagaattgtttgaacccgggatgcggaggttgcagtgagcggagatcgcgccactgcactccagcctgggcaacagaccaagactccgtctaaacaaacaaatatatgtgtgtatatatatgcgatcgagcccgggaggttgagattacagtgagctgagattatataagcgatcgagcactggaggttgatgttacaatgcgctgagattgcgccattgcactccagcctgtgtaacagagggagactctgtctctaaaaaattatatgcaagtgagagcttttcttccagcactcatgctcagactgaagaaagtaattgggccaggcccggtggctcacgcctttaatcccagcattttgggaggcggaggcggaagtgggtggatcacttgagctcaggaattccagactagtttgggcaacatggtggaaccctttctctacaaaaatacaaaaaattagctggacatggtggcacgcgcttgtagtctccgcaacttgccgggcttaggcgggagaatcgctcagctgcagcctcgacctccaggggcaatccatttcagcctcccaaagtgctgagattacaggaatgagccatcgtgcctggctttacactatattttaacactttttttgaaaatggaaacttttacaggcaattcacttccttcaaactaatgataaggaagtgatgctgttctgttctgttttgttttttgtttttgtgggttttttttcttttttgagatggggtcttgcccaggttggagtgaggtggtgcaaacaaggctcactgcagccttgaccttcgggctcaaggaatccttccccgtcagcctccccggtagctaggactacaggtgcatgctaccacgcttggctaattctttttttgaaatggagtctcactctgtctcccaggctggagtgcagtggtgcaatctcggctcactgcaggctggtctcaacctctgacttcggatggtccacccacttctgcatcccaaagtgctgggattacaagtgtgacccaccgcgcctggcgattttgctcattttagatactagaactttttaatttaaaatttttttttcctgagatggagtcttactttgtctccaggctggagtgtagtcgcgtaatctcggctcactgca

SEQ ID NO: 1879469 - DNA, 4001 bp, Homo sapiens
gagcacatgttataagggaaggaaaataccaaaacccagatgaagttcttccattacagtccagcagaacaaaggagattctgtttctcagacacttaaattaggcaaataaaagagatagagtctctctcctctgtctgaagtggtccaccagtagaaatattctgattaatataaactagacagttaaggcattagacactcaagacattccacagcttataatacaataatgatttactttcttgggcttcaaagtttgaaagtttttttttcttttaaatcatttaagtatcaaattggtggcttttcagcagcagtaacttcactcaaaaataagcactcttcttcaaaatctatgttttgaatcctccaactcaatttttagacaaagtaactttaaagtaggtgaagaccacatgtcctttttacaaactgcttttcttgacaagaagtagttcaaggaggtattgttcaggctacattactggatggtgctggtaaatacaattttggccgtagtttgtttccaatttagtgacactgcctttttggaataagatactaaggattatagcattattaggatttacaaaaaccgctatgatttagtagcaattgaacttccaaattttaacctcttggcaacaaaacccaatttcctctttcttacattagctcctaattgtcaagacattaaatagcaagcacaaagatactgcacttctaattgcagcatttggcagaaatgaagggaaaggaagttgtgctacatgttcaaagggattgtgagtgtcttagtgaaccagagtttcagtaacaaaatatcatagactggatgcctgtaacaacaggcatttatttctcacagtcttggaggctgggaacactaagatcaagttgctgacaggttcagtgtctggtgagagctcctttttcctggcttgtagatggccactttctttctgtatccttactttgtggggagaaggagagagctctagtctctttctcttcttgtaaggatactaatcccatcatgggggttccaccctcatctcacctgttaaggcccaaagcccccatctcctaatatcatcacactgtggttaggattttaacgtatgagttttggaggaaaacaaatattcaatccataggactgagcaaccaaaagacaccaggagaagattaaaatgttacatgaggtctcgtctttaacggtggcctttaatcctttaatccccctccaggaaccacacttttctgtttttgcttctcttgcttctttttgtcactgcagagcatcagtaatctttttcaagtcatcaacttctaaaaaaaggcacacatctccatctaaggataccccaaacttgcataatacagtgacttttcatattgtgtaattttattttttagtaacttttcaaaatccaggaagccatctctccaaagtgggttcagagccttggctccataaactgtattaacaccaaacgtctttttggctggtttgaagtctgactcttcctggaatttctttagtttagtcccggtcgagtttgctaattgttctttggtgttagcactttatgttctcctaacatctttttaatttaatgttttttttttccagttgctgtaatttctctttggctttctcgagtcatatacatatacatgtatataatattatctatttatctacctgcctatcatctatctattatctatctatcgatcgattatttatcgatctatcttttctgaaacctttacttctagttttacttctctttctttcttttcacatcatcactgtcgccccagttatccttgatatcctggtcattgccttctcagttgtccccgccagtggtattgtggtattgccggcccccacctcccgcacagcggtgcttcacggaattcctgaggcgtactgggagcaccggcacagccgccgccatttcccggcaggggcacatgggagcgacagcgaggcgtcagggccggaagtgtccctgtctttgccctcgttggctactgcggggcaggctgggaccgaggctgtgtgcagaggcctttggtggctgcgcacgttggggaggggacgtagaactcagagtgattttgaggttggtgaaaaatgttggatgtgtaaccttagactgtggtctaaatgaaccacagaaatcaagctaaagggaaagtagataaaaccaggagaaagaactcttctggatttctgttgcgactgattaccatataacgtctcctttccccataagattcccagcccctacttaatcactgcacactgatctcagtactgctgtgaagagactttgcagaggtaatgaaagccctaaatcagttgaccttgagactcggtgggcctgacctaatgatgtgagtcctttcaacgcagaattttctctggctggcagcagaaggggaattagagaaatctgtagcatgagaagccttccacatgccattactggctttgccagggaggtggccatggggcaaggacctgagaacagcctctaggagcctgtccattcctggccaatagctgacaagaaaacgggaacttcagtcctacaactgtgaggaactgagctctgcagaccacctgagtgagcttgaaaggacgttcttccccagagtctctaggtaagagcacagcccagctgacgcctcggtttgcaccttctgaaactgtgagcagagaaccatgttgagctcataggacttcttacctacagacttgtgagataataaatggttgtgttttaagccactaggttgtggtcatttgttactcagcaataaaaagctaatacattcctcatcactgattcaagtaacaaaagagggaaaaatacagggacagctagggacaacaatacatagcaaagatatatagaaccatgggctttgccttatagttcacgtgttctccacctaggagacaaaattattgaactagaaaaagcattaaatgggtagctttgggcattcgcataaaactcctagtgtctgtttctcccatatgtaaaatgcagataatgatgtcatcctcatagaagagttgaagaaataattgaggtagttgatgtgaaagtgttttacaaatgtacaaaattaatgcatgggtggcttttttttttttttttttttttttttttggagacggagtctcactctgtctcccaggctggagtgcagtggcacaatcccagctcactgcaacctctggggtggcattatttttaagcaaacctaaaagaggcaaattcaaatttgcaaacagatataagaggggatgattctattctttcactggaggagttttctcccattcccagtactatttcccaaggtttctgtctctttatttggacttcttctgtgctatggaataaagtgatggaaggggtattactatgaagactttgccaaacaaagacaatggttagaaaggatgccttttatatctttttttctatatactcatattctatccattgttacagcaaagttaagtaacttttttaaagctgttattgttacttttttcactcatttgtatattgtgttcattcattcatgaaatatgtatttagttcttggtatgtcaggcatttagaaaagcaccattctacttggaaggctctgatttgacgctaagaaactcattgttaagggctgttttagaaggttttttttttaccttaggtttttgtgcaaacagcagagttcaaagtcctcacaccaaaaacacatgcctgtttcttcagagagaagagccatttgacaaatgccacctttgatcatttcccttatgtgtccaagaaactcatctgggttcagatctgggagtctgtagttctagatctactcatcaatcaatactgtattgaagaatttcttccacaaattccttcagcagaactctaggtctgttaacgaaagctcagttacattta

SEQ ID NO: 1879470 - DNA, 4001 bp, Homo sapiens
cttgagcacatgacttaactgctgtgcctgggcttttgccttccataaaatggggttaactactccatctggttgttttaaggattaaatgagttgtacttacatggtgctggcatgcagcaagttccatatgcatgcatgttatcattgggtgaccctgggcagtgatcacatctccaagcatcagttttctcacctgaaaaaaaggagatgataataacactatctgccttacatgacaattgaattgaatttttttttttttttgagactaagtctcactctgtcgcccaggctggagtgcagtggcgtgatcttggctcactgcaacctccacctccccagttcaagcgattctcgtgcctcagcttcccgagtagctgggattacaggcacacactaccacgcccggctaatttagaattgaaataatttatgtacagtatcttagtacaggacctgacattataaacaatgagtggcagccattcttatttaatcagtcctaacaaagttcataaaagtgagactgtgtttgcttagctttttccctagggcctggatacccccagcccccatgacacacaataggggccaaatgaatgtgttgtgaaaaaatgaaaaacaaaaaacaaaaaagaacatgctgggattccttgacagggtcgtgaagcaaactgaatgtgaatgcacagatggaaatgtgccagacagtcattccaagcagaatgtgcaaagactcagtccacagggaatgcgaagtgccagggctagtctcaggagaaactggctcagaagagacagctctcagggagggctaaagtaggaaagaggctagaaagggaccaggtgagggaaggctctgaaggccaagcccaagagttctgcctgtctggcaggcagcagggcctctggagtttcttgggcaaagagtggctgcttcctgggtaaggtggcctgtggaaaatccctgacaactgtgtagagacatgtcgtgagggatggcagggagcatagtgaactaggtttgtggtttggaatcagggcccctggggtccagccaagttggattgtttactatctgtgtgactttgagagtcacttcacctttctcaactgtaaagtggggatagcaacagtgatagtcgatctggcctgctcacttctcagcctcactgtgagaaccaaataagatgatttacaggaaagtgcaaatgagagttgtggctgatatccgcttggagagagcctggagggtgcatcctcccattctccatcacagagttggggagggaggcaccctcgccctccaggggtttcctttgtccaacccagcctcctccaacacgcgggaattgtcaggcctggcgacttcagacaggaaacgctgtccagttccccttctttcccgcctcgctcccgggctggcgctaacgcccacctcccaacagcgccacccgctggcggatatcctgcaccgcggctgcccgctcctgcgccgctggctgtgccggcgctgcgtggtgtgccaggcacccgagacgcccgagtcctacgtgtgccggacgctggactgcgaggccgtgtactgctggtcgtgctgggacgacatgcggcagcggtgcccggtctgcacgccccgcgaagagctctcttcctccgcctttagtgacagcaacgacgacactgcctacgcggggtgaagaggcgtcctgctcgctcttccgcaccgtccttcccggttaataaaatgccctgtacgcttcacgtgggtcggggactggggtgagccgcgcactgcctcgcctgcagtcgggaaagcctgcccgcccgacctctccgagccaggccgcgcacaggaggcagggaggccgcgaagctactagggaggggtccggacctggcgccgggtgaaggcgcgccgcccaagccggtcggaccgggcaccggctcccactccgcacagttgcggggaagcggtagcgctgagcagcgcgggcgtagtgggcggtgtccccgctcccgaggcacccggcgcgcagcggggcgggctttgccgggggcggagcttggcttggggccgggtgggagggggcgggccggggcggggcctggtggccgcgcggcgctgctgggttctccgaggcgacctggccgccggccgctcctccgcgcgctgttccgcacttgctgccctcgcccggcccggagcgccgctgccatgcggctggcgctgctctgggccctggggctcctgggcgcgggcagccctctgccttcctggccgctcccaaatataggtgagtcctccgcctggagtgggtcggggggcggactgggagggaggtgcaggaaagtcggaaggcattagggtaatggggccggacggagaccctgggagagcccagccagagcgcggcccgccctggtccgctgtcctgggcctagggcccggtgacttggcgatggggtgaaaagagaaggaggggggatgccggcgccccctgcctcctgcctggtcatcctctgcgcggtccctgcggacactttcaggctcaggtaccaggtaccgaggggcctgtccagcgccacttcaagatcgtgatgagagggtcgctgctccccaggactggcatcttcgctgctctggggcctagctaaccgttcgacccggtgccagggcgctgagcgggcatggcttgtagggtttagtgaagaggattctctctagcctctattccaggcctggggccgccaggcactcctcaccctggtgctgttgccaccagtgcctggccgagcgggaggggcccgagatgagccaggagaagggagaattggccaggaaagaggctgggacaccaactcctccttggaactttcacttcccgctgctgtcttgggccgggaccgagagggcaggcgcgggtggagtgtccggaggagagagggccattgtgtgttgggggggtggggggtgctcgaggaggaagcagaggctgtaggcagcgggtgtgcctgactgggcatgagggtgtttagggaggtgggggtgtttgcactgctcacccagaaatgggcgttcctggcatctccgatgtgagcgaaggggagggtgagcgggcacccggccacaaggcttagctcagtctcgagagggggcgttcctgaagtggggggagagtgattgggagggagtgggaaccggggagggtcctgtgagaacctgggattggccggaaggggacaaggagggccacaggctgcgcaagccgaaagtctttcttggggacttgtgaatgggttggtgggtggaaagccataaattagagagacaccctctccttccagtattcttctttaagtctcagcatgcaatgtggaagcccctcaggtacctaagggtcttgatgggctgggagctggtggatctgagggcacctgtcacccccagccctgctgtcgattccctcagtactgtcttggggtgtcctgggacctgcaggtggcactgaggagcagcaggcagagtcagagaaggccccgagggagcccttggagccccaggtccttcaggacgatctcccaattagcctcaaaaaggtgcttcaggtgagctctcactcccctctaataaataaacgaatccacacacgccccggtatagccaggtgtctcaaagccaaagcttggctgaggagctggtgggtagagctcactgtagtgggtctatcccaggcccagctgcctctcccaccacaccccagcacctggcttcacttatctccctctccctctgcacacacgtgtatctgtctgcctcagccccacccaacccatccatctccactggggaaattgtgaagccaaacttgctttcttcatctcatgttgtcggttttctcagtggggggatttggaaagagtcaggaccttaccaaacccccccccccccaccccattctaaagctgagtcagaggaagggctggggcttgtgctg

SEQ ID NO: 1879471 - DNA, 4001 bp, Homo sapiens
agaagggcacggcctctccccccacctagggctgtggtgctggtagccatgacggtggtggccgtggcgagatgccccctcagtgcatgagggcacatatcccggtggtgcctttaatggtgacaggtttgtttgcagacaagggtgaccgctggtgctgcccccaagctggtgttccccagcaccagtgcgttgggggtgggcaacatgacacccccccacctaagccggcctcctgccttctctccctcagtctcaggggccagccaagcccccacccccaaggaagccactgcctgccgacccccagggccggtgcccatcgggtgacctgcccggcccaggggctggaatcccgcccctagtggtaccctccaggtaggaggagccctgggcatgggtgggcggggcgagtgacctgggggaaaggggcctctgactcttttttcttggcttcccgcaatccagaccagcgccaccgcctccgacagtgtcctcgctctacctctgacctctccggaggttccgctgcctccaagccggacttagggcttcaagaggcgggcgtgccctctggagtcccctaccatgactgaaggcgccagagactggcggtgtcttaagactccgggcaccgccacgcgctgtcaagcaacactctgcggacctgccggcgtagttgcagcgggggcttggggaggggctgggggttggacgggattgaggaaggtccgcacagcctgtctctgctcagttgcaataaacgtgacatcttgggagcgttccccagagtttgtctgcttctagaacccgggtcgctcctgctgcggttccaggtttggccgccagaagacgctgccgcctcagacgagggcgggctgtgtggggcgggagtaccagaaagggtcggcgtgtgtccccgggatgctcgcagcttccctctgcccagactggggtggctttcggcgcaatctgtcaagctgttggacctgccgtccccactctgaccattggctgggaaaagtggatctggctgatgctcccagagcccaggagccagggcggagcggggcggcggctgctcccacgatcccaaggccgcgcacctgcctcctccccctccgccgccgccacctgagggatcgggaacaaaggtgctttgtacaggccgcaaccacctcattacttcgtcttagggactggggccgcgtgggcccccagcccggaacgaaggtgtggagcggcaagggacagacgccaatcctaaagtgagcatctagcgcgccacctaaggctctttagggaaggtggtcccagagctgtgttgtcccttccgcttgcactgtccctagatgtgcaaagaaaacggggcagtgcatgaaggtggttggacaggcttcatggatcctcgcccgcgcctcactttcccctatctgggcaaaggttatgtacccttatttaaaatcttccaaacttctaataaggcagtctaccctgcactaaagcagacacgaaagagatgacctccctaaaaatactgctgttggaatacgtccttccttcccgccccctcgcagtgcggtgcagcctcagtggaagctttggcgaacctggcgcgcgctgcggtgcacagagggttaactggagttggcgctgggtggagaggaggagacgcgctcccattggcggaaagttattcaggggcggggtcagtgaatctccgtaccccactcccctttccgcaacttccctcttcactttgtacctttctctcctcgactgtgaagcgggccgggacctgccaggccagaccaaaccggacctcgggggcgatgcggctgctgcccctgctgcggactgtcctctgggccgcgttcctcggctcccctctgcgcgggggctccagcctccgccacgtagtctactggaactccagtaaccccaggtagccgggccgaaccgggcgagcgcacagccaagtctgcgcgctcccgggctttgcgcgcgcccgccacccgctctttgcgcggcgccgcctgagcctggccgcgcgccggggctcctttgtttgagccggcgggggaggggggaggggcgaggggcgaggcgcgccctgggtctccccacagcccgcatgtgttggggggcaggcagaagaccccagccccaagggttgtctagggggtcttggagcatggagctgggggggcctttgcccgcactccgggctccgcccccctcgctgctctcctggcgatccccagcctcccgcaggctggagctgtggctgacgaacttgagagcgagggagggggctttactcttatgaaagagcgtgggttactctcctgcccgctgggtctcacctctggctctcactctgtctcctgatctcatttgctatctctgctttcatctctgtctttattggtccttctgtttctttccagtgtcagccctgcccttctagccgaatcacctctgggcaagtctcgtgaccttcctaacctcatttatctcacctgtataatgggctaataatacctagtaccctgggaagtctggcagggtaagtgaggtcatgtatgtgaaagaggctcaggctgtacagatataaactattatttctttctctctcctgagctgcctgcctttgaaccttagtatattttactgtttccatccccctccccaagtctccctgcctctcctatttcctatctgtttttctttctgattttctacttgagacaatctgtgactattcatttcttcactcactaacatttatttattaaacacatactgtgtgtgcccggccctgtgctaggttgcaggggattaactatatagatgagaagatcaagaccctgccctctgggattccacagactctctggagaacaggcgcaggcaggagagcctgcataaagacaggtcattacaataccaataacaagtgataagagcttttgttgtccttggactctgaattctctatctctgtcacagaccaaagcttctgaatcacttggaggacctgttaaaaattcaggtttctcaccccccaatcttaaggtttctggctcattcattcaatccacaaatatttattgaacactgtcctgtgctgggcacttttccaggcacgggggatgcagtagaacaaaacttaccaaggccctgtccttgctcagcttgcgttctagtaagtctgggctggctgagcccaggaatcttcatttctaatcagaactgatacaggtcgtccttggaccacccactggaggcttttcctaagtcatgcttcgctgtgtttgtggtatggggggtggttcatgcagcattcagtactgtggggagcagccccttccagcccttcccacctgtgctggcttccccaggcagctcccaagaggtggggaagggagtcctgagaagactgaagactgggtagtatgtggactccccccatgcctggcacttgctcctcctggccaaaaaagggaggcacctagcacccactccctcattctttttttttttttttttttaatttttagaatttagagacagggtcttgctctgtcacccaggctgtagtgcggtggcataatagctcactacaggaacttgcggactctaaggatcctcccgcctcagcctcccaagtagctgggactacaggagtgcaccaccactcatggcctttatttatttatttatttatttatttatttatttatttatttattttttgagatggagtctcgctctgtctcccaggctggagtgcagtggcgcaatctcggctcactgcaagctccgcctcccgggttcacgccattctcctgcctcaacctcccaagtagctgggactacaggtgcccgccaccacgcccggctagttttctttttatattcttagtagagacggggtttcaccgtgttagccaggatggtcttgatctcctgacctcatgatccgcccgcctcagcct

SEQ ID NO: 1879472 - DNA, 4001 bp, Homo sapiens
ctgtcctccttacaccttaaaagggacagtgattggggactattgctgccccgcgtgctttttcaggcagagatatcagaatgaggtctgaaaggatagttgggtggccccagagaagacctccacggctggctaagagtctgagcattgctggcagtacttagcatttaggctaccctgagtgcatgcctggctcatgataagtggttaggcctgtcagaggcgggaggtgcctgctgactcagacccagagaggtgactcctactcttgagtgtctgatttctcagatatgaccatatccagttctgggctccagccctgacctgttccttggctatcagaactatcataaggccagatcagcttaactcatctccaaggtaattcttggtagattttggttccttcttgcattttgtggctttgtcccactaagagcagttgttctcagccctctgtactggtggcacaattttgaatactgtaattattttggttgcattttggaatgaatttaaagttctcgcaaaggatcttcagctccatgtcactcatcagagctcttttctattttccagctcttgcatataggtaacacgcgcacacacacacacacacacacacacacacagagtttttcttgatatgctgtctcttgccttccactgtcagatcgtaacctgatagactgaattgagtgacccactcacactcagctcagcattcctatttcaaacactgctgacacacggtatatcttcatgtgtaccagcaatcagactgtagtcaattaaattgttttgaaaattaggtttatgcacttatcagttgtttgagagtctggcagttttggccttaagagttccctgtcaaagactatggcgtgaaagatcactgctttcaggcttctatgctgtgattaaatgtggagagtggttttggggacatgtgtcttaagggataagctagtgaggaataggttgggactggtaggacgagcggcctgtggcacatttcagagccctcaaccgtaccccacactgcatgggccatgactctctcttcacccatggatcatctctagaggggattcatgatgtcacctggagtctctgctctctccaagtgtactggaaaggattgggtgttgggaaggcattggaaagctggtattagaagagttagctggggagagatttgactgaagagaaggaagcgtgtttgcagtgttaacgcagtggatctgcctcaagaggcccagaacttaagaaagccaggaagctatttttctacgactccccatgttagtgaaggcaattttttaacgtgatatccactttgaattctttgatctttaagaaatatgagtaagagaaaaggatagatggcaagatagatgaggaacttcagagggggctaagattactttaagggaaagctaatgagttgttgaattgttttacatagtggggtgctatgaataggatgttaaggaaagttcttcacaaataaatgacagaataaaaaaaaaataaacctaacataagacaattttctttttcagcaaggcacagggttctttgggaagcttcaaaaaattcaaaagtcatagtgccttttttcatggaattcactaagtagagacttttttgtaggcatatcattaaatgctggactctcaagttttcgaaatgagaagtctccatctgggaggtataaaaggaaacccccatctggttggttttagcatcttcaaggtgaggatacaattcttaaaattgtctacctatttctgagtcctggttcaaattcctttgtgatgtctatgtcagctgggaccctgtaggccccactgagttgcacatcaccaagtgtgcccatcactgtggttagaggccgtgggctgtgtactacagacaatgctgtaattgcttctgtgaccaagtgagggcggagtttgccctttatgtgatgtaggcaatattctatttttaataagccagaaaaatctgttcaaatccagtaacttcaagattttccaaagactggaagatgtggaggacgtgggcatcagctggaatctgatttctctcccctccacacttgctcttccccatttctcaactgctgtctcccagtgtaattaccatctcaagcattttctgttcgtcccctgtaggtacaccacatcgtgccaacaacccatggcccagcaggaatatacagtagcctttgccagggtccaccagggcttgattacacttcacggctgtaattcaagcctgctaatcctcctctgcgttcggaaaagaggcctgttctgttagataagctgattactgtctggtgtgtgcttcatgcctagcaagagttgtttatatgtggaattattgctggctgggctctgtgcttcgctacaccgaggaagctcgcttaggggtcaggggtgtcaggcttcacctctgatctgggaggggtgagaagtggagtgttgattacagctgtttttctctcaacctctgtgctggtggctaaatatttacttttctctgttaacggaaggagccagataagattttaagagtctgagacttttgcccctaggacccactgtcaaagatcatagagtgaaagatcactgccccagacttgccacattctgattaggtttgcaaggcgatcttagtggtctttttgtctttagggctacgttagggaggactatggcgggacaagttgagtgtgtggtgaaatcaacagccacagattgaagagtgcccgaccacagggaaaggatgcccgcagagaccatgtgaatgctttctcacactcaaagatgttttcttcaaagccacagaagccttgaaaccacctttgcctctgcctaccagcccatctctggtctggtgtggagcttgtggcttgggtgcagtctacgaagcccttgctcttcatggaggaggaagtgcattttgttataaccgtctgcccagtgatgttggcgtgatttatgctggctgcactctcaggattcccatcccttttgcggggtattttgtccccagatgcagagctgaggttctgcttaatactggcttttaagtgtttaagccctacaaatggctattcggtttaatggtgtaaggatggggtgagtgctgaaacaagtacaggtaaacacaagcacctggcccttgtcacctgctgcatgggcatacattggggtctgtttgtatatttgaatatgtggcagtctacactggagtaaggaaataaggatgaatgtcaaaaggcttaattgtgatgatatcacaattgaggccatttgttgagtaaacttcctccacatctctgtatactaataatcggtttgtcagcttttctctatgacactatcatttcctttagggcaggcactttgtctttcatttctgtgaccgttacctgtctggcccatagtaaccaatcaaggaatgggtctttgatttagtgtatgaataattaatagatttcagtgaagaggcagcctatcctagattgaatgcgcggtataaattgttaggtatttatcatagctcattgtacgtgggttccttcccaggtacctttcttgcctttctttctaggaagcagagaatccgcatccccagaaacatgggtgttccttaggtgtaaagggcatggccagctaaaggcagaacagaaaagctgctctggaaggggtactgggcggctgtggcatgtgatttagaaggaaggggtgctgtgctatgtcctcactgctgagacatctgggccacataatacctcttgatccacaaatatcttgagtgttatctccctcttttcttttgccattcccacccctctttttcctttttgagtcctctttgtttttcatctaaagtgttctcttccctttgccttttctagggaaatacttgtcccttaaagatcagcatattctccaaatggatgaattgtgccccaagggggattt

SEQ ID NO: 1879473 - DNA, 4001 bp, Homo sapiens
ccaccacactcagctaatttttgtatttttaggagagatggggtttcgccatgttggccaggctggtctcaaactcctgagctcaagcaatctgcctgccttggcctcccaaggtgctgagattacaggcatgagccaccacgcccagcctgggatgctgagattttccagggtggcccgggcagggctcactgagatgtggggacaggctgagaatgggggagtgggcatcgaatcatgcagattcaggaagagcattgtagctggagggaatagccagggcaaaggccctgaggcaggagtatccctggggagtctgaggaacaggaggaggcctgtggggctggggcagcgtggacaacagggagagggtggcagatagagtcagtgagggaggggcgggagacagatgacggagagctttcgggtcatggcagagacaggctggcaccctgagagttatgaggagccagtggagctcctatgtgtgtgtggcggggggtgcgggaggtggggggtaaatcatccaacatttagcaggattcctctaacaaggggctgaagaagtgccagggcagaagtccagctatgtgactattactacatccaagagagaaacagggatccacagactagcgcggtgggtggcgtgaagtgcggggagatcctagatggatgtgtttgacggcagtgccaacgagattcgctgatgtgccagacatgggctctgagagagcggggaggtcttcggcttcagcaaacggaagacagagccgcgattaattgagacgaggagtcagcagaagcagctggtttggagggaatatcagaacgtttgctatttgttttcattggggtgcaacagacataacataaaatgtgctcttttagccactgtgaagggcacagttctgtggccattactaccttcacactgttgtgcagccattgccaccacccatctccagaaccagggcaggaagcccgggcacttcgacactgagttccatagtggagccgggtacaagttggcctaaagatagggttatagccagctgggcgtgatggctcacgcctgtaatcccagcactttgaggggccgaggcgggtagatcacctgaggtcaggagttcgagaccagcctggctaacatggtgaaacccccatctctacaaaaatacaaatattagccaggcctggtggcgggcgcctgtagtcccagctacttgagaggctgaggcgggagaatcagttcaacccaggagacagaggttgcagtgagccaagatcacaccactgtgctccagcctgcgtgacagagcgagactccatctaaaaaaataaaataaagatagggttgtcagatgtccctcttctccagggacagaccagattctagccattgccctataattaatagcggctcttctcactctggaaagtgttctagtctgggtgataacatggccacccctcttactctgaagtaagaactcccaggcagcatctcttgtaaagtaaagatgcagagcttcagggactcagaacctccacctgcgctcctccactacaggcacatctcagttacttggacccagttcaaggatgggtgaaggcctgtttttgccaatgactaaacaaccttggagaagtctgtgcacatcggtcgctatgtccttggttctggcaggaagcaaatgtaaactcccagtcgtgagggcaaccacatagccttgggtctcctttcctcctcgactcactggttctgacgcactaaacaaatgataagcctagattgctagtctttggctgtgatatctcctgctagaacttccatctctcccacagcctaccctgtgggaccatctgcttctttacagcaaatctcacctcacctgttgacatttacatgcacatgccaaaactaagagaaagcctgaagaatgtgggacatgaggagctgggatgttcctgggtcgctccacgcttcatgagtcaggcaggctggaatgtggttgaaaatcagggagttatggatacacattccaaagtccccggtgacatgttcagaatgaacggaactccatgacaggcaaaaacaacagcccttgtttaattctgaagtttacatgcacattggcactgttctatcctaaccttttgtttccatggaaaccatttatgataccacaaaaagaggattctgaccaaagtaaggaaggaatagcagcaatggaaacttgctttcaaatgagcttcaggtagagggaaggacagggaaaaaaaaaaacaaagaaacaaaatgtggagcctgatacggtttggatttgtggccctgcccgaatctcatgtcaaattataatccccaatgttggaagatgggcctggcgggaggtgattggatcatgggggcaaacttcccccttgctgttctcgtgatagtgagtgagttctcgtgagatctggttgtttgaaagtgtgcagcacctcccccttcgctctcttttcctcctgctccagtcacgtgggacgtgtctgcttgccctccaccttccgccatgattgtaagtttcctgaggcctcccaaccatgcttcctgtacagcctgtggaaccgtgagccaatttaacctcttttctttataaatgacccagtctcaggtagttctttatagcaatgcaagaacagacgaatacagagccatgcccagagctattgttagggagaatgactctctccggatgccctaggatggatgtttgtggcccactcctaccagagttgattctgacgatctagctggctgagtaacccttccaaaaactgctttacccttatgttttcttttctcaagaaaaaaagtgttgttcaaccaaggggaaagcactctctgttgtaacccaagcatgcagaggcatggggtggaggagcagacgtcacctagagtattagtttcctgagcctgctgtaataaacttggtagcctaaaacaatagaaatttattttcttaccgctctggaggtcagaagtccaaaatctgggtgtcagtagatccacgctccctttgaagactgtaggacagactccttccttgcttcttctggtatcggtgacttgttggcctgtggttgcttcactccaatctctgcctctgtcttctcatggccgtctcccctgtgtctgtgtctcaaatctgcctctacctttttctcataaggacacctgtcagtggagctagagtccatcctcaatccagaatgatatcaagatccttcattacatctgcaaagacccattctcgaaatacggtccctttctcatgttctgggggttaggacttggacatcacttttgggagccacgattcaacccactatacccatataacaggagactttgccgtggcaactataaaaattcacattccattttgggaggctgaggtggcagatcacgaggtcaggagaccttcctggctaacacggtgaaaccctgtctctactaaaaatacaaaaaaaattagccgggcgtggtggcacacgcctgtaatcccagctactcaggaggctgaggcaggagaattgcttgaacccaggaggcggaggttgcagtgagccaagatcgtgccactgcactccagcctgggcgacagagcaagattctgtctcaaaaaaaaaaaaaaaaaaaaaaaaattcacattctgagcaccaaatgggaaaccccgtaggtcttgaagctttggccaatttcggaaaaattgcatgagcagttcctaccactccaagacctgggcacggcagggaatctggggcgttgccatggtgattctaaaccttgaaacttttgtcttttcatattgtttgcaaggaactagttactcaaacctcatatgaaatgcaggaatccaacagataggctgtttctagagtaagctcattgcttggagtgagaactcccctctgccttcattgaagaaacagcacctgtgacgttcttggg

SEQ ID NO: 1879474 - DNA, 4001 bp, Homo sapiens
ctgtcctggtaagaccctttctttttccaagacaccttaatcatcacagggtatagagcccgttagtatcaagtttggatttagcactggctctgccctggcattagtttgctccagctgccctaaccaagtaccaaagtctgtgtggcttaaaacaacagaaatctcagtggggcacattggttcatgcctgtaatcccagcactttgggaggccaaggcgggaggatcacttgaggctaggagtttgagtccgggcaacatagtgaaacccccatctccaagaaaaatacaaaaaaaaatacacacgaaaaaaattacaggcatagcatatgtgcctgtagtccctgctacttgggaggctgaggtgggagcattgcttgagcccaggaggtcaaggctgcaatgagccaggatcatgccactctactccagcctgggtgacagagactgatatatacatatatatatatatatgatatatatgtgtatatatatacacgtatatatgtgtgtatatatatacacgtatatatgtgtgtatatatatacgtatatacgtatatatacacgtatatatgtgtgtatatatatacatatatatgtatatatacacgtatatatgtgtgtatatatacgtatatatgtatatatacacagacatatatatacatctcatatatatacacacacacatatatatatatatatgacagaacatatatatattctctcgtggttctggaggcttgaaatctaaacccaggcatccccaaggccatgctttccctggtggctgtaagggaggatccttccttgtctttgcagcttgcagaggttgcctcgacatccctcgacttgcagacgcatcatcacgcccaaaaggtggccgtctcctccctgtgtcttcatatcatcttccctctgtgtgcacctgtgtccgaatttcccctctttaaaaggacaccaaggccgggcacggtggctcacgcctgtaatcccagcactttaggaggccaaggcgggagcatcatgaggtcaagagatcaagaccatcctggccaacatggtgaaaccccatctctactaaaaatacaaaaattagctgggcgtgttgacgggtgcctgtagtcccagctacttgggaggctgaggcaggaaaaacgcttgaacccgggaggcagaggttgcagtgagccgagatcacgccactgcactccagcctggccacagagcgagactctatctcaaaagaaaaaaaaaagacaccagtcgtattggattaggacccaccctaatgatttctttttttttttttttttttttttgagacaacatttcattcttgtggcccaggccggagtgcagtggtgcgatcttggctcactgcaacctctacctcccaggtttaagtgattctcctgcctcagcctcctgagtagctgggactacaggcatgagccaccgtgcccaacctaatgatttcaattaaattatttcaaaggccctatctccaaatacaggcacattctgaggtcctgggcataggacttgccttcaacataagaactgggggacccaattcaacccataacagccctcaaaagacttccctcatattaaatgcagaccagatcattcctaatatgatcagtgtagatcggggttctcagcctcggcacagttgacatctgtccaggcaattttttgttatgggaagctttccagagcatgacatagggtatttattaatagcaggatctcaggcctctacccgctagatgccagtagcacctctcccctcccttgtaagaaccaaaaatgtccccatttattcatttattgccaaatgtcccctgcaaggggaagagcgcccccagtggagagccactgaattaagtgaaatgtaggccgaccttagagaagcattgcaaggggactgaacacagatgaagaggttagagcgctcacacatcaggcagagaatcttccctaaaagcggcggattctgtgaaccccctaaatgtccagattccttcatgaatttcaagagtggttattgtgtgccaagtatatatcaggcgctgatctgggcactggaggaaaaaagagaacaagacattttatttttatttatttatttattttgttgttgttttttgagatggagtctcactctgtcacccaggctgcagtgtagtggcgtgatctcggctcactgcaagctctgcctcccaggttcaagcgattctcctgcttcagcctcctgagtagctgggattatagctgggattacaggcgtccgccaccacgcctggctaatttcgtatttttagtagagacggggtttcgccatgttgaccaggctggtcttgaactcctgacctcaggtgctccacctgcctcggcctcccaaagtgctagaattacacgtgtgagccaccatgcctggccaagaacaagacattttaaaacccctgccttaaatatcatacatttgagtggagaagactgaaaataaataagataaataaaatatgtagaatgctggatcatcatatgtgtgaatgtgaaaaaaaaaaaaaacaagggaagcaaggaggacaagaagtgctgggaggatgaaaaaaaagtgctttttttgtgtgtgttagatggagtctcgctctgtcgcccaggctggagtgcagtggcatgatctcggctcactgaaacctctgcctcccaggttcaatcgattctgctgcctcagcctcccaagtagctgtgattacaggcacgcaccaccacactcagctaatttttgtatttttaggagagatggggtttcgccatgttggccaggctggtctcaaactcctgagctcaagcaatctgcctgccttggcctcccaaggtgctgagattacaggcatgagccaccacgcccagcctgggatgctgagattttccagggtggcccgggcagggctcactgagatgtggggacaggctgagaatgggggagtgggcatcgaatcatgcagattcaggaagagcattgtagctggagggaatagccagggcaaaggccctgaggcaggagtatccctggggagtctgaggaacaggaggaggcctgtggggctggggcagcgtggacaacagggagagggtggcagatagagtcagtgagggaggggcgggagacagatgacggagagctttcgggtcatggcagagacaggctggcaccctgagagttatgaggagccagtggagctcctatgtgtgtgtggcggggggtgcgggaggtggggggtaaatcatccaacatttagcaggattcctctaacaaggggctgaagaagtgccagggcagaagtccagctatgtgactattactacatccaagagagaaacagggatccacagactagcgcggtgggtggcgtgaagtgcggggagatcctagatggatgtgtttgacggcagtgccaacgagattcgctgatgtgccagacatgggctctgagagagcggggaggtcttcggcttcagcaaacggaagacagagccgcgattaattgagacgaggagtcagcagaagcagctggtttggagggaatatcagaacgtttgctatttgttttcattggggtgcaacagacataacataaaatgtgctcttttagccactgtgaagggcacagttctgtggccattactaccttcacactgttgtgcagccattgccaccacccatctccagaaccagggcaggaagcccgggcacttcgacactgagttccatagtggagccgggtacaagttggcctaaagatagggttatagccagctgggcgtgatggctcacgcctgtaatcccagcactttgaggggccgaggcgggtagatcacctgaggtcaggagttcgagaccagcctggctaacatggtgaaacccccatctctacaaaaatacaaatattagccaggcctggtggcgggcgcctgtagtcc

SEQ ID NO: 1879475 - DNA, 4001 bp, Homo sapiens
aaaaaggacaaaatgccttcccgtctcaccaaaattgaattaaataagtggagcctggcaaagggcaggctttatgtagaagtgatttccccctagatctagagatgacctgatagccaaaggttgagattcatttgattaaagcctaaacttccatcttttatgttatgagtctctttgagatttataatcctcatttataaaatgggattaatatttttacttgttagtgttacaacaaaataagataatataaggtttgtaaagcaccaagcacacaaatattagattacttttccttgccttggtagcaaaactctctaaaaaactcacttattatgaacatgttgaatttgtttgaaaagtagaaagagaatagtaagatgaacacaacttaagatgaacacacctagatttaacaattgttaacattttaccatatttacttaatctctttttagttattttctgaagaatttgaagtaaattacagacataactttattttaacttgaaatatttaacatgtgccttgaaaaatgaacatattcccctataactacagtatcactttagtctaacaaaactgataataatttctcaacatcagctgatacttagtctatattgaaaatttccggtggtttccaaatgtctttcaaagctgatttattcaagcaagatcctgatatgagcatctcatcagggaactctattttatctcattgctgcccactaagggggccaaccttgttctgttgtttactagtcagcagatctgaaattcctccgtaagtcaggctaggaacatactttaagctaactcaatacacaaacttaaaaagataaattgtgcacaacagcaaatgactcatatgttttcagggactgtttgaagacttgaagttgtggtcttccttttggtacatctcagcgtgcaagcataggtgcttgaatgacaggaagatgattagtgatagtgggtttggggtgatgcaaacaggaagaaaaactcatttacatggggaatctaaaataattaaatgtacagaagcagaaagtaaagtggaagtaggaagggaaactaaaattcggggatcccagtggaggaggtggctttgcatgaggatggaatggactcatcagtaccccacataggtttaacttaccacttatcatggctcagtggaaaggcacagatctgggtccagatcccagctccactcttctagctgcatgaccttgggaaaattactatacatttcatactttagttttgttttttcttctgtgttgtgctaatacttttgtctactttccatagatgttgaagagattatagcaggtgaacatagagttctagttatatagtaaccgcacataaaaagtatctatctatctatctatctatctatctatctatctatctatcaatcatctatcttcattattattattattacaatactttacctcctatggtggttggtgcttccagctctattgatgaatgcatcccacacacaattgtgctcaaaatgtcatgacctaaagtgaaataaatacaggagacatagagacttatcataggataggggttttttgtcatatttcaagcaaagcagttctcccctgatccctgtccatctcctaaccctcttggtccatatggaggtactgcagctcaaggtcacaaggctatccatggctgaagcctctctctaactcccagatgccaagaccttgcaaagctctgcctcctgctggccctacttcccaaggtcagtcctggacctagcccggtggccagagggtcttataagcaccctcagctcagctccaaagagaaaactatctctcccaactaccttggtggccaaattatccttttctaaagcagctttattcctatagaatttagaaagcaaaatacttttgttttcccaggagagaggttttcacaacagtgtttggcaggtacttgtcattgctcaagggttgctaggagacaaatgaaggctggcttaagacagttgcaaagcatggaattctactctctagaactgcagtcttgatttcaaattttagcttgcatctgaatcacctgggggtagttaagattcaggttcctgggtctctgggtctgggatagcttgtgtttctaataaaccttctagtatagatgacccagggatcaggatcacacttggagaaacatggaagcaagtcaacttgcctaacagtgagtctgtggaagtacctctctggcaattggttttcagtgaattgattaagagctgggaaacattttcctaaagaaaatagggtcttttcagcatgatttcagggatatagatctccacagtcatttatcagtgctggagtggtgttcgggattctttgcctttattatcaaaagcttctgtagcctgttatcattgacctgatcattgaccaggtagccaggagagggaaggaggagctttctaggccatggaacgtcacgtgaaaggcctgtgaagggaaacatatgaagagctgaaggatctgaaaggtattcagcaggtaaattaatatgatttggtgctagattggctttggggaatagcatggaaaagatgatgcccatgatgggttctggtttctgcttatccacctggttggtatcattcaggaagttaggaaacactaggagaagagtcttgtctttttttattgtttctttgtctggaggattgggagatggaaatgaggatttggttttggacctgattaatctgagatgcttttgagatatctaacggagatgataagtaggcagctgggctgatgggcatggggctggaaggcatctgggttcgacacagaaaactatgggtcatgtgggaattggtggttatggaagctgtgggtatgggtgaaaatttccagggatagtgtagagggagaatcattgagttctaatgattgaccctgaggaatcttaacaagtaaagtacagggagaaggggaggagccagcgaaaggaagcctgagggaagctaatttttctcaagtgaaaagtttaggcattaaaagtcaactggaggggccgggcacagtggcttatgcctataatgccagcactttgggaggcagaggcgggaggatcgcttgaggccaggagtttgagaccagtctgggcaacatagcaagacctcatctctattaaaaaaaattaactggaagaaaccagttgttagaaggaggttgaatgtactagagagagaaagattccacatgagatgtacatagaaaggcaggaaggatgggacctacagccctgtgttccaaagaggttatggtgacactgtcacaaaatattttgctgaatatctgtcaggacacaggtattctgagagtgtcacagggtttttgatctctgaagggctagtgtgctttggctttggctttcacgttgactcctctgcctggggaagagaagtctctatgtacatgcaagagctgtgcatttttacagagactcagggctgagaagggtttctgtgtgggaaagtttatctccaacattgccttcaaccaggctggtcatgcagtgtccatagtgctctgtgccctgacttggcttcaaaaggaatggcctggagagaccaatacttgtttattcttttctattttcctctactgaattatgcagccatacaggattcctattataaattccatgaatcagctcttcctaatgaaagatttttgcattttggggcaatttttgtggaaatattttgcaaaatgtgaagtgacagctgcctcttgtcagacaccctgattccagctgcactagcaatttgggttccagaaagttctcagacaggaaggagtcatgctatagacacaaaacaacccatacatttaattccactggaactgcatttagatcctacggtcatgctagagaaagtttgtaattctggaatggttgctgagaaagactgtttcca

SEQ ID NO: 1879476 - DNA, 4001 bp, Homo sapiens
tggggtttttttgttttttgagacagagtcttgctctgtcaaccaggctggagtgcaacggcgaggtctcggctcactgcaacctctgcctcccaggttcaagcgattctcctgccttagcctcccaagtagctgggattacaggcacgtgccaccatgcccggctattttttttgtatttttaatagagacagggtttcgccatgttgatcaggctggtcttgaactcctgacctcaggtgatccacctgcttcggcctcccaaagtgctggaattacaggcatgaaccaccgtgcccagtagccatgcaaagtgctttgcttatattattaactcatttaatcttcatagacaaacagcttttaaaaaaagctgtttttaaaacaatttgaggagcatctgtggatgaatgctgaggccatgtgccggtcagggggcagtcttcccattagtggtggtgttctctgcgtaaggagaaaacagggtttttaatttttcatttttctgaagggaagaatcataaggaagtggaaacaaaagactccccaaaccatagcatgaggtttaactctcatgataccttaaggaagtaggcattattatgcccatttctatgaatcatgaaatagatgtgcaggagggttcagaagtcaccccagctcatacagcgcctaaggagcagggccaaggttcaattcaaaccgaatcccagcctcatgctagatcttagttcacacttcattctttcaatgagcatttataatctaaactgtacctagcaaacaggtgggacttcaatgtttcttgaattaaccacctaaatgtgccatgatgtcagagacagatgtcatcctcactgtagcccccaggttcagcacagtatccaggaaagaatgggtgcttgtagtcccagctactcgggaggctgaggcaggagaattgcttgaacccgggaggcagaggttgcagtgagccgagatctcgccattgcactccagcctggttgacagagcaagactctgtctcaaaaaaaaaaaaaaaaaaaaaaagcataggtgcttaatcaatgtcagccaatgaatacgtaaaggaattctaagttttagaacagtgatactttatttttctttgtttgtttgtttgtttttgtttcttttgagccggagtctcaccgtcggtcaggctgaagtccagtggtgccagctcgactcactgcaacctccacctcccgggttcaagcgattctcctgcctcagcctccggagcagctgggattacaggcgtgcaccaccacgcctggctaatttttgtatttttagtagagacggggtttcaccatgttggccaggctggcctcaagtgatccgcccaactcggcctcccacagtgctggggtaacaggtgtgagccaccacgcctggccgatacttcatttttctggaggtcatttacttagtaaggccaactggatcctggctaaaaatgtgaaagaagacagaaagagtcacgagcagtgaacaaaagtcacgggtcctagcacgtaaaagctcaagtacttgattcaaagccgaaattctcaggtcctcagttgtagcctggttacccttacaaacaccagtgctaaagagcacggttactaatctttccaggacacaagatttgaaagcatctgtttcgaagggagatgacctgctagaggaagcttgcgggcaacagcaaattgggagttcgactagcactttcagactgggatgcaacgaagaactcgccagcagaggtaagagatgggcaagatgaagagaatgaactctgattctcggatatctgcccgcaaggtggctccgagaaagccagcgggaaactgcagcatcgcggaggacttctctagttcaggttaaagagacagcagccagagggagccgacctcaaacccaactcccgacagcaaccttgaggccacccgaggtggcgcatgcgcagtgtgcgaggtagtgctcttcctacctgccgacctgcggagccttcttactgagcagggcttacgtcacgcaagcgccgcgggtgtgtgacgtcatctgagagcgccacgcgcggtcccgaaaacctgagcaccctctggctaaggcgttgctgtagagacggtgcgccagccccgcccccgaggcgggattggaggaaaactggacagctgacaagggtgacgtttcgaaagcgcgcgggaggccgtgctgggacgcagagcccgaaaacctatttgaggggcgtcttgaccgaaggtgctaaatatcacatgtccccattaaagtaaaaatgcaaactgccctaatcggatttcgtgtaaggcaggagggctgggaagacttaaatgtatcacttcagtagtttaggggtgggaagaagagtttggaccagactggtgccgggataacctgacctttttgagccttaacttcttctcgaagggatcgttcccatcagcatataaacatgtaatttcccccttcctgagaaccctgtggtggctccagctcccaccccatcccttcgctttctgaataccgtaactccttggaagagtgtatatattctttgtccagctctctcctcccactctgttgaactccctccagccaaactcagtctctcccaagtcctcctcttacctgctctatcagcaatttttgatacagtttatcaccctctcctccgcaaaactttcttcacttggcttttggcagtgcacacgcttgtttttctcctccatccctgccccaccttctctgtttcttttgctagcctctcctctttttcctgacctctaaatgtatcagtacccccagcactggctccttggacttctctttcttttcgcttaatctcttgatgatttcatcgggtttcatggctttaaagactatgtgctgatgactcccctccttatagctccagcctggaattcatcctcaagaaaaatccttctggcttctcaggctgtaaacttagagttcttcatcccgtgtcaaatctgtcagcagatcctattggcttttcttttttccccagaatccggtatccactaacagcatcttagaccaagcccccatctctcacctggattattgtaattgcctagctggtccttcctctgctcccaccccgtcagtctgtgtttacataacaacctcagtaattctgttaaaagtcatatcatgtgcctcctctgtgcaaaaactaccaggcctcctgtctcagagtaaaagccaaacctttaccatggctagaagtgttccacacggccaggcctctgttctagacctttcctttcttgtctccgttctcacttaacaccagccacagtggccattctgccaggcttgcttctgcctctgggatcctgaacttgcctttacctctgcctggaacttgtcctcagttatccccagggctctctcccttacctcctccaagacttggctcaaatgttcctcactgagaaaggctttcaccaacctcctggttttaaattgcaaatcagactcccccaagcccgcattcccattcccttccttttgctccattgcatttaatgtatcaccttctaataaaccgtttaatttagttctttatcttatttgatgtccctctccgcatgaagacaggaatttgtttcatcattgctccatccccaattctgagacagagtgcgtggcacatgataggtgctcagtacaggtctgtggagagaatgggtgcattgcagaatccaagggttaaggcatggttaggagctagagctttagaggcttgggttccagactccctttaccacttagctgctttgtggcttttttttttttttttttttgagatggagtctcactctgtggcctaggctggaatgcagtggccccatgtgggctcactgcaacctccgcctcccgggttcaagagattctcctgcctcagcctcccaagtagctgggactacaggcgcccacca

SEQ ID NO: 1879477 - DNA, 4001 bp, Homo sapiens
aacctctgcctcccaggttcaagcgattctcctgccttagcctcccaagtagctgggattacaggcacgtgccaccatgcccggctattttttttgtatttttaatagagacagggtttcgccatgttgatcaggctggtcttgaactcctgacctcaggtgatccacctgcttcggcctcccaaagtgctggaattacaggcatgaaccaccgtgcccagtagccatgcaaagtgctttgcttatattattaactcatttaatcttcatagacaaacagcttttaaaaaaagctgtttttaaaacaatttgaggagcatctgtggatgaatgctgaggccatgtgccggtcagggggcagtcttcccattagtggtggtgttctctgcgtaaggagaaaacagggtttttaatttttcatttttctgaagggaagaatcataaggaagtggaaacaaaagactccccaaaccatagcatgaggtttaactctcatgataccttaaggaagtaggcattattatgcccatttctatgaatcatgaaatagatgtgcaggagggttcagaagtcaccccagctcatacagcgcctaaggagcagggccaaggttcaattcaaaccgaatcccagcctcatgctagatcttagttcacacttcattctttcaatgagcatttataatctaaactgtacctagcaaacaggtgggacttcaatgtttcttgaattaaccacctaaatgtgccatgatgtcagagacagatgtcatcctcactgtagcccccaggttcagcacagtatccaggaaagaatgggtgcttgtagtcccagctactcgggaggctgaggcaggagaattgcttgaacccgggaggcagaggttgcagtgagccgagatctcgccattgcactccagcctggttgacagagcaagactctgtctcaaaaaaaaaaaaaaaaaaaaaaagcataggtgcttaatcaatgtcagccaatgaatacgtaaaggaattctaagttttagaacagtgatactttatttttctttgtttgtttgtttgtttttgtttcttttgagccggagtctcaccgtcggtcaggctgaagtccagtggtgccagctcgactcactgcaacctccacctcccgggttcaagcgattctcctgcctcagcctccggagcagctgggattacaggcgtgcaccaccacgcctggctaatttttgtatttttagtagagacggggtttcaccatgttggccaggctggcctcaagtgatccgcccaactcggcctcccacagtgctggggtaacaggtgtgagccaccacgcctggccgatacttcatttttctggaggtcatttacttagtaaggccaactggatcctggctaaaaatgtgaaagaagacagaaagagtcacgagcagtgaacaaaagtcacgggtcctagcacgtaaaagctcaagtacttgattcaaagccgaaattctcaggtcctcagttgtagcctggttacccttacaaacaccagtgctaaagagcacggttactaatctttccaggacacaagatttgaaagcatctgtttcgaagggagatgacctgctagaggaagcttgcgggcaacagcaaattgggagttcgactagcactttcagactgggatgcaacgaagaactcgccagcagaggtaagagatgggcaagatgaagagaatgaactctgattctcggatatctgcccgcaaggtggctccgagaaagccagcgggaaactgcagcatcgcggaggacttctctagttcaggttaaagagacagcagccagagggagccgacctcaaacccaactcccgacagcaaccttgaggccacccgaggtggcgcatgcgcagtgtgcgaggtagtgctcttcctacctgccgacctgcggagccttcttactgagcagggcttacgtcacgcaagcgccgcgggtgtgtgacgtcatctgagagcgccacgcgcggtcccgaaaacctgagcaccctctggctaaggcgttgctgtagagacggtgcgccagccccgcccccgaggcgggattggaggaaaactggacagctgacaagggtgacgtttcgaaagcgcgcgggaggccgtgctgggacgcagagcccgaaaacctatttgaggggcgtcttgaccgaaggtgctaaatatcacatgtccccattaaagtaaaaatgcaaactgccctaatcggatttcgtgtaaggcaggagggctgggaagacttaaatgtatcacttcagtagtttaggggtgggaagaagagtttggaccagactggtgccgggataacctgacctttttgagccttaacttcttctcgaagggatcgttcccatcagcatataaacatgtaatttcccccttcctgagaaccctgtggtggctccagctcccaccccatcccttcgctttctgaataccgtaactccttggaagagtgtatatattctttgtccagctctctcctcccactctgttgaactccctccagccaaactcagtctctcccaagtcctcctcttacctgctctatcagcaatttttgatacagtttatcaccctctcctccgcaaaactttcttcacttggcttttggcagtgcacacgcttgtttttctcctccatccctgccccaccttctctgtttcttttgctagcctctcctctttttcctgacctctaaatgtatcagtacccccagcactggctccttggacttctctttcttttcgcttaatctcttgatgatttcatcgggtttcatggctttaaagactatgtgctgatgactcccctccttatagctccagcctggaattcatcctcaagaaaaatccttctggcttctcaggctgtaaacttagagttcttcatcccgtgtcaaatctgtcagcagatcctattggcttttcttttttccccagaatccggtatccactaacagcatcttagaccaagcccccatctctcacctggattattgtaattgcctagctggtccttcctctgctcccaccccgtcagtctgtgtttacataacaacctcagtaattctgttaaaagtcatatcatgtgcctcctctgtgcaaaaactaccaggcctcctgtctcagagtaaaagccaaacctttaccatggctagaagtgttccacacggccaggcctctgttctagacctttcctttcttgtctccgttctcacttaacaccagccacagtggccattctgccaggcttgcttctgcctctgggatcctgaacttgcctttacctctgcctggaacttgtcctcagttatccccagggctctctcccttacctcctccaagacttggctcaaatgttcctcactgagaaaggctttcaccaacctcctggttttaaattgcaaatcagactcccccaagcccgcattcccattcccttccttttgctccattgcatttaatgtatcaccttctaataaaccgtttaatttagttctttatcttatttgatgtccctctccgcatgaagacaggaatttgtttcatcattgctccatccccaattctgagacagagtgcgtggcacatgataggtgctcagtacaggtctgtggagagaatgggtgcattgcagaatccaagggttaaggcatggttaggagctagagctttagaggcttgggttccagactccctttaccacttagctgctttgtggcttttttttttttttttttttgagatggagtctcactctgtggcctaggctggaatgcagtggccccatgtgggctcactgcaacctccgcctcccgggttcaagagattctcctgcctcagcctcccaagtagctgggactacaggcgcccaccaccacacctggctaatttttgtatttttagtagagacggggttttgctatgttggccaggctggtcttgaacccctggtct

SEQ ID NO: 1879478 - DNA, 4001 bp, Homo sapiens
ttttcctgctgaccctctccccaccattatcctatagtcctgccacatccccctcaccgagatagtagagatagtgatcagtaaatactgagggaactcagagaccagtgccgggtcctccgtatgctaagcgccgtcccccgggcccactgttctttctctatacttcatctctgtgtcttatttctttcctcagtctctcatcccacctgacgagaaacacccacaggcgtggaggggctggcccccttcagtggacagctaattcaagacaatttaaaatgctccaaagtctaaagcaaacaagttcacagagtgcagaagcattgccagtgtacagcttctggcactgtaaattctaatgagtattttattatatttgcttaatttacaacagacaataatataattatgcctttgacagacatcaataatctgtttctgtattcattctccatatttatagagtattgtgttttctagctgatttccacaacatattgttaacagtgccttaggccaaactactcttctttcccaactattctctttcttccctacaaagggagttaaaacaaggagctgttaaaacttggagccaaattagagattaaattacattagctttaaacggttttgtgaagtggctagaaatttttaccagtaatcttactgcaagtcctgggtcactgaagaactcggtaaatatgattagcatgcacgcaccaacacatcactgtgatgaaaacgcaaatcacagtatgtgagtcactactctcaacattgccatgcccctgccttaaacctgccagccccatccagaggatttttctcatctctgaactccaatcatttacaccttcccccatcagaatttaccctacattttattataattgcatataaatatgccttccctgtaacagcagggactgtgtttctccactgtatggcctggcacagtgtccagcacacagcaggcaaagcaagagttactgcatgagccagtgtcatcatccaaacgatagctaccatttccagagcacctaccgtgagctgactagtttacctacattatcctggtggctttcccagaccagaccacccaaaccaaagcagccccccagtcaccctctaggcacataaccctattttagttctctgaatacgactgattgctgtctaacatattttggtttgtgtgcttattgtctgtcaccggtttcccttcacaagaaggaaagctccaagaggacaggcatcttatctaccttgtacttggctcatagcaaataaatgaatctaagccgcccacctccctgggtgacagagttgacctgcacacagtaggtctcaaagagtatgttttaaattttatatttagatttcaagataattgtgttgaatattttatggttcataacaaacagaaaggggagggcagaataaaaataaataaaagtttagttacattaccctagcactgacattggtacgggaatttttgctgcaataagaaagccacttcctctgacataaggtcacccatacttctgggtcttgccacatcctcttagacagttcatcgtagctgggctggctggggcggtcaggactccagacgctcacactaaaagaggggtggtagtcgagcagtcactccactcctctgtagggagctggccgcgagtgggtgcgcagcagggtgcgcgcggacccgtgcagcgcccagggcggctgtgcgaagccgccgcagcctgcgcgcccaggcgattctccaccttggggctcgccttcctgccgcgttcctcttccttccatccctaaagcgcgtacgccctgcagagtcaaacctggcgcatcctcaagcttccagggggcaacgtgaccgagccccgcatcacgtgtgcagagacggcctatagtgtctgaaggatgccacctagtcgcaggcccggcggcgccaccaacagcgaccgcggtagtccagctcgcgccgcgtcccggccccagcccggcccggcccagccccgccccgcgcccagccccgccccgccccgcgcccagcccagcccccgcggcccggcccccagcggccggcctcccgcggccccgcccccgccgccccagtccccgcccctcgcgccttcgtttattcctccgcgcgctgggacaggctgcttcttcgccagaaccaaccggttgcttgctgtcccagcggcgccccctcatcaccgtcgccatgcccggaggtctgcttctcggggacgtggctcccaactttgaggccaataccaccgtcggccgcatccgtttccacgactttctgggagactcgtaagtggccaccgcgtagccctgtcctggcctcggttgcgccggactcggaggtgccttccctgtttcttctccctgccgtcctcccggccgctcagccccctgcgccgccctcgccttcccccgcactggttccggcgcgcgccaggccgtgtggcctctgctcagcgtcggctgcgctgctgggagctggcacccgttcggcctgccctgcgcgggccactcgatccctcctggcctccccgcctccggcgtggctgggcaaggccacgccaaggtggggggtggggaggataaaattgtgttctgcgggttctggaaactcaccgcccgcgggagggtttgttgtccatttaactcgtcttagtaaactgtgcaggtagcgtggtcaggccgagggcgcaggggcggggcggcattgacgatcacttccccggactagtgcccagggtcgcaccgccctcccaccctccgttctggaatttgctccctggggaggatgggtgtctaaagccaaagtcggaggacacagctgctggctataggttacaggaaggccaacgtatcatctgagggtgcagtggtatttgcaggcttctgggcacaaaatgtgaaatttaaaaccactagctgccaagtaggtggccgaaagactttttgtccagagccgcctccaatggccaagatatgatttgataacagctttaggaagagccaagaacactctgcgtaggtgtgccttcagagattccagaacttgcaacacttggagggaaggactttctgacgctgttccgctggagtggcctattcttgctagtgatggccgttccaggctccaggacacgtgtactccccaactttgagactctcttgttttccagtggcttgcccctcactgtcccctccgctttctaccttgcttctagcacatgagcttgctgatgatagccaaattgatgacctgtgatctgacttggcagttttaccattatggataggagtagtaaatcggtgttgcccttttttttttttaacagctcctgaatcagcaaactggaagttgcttagttttcatcagaagcattccaggcatgtctagttatattatggttctggagtactagtggtcccactacactgtggggctccaaggcttgacaacagttcttccccagattatatcctttttatatacagtatccagggagacaggcttatgaaattaatcagtgattggacagggctgtgcagagaaccagggacagattcttacacatcatatgcctatccaaccctttataacctcttaagtcccttttccagccactgaatagggaaaagttaagctttgtgaaagataggactaggccagaaaaaggttgagaaatggaatattcaaaccttgaatgcagaaaaatactttagaaatacagcttatggccattcttatacttaggatctaggtagtaatatttctccagcaatccttgggatttttagagttgtgttccttcccatttctacctgcagccctcatcccccatccccatgaaacataaactatttccagaactcttagcttgtatagattaaatattagcataaaacgtatttactgtgccaacagttataaatgctgtcactttttaagctaaccatac

SEQ ID NO: 1879479 - DNA, 4001 bp, Homo sapiens
aatatacttaatgatgaaatcagaaagttttgccctaagattgggaaccaatgatgtccactcttattcaacattgtattgaagataccagttatttcaatatatttctttgttgttgttgtttgtttttttttgggggggggggtgggggacagggtcttgctctgtcacccaggctgtagtgcagtggcatggtcttggctcactgcagccttgacctcctcctgagctcaagagatcctcctacttcagcctctggagtagctgggactacaggtgcacaccaccacagctggataattttctgagtgccagtagtggcaacaactcaatcactaatattcagtgttgatggagcaagctgggtgtggtggcacgtgcctgtagtcccagctactcaggaggctgaggcaggagaatcacttgaaccagggaggcagaggctgcagtgagttgagattgcaccactgcattccagcctggacaacagagcgagactctgtctcaaaaaaaataaataaataaaaataaaaataaaaatttttacccttttgacagcatgtcaggcttctgggttctgttccccgagctcaaccctaagccaagcattttaaggtttgaggaaattaacttctcccagtttggaggaacattatagaagaagagataggagccattttaaatcatgaatgaaggaaggaaaaataccatagaaaagtctgggggtttgggtggtagaattggagaagctgacaatgtgaaagggagggaggaagggccagggcatctggaagtttcatttgaggggttcctgggagtttgtttctctagttttggggaatcattccctttgggcctgtctgatatgactgctgaaagagctgagtccattgtgcaatgcttgcaaaggtctagtaagaaggccatgctcttgtgcaaaagaaaatgagctgttttttcttccaaatctcagagtcaaaggagtcccagtgcttcagaacgcactccagaggaggggaaggggaagacagtgagggcgccacccctactgttttccctccttggttcctgggtcccagcatcttgttaaacatgcctcccatggttgcaggtgtgacccccagccatggaaccagaggaactaagtgattggggttagtcatgcttacccatgtgactctagtcctgcacttatgatttccttttgacttccaagacttgtgtgacctgtgtggctccctgaaaaatggatcttgggagagactatgtaacagttgcatttaggcaactgttgtatttccctccataatggaggaagtgtgctggtttgagctctatatcctgctattatgactcgtgctaaagtacccttagagaatggttccagttaacttccggacttaaattacccttactatttaagtactattttaattacaagcagaataggtgccttaaaaaaaacataggaaccaaatggctattttcctgctgatgggacagtattgagactaaaatttggttttggaggacattttcctccttattgttgaagacagagttttcccatttatggaagtagcataaagcctggtgtccagcagaggggtgcaaaaagggaggagaattgggaagccagagtgttttggcaaagggctgacaatgtgcctcatggagaggattcctatgccactgggtagggccgttgacctttaaatgccatgtgctctccagaccaagggcagagagagacctcactatggggagaggaggggaagacccactgttcctagaaaatcacaaaaatggcattgccttgagctctacctcagttactacggtatttcctgatcttgcctaacaggattacttccttgaactgtaaaaattcccactgcttcagaatgttctccccagcaagcctgtcccccaagtcttgtaaggctgccagccacactaatcatttttaaatagctgaagggggcccagtatttgatttgattttaaaatggaggccaagaaccttgaaatgaaaggacatggttgaggtccactcctgtcctcactgttctgatgatgataccttgatcccacctggggccccaaaatgaagcagtgtcgttcatctggggtaagacccaaggatcattgcctcatgccaaggaatgaagcagtgtcgttcatctggggtaatacccaaggttcactgcgtcatgccaaggaagtcaaggacacgaacacatgtgaagtgaggttaagagcagaggtttaataggcaaaagaaaaagagaatagctctctctcctgcagagagaggggcacctgagtgggtcttccagcctgcagcagcatgcacaaggacaggcatgaggaggcagtgtctgatttacatagggctcaaagattggttgaaacaggtgcgatgtttacatagtacaggaagaagctccccgccccaccctaatctattttgcaaatggatttttttttttttttttttttttttttttttgagatggaggttcactcctatttcccaggctggagtgcagtggtgtgatctcggctcactgcaacctccacctcccaagttcaacagattctcctgcctcagcctcctgagtagctgggattacagacgcctgccactacacccagctaatttttgtatttttagtagagacaccatttcaacgtgttggccaggctggtcttgaacttctgacctcaggtgatctgcccgcctcagcctcccaaagtgttgggattataggcgtgtgccaccgcacctggccacaaatggcttctctacctggctggcgccacgttgcctgctccttactgtacatgtggttgataaagaaaaaggggagatggagccaccatgttgaacatgcctagcctccagggggccttttcctattgccagagctgctggcattcacccctgcaagcttccagcttgctgatctatgtctgcagcttgattttacaggctgcacttcgttaggaaagaaatgattcgggggctgcttttcattaaaaggaaaaccttaccaaggacttccttaccctcactatctgcctaaataagttcttagatcacagggagtgtccagtgtgcccactggcctccagatacccaagcctgcagatcacacacatctccacctacttccagtgcatcattgcactcacaaggttcagaagttccaggacagccagccatggagcctgtggacagggagtgcatcgtgaaggttgccaaggcagtggaggcccaggttatggcagcccaggaaatgagctgggaggaaagcattcaggaactgatgagcatggagaaagaaagcactttgtaggaacagatgaggaagacgtgggggatgatgtacagaagttacaagtaagcggagctgatattaaacaggattttgctacacagagaaaaaggctagaatgtatatgaatgcttttttttttttttttccgagacagagtcttgttctgttgcccagagctggggtgcaatggcgcgatctcggctcactgcaacctccgcctcccgggttcaagcagttctcctgcctcagcctcctgactagctgggattacaggcgctgccaccatgctcggctaatttttttatttttagtagagacggggtttcaccatgttggccaggctggtctcgaactcctgacctcgtgatccacccgtctcggcctcccaaagtgctgggattacaggagtatatgaatgcttttatccacaccactaagaagagaattgaacatgttttgaaaacacaagaggaaaggcagaaacttcattacaaatattctaagcagtttctgactttgtttcaagattggaacacgaacagtgaaggctgaggaaccagaggaacaaaaactagctacaatgtttcgagagcaacaaaagagttgtctataagctagaatggttcagagacagagacactgaaacaaattaaactg

SEQ ID NO: 1879480 - DNA, 4001 bp, Homo sapiens
tagatccagcggattggatgcctgggtcctaagtttcccaagccagggattatcaccttttaggagctgcaaggaagttagaaggataaaggagaataacttaggaaaccaaataacttcttatgtgtcgcggtgatacttttcttttttttttaatttatttatttatttacttttcatgcgcgtctgtgtgaagagaccaccaaacaggctttgtgtgagcaataaagctcttaatcacctgggtgcaggcgggctgagtcggaaaagagagtcagtgaagggagataagggtggggccgttttataggatttgggtagataaaggaaaattgcagtcaaaggggatttgttctctggtgggcaggagtgggggtcgcaaggtgctcagtgggggagctttttgagccaggaaaaggactttcacaaggtaatgtcatcacttaaggaaggactggccattttcacttcttttgtggtggaatgtcatcagttaaggcggggcagggcattttcacttttgtgattcttcagttacttcaggccatctgggcgtacacgtgcaagtcaccagggatgcggtggcgtggcttgggctcagaggcctgataatactagcccagggtcctgctcccttacagttctgtaatcttcactcagtgactcgcttctgtctcaatacaaaggaaagacgttattttttctttttctcctttttttttttttgaggcagggtatcgctctgtagcccaggctggagtgcagtggcgcaatcatggcccactgcagccttgacctcctggactcaagtgaccttcctgcctctgcgatagtttttcatggatgcttctagtagttttttggaggtatggtgtgttaggaacaaactgccccaaaaagcttcttggtactgccgacacttcccccaaacctctccgtgctgctcactcctccccctaatgctctgcaactcttctccttcccccaagcctctttacacttctaagtccttatgaagccagcagacttcacttatcagaccttgctgcaataaacaaaccccaattacaaatcatccggaccgcacaggggaaggtgatgggaagcataaacaaactttacctacaccctcctgtaataaacgtcacaagctaatatgtggcaaaattaaccagcaaacaaccccagggtctctctcccccatataaacccctcattttgtaagctcaggggtgcctcctctgtctgtggtggagcagccgtcaggttaataaacttcctcggctgaccttgggtctctctttcgtcctttctctcggctaaccttatatggtgatagattggaaacttttttttttttgagacggagtcttgctctgtcgcccaggctggagtgcagtgacccgatctcagctcactgcaagctccgcctcccgggttcatgccattcttccgcctcagcctcccgagtagctgggactacaggcgcccgccaccacgcccggctaatattttgtatttttagtagagacggggtttcaccgtgttagccaggatggtctcgatctcctgacctcgtgatccgcccgcctcggccttccaaagtactgggattaggggcgtgagccaccgcgcccggccgattggaagcttttaagaactccttctcctattttgagaattcagaaatttatttatagctttcgtaaaatagagtgaagactcttacagacctatgttagactagcaggcgctcagtctctgtggtccgagatagagcacgaagatgacagtgtatatgcattttggtgctgaagtggacctggagtgtggacagaggagttactaagaagaatcccggagaccaggatgtaaactctcaattctaatcaacacaggtgtgggctatggttctgagacaccattcatctcacacgaggtacggcgatacgcgacaccacccagtacaacagctctctctccacctggaacccggacccagcttgattcgcgggtgccggatgatgacgtatccttgcacctggcgatgattggttcgcgtggagaggcgtcgtccgacaacgcgactcggaacccggacctatgttctcgcgagagttagcggcctccggtgtgggatggccgcggagccgggcggagctggcttgcggctcccggggccggctctccggccggagacatggcccgggggcccggcccgctaggcaggcctcgccccgatacggtcgccatgcccaagagaggaaagcgactcaagttccgggcccacgacgcctgctccggccgaggtgggcgaggggggcaggggcgctgaaacattttgggggctggcggctgggagggggctggaccgtgccgaggtgagcgctcgcgtgcccgcggctggagggcggctcggtccgggggcctgcagcgaggaggaggtgttggcggggaagacgctgacgagagaaggcctcttccttgagggttggtgctgtgttgcagtgaccgtggcggattacgccaactcggatccggcggtcgtgaggtctggacgagtcaagaaagccgtagccaacgctgttcagcaggaaggtaagctttgcgcgagcctttaaagactcatgccgcgaagacagaactaggtattttatttctgtttttcttgcagtcctttagtcgtcttcctgtaaccgtgtttgctttcgttagtgttaacttacatattggggtggaggaggattagtcaagagtagcagtttctgtagcagaaatattttctttctttctttgcatttaaaaacatgtttgcatactttttagtttccactgcattcttcttggttattaatctctttgctgtagttcacatgttttactctgcagtttgcttccttgtttaataaccttggagtgttcttttccttttctggtgtttctcttgctttcagtctgtttactcatgggtctgagacttgtgttttatgacacctactgcctccagctcaggaccaggattaaattggattcaatttgtctcaaacatttctctgtagaccttatgagaatacaaatcagcttttatcctgcagggtttatagtggaaaaattgtacacaccttttttcttcagggctgaaaaaaggagtttctgcaactttggagtcagtttgcccattgctttccttttttttttttttttttgtatttaaaatactaaaatctttattttttttggtgacagattctcacctttctctctcaacgatgttttttttcccccctttcctgaatggatgctgataccttggctaagttgtttgtatttctgggtggagctgtgtgccatctcattctccttttattttcttctagtaaaatctctttgtggcttggaagcctctcaggttcctgcagaggaagctctttctggggctggtgagccctgtgacatcatcgacagcagtgatgagatggatgcccaggaggaaagcatccatgagagaactgtctccagaaaaaagaaaagcaagagacacaaaggtatggagcttgttctcttttggtttattagacctgcctgtggtgacaaattgaagatgttactttcccagtagcacaggaggagatataagacgtgataccaggagagtttaaagaaaacttggctctccctaagaaccttggtagtgggccgggatttaatacacctgggctttcttttttcttttgtctgaattcgagagggaaagagattagtacgtgttagtagagttctggagctgtgaactggactctagtagcccttcattgagaacatgttattatcaggtaaaaacccataaggcaatgtgaaaataaaaggcctttgcatttctggatttctgaatgtgtaaggaagcagagatgtaaccaaaaaatgttttccaaagtatgtggattttacgttaactagttttgttacacacaaacatagacattatcgtgggcttttaagtg

SEQ ID NO: 1879481 - DNA, 4001 bp, Homo sapiens
aatcctccggcctgggtctccccaggtgctgggattgcaggcatgagtcaccatgcccagccaagcactttatctatattaactcatttaagtgtcaccacagtcctatgagggaggtactattgttatcatcatcctcctcatttgacagatgagtactgaggcacagagaggctgagtcacttgctcagggtcacagagttgggaagttcagactggggatctgaaatgaggtttagatccagagattttacccactacattatagcatctgtgaaatataagtgtttagctaccagataatatgagtgtgttttagatgacatgtaaagattgaacagatcccagccaattaccagcaccaaaagtagtaactgatggggacttcggccacaaagggcagcgtctctaaggagctgaggcttagagacaatgtgaaagtagctgtggagggtgtggctcagtcccaggcctcagaatttcacatgtggggcttcccttttccacctcatcaccccaagatgacttaacaatcccccgcctttggccaaccaaacgcaagagccatatgagtgactaatgtcgtctgggcaaagggggtcatgcccaggtgctaccaggccaggaggcttttgtcgccagaaacctgtgcgtgtttatatttctcgtttctgctcaccacaggcctttgatttacaagggtggagtttccagagctgggcactgttgcaccttcatctggctgtcatcacttcctctgtgcagctggggcaccggggactgaggacggggcagtccacagggagctgtggttccaccccttcactcttggtttctgccaggccctcctcttgaacactagacccagattcaacccagatttctcctccacggctgcacagtgccaggaagggaactgagaagaccaaagtggaggttctttaccttccccaacacactcggggccaggcgtggcacccacaactgcaaatgagacaattagggagaataagtgctggctgccctgtcagcccagagcctcagtctgcccagggcacccagactctgtgaggttcccacctgaagaagcagttccatcttccacaaggagcacaggaccaagagtccaggacccaggttcgaggcccagctctaccactttctcgccgcggggctcgggttctctggaggcagcgtaatggagtcagtgggtttggcaaggggaagattcgcattatggctccctcagtctccaggcaggtgactcagggctggggggaggtcctttctcctctctgacccttggtcatctcatttgtaaagcggaggtgatgattctcatctcagggacgaggcactgtggggttaggagagaatttgtcaagtggcatggttggtttttggtctgtctaggcccctccccctctctgtaagctggaagcggtacttgtgaggctgaggctctaggtgggtgtggggagccattggggtagtgaatggaaggccctgggcgaagggccccaggcagctgttgaaatgtcactcacccactgtggacttcccaccaagcagagcccgccaagcctttcccgtctgaggtgggttcagtttcactaccgggctgaggcaggcatctcaggaaggggccctcggcttttgtgtgctgaaaaataaccaggctccatctctgctgatttctgcttgggagttccgtgagcttcctgcatcatctgtccacagacaggctgccgcagggtggacatcagagtccctggggtggcttccggcctccctcccttgcctcccgcctttgctcaaacatctgtagaggctccagccccagactaagcccttaaggagacagggtcccgtgagacccagcctctgccatcagggttctcctgtctaaaatgctgtgtgcctcagtaaaaggcagcatggggtagggtggctgtgtggggacacagagccagggaccaaatgctgtctggggtccctggagggtggtcaggagagcttgccagaagggggaaatctctgaaatgagacagaaggaggaggagccatcgcttaaccacacctgggcgagttaacttccccaagcctcagtttcattctctgtaaaaggaaccagtgatacctgcttctgagggaagggtgagaagcttaaaagagatggtataaaagaactgacaaatcccgtacaccagccgggtgaatcccttacaccacccacatgccccggggagatgttctgtgaactgaacttctttttcaaaagtcttttcctctggcaatcgacacctggtaacgtagtgtaaccaagtgtcctgttctagaaaaagcccagctgcaacccagcagtaagtgaagcagcctcagagtcccctctctctctgggatgggtaatggaaactcctccacccagtgggagtgaggcagaagtctccagaattcagagctttcccatgcaccctgcctccccagggcctgtgacctttagatgtgttccctgtttctgtaggcattatgaagttagatgcaggagagttcttgagaacttgaaggcacttcccctctacttgtcccccctttgattttaacaaccgtttgttgagcacctactctgtgccgggtgatggagagtctctgttggacaggccagacaaggtcccagccccagtaaagctgtggattctggagagggacagagacagtgatgataaagacatggaaacaaaacagtctgcaacaagtactgtaaaggaaaacaaacaggatgctgtaacagagaatttgggggactgcttagggttcctgggacatttgaggagctggtaggctgagatctgaagttggagctgaccatgggaagagtagagaggaggaaaaaatgttccagatagagacaacagcagctacaaaggtcttgggggaagaagaaacttgtagaaactgaggagttgtgtgaggaggttggtgggggagggggcgctggcagcacaagatgagggcccagagtgggcaggggccatggggcctggtgaagggtttggatttcattccaggacagtggagggtttttaagcaagggagtggtaatatcagaatttttttttattttatttatttactcagacaagatcttgttgtgtcgtccacgctggagtgcagtggtgcaatcacagctcactgtagccgccacctcctggcttcaagcgattctcccacctaagcctcccaagtagctgggactacaggcgcataccaccacgtcctgctaattaaaaatatataatatataaatatatatatatatattttctttttgtagagatggggtccgtgttgcccaggctggcctagaattagactcaagtgatctcctgcctcagcctcccaaagtgctgggattacaggtgtgaaccactgaacccagccagatttctgtggtttgtttgtttgagatggagtctcactctgtcacccaggctagagtacagtggcacaatctcagctcactgcaacctcgacctcctgggttcaagcgattcttctgcctcagcctcctgagtagctaggattacagatgcatgccaccaggcccagctgattttttgtatttttagtagagatggggtttcatcatgttggccaggctggtcttgaactcctgacctcaagtgatctacccaacttggcctcccaaagtgttgggattacaggcgcgagcgagccatggtgcctggcctcagccagatttcattttaaaggctcatcctggctgctgagggggctgtcagagggcaggagtggaagccaggagaccatctggagccattgccctcactgtccctgtgacgtcaggcccctcacccctctaaacctgtttattcacacatatgtgtgactgtgagaatcaaatttggaatgagcagaaatgcactttgcaaagctgaaaagtacgcataaatgcagggattcccgccttgctagaagcg

SEQ ID NO: 1879482 - DNA, 4001 bp, Homo sapiens
cgatgaagagccttttcatgcttctgcctcctgggcttggctggtgtctctgaccctggttatgggagggctggtgcaaggaagagctcccttcccaaaccccttactgtcggtgtgcacaaactcattctgacagggcaggtgtcctgtggcttagccagcctggattaagggacaaagcagaaggtgggcttgagccatagataacagaaggctgaagactaccaaaccccacagagaaggacctaagacatcaaagtcccccttcccagctcctgccacttggcataatcattctcccacttacctggcacttcacaagtgtgatctcatttctaatcctcaccgcaactatactgaagtatcttctcttcattttacagaaagaaacagtctcagaaactactcccatcttgcgaatagtaagcagtggagccaggatttgaacctgagaccatgcactgggggctcttgcccccacaaacaaacctggaaaaacttccagaagcatcctgaagtggccccccccagtgccatttactgtggaactcaggcctcagggccagagcaggctcccactggactcctctccccacattgtggcctctccctgtaaccaggtctgcctcccccacaacagggaagctcttgaagccatggattagcaccatgctccttaaagaccatactcaagtgtctcaagtctttgatgagaaagtagaattacaggattatactctcaatcaatatttgttaataccaccttgcagctgggcatggtggctcatgcctgtaattccagtactttgggaggccaaggtgggaggatcgctagagcccaggagttagaggctgcagtgagccgaaatcccgccactgcactccagctggggcaggagagcaagacccagtctccataaaataaaatgggttgggagcagtggctcatccagcactttgagaggccaaggctggtggatcacttgaggtcaagagttgaagaccatcctggccaacatggtgaaaccctgtccctaccaaaatatatatatacatacacacacaaaaaaattagccgggtgtggtggcatgtgcctgtaatcccagctactcgggaggctaagccaagagaatcgcttgaaccaggaggcagaggttgcagtaagccgagattgtgccaccacactccagcctgggctgcagagtgagatcctgtctcaaagataaataaataaataaatactaccttggagtttcctataaaaatacgtgttttcttcctataaaaatcttagttcttagctgaggagagtttgaaagcatctcacaggcactgagcggcaaggcagtcggcccagatgcaatcactttctggaaatcaattgaaaatagaaccgggaaaccagcctccactcctgatactgttactaacctgctataagactttgtgctcacctttgcttcctgggcctcagcttccctgtttctgagagaagagatcccctctccgagatctcttcccgctttctataaatattgattgagtacccgctgcctgccagggatatcgccctgggctcctgggatacagctggaatctcgacagcctggggaggaaggagcctttgatcctacagcggcaagagttcttgacacttgccggctgccaagcctgtttcctcccggtctaacgttctgtggttgtctgaatctccagctgcccctcaaaaccttcaatcagattagcgccgtgctcctttaaagaccctactcaaagtgcctggagctcacctgggtgtgtttgtgaggccctttccctctctttaccccgcggaggagtccgacctggaagcctcctgctggacttctctactggactgagtgcccgggagtgccagagccagtcccaaaaaggacccaggagcggggacaccacggggaggcgccgccactccagtgtgcgggaccctggcacccccggcgcgttctccggcctccccaggatcacctgcacggggcggggccgggggcgggacgccccgggcgggggcgggatcccagggtggcagcgccgggcggcggcggggaccctggctgggagcgcggcggtgccggcgggaggccgagcggggctcgacagagcaggtaggaggcgcctggtcgccggggttgcccggggctgcggggagcgaggagcggtccggcccaggtgcggtggcttcctgtccacctgccggccgcgctgggcgaaggagggcccgggggtggggacgaggggtccccagtctcacccccacatctgttggaggaagtgcctggggtctgcgcgggagggcgttggtccggggtggtgggagggaggctgatcatctccagtgggtcttggagacgaggtcgtttccttgtcccctccccacccaagcatctggcggaggggccgaggctcgctggaagaaaagggagtcgaccttgacccggcctggagataaaggaacttttacccacttggggccttatccgccccatctgttaaatgggcgccttgatgggtctgccctatgcagaggcccctccggaagatctgcgattcagcgagatgaaaacccacggcagagaaggagcccagggccgtagtttccatccacagcacgtttggaggggctcgggggtcgctcatccagcagcgctcctgaggaaggatgcagagacggctccagtcctctgggtatccttgtgggaggagatggctgtgtcaaatatgaaggctggattagagagaccaaggcagcccttgagtctgggagaagattctggaaggccccttggaggaggtggcatctgagtggggcagggaaaggaaaggtggtggttagggcagcgctttggagtccctgctttacccctcagccaaggccgtccaacagtctcgggcaagtccacacttttctctatgtttcagtttgatgtgctccttaaatgaaacaatttctctgacagattaaatcagataactcataaagtgtttaatacagggtgggtatatagtaggcactcaatgaacatgagctattaatgtctgctagcagctgcttgggggcagggatgatgcctatttggttcacccttgtatccccagcaccagcacggtgcccagcatgcagtaggtctcaatacatatttgtccaatgaatgaatgaatgcatatgaagtacaatgcttggcacaaatagtgaatttacagatggctggttctaagaggtgggtatggatactagagacagtggtctaggtggatggaacagttataagcagaagccaagagcaacagattataggcaccccctcttatggtgcatgtgtgtatgtgtgcatgtgtgtgtgtgtgcgcttgtgtgcatgtgtgtgcatgtgggtgtgtgcacgtgtgtgcgtgtgtgtgcgtgtgtgtgttggtggtggtagtagaaagtgacaggcacagccagagcaccgggatagaagagggcacataataccctggaatcctgagtcccatcagcccgtgggagtggatgatggggcaggaactctaggtaggccaatacctttactcatgtcctctaagtggggagaggggacagaagggcagccaagagacaccaaaggaccatgaatgcctggtgggaggggaggaggaaatgggaagggggttcccatgaccccttcatggcctgtggctttcttcaccttgtccctgctgggctctgtgctggctggggccgagatgagctgtggggaggcagcatggtgccaagccagccagccgcggcgcgtgcggtgagctgggcatatagtgagctgggcttgaggaactggctgggctctgtgggaatctagtgtagtggtttcctatcaacagcttatcccctgggccagttcctgggctccgtagcaccatgtggactatggccattcctgcctgaagtcaggaaggagctgtgtccttgaggtagagccactct

SEQ ID NO: 1879483 - DNA, 4001 bp, Homo sapiens
tttttttttgagacagggtcttgctttgtcacccaggctggagtgtaatggtgtgatcatggttccctacagcctcgacctcccaggctcaaattatcctcctacctcagcctcccaagtagctaggactacaggtgtgcaccaccacacctacctattttttaaattttttgtagagacagtctcctatgttgcccaggctggtctcaaactcctgggctcaagtgatcctcctgcctcagcctcccaaagtgctgggactacaggtatgagccactgtgtctagcccccttctcgtttatacaattcccttgttaccacccatatccagtgttttgtaataaaaatgtcttatggttttacagcaatttagtttccgagacattgtttcttacaacagttctgctaggtgtacattattatgctcattttaaagagaaggaaactgaagtctaaaaagttgagtcggttcacctttggttacaatgagtcattgttacacagggattattttaacctgtgtccagtgatttttcccccaccacacctactctacactctgctgctaatgcttttgcagggagaaaaggactccgtgttaagactgagggccgggcgcggtggctcatgcctgtaatcccagcactttgggaggccgaggcagacggatcgcctgaggtcgggagttcgagaccagcctggccaacatggtgaaaccccgtctctactaaaaacagaaaattacaaaaattagctggacatggtggcgcatgcctgtaatcccagctacttgggaggctaaggcaggagaatcacttgaacccaggagtttgagaccagcgtgggcaacatagggagactttgcctctacaaaaagtttaaaaattaggtaggcgaggttgcggtgaactgagatcactccattgcactccagcctgggcaacaagagcgaaactccgtctcaaaaagaaaagactgggaataggaatcagagactgctgtcccaacttacagaatcgtatacagttctagccgccaggacccaagaatgatgtcatctcggcactgtctctagaaccattcattctttctaagcctggaacttagatgagtgaaagcaggttcctattacataattatgatcttgattgccctgggcctactcaactgtaaattttttccagagccagaaaggcttcacagaggacaactttaccctgaaaagaaaggacctctttggtcagtggtcctcaactctgactcacctgaaagctttacaaaaagtaccaatgcccaggtccagcgctggagattttaactggcttggggtagagccctggcatcagtatttttagaggcttcccaagtgattgcaatgtgcagccaggcagagaattactgctcggtaagtgggatgactggggagtgggagatcaaatactctaacgtctcccagcacctattctagagatcagtggggcagaaaggtagaaataaaaggtggaaagggatgaaatgggtaagtgtgggtgaattagttccaggaaaacggcaatctccactgtggattcagggaaggcgtcactgaggagggctttcttaacagttcaggtcagtggaagccaacttgaggcacacatcgtgcgcggcatcctccggggaggtcgggtcatttcaccccattttactgccgagatgacctaggtccagagacggtaaagagcggtgtacgactcacacaagtcgggggtcctgtgaaccgaggttgagcctggcgggccttcggcccgaggtctttaagcgaagtcaccagacccggggttcaaagcccagaggtaggcaggcggctggctctccgcctcaggcctggagagaacccaggggtatgaacctcaacctcgctcccgcgtccagctggaggggcggagctggctggccccgcctccgggttaaacaaagttctttacagactaggcgtgaggggatgttgcagtcttgttgccacttccgggcgaagaggttagcgagaaggaacccctccacgcagcgacgacgggacctgacgtcacttccgcgcgccgccgcaaacgtcagtgtcgggcgcagacggcggcagtgcggcttgctcttggaagttcaggctcggttgtcttttgggagccatggagagtgacttttatctgcgttactacgtggggcacaagggcaagttcggccacgagttcctggagtttgagtttcgaccggacggtaaaagcagcctgccgcccgccgggagcggggaccaggcctgggggccggcgagtggggaggccgagggtcggaaatctgtggggaactagaggagggagggactgagacctgtgcagtgcagatcttaaaggaacgccactgtgtctgctccacggggtctttctatccattcagcaaacgttgactgaacgcccactgtgtgccaggctctgttccactctttgggaatacggcagcgaaggtagacaaacttcccctctcgtggaacttgtgttttactgccgggagagagatcataaacaaaaagatgattccagatagcagtgagtggtcaaaaaataacatggtagaataattgctggatgggctgcttttagataggttggccattagagagctctctgtaaagggtatattgcagccgagtcctaattaacaagaagggctcagccttgtgaagctcataaggaagaccattctacacaaagggaataccagatgtcaaggctgcagggcgggaatgagctaggcgtgtctcaggtggtcagtgtggttgaagagtggtgagctgggagatagcaggagatgatgtcggataggtaggtaggagcggcacctcttaggtctttatagaccacggtaaaaagtttggacttggaaggccttttttttttttttttttttgagacggctttcgctctttttgcccaggctggagtgcaatggcgcgatctcggcttattgcaacctccgcctcccgggttcaagtgattctcctgcctcagcctcccgagtagctggaattataggcgcccaccaccacgcccggctaattttgtatttttagtagagacggagtttcaccatgttggccaggctggtctcgaactcctgacctcaggtgatacgcccgcctcggcgtcccaaagtgctgggattacaggtgtgagccaccgcgcccggccgggcttggaaggttttaagcagagaagaaatgtgatctcttcttgaaaaagcattctggttattgggtgcggaatgggcaagagtggaaacagggctattgattaggagactgttgcagttgtcaagacacgaaagatgttgggggccgggcgcggtggctcaagcctgtaatctcagccctttgggaggccgaggtatgcggatcacttgaggtcaggagttcaagaccagcctggccaacatggtgaaaccccgcctctactaaaaatacaaaaattagccgggtgtggtggcagacgcctgtaatcccagctgctcgggaggctgagacaggagaatctcttgaacctggggcggaggttgcagcaagctgagatagtgccactgtaccccagcctgggtgacagagcaagactctgtctcaaaaaaaaaaaaaaaaaaagatactggttgggactacagagatagtagaaatggagagaaagatttaggaaactgttggaggcagaaccaactggactttgatcgttgataggattttgttggcagaggcactgtggtgaaggaaagagcaatcaaagatgacagaagacatccactaagtggggcacaaagatgaatctgacaggcctcgactgtgagggagatagatttgtaagcagtgataaaacagcacattaggtgttgtggtaaaaagaaacagaggaggctcgcagcagagaagggtgcacctaaccaagcctgagggtcagaggaggcttcctacataaaatgatgggagg

SEQ ID NO: 1879484 - DNA, 4001 bp, Homo sapiens
tatttattgaataaatttattcaatttgttgaataaattcctcagcatgtaccttatgacagcctgcttacatcagtttagattgctttgttcttcatatgtcacagataaacatttaaaacttcattgtgtacctggaagttgatacttaataaaaattttatttcaatatgtacattgtgacccaaaccaattataggcattccttcttgtcattgttgttcagaagtgtgaggtttccttttgttacttttaattaaaaaattgagactttatttgctttggatatgaggcctaggctttataatgtcgcctttaatggaaacaacaaatacagtaacttcatttaaaagtaaacaatagtgacaaattcaccctgtaaatcaaattgctggtatttataaacacaggtggcaagttactaggtacgaagggttcgtggtccaggggaaaatatgccagcagagtgcagagacaatgtctaggtaccggccctaatttaatatttggtgtatgtaaagatcttcgtgagtgctgggctggcaacagcaggggtttgatgggatgaaaaagtaaggttagctggatttcaggttcaggaagaaaccaggatgaggacattagaagatgaactcagcaagtatgtaggaataggcataggagatgaactcagcaagaatgaagggatatccgaatcttgggaaagggtgggaaaataacctagagaactatggattgaaggaaattgaagaggaaaaatagcaaggacttaggcccaggacggctttgaatgcggctcagcacaaattcgtaaacttcttaaaacatgatgagattttttaaaagtttcatcagctaccattagcgttagaatattttatatgtggtccaagacaatttttctccttccaatgtagcccagggaagccaaaagattggacacccttggcttagatggtggagtcaagggaactaaagatatgaccccagtgtgccaatgccaaaggtgagaagagaaagcaaagaaagcaggcctttaaagaggtagaggaatcctcaaaggtggaaagaaacagggataggatgctgcccaagaggcagggacaaagaatcggagccaaagactgcggtaaaaatgtgggaaggtgatgtccacgatgttcgaacgagtccgtggccgaaggaagtaagagtctgggtttctggaggttttcatacagagaactgggatttagatttcgggctggaaaaatatattttggactctcaggggctttcagggtaagagttcggtagagttcagtcagcttggcggagacaggtagtcagttaatgttggaaggaaaattcggacagctgggaattaatttcaacgggtttagggtgatttcggcaagggctggcggggctagggtcgagtgtgaatttcgtcttgggtggtccacgcgtctggtttgggcaggaatttctgtgggcagcgaggcgtattcaggcagcgttgcgggtgaatctgcgtgggatgagggtggatttccttcaggactgcggtgcatttcaggccggggtggaggtgcctcacagccgcggcgcagggaattccctctaggatgggggagcgggtcgggcggcgccggccagggaggggaagtccaacgggggttcggagaggctcgggggactcggacggagagaagccgggtcgcggctgcggaggctcggccggccaagggatttccgcgacgttcagcgctgcgagctgcgcggcgctgcggcccctcccgtcccgggggaacctgttgccggcgaaacaggcgggcggtggcgacgatggagaagccttcctcgcctctgcctggctgcacggcagccctttcaccttaggcacgctccgcggcgcggcccctccctccgctccttcgtttaaaacaaacagaatacgccgccgccaaccctagcctgccaacggcgagcacggtcgcctcccgtgccgcttccgggagccgaggcgcggccccgccgcccggggaggaggaggcggagggggaggaggccaacatggcggcgcgcagggctgggccgggccgcagccgcgcctgagcgcctcaccgcactagctcggctcgcaggacccaagcccgcacccagcctggcccggctgctgcggagcacccggggcaggaacgcaggggccaacctgggcgcggaggcggcgcggagggtgcgccgcgcggcccgccaggcccgggacccgtagcttcgccgtgcgctggccggggcggccaggaggcccaagccatggaatcggaggaggagcagcacatgaccacgctgctgtgcatgggcttctcagaccccgccaccatccgcaaggccctgcgcctggccaagaacgacattaacgaggccgtggcactgctcaccaacgagcggccgggcctcgactacggcggctacgagcccatggacagcggcggtggccccagccccgggcccggcgggggcccgcggggcgacggcggaggtgacggcggcggcggcggcccctcccgcggcgggagcaccggaggcgggggcggcttcgaccccccgcccgcctaccacgaggtggtggacgcggaggtgaggaggggcaaccccagacctctgtgggaagccactgggctggagttcctgggaggggacacaccccgctgggcttggtgtggggagagagggcattcgactggggctttagtgggggcggggcggagagagagagagaagccccaggctccagttgggaaccgaagtcacttgattgggggtaagtggggagagggacccataggagaggcgtgtgaaagggaattagggatgcgcagcggagctgtgggttggggtgaggaggggtcccttaggcttccggctatgcacgccgacgatggggaggaggctccagggctatcatccgagatgggaggacagacacttgagcatatagtgggaaggatgcgtgcagtagggggtcggaaatggggtactagtgcactaggctaggtcggagattttgtggcacgaggtttcagtgaaggattggcggaggcaccaggctcagagtcagaaaaagcggtgtgggccggccagagtagtggtctttgacaggatcacaggaaaactgttggggttaggagtgaggttggggttttagccaagggtcggaaagggggggcattgagtaggatttaaaatgaagagggaaggggccgcggccaggaatgaggacttgaataaaatcaggtatgagagcagtggggattgcactgagagggcagaggtgggaggcctgggcaggggtgggagctgaggagggtctaggcagggatggggactggaattggaagatagagctggcaccaggtctgggtaaagagggagtactggtcatcgataaggtcagaaatgagagaaaattagaccggggaaagagatggtagtcatactgagggtgctatgcagaggggcgcggaacagggtgggagcgcagtgggggtggaggaggagtcttgaggctaatggctttgatcagagacctcaagtctaggtggagaagactatgcctgtttagtttggggtgtgagcaaggaacgtgggggaagaaaacggactcttctataataaagaaaaaagatcgaccagaagcagcagtgcttttgaataattactttgcagaaacatagtagctcatggcaggaattttggtcagattcgttgggtagttcatttcaggggccagtagagcagcttggcctgaccacagaaaagcacagatctcaaattattgggattgcgttattaggtagagatacgaatttggttcgttcttaatgaagaattaagcttagtgaagctaagccttttgaaacactttttcctgagcagtgttatatccttttaattgtatgcttttgcaacagttcctcgggctgaagtagcttgaacaagaaggtggcacttaaaaagaa

SEQ ID NO: 1879485 - DNA, 4001 bp, Homo sapiens
tgtgagaaacacccaagaattatcaataaaaaaataaattaaaaaaaaaaaaaaaaaacacatatttgcggctgggtgtggtggctcatgcttgaaatcccagcactctgggaggccgaggcgggcggatcacctaaggttgggagttcgagaccagcctgaccaacatggagaaaccccatctctactaaaactacaaaattagctgggcgtggtggcgcatgactgtaatcccagctactcaggaggctgaggcaggagaatcgcttgaatccaggaggcggaggttgcggtgagccgagattgtgccattgcactccagcctgggcaacaataatgaaattttgtctcaaaaaaaaaacaaaaaaaacaaaaaaaacaaaaaaaacgtgtatttgtggccagtcacagtggctcatgcctgtaatcccagcactttgagagcccgaggtgggtggatcacctgaggtcaggagttcgagaccagcctggccaaaaaggcaaaaccccgtctctactaaaaatacaaaaattagccgggcatggtggtgcacacctgtagtcccagctactaggcaggctgaggcaggagaatcgcttgaatacggcaggcagagattgcagtgagccacttactgcggaggatacaggttagagagcattaatttctaatggccccatttggtatagtttcataggaaagctctgaaactataatgtagaaaggaactaaactgcctcctttttttttttgtaaggttcctgcctatgccggatttcttaccagagtttgttaagtctgctcaacagctaagggaagaaggctaagagtaagtttcattccgctgtcttggctttaaaagtttggtttggactgtagcattggatatggccttgtttccaatatatacttcaatattaaaaaaaaaaaacagaaaaaggtttttaaaaacataattatgactccataatctgccatgggaaagattgctttcagttactttctatgagaaccctaacctaggcattatcattctttttaacctgctcagattttcaatttatgtcagaaaacccatgttaatgtcgaacctgcccctgcctcaagagtaacttggtttaacctcttggggcttgttgcatcatcagcaataattgtcttgccaatgtcacagtcactgaaggagcaaacaagataacagatgcaaacgccctttgaaaagttcactacgtataagtgaaccatcactattattctcaaagtcttatttacaaccttggatggctgaatgagcataagatggccagacttcactgttcctagtaagttttccatagcctctgctttaggagaaataaatttcctcacatccagtctttgctttgttgactgctcaacaccctcttgtctcgcttgcttttctgagagtgaccttgacagcatccctccaaagagaagggtatttcctttatatagacatgcaggtgcagtcccaccaaaatttattgaactccaagctagaacaaaaggtggaggtgcaccgatgaagaaacagggcctctgccttcaggagcttacaaggccattaacagagagtgatattgatcttatgcaaatggcagttgccgcctacttgcagaagagcaggggctacagccaagcagcagggggcagaagaggctcgagctcggctctggaggccgatctggccaaagccaggatagaagctcccgtgacccattcgtgtgtgcgacttggaaggcagcccttctgccactcccctttcttaaagcccagagcaaataaaagatccttttctactacagtagatatacctgtagtcaggactttgaactcacagctattcgccgcaccattccctcttaaggaactactgcgccctccagcggaagaacagcggcggaactccacagcggcagctaaaatccctgaacgctttaaagtccttctcctcaagatactcggctgcgtctggccccgcccctcactgagttccgccccgggcgcaacctcatcttatggcaccgattggctggcccctgtgcgtgaggacgttgcgccgtggggaggggcggacgagaggtgtccgtcaggccgtgtgtcccaggccgtcgaccccgctgtcgcgctgcgtctgctccttgcatgcctttagatggtacagccttcagccggggcttcgggagacagtgcagccaccgagcatctctgctgagcttctccgccgatcctccttttctagcaggcagctcttctaggccacgtccaggtcgagggggaaaatggcgccggcgcccctaggcgtcccggaggagcagttgctggggtgtcgatctagagtgctttctcggttactcttcattgcccagaccgctctcctcctgttgcccgccgccggagcaggtctctgccccgcgccctgctcctgccgcattcctctcctggactgcagtcgcaggaaattgcccgcaccgagctggagggcgctgtcgggcttgctgccccccgacaccgctatcctgtgagtagagcggccaggcagagtgaccaaaaggagggggagccttccctctacagggggcaggcaggagggagacaggcctggtcggagggtgtggtcgagagcctaagctctgaaggaaactgccgtcaggattttatgaactttgttttaggtggtgggagcctaaaaaagccggtgttaaggtttctggagaattgtatgaagacgagggttaagattcttggggccaaggagtctgtgatttcctcaactggggaggaaatggggcgggcatatttaatggtaaggactcacgggtcctgggcaccagcattgactttggatggttggtggggcggggggtgggttgagcacggaacagtgctttctgcttatcttgagctgcatgatttggtgtgtacctcagacttagtggtcctcaggcacgtgattttataatcacaatcgccaaagacctatgaactgtctttagtccttagttcgcatgttggctgattttgtgctgcagttttgatacttaacagggttgaaaagttcattatgatgaatcaggagatcctgtaattcagaatatctttgtaagtagcattcttgatctaatttaaacttcactgtaaagaggaggagtattttttgcagaaccatttgatgctttgttttcagcgcatcttcttgtggcaaagaacccaaaaatcagttctgcttatttatgtaggtaaagcaggtacaacggttgaatgaattctggagtttccactgttgagttttcactttgacaggtctttattagacagtggaacttggagggctccttagtctgagtcagcctggtggtattaggaacaacagcaggtattaaatgctgcaattatggggcttcttaaccactaacatacagttatttctcgtcactaactgagcagcacgtttattaactgacagatttctgatggagtcgttaagaaagagtcatcaatgggccaggcgcggtggctcacgcctgtaatcccagcactttgggaggccgaggcgggccgatcacgaggtcaagagatcgagaccatcctggccaacatggtgaaaccccgtctctactaaaaatacaaaaaaattagctgggtgtggtggtgtgcgcctgtagtcccagctactcgggaggctgaggcaggagaatcgcttgaacccgggaggtggaggttgcagtgagctgagatcacgccactgcactccagcctgaaaacagagcgagactccgtctggggggagggagggtcggggaggaagaggggccgggtgcggtggctcacgcttgtaatcccagcactctgggaggctgaggcgggctgatcacctaaggttgggagttcgagaccaacctgaccaacatggagaaaccccatctctactaaaaatgcaaagttagctgggtgtggtggcgcgtgcctgtaatactag

SEQ ID NO: 1879486 - DNA, 4001 bp, Homo sapiens
gattgggaaaagatatttgttatacatatattggacaaagggctcatattcagaatatgtaaagaactcttataggtcattaggacagacaactccctacaaatgagcgaaagacttgaacagacactttattaaaagggtattgaaatgaacaataagcatctgaaaaattgctcaacatccttgatcatcaaaaaatgcaattttaaatcacaatgaaatacatatcccccccctttttaaattaaaaagactgaaaataccaatactggcaaagatgtgaaacaaccggaaatctcatatcactggttggaacctaaattgttatacgaatttaaaaactggcagtgtatttaaagtttaatatgtgaacactctatgaaccaggaatccaatcctaggtatatatatatatccaacataaatgaatgctatgtccaccaaaagacatgtgtaagaatgtctgcagcagcttcatcaaaggcagaaacatgaagcaactcaaatgtccaccaacagtaggatgagtacacaaatcgttgaatatttatataatgaagtaatacacagtagtgaaaaagaatggaccattgttacacacaacaatatggatgaatctcatagacgcactgttgggcaagagaagccagacataaaattgtacgtgttatgtatttcatccatagcaagttcaaatattggtaaaactaatctatggtgatagaggttaaaatagtggtaatccttgtcggatactgaatgggaaggggcatgaatgagctggaaaggttccacatcttgatatggatggcagttacatgggtatgcatatgtaaaaaattatcattctggacacttttgatttgtgcgctttactgaatgttatacctcaaaaacaaaaagtaaaacaaaaaatcagatcatatgtcttgatttcgcgtctaacaataggatcactggctttccctataaacactcatattgatgtcctatcgcattaaagttcctggatactcactctcctctccctcgctgggaaagacatatttgagaactcttcatagtctgacagacaggagaaccacacttatttcaggcagggttggaagagtagggcggaggagatgtaaatactgcatctgggaagtaatcttttcccccagcacctagtaaacgatcaatacaagtacaataatgtctattgataaataacattgtccaacattggctactatctgatacatacagcatttgccacacactttctaacaggcactaggcaatgcactaattgtttcccacgtattttcttaatacttatataattctacagagctgtcccattgttagtcttgtcctacagataggagacgcaggttgttggagggttggttcagttacttgcctaaggccttacagaaagtttaagtggtgcatggagatctcaactcagattagtctgaattcagaacctgggctgtaaaccactcgctatgttatgaatggatggtgtccaagccctgcctgcatgttatataacacactggaccaagtgctgtggcattccgaatggggccgaagcggctgcggctgccgacattggcgatggactccccgaggcccttcgtcccactaactgcacacaggtggtccccggggccagagagccgccggcgctctctccccgaagaccacgccttcgcctccagccagtttgcttggggaatcagaaaggtgcccagggcccagaaaccattaagttttttccgacttcaaaaacacacaccggaggtaggcgtgggcgttacccgcctcactcctgggggcagggagaaccaacgcgaaaatccccagagaggcggaagaaaaacctgcctgcgagagaataggatggagatgggaaaagcctggggaagagagagttatgcggcaggaatagcagaaaagcgtactaagcaaaaagaaaggtgtcccactaactccgaagttaagtgggtgtcgacgcagccccctctattgcgcttgcgcagtgctgcctccctgagcaccccgccccttcccgccgctgaggatttactcgtctcttggcaaccattcacccgaagagccaatcagagggcagccctcgccccgcccctgccgtcagggccgggcggaagggtcccgaggggactggctccgccacgccccgcccctggctcccccgggagggcggctcaggggcggggacgggggcgtggtcccgccgtataagaacggagggggcggcggcgggacggctcactcggtgccgctgcctaggggctgtagaggtcgcgccgctcctgctggggcctgcccacgccaaggacctgcctctgtcgcctcctcttctattgcccaggtgagtccgcgacccccctcctctaaaggtgcggcgatgcggcagcagccccagggagccgcgagctcacttagtgggggtccgcccccactaagtggtgctcaggtctttgcccagcctggtagggggcaggcggacccgaggggagctgcggacaggtgccgagacccggtgctcctttcccctcctgctccctcgaggacccccgcccctgacacacccgtcccaaagggccagaagagacgctccgaaagggagctacaactttccagagacctggggcttggcaaactccagcgagttcctgctccgcgcgtcctgcaggctgcgcgctggccaggcgcgggcagggcgtctgaagagtgtgtgatcggcgcctccgctcctacctggatcagacggcgccccccgccacccatgcctcccttcctggcttgcagtccctcgggctcgccccggcgctcccgcgggcgcgcacaccttcgccggcccgccgagtgtgaattcgaattcggcggtttcactaggcgcagctggagacgcagcggtccggggcttggatctggttggggaggggaggggcgcttcctaggctcattgccaagtcctgagttttaaggagaagggcggagatccttaaatttaatgcgctcacatcagactgtggacaccatgagcagcaaagggatccaagccagtgacttgtgcgctgcgcgtctctcagaaacttcttgggaatgcggtgtctgtgaaacctgcttcctctccttttgaaaatgaaacttgctttactgcgtaggtgaaaagccacggcaagtgggtcgactcggacggataccggtgcggctgccccgggaggtgtcgcagttcggggactcccttcgcactggtcgcgaggcaggagggagcagggtgggaggcgagtcagaggagggtgacttacctgaagaatacaggttggtagcctgcacacctgaactcaacgctggcgggcgagaaaaccaagcagcgctacctccaagtaagggcgctcccctggagaaatgaatgcctggcgagcttctggagaacccactattagggctggaccctgcgggagggatagtgtcagctcccttccccttcgcccttttttgtccataggtaggcttttgtagggctctaaccagttccctggcttaattaagtaggggcctgcttcctttttaacatttttgctttcttacggagatataaagtgcatacaaatgaagtgcttaaaatgcacttatagtaagaaagcttttataaatactatgtgcataattatttgtattgtgacaacttggtcttcaggttactttgtaggtgggttaggagactgaaccagcccaggaaataaagttagggtgattagatcctcccaaagtacacttctggctggctcagctgccctctgcgtgcaggaaagagggtgaccgttgttggcgacagcaacctttcaacgtgagtaaattggcaaggaaatgagcccaggaagtaagttgggcagccgcaagagtggtaggagagcttacccagaattttactgtcttaaatccccaagggtattattgagggtgtgagaccagccacgtta

SEQ ID NO: 1879487 - DNA, 4001 bp, Homo sapiens
tgatttggggtgagaggtgacgccatccccgaggcagaaagacggccaggggaggggaggaggtggggaaagcagacggacggggaggcggggggagcccagggccaggagtgtcaggggcaggcacttgagacagaggcaccctgaggtttcccagcaggcaattgataccctggcctgcagcggggaggaaccggggctgggctggaggcctggggacgcctggggctgccccaattcccagcagacacctcaccctctgggaagccccagctgccccagatccctcccacaatgctctgaccacccccaacccccaagtcctctcccttctgtccccaagcccgaggccttggagctgcccccgccctgggccatgagagctggacacagagccctccaagttccacgggcctcctgcaccgccgcctgctccgccctcctgccctccccctcggcctcccctgtgagggctgcccacctaggtgaccccggagccgcctcctcacgcctccatctgctctgcacaccgtccactagcctgacagctgcccaaagcctccagagcacagaacgggcctggtgtctgcgcctccgtctcggggtgggccacggccggttctgtgtcccgtcccctccccgctcaccagcggtggaccccagcttccctctgcagcagcactcaactcatgcactttcttgcagacgcgcagcccacctcgcccccgcaggttcctcttcattcagagccccccatggcctgggcagtccatcctgagtgtccgcaccacacgactgtagacgtttggcttctggactcaaatccttcaccagatcgtgaccaggagggcaatggccaggcctcggcctcagccccctgcctggcctgcactggcacagagcaggggaggtgcaggccgaccttgaaggcgcaggagtggagggggagcccttaactgggccccggaccctgccctccatcccttagggtgtggctccagccctcgggtacccacagccgctgtcccatcctctgtgcccaggggctcccatcaacagaaaagggaagcatctttgggggtttctggacagtcccctggagacggccctgccgggaggttggggtgtggggctgaccctgtggggatccatggagacccaggtcggggctgtgtggagggcctcacggagggcagtggggtgatgcggtgctggactcttgggggcctggggctcctcagctgttgcagagtgatggggggaggcccagcctgggggtgagggtctgtgttttgtgcccgtgacactgaccagtctcagcctcagtttccccatctgccccggggggaggtgtgcccagaatgccctctaaatcccctgcctgaagccgggtgtggtggctcacgcctgtaatcccagcaccttgggaggctgaggtgggtggatcacgagatcaggagttctaacccagcctggccaagatggtgaaaccccgtctatactaaaaatacaaaaattagccaggcgcagttataggcgcctgtaatcccagctactcaggcagctgaggcaggagaatcgcttgaacccgggaggcggaggttgcagtgagccgagatggtgccactgcactctagtctgggtgacagagcgagactccgtctcaaaataaataaataaataaataaataaataaataaataaataaatccgcggcctggcccctggccctgagttcgtggggagggcatcgcccagtgggatcctggggtctctgggctcaggccctggctgtgacaggagtggggaggggccctgtgtccctgggcccaggtcatgggggtgtagggaggagaggccgtgggccaccagggaccattgtgtctggggagtccccttgacaggaggcgcggggctggggggtgctcacctgcctctctctccctgttggttctggtgggccctgggatgggggcggtgatatcctgtgggcaaccgggtcggtggggaccgctgggggctggagagggccccgtctcccgcctccttgggctgcctcattccctccctgatgaccctggtttgctgcacaaggcctggcggtgctggtgctgggacagcccacactgaatggattgaatggatgaaggagtgagtgctgtacttagccgggggcgctaggcgctgcgtcgggagcctgggacatttcctcctgctgcctgggaggtaacaccctggactgctggagtctgcattccaggagagcgggcagaccacagaaaagggagaaaaggggtggagggtcaaggcgggcggacacagggaacagggagcggggacagggcttactcagcaatcagagaagacctcacggaggaggtgaggtgtttaggtggttggtgaaggcggaagccccaggaatgggttagtgcccttaaaaaagagacctagaaggctccctcaccccgaccactgtgtcaagacacaatgaggagccatctaggaaccaggaagagaccctcaccagaccccgaatctaccggcaccttgatcttggacctccagcctccagaaatgtgagaaataaattcctgttcttttattttttgagatggagtctcgctcacttgcccaggctggaatgcagtggtgggatctcagctcactgcaacctctgcctcctgggttctagcgattctcctgcctcagcctcccgagtagctgggattacaggcacccgccaccatgcccacctagtttttgtatttttagtagaggccggttttcaccctgttggccaggctggtctcaaacttctgacttcaaatgatctgcccgcttcggcctcccaaagtgtggggattacaggcgtgagccacctcgccctgccgaatttctgttcttgttaagccacccagtctatggtagtttttatttttatagcaacttgaatagaacaagataacctcccacattcaacagctactgagtggacaagcttaaattaaacaactgttttcaaagatgtggcaccgggcggcccaggacagcggtgccgctgaaatactctcagggccctgcgctgctggctgcctcccacttctctcccctctccctctgccgtcctgtcttctttgcccagcctctccttatttctctcctcttccttccttccccccacctccccatagccgggcttggacaagtcagacagacctctgaggtctcatcccggagctgccactaacccagcctcccccgggacctgccctcacctcccagagccctgggagccagggacactccctggggctgagtgagtaccgggggctgcacctgccactcccatgtcctcggccccactcccgcggatgcagcaggtggctggtgaccgaggccagacctgggagcagcagctcccgctgggtgtgatttctctcagggagcctcatcgtcaacatcattgatttctccacacttggcctaatctcatgcatgaaaagaagaaaatcaaggggtgagcacacagcggccccatgagggctcgtgtccccagccgtcgtctcttggagctctgtccccccaaacctgggaggtggccccagagcttttccaggatccatggctcctcccaggaggaggagctacaggttggggcaggtgggcttcctgctgtgcctggagcccagatgtcaggtggcctccctgggggaagggaagttggggcccctgaccagggagccctctgccacccctgcccgctcactccatggccccatgctcccacctgcccccgggactgtgggcagaagggcaggctgtgcttggctcccatctagcactggggggcagccaggtctatggggtcagcctctgaaaaggtaccctggcaatgaccctggacggtggtcaggagccggtccatgcacagggaggcccgtggtccctggagaccacgcctccagttggggagagggtgacacggggtggggcagccagaa

SEQ ID NO: 1879488 - DNA, 4001 bp, Homo sapiens
ttttaaatatccctcccagtactgtggaaggatcataaggaaaaatgcccatccagaccagttgcaggaaatgcttctatataacaggaaacacagaaaggcagaaaaaaaaaattctgtcctccaaagataacccaatgtttttttacatttcaaaaatataatcactggctcaggtcagcccaagggacaggttaagatgcccatcagcttttattttatccgagtccagttcacctatccccaggacctgtagatgactttgcctggctctttttcatcaaatacaactcatcctactatattggatcaccttgctgttagcctggcactgtccctccccatttcaatttgaccaaattgaaacagatgcccagaggccgtgaagatcaagactagtataacaaaatttggagccagtttccaagtttaaatcaatatttaacggtaagcctgcttttatttatttattttttggcaggcttttactggcaaatatcactttaaactgaaagccagaagccttaattataaaggatgccattcaggctacattttgaaaaacaataactcatttgacaagacaacctggtagtttaccggattgcactccccagaagaaggcaaggaggagggtggtgttgttttctatatccttcaaagatatatttaattacctcatcttcaagcatgcagagacaattcaaatagggtagaaggagagggaaatgggggagtgaaatcaattcactgtctcagtcaaatcaagcaaaagccccatgactacctgcaacatgagaggcaaacatttacggaggtggggagggatcacccaaagagcttatacagatggaccctggctagaatgaggacctgtgaggatgctattcctgagtgacctttatttcacctcactgctctccaacatgtgtgctaaatctcctctagatgagtcaaacaacaggacaattgggaaagaagtgacatgacatcaaaatataagcccccctgggcttgccaaactcagcaagacctacctagagatctcacttcttcagtataatttttggaatgagtttcaggggccaaaagtctctttttgccttacctactttgaagtcatagcaaaacaaaaacaggtgatccatgtaagcagttgctaaacataaaaaaacaaatgcacacacaaggtttactaaatgaatccacatccaacttagcaagcatcacgtcagagctaataattggtcattaatctcaaagaatctatttcaaaatgtgcagtcagaaattagcaagcaggagcatatgttccacaactacagactctacgagtgtatcttgtaacgctgccatttaccttcaagagaaatttgcgattttctaaagaagaaagttgtcaatcacttacgtacatagaatttagggtgggggattgggagagagaccacaatatagctcaccaagaaacagaagggactcagaacaatcatgtaaaggagaaaagaaaccagttccagtcctcacatgggcaccgagactgtttctgccctgcctgccagaacacataatcaggaggggtagcctttctaaacattgcctctttctgttgttacattgtttcacaaattcagacaagcctctaggtatcattctcttttttctgtgaagtaaaaattcctaaagacttcttctccttaaacctttaccatccccctaccccccgcccaggccttctaagagacaacacttgccttctgcttttcctccagcttctgggcaaaataaagtgccttccatgggatgtcttccagaccgtcctgtaggatctcacacccacctctgtgagcaaaccgaggggggcaccccatctacattgacacgaacacgattgtagggctttaattttatttcgtcgacttccctttgcagcttgcctgtctctcccatgtctgccacccgcagcaggagattaaaagaacagaggaggtaggagctcttgtgagaaccacgggaattttggcagaacctttatgggaaccatatggcagcaactctgaagtacatgaaacatttctaagggagaagaactctattattcccaaagaatgtttctcatctgactcaagtgcactgagcacccctgccaaaggatgggaataatattttctggaaagactgtatggatgcagattatatctgatctcaatgtatctaatagtagcagatcagcattataccccacaatctattaataaagggaaaagacaatatgtgtgtttctgatattccctagctattcataaccttcctataacacattttactcatcttttgcaatgaagggactggataagataagtgcccttcagttttttatctttgcagcagtctcctttggtcaatggagacctcattcagaactccagtacacaggaacgatcatgatggatcagatattattgaagcaagggcagaaggtctggctgctcttttttggcctctccctcacttttttcttcttttcctttcttttctttttcttttgtttttttttttttttttttttcaggtttctttcccagactattactctttgttaactttaaacaggtagaacaaggagagacatctgtcccctccagttctaccagagccagatatgccttgctcttctgttcagaaacacaagacagtgagttcacactgccttcaatgggtccatgactttccaaccagccctgcagtgtaaagagactcttcacatagccatccagtgagcagcagtcagctaatgaccaaaagcagtactcctggaaaagaacccagagcactgcctcaggactgggcagtggaggagtcccaggtaatggatgagatgcagacaagcagaagggatgtgaaagtggctgaagaaggttcttccaggcaggaaagagtcctggagataatttttttctacctcaagccctagagctctataaacaaatctaacttcctcgcatagaggggtcacaaaaagaagtcccaaaaaaatcatgtgtggtagtatttagaaacagaaatagcaagaaaaatagctgtatagtggttaaattatgggtggttgaggcagaaaatacgcctgccttgaattctaaccttttaatcaaccacatagaaaacagatgttaagatttggaacaaacaaacaaaccagcttggactggagaagtgaataattctgttcagaaacactaagtcaggatgaaggaagatctctagaatacaactggatatcaccaatcccaaaccatttttgatttaggatttcaagaatctcctagtgaaaagagattggagccctcacaccacactcatgcctttagatggtgtgaatttttaaaaatatacttaagcttcagttcactttggatgtgtatggtttctttccttggtggtcttgacttcctctcccatgaacttttaaggagcttataaagtcctaagcaaaagaacaattcaggcactttcatggaagtgcacctggaccaagaggactcagctcttggtcagctggaggcatgatagtgttccctaatgtgaaagaacgtaaaagcacccttgaaatgtggtcactaacatggatggatctgcaggccatgatcctaagcaaaccaacgcaggaacagaaaaccaaataccacatgttctcacttacaagtgggagctaaacactgagtacatatggacacaaagtagggaaaaacagacactagggcctatttgagggtggagggtaggaggagggagaggattgaaaaactacctgttgggtactacactcattacatgagtgattaaataatctgtacaccaaaaccctgtggcacttaatttacctatatagcaaacctgcacctataccgctgaacctaacataaaagtttaaaaaatgtgatcactaaagacatatatgtgtttattaacattttctgagaacacattctagaacaagaggc

SEQ ID NO: 1879489 - DNA, 4001 bp, Homo sapiens; identical to SEQ ID NO: 1879270

SEQ ID NO: 1879490 - DNA, 4001 bp, Homo sapiens; identical to SEQ ID NO: 1879271

SEQ ID NO: 1879491 - DNA, 4001 bp, Homo sapiens
atatgtaaacacacacatatatttgtccattgtagtcatagttttttgatacaaaattgtctgcctttggtcagtggaagatccttcaacttggccctaatgttattttagtgtgatgcaatggtctttgatggcttctttgctctcacttacaacgagatatcccaggcttatcttgtacatttctcatcctcaatatggtgctggcagtttctacaagggaactcgatttttttgatatttagacactaacatctttaccctttgattgctaattgatattggcctgtcaatgcttctatgtattcttggtgaaaagagctagcaattttacaaaaaaaaaaacaacaaaaaattgatactggtatttccttttcaagttaaagattatagtgttttaactttttatatttgtatgccttttatttcaggctaaaaatcttgatttctaaagacataaacatttgctttatgaaaaatatatcctagtatattttttaaatatgaatactaatattattactaagaataagattattaaatgtatttaactgcatccttggtatatatcctatgaggtatgggaagataaaagtacagttttgaaaactgaaggaattattttctttgtagttatgccacaacttagtataaatttaagtatactgtaccttaataatgaaaagtagccagataggatctgttacctatggagaagggaattttgacatcacagagttgagggctgtgaaagtagaaaaatgaaaccatttaatgaatataccacatcaagttcagactgattgatacacatgttaaactcattttaaaaaggaaaaaagcaaaaaaccgagggcagaaaattgatggggaattgaaagagagcttgggacagttaaatccatatgtgtcttctgtctggagataaaaatacaatgttcacttggtcattcattataagtgccaaactccattattactgaggcttcttctgcttcaaatcatacatttatttgggagttgtaaaacattataattcccaaagtcacgctcctttccatctggttcatatctagtgccccgaaagctactaaaaggaacttccccactgtcttgctgtttgcactacacttatgagaatgccaatgaccgcacttaggggactggtcctcaatactcccaaagccaccaccccagaggccagagcagaggctggcacactacagcctgcaggccacattgcaggaccacctgtttttgtaaataaggctttattagaacacagctctgcccattcattcacatattgtctgtgactgccttcttgttacaatggcagagttaagcagtagcgaatgagatcaaataatatgaaaggccaaaagatatttactatctagccctttcctaaaaaacatctgctgactgtatagcagtgcagcttgtgtctggagtataaagagttaaaaacatagcccctctagcagtaaatcttcactctttctgagcattttttaagtgtcgaaaggggactatatactaatagcatcgccaagcattctttttattttgatttttatttcatgagacttcagcttttcccgcctctcctctcctagtcgtaggacaccactgccatgtagtttaaatggggcatcacatcgtctatctcctaccactgatatttttaaaatctcagctccacctcagccccaattatcttctgacacttataggaggtggtttaatgccacttaccagtgtgtgaccttgagcaagtaatttcatgtcttgggacctcagtttcttcttcaatagaacaggatattatttactcttggggctatgcagatgtaatgaaataatgaaagttcttggaacataatttgcatcctagaaaggtggttattattattgttgctgttgattagtgtaaggtaatggttaagaacttcagccggacatcttgggtgatcttgggcgatcttgggcaagttatttaattgctctgtgcttcgttttccttatctgcaaaatataaataacagtgctgatcatttccgtttgttatgaagattaagtgggatcaggcatagaccagagcctgcccatggtgagcacttatccactgttagctactattattattagttattcttattggtatattaactgtttattcttaaaactagagttgtgattatagtatgagaaacaatattttttaaacactgagttaagtttttgtacaaatgtaaaagggttttggggagagtaaaataatcagaaaaaaacgaaaagagtaacacattgttatctcattctacacttacagttgtaaaggtttattttttaaccacttccttaccagctcaatcaccttgtaacaaaatcgacattgtatttatttcctgtagattccataacctcccagagtctctttgtaagtctctctacaaaaagagcaggtgaaatcaaggccaaatacgtgttcctgatataaatagcaggaagtcgatgaaatgtttattgtaaaaagagtaggattgaaacatatgcttgaatacatataagcacaatatgttctccagctctatgtagcacctgtgtagaacagctaagccatatgtttcagaaattatactttaaaaattactatgtagatgtaaaaaaggaaaatgcacaatttatacaaaaaataaacatgtttactgttaaaataacttcatggttccttcaaatcctttttaattgtaacaagtttttatcttgtagtgtatgcagaaacttcttacaaaaccattaaagtaaataaacagcttagaagtatattgtcaaaatgatattaaaatatctatacaaggttgaaatttaaatcagcacaactttaatagaactcatgacatttagtattaagaactcatgtcgcaaaatagctaatgttagctacactatcctttagtatttgcttgatcttaaggaaataactttttactctttttagcaaaagacctaataatatattaatgttgtctgtgttgtatgtatggtttagggtgagggtgtgcacaaggaggggaagtaagttggagaggcgtgatattcttggcctgatatacattactagggagtttcctacatggaatacaggatagagaaggaagacttcaaagttagaatggatggaaatactaaatttaaaaatataacaaagaaatgcatgattgtattattagttaataattaattattagttaataattagttaatgtgacacttgctatcccgttagtttgacccatggtctggagctacaatttaatttaactgaagggacaactttcagttgaaatttcttatatttccaagtagaggtctttttgagcctatttctaatgactagtttaaacattgataattagcaacattcattcgtaaggcaataatttctatagcagtgaatatcattttaattctgtaattagataaccaaaattttaataataggagctatcaatttgctgaataaaccttccaacagataatatgaaagaaaaacatctatacaactcaggtgaaaacatgatgatttggttaattaaccttcgaaatactgtggttgttccattatgtgcaataaaatgctttgtaaaaaacttgtctaaaggagtaagtctgggaaatgcttcacaggtaatttttctctaggaagctcacaatgcacatgagtatattacaagattagtataagatattctgtagtaacaagacatatttaactcagtgtttcccaaacttagttggccatggctcttttttaaaaatgaaatctagtgttattttggtaaatagtgttggctgattatacaaaagccattccctccctccctttttaacagaaccatgatttcattggaacagcaatatgcccagtcccggagaaggcatcatgagttctctatgccagttttagcaatccatagtggctggagtgtgatgca

SEQ ID NO: 1879492 - DNA, 4001 bp, Homo sapiens
gagtaaatttcccactaattacactgttttctgcttttagaaaagaaaaacaaaaccaattttccaattccccctgcctctcatactaaacattttaagaaagcaaaggaaaaaaaagaaaaaaaaagatgttaagtatattgtccttcactaagagtaaagacaattgttactataccactagtactactgtaaatactagtgaaaagtatcccatgtgaatctgttctctagaatgtcaaaggcattttcccataaaaagaattttatgaacaaaagttggatctccagtaaggcccacaaaagccaagccagtcacggtgttgacatagatcagtattgaggcaatatctagaaatctcagcaacatcagaattacatctcgactccctctctttctcctgtcaacaactattttgaaagccatgtaatagtgagaatttagcttttgtatgaagaaaagagaaggcagtatagcttagcatactatgagcactaggactggattacctaggtttgactcctgtcactaaacacttcccagctctgaacatgagacaaggcccttcccttatgtgggcctcggctcccacatccacataacagggattaaagtaggatccttagtgttgttgtaagtaagttattaccttaaaacacagagaataattccaggcacatagtgagtactcaataaaagaatgctattgtcagggcacgatgcctcatggttttaatcccagcactttgggaggccgtggtgagcaaatcacttgaggccaagagtttgagaccagcctggacaatatgatgaaacccaatctctactaaaaatacaaaaattagccggccatggtggtagtccatagtcctagctactcgggaagctgaggcacgagaatcacttgaatctaaaaggcaagggttgtagtgagccaagatcatgctaccgcactccagcctgggtgacagagcaagcactgtctcaaaaaaaaaagaaagaaagaaaagtccattattattggtactgtcatacatattttatctaatctttgccattatccctcaatataaatatatttatcttccatgtcatagatgaagaaactgaagcctagagaagttacgtaattttccagggaaacacagtcataaaagataaatgtttaaagatagagccagatttctgacccagtcctgatacccaaactccaggttctatcatgtatggccatcatgcaatgcctgtgaagatgcagggttctcaaaaacacatccttcccctgcctcccaatccccttcactaattcctcagccactgaccccacaggaagaaggaaagacagatggcaatcaaaactctttctccctttccaggacccacagaaggagaaggctgccccagctctgtgcctagcaagggccaagcttccatagatatttgacctttgtaaattaggcattcagaagtcaaagaatgcctgtatttaaaatttccattgtagatttctggcaaatccatgagtgtgagctctttgaaaatgccacaggcctgtggaaatccttgtgggtgtaattagctagagaaagtgaaggtgactgaccatttacagtcacatcataatgaaatgaagtattacagaaaccatgaagccaaaacactgggagggctgagacccacaaagtaatctggacatagagatgttttccagaaaccaactgtgaaagaactaagagggtgttctactcacaggcttgacactgagctggtccagtttcccttcacattcagaggcagaggctggagaaaagagaagaaaacccagatatgaggaataaaagcattcaaggcctggaaaacagatctcgtggcagtgggtttccttaggaacaagatgggagaaaaaggattttccctgatttctgggatcttctcacagctcccaaacacttcttaattattttgaaaatgtagttttgattatgaggaaggtccttttaaggaattacagaatctgaaaactgtaagagggattggcctttacagagcacttaccatgtgtcaggcattgtgatcccactataaatcttccaacaaccctgtaattattgtccttgcattacagaggaggctcagagagggttaagccccgcccagggtcacagagccaggatgcaggaccctggctcccagcctgcctgacaccacaggcagaggccttgctcactcacattcactgacttcctttgaagtcattttgtccaagcttcagcaccctgtgcaagtgccctgaacagcacccccaataggtggcttttcagtttcagtttgaataattgctgcaaaaagaagcttactacttctttttattgcagtaaaatacacataaagataaccaatttatttttgtatgtgggtacacagtaggtgtatatatttatgggttccatgagttgttttgataataggcatgcaatacataataatcacatcagggtaaatgtggtatctgtcacctcaagcgtttaccctttgtgtttcaagcaatccaattatatacccttttaatcatttcaaaatgtacaattaaattatgtttgactatagtcactgtgttgtgctagcaaatactaggtcttattcattctttctggttttttgtacccactaaccatccccacttcccactccccaccatcccactacctttcccagcctctggcaacagtccttctgttctctatctccatgagctcaattattttaatttttagctcccacaaataagtgagaatatgcaatgtttgtctttctgtgcctggcttatttcacttaccataacgacctccagttgcatgcatgttgttgcaaatgacaggatctcattcttttttacagctgaatagtactccattttgtatatgtaccacattttctttatccatttgtctgctgatatgcacttaggttgcttccaaatcttgggtattttgaatagagctgtaataaacatgagagtgaagacatttcttcaatatattgatttcctttcttttgggtatattcctagcagtgagattgctggatcatatggtagctctatttttagtttgttgaggaacctccaaactgttctttatagtgcttatagtaacttacattcccaccaactatgtacaaaggttcaaaggtaaccattttaaaacaaacaattcagtggcatttagtacattcataagtttgtacaaccattaccactatttagttgcagaaaattatcatcatcccaaaatgaaactccatactcattaagctgccactccccattcttcattccctcagccaataatttgctttctgtctttatgatttgcttattctagatggctcatataaatagaatcatacaatatgtggctttcttatctaacttctataactcaatataatgctttcgaggttcacccatgttgtagcatgtatcagtacttcattccttctaaggctgaataatagtccactttatggatataccacatttttaaacacttgttttcaataattttaggtatgtaactaggagcaggattattggtttatatgggaattctatggttaacttactgaggaaccaccaaatgttttccaccacagctgtgccattttacattcccatcagcaatggatgaaggttccaatttctccacattctcaccaacacttgatattttccattttgttttgtttttttaattatagccatcccagtgtgtgtgaaggagtatctcattgtggttttgatttgcatttccctaatgactaatgacatcaagcatcttttcatgtgctcatggccattgagatatctcctttggagaaatgtgtattcaagccttttccccattttcttaactgggacatttgcttttgttgttgagttataattctttatatattatggatatttgtcccttttttttttgagacagtgtcttcctct

SEQ ID NO: 1879493 - DNA, 4001 bp, Homo sapiens
ctattactcttcattctcggatgttttataactgataatatctttgaaaatatctaaatatttttgtttgggaggctacttgagatcacttccttttcactgataggtcagaggacacacaagaagtccactcttaacatatcagtaagtgagtgatggatgaagtgaagaggtaagtgtagacacctccatttttaagttacattgttggggagatgggaagaaatgcttaatgaattagctctccgtctttagtcaatctatctactatgatttatccagtaatgcattggcccccggaacttggtgcttttacatctagcacatctccatatcttatatttgagtaaacttttaaatatttattaattgttattctgagagtggaaatatcgtaagtgtagaataaggagattaggctctactctaaattctattgtgaacctgaatcctaatcatgacaaagtcactactctttgcctcagtttcttcacatgtaaaattgaggtgctgctttaaatagcatcatctaaaattcatttcagatattgtgaatggaaaagctacaatctctgaatgttacaactgtcaggtcagttaccctcatggatttcatacatttcccatgcctggttgttggcagagggaaaagagtgggagtgtggtgtctgtgttagtattgccagctgatgggctttaaaacaggagtagtatggtttgagtaacaaaaataccttcttaggatgcctcaccaaataatagagggtgctgaagagagtatctaagtaagagacctggctatttctggaggtttttcaactagacctacgtttaatatttaaaaacatgaaaactcatgtaattaacatgtaacttatttgtattaaaattagtatgctgacatgatattttctaaaactgggccacatatgcatggatttcctaaataatccttcaagagaatagagcaggaaatgaagtgatatgcccatttgcagtgtggtatggggcttcctgaatgtataaatgtggaaggcagcaaggtggggttggataccagtaatgccaagaacttaatttcagcatttcaaccaccgtgtacatcctcaaaatgcctttcactttaattttgtataaatacgaattggatcccgggttaccttttgctttagagatgaaaaaaatgtatttacgtttcccacacaactgctaggaattaaagtagtgtgaaaactccacacaaataaataatacatttaaaactatttttagaagaataattcaaaaagacagtagttttgggacataggcaacaaaaagtcccttttacctaggtttctttgattcagagattcagcatacggatttatggagacagattatatcctcaacaaattaaagaatacaggatatacactgttgtctaatataatatgaggaaactttaaaatttatttccatgaattctatgttcaattggaaatatatgttcaattgagtatcagtagaaaaatctattgtttttactaatgactcagctgcttaaatgatctattgtatcggtggccagtggcaggaaggaggctctgtgcagtattgttgtaaccatgacattagtgacatcatttagcagaaatagaatttgggacatttggaaaacaaagcagtggcctcttggctcaactttgtgagaacctaataaattctaagaaagtataatggacagtgttgatttctccatatatatttagtgattttacatgtatgcacacacacacacctacatacataaagtatttcatttaaatttacctactaatgtatgatattcgcaatgccgtatagactttgggaagaatgttaatcttgtattgcaaagccatgctctactttaaaagcaatgcctccagatgtacagcatacttaacagggccaagaaaacatgtaacgttgattctgttctgagatacacctttgttaaaaagaatcccttcagtttttcctgtctgactaaaaatgatgaaaggcagggtatcctgaatggctgtgttagaacatcgaggtattggagatccgtgaaggagcatcatcgttactatagaaacaaatgctgcccctgtcatggacatccaaaggacagactgaaaaatgaggaagggaaaagcaatgggaggaagaggtgccatgaaatgagaataaagaaactacacaggaaggactgaattaagaaaagaacagcctgaggcagagtgaggaatctagacacagaaaattcccaatggaaatgtaaaaaactggatcaccacttgtgtgggtacaaagaaatgatgacttttctgtttttaaaagttaaattttcttctaaagtataagtatgtttttgcctttggaacaactttttgtatcctgaagtctctcttatggcacatgtatacatatgtaacaaacctgcacgttgtgcacatgtaccctaaaacttaaagtataataataataaaattaaaaaaaattaaatttgaaagaaaacaaaataagtgaaagtattgaagattgtgatagaaaatgtgtttgaataatgagtattagaatctgtgacaagtcactcgacctcaccttaaaatagggaaactaatagcaacctcatgattattgggtcagtataggagagaaccaaattcaaaccctgctccatggagtgaacatttctattttgggggaaagattagggaacggaatctgggaatataaattattcattttagtatttcagaatgaagagaaaagagaagatttcttttcctttattcctctcgctgaaaaagaataatttgttcatgtttgaagactgtgaacagaggtagaaaacatttattatatatatgtaaatatataattagatgacagtttacaaagtgaatgaatagatgctattaaaatgctacttttgaccttcaaaaacatctcaaatagggttgatattatttggttatttgctgatttggataaattgccaagcagaattttatatcaagaatagaagatataacgtttttctataacatttgatatgttttctggaaatgtttacttatagattattatcactcatgtattgtggtagacaaggtgatgtagcatccagatacctcttaaaagaaacacttcccagctcctgcctttttatccaaagtcatactattcactccttagggcagcctactttcatagctgatgaaggttggggtataaaggtatggccatcttctgaggttctgttgggtttaccaaggtggtggggcctgcattgaagctcagcttttcttctgccagtcctgcttcttcctcatccctttcatgttgttgagtccaacaagacagttcttaataaacatcctgcatgctaaacttcaattcacagtctgatttctagagaatacaactggcatcatatactttactattacaagtaaaatatcatatggataaatattttctatttgaaatgtccgtaaagttttacttttaaaatcagttttcacatgtatgcatagcttcagattacctgtactatcctttaaaaattcacaaagaaagctaaaaatgcttgcaaaaattgttagctcatgttttatatgcagaatcttagtgactaaggaattttaagaaaatatttataatgatagggtttcaggagaccctagagatcgcatcaaacccacttgtacagataacaaagctggagcctagagggctaagaggactctttcaaggccatgccagggcttagaacacaagaagtcctactactgctttagctttctgtgttcagggaccgagtttttttttttttttgcctttcttctctcttttctttcctcttctgtttctttaacctaatttgcttcctcatgttcgtaagccacagctgtttcccagaactgtgaaatcctttccgagaaatgattaggagtgtgatgtgtgtagggtggtatagagagagc

SEQ ID NO: 1879494 - DNA, 4001 bp, Homo sapiens
taattaaaaaatcattaggatggcctggaatgaacttggcttaattttaatctgccacctgaatgtggtccaggttccaggtgaaaacaaatacaggatccttcaggatttgagacctgcagtacagtaattccagcagagataagcagggctcccggaatttgtcccttatccccttcactgcttaatcacacattgttccctgcccaggccaactggcattacctccagacttcaaaatgcccttctgcagctcctgtgctggttaaagaaagaaaaaaacacagtgaagtccactggagcacattttagttttaatgtgccaggtcccaaagagccagctgagtcgacttggctgccgaggaaggaacggtgaaaagtatgtggacaaaagagatcatttgttgtttttaccccaaacaattctcaaaacatatttcatattgagaatgagacaggcacaaatgcacatctggactgtacatattgttgaaggtaaattcatttgctcagtgagtcaaggttggcaggaagccaaaatgttcagcccttgcttctgatgctgaggcttcagccagtcataaaattatctagatcatttaagacataattacttctatctcagccaattatttcagtagaaagtttttttcttttccagaacaatccttaattaattaaaagtgcttatttcaaaatattttatagagaatgtgtatgtacaggccaggcacagtggctcacgcctgtaatcccagcactttgggaggccgaggcaggcggatcacttgaggtcaggagtttgagaccagcctggccaacatggtgaaaccctgtctctactaaaaatacaaaaattagccaggcgtggtggcacacatctgtagtcccagctactcaggaggctgaggcaggagaatcgcttgaatctgggaggtggaggttgcagtgagcggagatcacaccattgcactccagcctgggcgacagagtgggactccatctcagaaaaaaaaaaaaagtgtatgtacagattaaagaataaagtgaacctcacgtgactacactggagacaggagcacctccagagacccttgagcactctgccattccatcccctttcctctccagaggtaaccaatatccccacctttgtgttaaccaccccctggcatttattcctaattgcttttatctctctgtgaatctctcaaaaacattgtttagtttggaaaaaaactgagcagtaagcacagacctagctttgaaaggggagggcaatgatgctcccacggctccctgaagatgacctgagtggagcttccgggcagagcctggcttccacgtccccttgagttctccagagtctgtctggggttgtgtcacagggcgtagtgtgagtgaggtgcaggctgaccagcagaaacatggtcaaagggcatgggctgctatgaattttctgcctctagactcaccacagctgcagtgggtggaaacagacctggaagagatcaccagtgtccccgggcgctctgggaggcagggcctttcatcttcttcaacctgggcacacctgagcatttttatcttcatgtacaaggaccatcgttgctctgtgatcataaccctccgcatgtctatcttctgagtcacggcggcagtctggaccagctgctcgctattgctaggccggagcacagctgtcctcccaggagctcccttgtcctccgccggcttcaggatccctgtatcccgtgtctcctttttcctggcactacttcttcatctgggggagcacatcatctgatagtttcctgagaaagggcgaaaggatgtagatagacaagcctacctgacgctactcgggggaggtgggctgtgtccaggtgccccctatgcaccgctcctctccgagggcttcctgggagacagcccaccagctgggatgttctaatttggactcagtagaaactatcaaagtggatgcagtctcagaaaactaggaaggtcaggaattgagtctgttattagctgatctcatctccgacaaaaaaaaaaaaaagagagagagagagaattgagcctgttgtagtgcacagcattctagcctgggcaacatagtgacacccctctgtaattaaaaaaaaaaaaaattcagcctggaggaacttaaattaacattgtcctggccttggaatgcctttagaaaaacaataggaaaacccctaggcccagcggtgccagtgggaaataaggggagcctgtcaagcactggtgcaccaagaattcaaggcctgggccccacagctctctggcagcagcatttcagccttataaggcagtgtaagttgtttctaggtgctgaggagactggagatatgggcggcagtgagtccacatctctcctcccctacctggcagtcccctccccatccaggcactgataagatattgcagtcctgactgtgtctccctgagatttaagagaggtatcgggagacacaccctatgtgtttggcttccatccccagccctgcccatttgctgctgggagtaaaccaaagcaaaaagcactctgaaatggaaccaagtcaccattctctcctatctggaatctgggtgagactctgtggtcttagtcaaagcatgctgacctgggggcaggggacttgggccccacccctgggagccactagtgcatgctcctggacagtcattatctgggccctgggttagttcctcttctttaaactggaggttgggtgtcaggggttctcctctcatggaacatcagaatcacctggagagatttaactagctgcagccgcccaggccccacctggagactctgatataattggcctgtagggaggcccaggtaacatatttttgaaaacccttagttgattcttgcgtcatccagctgagaaacactcacagatgactctagggacttttgtagcattatgattcagtaattctgataagaaactgtaggtaattttttatatttttttaaagagtctcgctctgtcacccaggctggagtgcagtggtgcgatctcagctcactgcaaactctgcctcccgggctcaagtggttctcgtgtctcagccacggagtagctgagattacaggcaagcgccaccgtgtgtggctaatgtaggtaatattttgcaacataaaatccaagggtaggcgagaagcagtggctcatgcctgtaatcccagcaccttgggaggctgaggtgggcgaattgtatgagctcaggattcgagaccaccctgggcaacacagtgaaaccctgtctctactaaaaatacaaaaattagctgggcatggtggtgcacacctgtagtcccagctatttgggaggctgaggtgagagaatcacctggcctgggcaagtcaatgctgcggtgagctgagatcacaccactgcactccggcctgggtgacagagtgagaccttgtctcgggaaaacaaaacaaaacaaaacaaaaaaaacggccggatgcagtggctcacatctgtaatcccagcgctttgggaggccgaggcaggcagatcgcgaggtcaggagttcgagaccagcctggccaacctggtgaaaccctgtctctactaaaaatacaaaaattagccaggcgtggtggcacatacttatactcccagttactcgggaggctgaggcagaagaatcgcttgaacccgggaggcagaggttgcagtgagccgggatcgcgccattgcactccaggctgggcaacaaagtgggactccgtctcaaaaaaaaaaaaaaaaaaatcgaagggtaacctcagatctcctgacaggtagtcctgtaaaagaaatgtccattgttatctagtattcaacaggacttaactacaatgcaagcactggcttctaattatgcctaaggagagacattagcattctttaatgtccctagagttaaacatttgtccactttcttaaatgttttactctctaga

SEQ ID NO: 1879495 - DNA, 4001 bp, Homo sapiens
taatcccagctactcgggaggctgaggcaggagaatcacttgaacttgggaggtggaagttgcagtgagccgagatggtgccactgcactccagcctgggcaacacagcgagactccgtctcaaaaaaaaaaaaaagagagagacatgtgaatagctcaacgttccactcctacacacatataaatgaatatgcatacatatgttcaccaaaatagcagcataattcataatagatcaaaactagaaacaaaccaaatgttcatcagcagaacagataaatgtggtgttttctcacactagaacgtagtacgacccagcaatgacaaactggctacgacaacatgggtgactctcatagatgttgattgaaagaagccagttcttgtgtgattctactgattaatatatataaagttcaaagacaaagccaattgattccattagtaggctgctacttagggggggtggtggctggcagggagcatgcattagggctgcccctggtgtgccaaccatgccctccttgatccgggtgatgcttacatggtcatgtttcctttgtgaagatccatcatgctatatgcctatctgggctcttttctgcaagtatgtttacttatgttaaaaagttaacaaagttagccaggctcggtggcacatgcctgtaatcccagcactttgggaggctgaggaaggaggattgcttgagctcaggagttggagaccaacctgggcaacatggcaagaccctgtctctactaaaaatacaaaaatcagccaggagtggtgacatgtgcctgtaaccccagctactagggagactgaggcaggagaatggcttgaacctgggaggcagaggttgccatgagccaagatcatgccactgcactccaccctgggcaacagagcaaaactctgtctcaaaaaaaaaaaaaaaaaaagttaacaaacttaaggtaaaaatttgtatatacagccaggcacggtggctcatgcctgtaatcccagcactttgggaggctgaggcgggcagatcacgaggtcaggagattgagaccatcctggctaacatggtgaaaccccgtctccactaaaaatacaaaaattagccaggcgtggtgtcgggcacctgtagtcccaactacttgggaggccaaggcaggagaatggcgtgaacccgggaggcggaggttgcagtgagccgagatcgcaccacttcactccagcctgggcgacagagtgagactctgtccgccttaggaaaaaaaaaaaaactgtatatcatgattcttcatctgattctgaagaagtgctataaatacatattatgaaaataaaaaacaatagggatatcaatgttgaatatgtgggttgcttaaaagtaaagaaccacatatactttagtatgcctggtggataagttagccgccctttcctccctctttttaccctaaaacaccagatactttgctcatgctgttctgtctgtttacggtgagaaactgaggttggaaaaagcagtagctgaattaattgattcaccctccacaaatgccattctctctttctggaagaactccatttgtgcacataagcttcaaatatgtatgcagccagcaaggttatctggacgaatgccgccttctgggattttccttagaaagcatgttgacactgtgcaatctggccccactaccaagtaagccttacccttgagcggaggagagagagactcagcaaaggtgttccaaagaacgctttcctagaggtggaagtaaaaagtccacattatgtcacagccattctgtcttccaagaccgaagtctcaagatgggaaaactccagggaaattcctgagctgcccttccacctctatcctcattgctgctcttcctgccttgttcctcatcacccaagcgagaaatctgacatcagcttcagttcttctggttcagtcatttatgatttagaaacgtttctgaaatccatcccctttgttctcatagacactgacctaatttcaggctctcatcacctttcataactattactttagcttcctagttaatctcctgttcaaatctcttgtacactgaaaccagagttgctttccaaaatgcaaattaatccagcctagccaacatggcgaaatcccatctactaaaaatacaaaaaattagctgggcatgtcggtgcacgcctgaatcccagctatttgggaggctgaggcacaagaatcactcgaacctgagaggcagaggttgcagtgagctgagattgcgccattgcactccagcctctgtctcaaaaaaataaaacaaaataaatcatgtcacttctctgtggaatattcttcaggggcatgaattcattagtctaattacacatggactttgtaatctgacatcaacccacctttgctacctgcccctcctctttccttgattggattgattgccattccattccagtgctatgttctatcacacctctgagtttgtgctcatgatgttcccccttcctagaatgtctcctccctaccacccatagggactgctttgggatttcaataccatttcctgagcagctttccctcctccatctgctttcagctcagactgccttctatgctgacctggactgaccagcactgatactagatctgctatttaagtgctaggctaaaattgacaatagcatgtcctctcctcattttggcatctatagcacttgacacataataagcaccaagttacttttttttttttttttgagagtctcgctctgtcgcccaggctggagggcagtggcgcgatctcggctcactgcagtcttcgcctcccgggttccagcaattctcctgcctcagtctcctgaggaggtgggactacaggcatgcactgccacgcccggctaatttttgtatttttagtagagatggcgtttcaccatgttgaccaggctggtcttgaactcctgacctcaggtgatctaccctcctcggcctaccaaagtgctgggattacaggcgtgaggcaccgcgcctggccagcaagtgactttttataataattgaacaactgaatcactttattctatggcacaaagcacagttaacagtgaagagatctgatgtcatttccaccaaactaagatttcatggctgtctgcagacaagccataaggctttggaggtggggcttcctctggtatttagttactgctggtcagaagccgttttagcaatacttctctcatgatgaggggcccaggagccctgaatatggtcaaggcgttcaaaagaaactttctaagaccctggcctacaggaacattctctaaaacagcttcaaagaggagactatagataatttattacaaccaaaattctaattaccttcttttgtacagacaggaaaatctacttccccctttggctgattgtgagcctggtacggggacaatggatcttcttttcagattccaggaagttttgctcacttcaactttctcaaaattaatgttgcagaaagataaatgagtttcacagtaactgaggactttagaagtggagacattgggtgagggaactagcatagtccagggagctatagaaatgctgtttcacagtgtataaggaaatcagtttttcaaattaaaaagccatatattagaaaagtggatcagggccaggggccatggctcagcctgtaatcccagcactttggaaggccaaggggggaagatcccttgaggccaggagttcaagactagcttgggcaacatagcaagaccccatctctaaaaaaagaaaaagaaaaaaaaaagaagccgggtgcagtggctcacacctgtaatcccagcactttcggaggctgaggcgggcggatcacttgaggtcaggagtttgagaccagcctgaccaacatggtaaaaccctgtctctactaaaaatacaaaaattagctgggcatggtggcatgcacctgtaatcacagct

SEQ ID NO: 1879496 - DNA, 4001 bp, Homo sapiens
ggtaagtatttttgtatctaaacatatctaaacatagaaaaaatatggtatgataatctgtgggactgtcattgtatatgaggtccatcattgcccatagcatcattatgtagatcatgactatcttacttttaactttatatatttctatgtagttggctaagtattatatttataatttttaaataacctaaagatgaaaaagtaaaaattaaagtcttggaatattttaacccattggtcttttagtagagtgatttgattaaaggtattgtaaggaggcagtgtggtgcaatgatgagcacactgcccaggtttgaataccggctccgctgcttactaactatgcatgcttgggcaaattacttcatttatttgtgcctccatttcctcatctatgaaatgaaaataatcagaatgccaatttagattgttgtaaaaataaaaggaaatagcatgtgaaaaatcctaccttaaaacagtacctggaacactgtaaaggttcattcaatgttagcaactggtagatgaagtagtgcagaaagaaaagatgcctgaatgaaaataatctaaccagttgatcccagagctgggattttaacgcgggctgcctgtttcctggttcagtagcctttgaacgatagactttgttttttctcttttacataactattctcgagtttcagagatcatttcaattttcttcattctttattctagaggaagctgtttcccgcattaaaacatggtatgtatagaaaactcaaacaggaagacaaaacatcaagaaaatttttaagatacaggggtaataattcattcaataaatccggtaatatcctaaaaacttattttcttaaatttaatctcctgtggttatcagcaagatgtatgcactgttaacaatgaaaacatagaaatctgctggcaaaatttaacctgaaaataagttatgaaaaagaaatcctccagagtatgaccagcatgtcatgacagttttatagacatgcataacagctgcagcaattcttcattatgtgttaagtattacacacattatgttctcaaaaatatgtcacagtaagctgtcaactgcactccttctttacttatctcacaaagtaaaacaaatagggaatttttaatttaacaccatctgaatcaactaccagtgttccattttctactgacagaaacactaaacattgaaaaatattatttcctaacataaacaaggtctgctaattattttctgcaaaattttatggatatttaaaagagaaagaaaaatgatctgcagtgtggctactctagctctggttctcaggtctgaaaacatcattcttcctatttcttctaacatcatgtgtggtttagtttccttggtggatcgctgacttccacagtccctttaatagggacaggaaacaggaaaatattgggtagaagagggctgtttcccggcaaaggccccaccctcaagcctggatacccgtggccctaaataagaacaggcattcctgttttcacgcccaaaaatttgccttttggcccaccacgccccctatacccatatgaactcagaattccaggctccagagccgatgagcaggcaaggagatgaggagacaagcagataaacggcagaacgacatgacaaagagagaagaggagcgacgtctgaacgcccagaggagttccgctgggggcgattggagaggagttcagccgctgaatggcgaggctccgggggaagatcatcttcccactccatcccccactccggctccctatccattccgctgagagccacccccactactcaacaaaactctcgcattcatccttgagtccctctgtgcgacccgatttttccgggacgctggacaagagctcaggatacagaaagttgttacactgacccgctgccctcgcagaaaggcaaacggtccaccgagctggttaacactcaagccgtccgcggatggcaaagctaaaatggcgcactgtaacacacgcccacttgggctccttcacctgcctgcgcgctccccatcctgtaaggggttttgagcagtaacggggacagaacaggcgagcacccctgtcgcacgccctatgaaggggatcagagaactctcccatttcaccttcacatcacttttcttcccattcaaaatacctctacctggcattgctttttctctacccaatcaaggcctgggagaatatgccttctttgactcatactaaaaacaggaagcaaagggttggggttgctttgaaagactggccttctcatcttctcttattaacctgagcatagaacagagtgcacatttaaaaaaaaaaaaaggaaacttatttccaccaaactctaccatttttgctgcatctactagaaaatgtctatggaatttccacacaaccataagggatgggttgaaattccagagaagaaacatagctaatacatacagatcccttcttggcagagtattaggatttgaaattaaggagagaaaaagggaaaactataaatacaataatactggaagatactatttctatagttatttggctttgcaaatgcactagtcaagaatgttcaattccttgacctagggattttggtgatctacagtgctttcttttgttctgtcaaaaaataatttgatgtagtcaatcattgccacagggttattttatcataatgctttcatgtataaaattaccatttcaatatttttatatgttttatttatactaccaagttcttctatctttattctcttttatactttatagctcatttaaaccactactatattctagcttttttctgagtgtttcacaaccatcttggttaaaagcattaaggactcagtttattatgaactgtgtttcctgtctttctggataggaacaaggctcttcagaatcttggtggcaatatccatagctcttgacagatttacctgcttccttcacattttatccaaacaaggtgactttgttacttgccctcttgttttatttaaaagataagtacttttgtttactacaaacactctagacaaatatttaataataaatacatcctagatgtacatcaggactctttcccaaaaaccatggctggagaggacagggatatgaagccaaaaacattgtagcacagcaagccatttaggttgctttctcaattaaaactctgcttcaaacctacagtgtcatcaaataaacgaacattacagcaaagtatggaccattacagacccatcactacttctgtaaactagtattttatttacaaatagtatgtagtttagaggtgaagaacatgaactcttgagtcagacaaacctgaacccgtttgccaccgattggctatgtgaacttgggcaaggattttagtctctcttatgcccagtttttcaatatatgaagtagagacgcccataacaaatgcttcatggacttattgggaagagtaagtaaaatgatctttataaaaatagccaatatggtgcctgagactcattagatgcttgacaaaaaataagtaagatgattcattcatttcttcatttatttgtgctttcagtaaatatctggcactaagaatacacagtgaagaaaagggataaaaatctctactttcataagtttgcagtctagtaatagagacaataaacaagatcaataaatataatacatgatgtgtttgtgcaattctaggaagacgaatgaagcaggggataaatattgaaagggtatactagtggtagtgggtgtatttttaaattgagtggtgagaagggctctattctgaaggtgatgattatataaaatcatgaaaacttctacaattttgtatgcctaactgggattatatataaaataaaaatttcagaacgtaagctccctgaggtcaagaattatgtttattaccatacccttcatgatagtgcttgacatgtaggtgctcaataaatatt

SEQ ID NO: 1879497 - DNA, 4001 bp, Homo sapiens
accaagtagacataagatctttacaaactgacacagtccagattttattctgtgcttaactggaactgcaaaaacaaagtgataactgttacaagaatctcaggaacatttcagacatgattgttttccaaaagagaacaatatatgtatattactctttattaaaacccataaaaactcaaatgacaccagtggcaaataagaagttgtaaataagtcatggccttcttaagcccatggatttgcagctagctcctgacaatgtgtctctaacctccttgctggattcagtcacacatcactgcacaataggcattctctgctctttaaaaccctgagatgccagtgccattctcatttgcatttttaaaaagagaaagaaaaagaggaagttttggagattaaaaaaacaggtacattgtacacaacactatgacaatccaatgggggtacatatgttctagctgtaagctggtaggcatttagacttttgctaccagccccactgggctcaaataacctttctcaatggtgtcagatgcatagcagagtaccaagtcccattcccacaaggggaataagcagaccactgacattatggccacctttcacccagcacagaaatttcaagctgccttacttttagcagcagctgggcttgtgttctataagactgagtaaaactcagcagaacttctttggaaacttgtgcctggctcattaagacgtattctgatatcttacacattactttgatatttaaggccacgtaaggatgttgtggattcctgtggctccttttggcaaaagttgagtgttagtagagttttgctgttgaatgtcatgtaccaaaccattgtgttttctggaaagacaagctgagttttgcttgatgcttagtttggagaggataaagtttctcccttttccctcactcctggggttgtctgagtatactccctggatttctgatccaggcaaatggggcactgggttattttatattcagtcacactcacctgcggtggattttatgacacatatagtattaaagccagaatttcacttggagaaatgaagtgttggcattggagatggaaaagcttaggtggagattatttttgcaacctatggagtaatgttagaccaacatatggcttcagatgtatggtgtctcctccttgggcccccctctgtggggaaggccttagggcacacagttcagaaccaggctgcctgagcaaagctgacttgttagatcagaatggctaatgaacatgagaaccactgagccatccaaaggcaatttttatcattagtctcccactcccgcaacagaaattctttctctttctcttttgtcacctctttatcattggtctataagtctgtttctgtttcttttattaattttttttttgagacagagtcttggactgtcacccaggctggagtgcagtggtactatctcggctcaccgcaaactcctcttccaaggttcaagcaattctcctgcctcagcctcctgagtagctgggattacatgcaccatcatgcctggctaattttcgtatttttagtagagacagggtttcatcatgttggccaggctggtctcgaactcctgacctcccaaagtgctgggattacaggcacgagccaccttgcccggcctgtttctttttctttttttttttccttgctttgttctcctatgtcagaatctttgctgtttcatgcttaccccttagtgttttcggaattaaaaggttatggacccctaatgtaaaacaatctttaaattgtggtcgggttttctatagagcattggtgattacaagtgataaagacattttataatggttttatcatgctaattcatgggactgatgcttttatctcttttatatagagttgtaatcttaccaccaagagcatttttccctgtacgtcaatagttctcaaagtgcagtctaaggaaccatagaggtcatggagatcctttcagggagtctgtgaggtcagcatctaaaaatagtaatactaatatgttattgatcttttttaccctcattcttgttttaaaaaaaatttagccaagttaaatttaaaagagtttaattgagaaagaacaattcgtgaatcaggcagtgtcccaacctagagtaggcttggagactccagcatagccacatggaggaagatgaatggatggaaaaaggaaagtgacctacagaaaacggacatgaggtgcagaaacagctgagttggttacaactcagcatttgcctcatttggacagttggccacatttgattggccaaaactcagtgattggcacaacagtaggccacagtctgtttacaattccatttaggtgatagttcacgacgtacagagaaacctttaggctgaacttaaaatatataaggaggcagctttagtctaaacttgatttaaaattatcttacctgtgtacagtgaagtttttcagaagttacatgatatgctatatcacaatagactgaatgcagaagcagaaatgagaatccagctgtcttctgatattaaagaaattagcaaaactgtaaagcaataccattatgttcactaatgtttttgttttaaaaaatagttttcacaaaattatgttatttctgttaacatataattggtttattaagtttattattgttggttttaaatgaatcaaccaatatgttaaaaatatatatttatcagtagatctaatccacataaaaaaaaactctctgggatcttcaataatatttgagtatagtcttggaaccaagaaatttgagaaccacagtgttagattatagcctgaccagtcaagtatcagccttcacttcagtgtaacttctgtaaagtgcataccttctaggagaattttaataggtcaaaataagccctgataatttgaactccaaactgtattgggaatctaaccactgttaaccaccctaatcacatatactctaatcaacttagactgaagttactttccccaaatctgttttgttgcatccacttgtatcccactataatccattctgaatattgcaatcaggacaacctttttaaaatgaacttccttatcatgtgcattgcttgtccaaaccctccattggtttcccaccatactaaaaatatactattgtatgacctacaagatcccatatgatcccgttctgttggtctcaacctcctctctgagcattcctgttggtcacattggccttcttgctcttccactcatgttattccctctgcctagagtgctccttcctcagatattttcatggcttcatttacccctttgtcatctctgagttctcacaaaatagtgctctaccttcatcccacccatcctctttatcctcttatccttatttctccattgccatttcactgcctgacattatattccatattatttgtgtattatcagtctctcccactagagtgaaagctccatgagggcagagacttcgacagtcctacttatcacagtatatcccagtgcccagaactgtgcttggtactgagtagatactcagtaaatatttattgtgtaagtgaggcctaaatgcctaaaactttgtagtcgtgtgctaacttaacatgtgctaaaggcctaaaactttgtagtcatgtgctaacttaacatgtgctatgtacctcttagctctatactaggtaccagaatatggagatgaataaaacacagcccaaagcctatacagtcaaccagaatgaaatcagtcttagaagagaggtacaggtaaggtgagagaggtactaaagataaaaggatttatttcagtggagaggttcacagaaagctttgtgatagagggaattactgaaaatgtttagtgatattgatttcagtgttatcttatctgggctttgcaaaatcttttcactttgttgtagtcttagctgtaatcattcaaggttttttgtcttaaaacaat

SEQ ID NO: 1879498 - DNA, 4001 bp, Homo sapiens
tcctgctaattaaagcgtaacagattgcatgtcttctagaaaagagggattcaaatatcaaataactttgtaagtagctgctcaataactggaggtaactgcaagtcagtggtagaaaggaagaactgtagaaggaaccaattaaccagaggcagttcaagtttgcaaggacaaatctgaaggtttctcaaataatcatgggttaatcttagcaggaagaaattaagaaactaatatgtataatatgagctttaatcaatttattgtgagaaaagataattaagagaaaagagttttctaacaaatgagtaggggcatgcataataacttgaaaatgattaggatagttcatttgtatacagttcacttctctaaaagaaaattaggaagagaaatatagaatattaaggcataataaagatcttattgaattagtaactgcatgataggtagtaaaaggaatgcaagggaggtttagttatttagatatattaagcagctgctttacaaataaaatgtcagaggcttaaaagtgttaacacagtgtcagtatcacctctaccccttactgggtgtttgactaaagactatgtcctcaaacttgctgtgatcagttttctcctctataaagtaaagtttaaaatagcatttacctcttggacttgtgatacttaatctgtacaaaatggttagaaaagtctgaggcacttagggaagatttgataaatgttaactatcatcatcattattattgttattttaaattatttctttataattaagcagaatctattacgttgatgattgattctgctttctacgttatatagaatctgaattaatataacaaatatttgttgtttgcctgcattatttgagactctgtgttaagtgctggggtaaaaactgaccaagatagacacagtcattctctttaggcagtctgactggggacatgtgcaattaagtgagttgaagtggaaaaaacaaatgcctcaagagagtcaaatgtggataaaagtgctttagaatcgggccttttcaaacagtaacttcagagatctggcctggtatttgtaaagctaaggaagctttcattaagaggtagaagccttagttactgctcttttcttaatctaattaagtctaaggaaatatactttgaaaaagtggctgcgagataacacattatgctgggaattacgataggaaaaagaaagggtcctgtgtaagaatctaatggagcaagtaagtgttctgggaagagggagcggggtatgaataatcacagaaacgtagtaagaaaattatattctcttaattaaatattttataggcctataataggagtattatattaaaatacactctttaaaacttgtgatctactaaaaaaatagaaagattgattaataatattgaaagccttaagaacataaacactgagatatgataactattattgaggctgcctttgacaaaaagagggaaaaacatttttaaaacataaaaataattgagggaaagaaaattctactttgatataagaaatatcacaataatgttttatctcgtgttttttttcataaactccaatcttaacaggattactatatgacattactgtaaaatatcttttctcttccttccccactttcaccactccatacaagaaagtgccacatgtggtcataatctgaataaatgatagagaaaagcagaatctactcataaaactcaaaaaatagaagtcttagaaataagcataatgtaaattgaaactagatgtcccattttaaagacaacaccttaccttgacaaacgctgtcaggaaacaccacatttatttcagagcagaacattttttctctatttcttcccttccatcctacctcatgaggagaatattataccagtaaatctcaaaatcatctggaatataatttcaatacgtgaaaaaaatctgtaatttgtcaatagtctatttaaaactaacactcagaaaaaatggcagcacactaaacattatgtgtctagttaggagcacttaagacatcattgttgaagtcctttctgttaacatttaacctcctggggtttagataataacttattcattaaactgctaactccctttccagcaggatttgcctatgaatttttaactggggccgaacctccagatgtcttcctcctccaactaaattcttaccatttcttttccatgctgctcacttcttgcttcccataatcagttagcatctaagagagcccagtttgtgtggctccccaactaaatatatcattctgaaattattctctccacataagttcagtacacattagggctataaaaatatttcaagttctgtataggatgtattctaggctcatatttacttatttttttctccatgctaattactctgtttttcacattattgaagtagagtaaaatggtctcttaacacccatctgtaactctattttcttttatgttcagattccctaaatagcctcacaagatgatcattcctttccataacctctaagagaagatctaagaaggagctatgaaatcaaagaccaaagatctgactcttctgtgagtcactctgccctctacagtgactgttcattacttaattttacagcctagtgttggggtctgccttcaaatgttctgtgtcgtgtccaacacactttgtcattttctttctaatccttgtgattattattgttgttattgttagcttcctatgtaaaactagttctcagcttgatgatataaaaactattttagccataaatgtatctcttgtatttatataaaaggaaaaggagtattttaaacacttctgacaactaataaagccaggtgtgtgtgtgtgcatgtgtgtgtgtgtgtgtgtgtgtgtagagagagagagagtgagagtgagagtttaatctaggtgttaaccctggggtcttggaaaagttcccatttgagtaattgaatttttattaactcacttcctcttgcaggtatttttcatttaatgcagcacagtgttctgtattatttctggatgctaagttgttgctacatttctccctgtggtgactacatttcatcaatgaataaagccgtaactgatacatgaaatcattttattttgatatatgtgctttggaatcctcccctattttaaaacagatactggaaaagaaaagacagatgatagcaatatagatagaggaaacagatatctgggggattcctattattgaaaaaatagtcttatttggttttggtattatcccctaaattctgtagacttttgtttcagaaaataaagaaaatgaatggattcactcatttataggtgatccatttagggagtccttgggaaacaatagtgtagacttaaaaaaaaatgtaataggagatagatctggctatttttttttcttgtcctctgaataatagctggtgacaacacagatgttaaacacaaaatattacagggattaattcatagcgctctagttttcatccaaggtcatgtgcagtgcaaacaataagttccagccaggcagtctgtagtggcaattaaggaccacctagggtgggggtgaagctgaaggtggctctgaccctaggaggtctacagtcacttcagtgtacctccttggaatgccttcttgttcctataaattaaacaaaagtgaattttctcccctttagggaacaaacaatccatgcctcagatcctgcagcctaagcatttcctcctttagaattgcaactgaatctcctctaaacagcaattagcattttaatagtattaataacattcacgattttaacaatctgaagctttctgctttttattgatgtcttttgttgcaattttgtctaatagtgtgcccagggtagcaaaatataaccaattaaaacatttgccaaacagcaaggaatctggaaagtttcaatgctgctcgactaaaaatgaaaa

SEQ ID NO: 1879499 - DNA, 4001 bp, Homo sapiens
tagcctctatcattcttgaacctctttggaaaattttaagcaaaaaattggggtaagtagtggaggaggtataaccaagatatacctgactcaagtacctaaaactatctcaggttacagtttgtgaaaataagtaatagtctagtttttaaagtagctttagtcataaaacaaaattatgtgattggtaaagcagcaatttctctttcaatttaaaaatccaagacaaacatatatgttatttcagttgacatcttttcaaggttctactgtaacctaggttttatatttgtctagggagagaatagtttactatgtactaagtagttctccagaaaaataaaataaaaaaaaactctctgttacactatatgacatgaaatgaatatatgcccaatcactcactcatggttctgggaagaaatagaaaaaaaaaaatgaagaaaacaggacaagaatttccaatattcattcctataatcattctatctaaacattccattaacaagagccaactttggtactcagaatttgagacaaaaaatactttgttataaattgattatttcttgctctttacatttacatttacatatgatactgagaaatttctgagcttcatggaatttctctgaagaattttagatattacagtaaaatttcaagttgctaaaatgtttgataataaagcaagcttgaattaaaaaggtaacagcctaaaccatttgaaaatttccatttggttcataatgctttattttcaagggtcatatacagtctttttccatgaatatttaaatttcctttattttctaaaatggcctgaataaccaaatttccctaataggctttagtgagaaatagctaataaaatcagacagtacgctgctatgcaactgcttaagagaaacatttttcttattaaaacatctatattgaattctctttaatgttcaagaattcttgcctcattctgtcaaacttctccacgctattctcattatttctcagagcaaccctatgagattttaaagtggcaaccattacaattttatttcagtaatgggagaaactgaggcaaagagagtataagagcatcacacagcatgccggtggcaggcctgggaacaaaacaaatatctttaattttcctgccaaaagcatactctaaaaaactgaagaaatttctttgtcttcaaaaaaacgggagtagaggggaggcaaaaaaaatcctacagtagtagaatatcactattgctcgatgttattaggcctaattaatgtttctgaaaaatatctatgaggtttattctttgctaatagtacatttattatttcacaactttgttgcaagttcaagtgcttacatgtagaacaactacagagcgatgattagagaaaagcacatatagaatgaatacattatcttaagctacttaatctttatgcctcaatctatacattatcactttatataataattgcattattttcctcaatccctctcaaatacacacacacacacacacacacacacacacacacacacacaccccaatgactttgcttaaaacatatggtagttgtcaacaatgaagaattttaaaataaaaattaaatcattaattttgcttattgcttatggacaagcaggaagatgtctttgcaaactgattaacatatagtaatgaataagcttaatataatttctatttaagtgaaaaataaaatgaagcatacagttgtgggttaatgctatatgcgacaatatttccaaagattgatctttagtaaagatatgttaataaagcattattggctgctcatttaatagaagttgccttgccttgctgggcattaataacatatggatgataaaagagtacctttcttcagagagtaattgcccatatttctcatattttccagagccgaaagccaaaaatcctcataattgataagcatatggactgcagtagcatattgcagaaactctccggcaataaacatacccaattattttcaatttcattctacttctttatttatgcaaaactcaacattgtttcttcaaaacatcctggtttcatttcctcctccctgaaaagcagttacactttaatcagcatcactgaaacatttgtactccctcactcttgttatttcgttatgagactctatttttggcatatcaaataattatattacttatgagcttactattttaatttttatcaaacattttattattatcaatgaaaactgaaatatgatagaatacattatttttagttgaatttttaatattctccatccaaatggtagctgcattttgtgagtaattatatcatcagatatgaattcttgttgagacttcacattcacttttacttatttttgtttacttgtttaacaattagaactaatttgcacttacataattcaggttatgagaaaattccacatataaattagaatttaatttgtatttacatgaagttttctttcttacttgatagcaaaaacttgtttccataaccttgtctgtgatattgtagagattgttcaagcatcagacagggggttatcctcaattaccttcagagtcactttcaactctgatattctctgatatcatgatgctatatatagaataataatagagacaccttttatatatcctcctagatagttttatgaaactaatattactcaaactagaactccttggaatacccggaattttatcaagtattattcccaaaaagttatgttgagatttaacaacaacaacaaaaaagccataatgtatcacatgcacaatcattgttaaacagagagaataccataggcactgaacaattctgggaaacctcaggctgtggacgtttacactggtttctttgatcagtcacccttaatacattaaacatcattgccccaaacaaaatatctagctttcactgatatccagggtttatttccttgtttgctgcaggcaaacaagctttcaccaaaggaactaacttagcttctttgactagtgatttccatctttttgcttaagtttttatttccattgttttgaaatggtgtgtaaatagctgatccaaatctttattcccctgaacccttttcatgccacagtgattttttttattgtggttaagaaaacacacagcatgagaactaccctcttagcaaatttttaagtgtataatagagtattgtcaactataagcatcatattgtactgtagatctctagaactgtttttattttgcatgactgaaactttacgcccattaaactgcatctcttcagtttcacttcctcactattggtttcccttttatgtcctcttctttacttttttcttctactgtcatttcccattaggtctttcagtactttttgtatcttcagtctttcaatgcttatacaccactgctgatttgtttaacataattaagaaaacacagtgttatcatgtattgtaagatccttagatattaatgtacaggtggtcacagcatcttctcatgtagtaggtatttcctttaccttccaaatccaatccctgctattgccaccgttattctatgaaggatttgtcaagccctgtttctcctgaatattattatgaagttcaaggttaatgtgtgggaacaaaaaccagaagagatgaaagtctattaattgcaactgaaaaggacaattaggaaacatagatctagaaacagtagagaaatgggtcaggagtaccaaaaggtaaagtggatttagtaaacagtagagtttttgagatttttagatagagtcttaagacgggagttaaaaatattttgtaatcaactcatatttgaattttttcaagagagaagaaaataaaaattcaaattgctttcatttagttttggttgatagactattgtctgatggatttgaatagatatctaaatttggggaacaattatttgggatttaacaaataagataat

SEQ ID NO: 1879500 - DNA, 4001 bp, Homo sapiens
ctctgcagcccctcctcaccctcactgcgacaccccagtctcttggaatcaaatccactggcaataaccttccttaacggaaaatgttttccctcccaaaatgtaaaacaaaaataatacaagcaagcaaaactcaaaacagaaagggatgatcagagcaagctttagccccttgtagctcacttatgcccccattgtcatgctactgaaaacagtgtctgcccccattaaactgattcattactgcagaatgaatggcaaaatttagcgtatcactgctcctactacattcctgaaaaaaaaaaagtaaacaccacacaaaatataaacttacccccaaaagaagtcagcatcaacctaaggatcctactgtaatattactacactaacccaagacattttaatcctcttctgacttatttaccaaaaaatactcattttgagagctctggaagcattacaaatattgtattagatttttcttcctgaggtagtttgaagtcttgaaacaagagcgaatttacatatttttctacacaccactgaggggtaattatcataaaaggcctacaaccaaaatcctcatcccccgattctcaggctgtcacaattttttttttttttttttttttttgagacagagtctcactctgtcacccaggctgaagtgcagtggtgtgatcttggctcgctgcaacctccacctcctgggttcaaagtgctgggatccctcccaaagtgctgggattacaggcgtgagccacagagcccagcctataatttttccttcacatcaaacaatggaaaacacacataaaaagatgaaaagtcatacaaaaattaaaaaacaagcaaaaccaccattaaagaaactgtgttgtcacactaacagtctaaactttgctaaagaccaaaaaaaaaaaaatttttttttacttggtttatccaagctacagacattttataaagtactcaagaaattaatagcttataaaaatagtggaacatttttcaatgacatcatgaaactaaaatcaactcattctctggcaaagagttcttccaaaatgtcaagtctacaagaagggatgtaggccaggcgcggtggttcacacctgtaatcccagcactttgggaggccgaggcgggtggatcacgaggtcaggagtttgagaccagcctgaccgacatggtgaaaccccatctctactaaaaatacacaaaaaattagccaggcgtggtgtcgtatgcctgtaatcccagctactcgagagactgaggcagagaattgcttgaaccggggaggcggactccgtctcaaaaaaaaaaaaaagaaagaaagaagaagaagaagagatgtgtggcaaacttcacgaagcagcccactctcaggctgaccacctttgcctgttgttcaggttggcttcagaggtgcagggatgttggcagacgcctcctcaaggtaggccaaggagtcccgagggataccgatgctggccggcttttcaagctgaacgttgatgtcctccagcacctggtgccagcggctcagctttatcaagtgcttctggacttctttccactgtaactcattccttagttttgagacatcctctttgataacctgctctggtttctggacaaataactgcaatattttttgtaagaaaaagcattctggtgacagagcaagacagacagaaagagagagagagaaagagagagagaaaaagaaagaaagaaagagagaaagaaagaaagaaagaagaaagaaagaaagaagaaagaaagaaagaaagaaagaaagaaagaaagaaagaaagagaagaaagaaagaaagcaagaaaaagaaagaaagagcattctgtctttctttcaatatccagaaacttctggctacactgagcaataacagtttgaatgtcttcctaatcagtgcagttgacatagtcctgactcaccggagaagttaagcatgcatcgcaggataactccaattactccgccgaagtactgttagaaggtctcagagcacgtggagctgtctgaagaagcgaagtctggccccggagggccagtaggggcccctgtagctgcccagagaacataccccctagcggagctgctgtggctggaatggcgtggaaggagcccactcttagctgttactttctgtataatctctgaatatttgtcacattctctgggaagtcctccctgatcaccttacattgaggagggcgcacctctgttctggcgagcaccttgttttgccctacataatatttatacggtaatgaaatcgcctgttgaatgtctggcttctctataacagtgagagtttcagcagggactgcatctatttcccattgtaccccatcacacaattcagtgcctggcacacagtaggtgctcaaaaaaatcatcaatgaataaatgaacgatgtcttccatgtgcaaagtagaagtaaatactagaaatctcaaagaggcataaaatttagctcctattctggaagcgtttacaataaggtgggaaaaacagtatggacataggttttttataaagaaggagaaaaggaactaagaacaaatataagaacattaataacaaaaattattttcattagctgcaagaaagtaatagtttatttgtgataatactaaaaaaaaatttctcacatgaatcagtaagaaataaacagtcatttgaatgtcagaatcatatcaaattacaacacctttcatagtatgttctcccttatctgtggctgaaatgtctcacccactggtttgttgacaatgccttcaaggccatattgctacatgggagaatttgagtgcagacattccttcatattcattcttcatgcaacctttcagctccagatatttgcaaattttgcctcagctattgaaatttgttatggaaataacaatgaaaaaaaaaaccttgattcccacttcttaaatgagtgtttatacaataaagtgtttataatagtacctggtacctggttaactttcaatacatgtttgttattctcatttcataccccttgatatctttaaattcccctttctaaggcactgaatctaaacctgaaagcaagtacagatggaaaagaagagcgatataatgaaccttgcaccaggttcttggactggtgtcatgcatgcatttaaaattacagttcagagtgcaggcatttgaactggctcacaaacaataaagaattgtgcctggtctgggtcaggtataaacaagctggaatctggcataggtaggatgtttactagtttggtgttctggttgtgtgctttctcttattcctataatcttcacctctgattttttctgtcattctgtaaggagacttagatttggtcatcttcccaccatatgctaagtctagcatggtgggctttggagtcagaaattcctgagtttggacctgacctcaccattagcctctctgaacttccttttctttatttgtaaagatggaattaataaccagtcctgctttctttaaaatatcttaaggataagtactaattaatataaaattaatggtataggtatactctaatcttggtgagagaaacaagctcctctaagtaggtaactgattagtgtcaattgtgatggatataaatacgatgaagaattggtatcatgtacagttcaatagggctctaacacatcacagtacgtggtctgtgcccaataagctatgctccatgtttttttttttttaatgttcctaccacacggttttgcagttgttcagaattcaatatgtatttttgaatcaaatagaatttataagaataaaatataagccctaaataatggcaggaatattctcctataactttagtgtcttattattattcaaatactaattttcaacattgctgagttatctaagtttatgtagaaaggttttggaagagtctgtcaagaaaactcaaaaaagtattgtagaaaagtaatt

SEQ ID NO: 1879501 - DNA, 4001 bp, Homo sapiens
caaattcctggaaaatgccagggatcagatcttgcttttaacttcttatgccttacagagaccaaaacaagagcgaagaaacggacatttcactccaagatgtcttcccttcacctcgccctcgtcggccacccaaggaggccagttcagggaaaaacaattccattcgattccattctattctagttagatgctaggatattactcctctagctaatgtaaagcgttcttttgccatttccctttgtctgatatccatgttttcattctcattcttttgtttacaataagcctggtacagatttgcaccactcttttttgttgttgttgtttgttttcttttctttttaaatgttttatttccaatttttactttaatttcaggggtacacgtgcaggatgtgcaggtttgttccatagataaacctgtgccatggtggtttgctgcacagatcatcccaccacccaggtactaatcccagcatccattagctcctctttctgatgctctccctcttcccagccctaccctctggcaggctcgagtgtgtgttgtccccacccccactctatctgtccatgtattctcatcattcagctcccacttataagtgagaacacagagggtcatgatgatgccactcctccaaggatttcaggcttcccagacgcctagttttcagtctagttcttctgtgagatcttacacttggggagctacacgttctcgcgtttggggctctttcaggttctatctccattttcccctcaattcctccccattctgctacaataacaaaacaattctcacctccggaagatcccgcctctgcctccgcacgagcctttcaggaggtctgaatgtctggtccaccgctccccggcttctttccccgcttttgcttttcccttcccccgctcccgccctcccgcctcacgacccgaccaccgcccagctgggcccccgcggctccactgcgcagaaggtgcactggaggccctgcccgttgcccgccccgcggggtgccgagaagtcaacctgaataaacgccttgtaaaaagaacttcctaatggaaaaaatatcttatgatttccattctcaacgctcttcagaggactaaaagataaaggccacgatggattcattcaacaagtcctaatcctgcgccctggtgtgtgccagaccctgctccccgcgaggggatccacgagcgaccctcaccactatccctgccctggtggaccctccgtgcgggacacagcatccgaagatggcagcggaagctcctcagcgccccgaaagcgactgggcagggggcacaggctccctcactgggtgaaggccgcacaaagaaccggaagagccatccgggtagctcacccggcgttcagcttcccttgggccccctggctgctcgggcccggatcgcggaccggggcgtttccggggatttctgaagcggacgaggggcagggcgggcgaaggccattcggctctccttctggctccagaatctcccaacccgcaggtgtgcagtgtgaccagcgcgactcaccgctctaatcgctccgattttccaaggccttgctcagtagtcctgccaggcgggctctgaggctggaagggattggggagttcggtgagtgcgccctgcctatagcgcccagtggaatcgctagtacctgtctctgtggcgcaatcggtcagagcgttcggctattaaccgaacggtgagtagttcaagaccacccagggacgcctgttctagcttttaaagcattcatgtattatcatcactagagaatctccccctattcttcccatagtcctaagtccgaaaggttggttccaggccagccagggatatgcccatttcaggaaggtttttctcttctcaggattctagtcacagttaacagggatccctatcaagagccaccccactcagagatccaattctgacagaccatctcctgaaatgtcaggttgtcttgtgcctgagtgcaagaatcagagaccaaacaagtcacttctggtgcgataaaatcctcatgcctgccccttataggcttggatggattatagaccagcttccatttttttcatttttaataggaggcctagagaggtgtcctatccccaggatgggcctggatttagtgattgctcaatcaataatgcgaccagtggaatcattgatcatcataataatcctctccatcatttttgaaaacagcatttcccccctcagttggtacatgatttacttaacccttttcaaaatgtgtttgaagagattggcttcatgattttaggactacaaagaatcttgaaaccatcattcttgtacatatatctttgaccactgatatttctatagtgtagagaactagaggtgccactgctacattacaggctttttaatttttatttttagtttttatgacagggtctcattctgtctctcaggctggagcacagtggcccaaccatgtctcatggcagcctcgtcttcccaggctcaagtgatcctcccatctctcagccttcccagtagctgggattagaggcgcgggccatggtgccctgctaaattttgtatgttctgtagagaaggggtttcaacatgttgcgcaggctggtctccaaactcctgggctcaagcagctccgaggcctcccaaagtgccaagatttacaggcatgagccactgcaatggaccttacataatgcctctaacttcagcacatttagcacatttatcctctgcacgagcgataccaaatcatattccaatttatttctcaactctcatactgcccctttcttcatttacttgctggcacaacaaactgtctgccaccctacccacccccccacccccactttattttagactaggtctcactctgtcatccaggatggagtacagtggcttgatctcagctcactacaacctccaccccctgggctctagtgatcctcccacctcagcctccagagtagctggatctataggcatgcaccaccgcattcaccatttttttttttaagagatagggtcttgctatgtcgccgaggttggtctccaacccctgggctcaggagatccatctgcctcggcctcccaaagtgctgggatttcaggcatgagccaccgtgtttgccatgtgcccatgatattctaataaggggacaggttccctcccggcttaactaaggggacaatacaacagaaggacatggtggacattacacacagatattctgttgcataggatggacagctaaacttctaaggcattttatgtttattttattttattttatttttcgcgacaaggtcttcctctgttgtccaggctgcagtgcagtggcatgatcatagttcactgtagcctcaaaatcctgggctcaagtgatcctcctgcctcagccttccaagtagctgcaactatgggtatgcaccatcataggtggctattaaaaaatgataataattctgtagagatgtgatttcactatcttgcccaggctggtctccaactcctgagctcaagtgatcctcctacctcagcctcccaaagttttgtgctgagattaccggcatgagccaccatggtcagccctgtttctttttaaaatttatttattttgggacagggcctcactctgtcacccaggctggagtgtagtggcatgatgacggctcactgcagcctcaacctccctgggctcaggtgatcctcccacctcagcctcctgagtagctgggactagcagcatacactatcatgcctggctaatttttgtatttttttgtagagatggagtttcatcacattgaccaggctgctctccagctgagctcaagcaatgcacctgccttagcctcctaaagtgctggtattacagtcgtgagtcactgtgcctggcttgtcattgtttcctgtggtgaccaagtcacatgggtccagagaagacagatcacagtgactt

SEQ ID NO: 1879502 - DNA, 4001 bp, Homo sapiens
tctctctcatacactttgctcttttatttcatagtacacatctcagcttgtagctggatatttgtgttcattttttcagtgtctgtctttctcattggtctgtaatctccatgagggtaggacccatgggctttgtttagttataagccttagcaattatcacatagcctggcacatggtaggtactcactaaatccataacgaatggatgacttttagtgctgtctgcttactatccttcaatagccatacatttggactccaggcaagttcttgctcaaaggtggctgacaagtcattctagctcctgcaaacaacagcttttacattaggatgctggggaaaccactaaccagtccaacaaagcacaagaataaaattgatcccaccaatcctctcagacacaactattaatactctctattgcctatttcacacccctccttgtaagaatgaaacagggaggaaatgcactgggctctcagagctataagactcaacaagctgccaagttgggttagacacccaggtgggagaaggagtaaagcagctagcctatgtaaccttggcaagatgactgctcagatgccactggtgcatagatagatgactggcttcccaggggaatgtcaacaactgacacccacactgtggtctcccacatgtgaatacgtcaatgtttacttaaccattcccttatttcaacacacgttgaatgaaagtctactatgtgtctgttactgtgtgccacaaaggtaacaaagtcactgctcttgctgtcaagacatttaaaaggaagtacttgacagacaattatgaaaacaaactattatgcaggataaaaatacagtctacacacaggagcagagaggacaaaggataagggggacctaatcctgtggaaggtttcactgagaaggcagcacagaactaacttgatgcggaaggtaggcgccttctggaccaacaaggcagggagtgcattccaggtgagagaaacatggacatgggcactggagggagatttgggtttttaagttctcggaatgtggagtgcaagtgggaagtgctggaagtacaacacggacggaaaagccaacctgacttagatcacataggaccttgcaaaggagcttagcaaataacctactggcaatggtcagccactgaagcatttacaggcccaagagcagcattacgtttgccttaattcattgtgttggcagtgagaagatagagtggaggaagactagacacaggtaaggaaccctctccccatctcccctactccctcccgctggcagaagaggctacgcagtggttgagggaaaggtaagtaccagaaccagggcagaggcagtgcaaatgtgtgatctagtacagacacgtaggaccttacaacgtataccatgatcttagggtggaggtaggtgtgagggatgactgcagatagagctcttctctttgccttggacaactggccagttttaccaagctggaacagagatggtggtaggagaggggtcctaaaggaaaacatgaatgcgcttttcataagtggattgtgaggagttcgcaggacttccagctgaaattgtcccctagggagctgaatgataggggtctgggggttttgagctggatccaggttagagacacggatttgtggcgtcatcagcgtggatgagactgcgcaaagttgaatgggaaaatggcaaacctagaaaacaacaaatatcacagtgcgataccagtgtcagctttacggcttttctccgtcctcagcttggaatgaggaacatctttcatttcacaagaggttcaggaactaccagtgtgaaaagaggctacgttcaagctgctggagggccagttccacctaggcgcagtcaagaagggcgcctggctttccggcttcacgtccctggaagctcggcactgcagcggttctagatctggggccgccggctgccttcccgacctacctcgctgactgggcaccgcccttaacgtcacgatcccgcccccgccagcgctccgaccacaacccgcgggagccattgcgtttgacgtcatcatcgcgcgccatctcttcccttaggtgtttaagttccgcgcgcaggccaggctgcaacctgacggccagatccctcgctgtcctagtcgctgctccttggagtcatgttcccagccgccccttctccgcggaccccgggtaccgggtcccgaaggggcccgctggccggactcgggcccggctccacgccccggacggctagcaggaagggtctgcccctggggtctgcagtcagctccccagtgctcttctcgccggtcggccggcgtagctcgctaagctcgcggtaagtgatctccctggttgggtctggcaaccaacagcctcacgggccgcagtgggccggataggttgttgtctttagaagcctttggaaccggggcggcggaatagaatgccacagtattggaaaatagaccttttccactgctgcaggtagtatctgcttcgttttgattatcagttgatcagttgattccccactttgcatttttcatggatacctttgtgcagaagtgaagtacaaactggatttgcatcagtgtttacctacttcccacctactacccgtgtgatctggtgtaagtcactcgtgattttcttcatctgtgaaatggcgataatatatctcacctgagccagaggagttattatgaattgccacgatgcagatgtaaggtgatggtgataatgaggacctacaaccctgaaagatcattgtttaatgcctaacataccaactgacattaatatctgatgattggtaattaaagggtttctagctacggaatttaactttctaggtaaattataaggaaaaggctttacataagtgagctaagagtactgtgatagtttagttactaaaactgctcgtttggagcaccagtaaaatcatcacacacacacacccctccccacccccaacacacaccatgttcataattaacctaaaactttagtgtttctgcatagttttctctgaattcatctataaaaaatgaatttttccctgcaggaaacacaaagtattgtgtcttgaaattatggttaaaatttatctgtaaaatttttcagtactttaaaggagaagtggttttgaaagaatacactgtatctttgactttttttggcatattttgaaaagttcttttcaaagtgctgatcttgtcagtgttttctattccttttgcgaaaagttggagaataaaagcatactttatttactgtgtgttgttttatttaaatctcttcttgtgatcatttgaagaaaaacctttgttatcctctgtcaggaaacaaagcccttagcccttctgtatgtgcatcttctcatttaattctcgtgataagacatagactaccttttattctggtgactttacaatattctaaatgttaagagggtgagcaagaaataaagtttttactgtgatatctgctgttgaggaccatgtaacagctgatgctcgtaacctgttcgatttcttgcttggttgtacagatctgatagtttttttttttttttttttaaagagacagggtctcactctctgtcgcccaggctacaggctggtgccacaatgcccggctaatttaaaattttttttgtagagacaaggtcttgccacgttccccaggctggtcttgaactcctggtctcaagcagtcttcccgcttcggcctcccaaagtgctgagattatagacatgagccactgctccggccaggtctggtggactcttaagcacctaaagctagatgagcttaaatctcatctaagccaatatttataaaatgtatttgaccacaacatatggtaaaagctgatgttttatattctgtctttcaaaaatgttgagatctgcaaaatgacccgctgtttgaaaaaaaaaaaaaaaaaacactggtctagttaagcctt

SEQ ID NO: 1879503 - DNA, 4001 bp, Homo sapiens
ctggcaaagacttgaaaatgatgcttcataagccaagcccctcgtgtgctcactgggttaccctcacctttagaagaaggcaagacttgggaacgttttagggtcttcctttcacttgggagatttacccataagttcagagaaacaacttcagaaaacaactgttagggcatttaaaatcttagagaagcacctcctatctagaaaacatgagagtttaacttctgaagcatcacggtcttctgcagctcacatatgtgaacagcatggaaataaactcgtaatgcacggtctggtagcttgcgcttgcattaggtacagcgcactgtgtggggaggattatcaagggaaggtttgattgactattactccagttctgtctatgcccccaggacccacttgaagacattatacttcaaggtgactattctgttgaagagaacataatattaattaattaatgattacatataaataatggaaaaagactaattgagcgatagttcagctaaatagccccaacaatgtcaccagcagtgacggtactgctgagcaactgataaacagtaccagccatggagggcagaaacagagccttttaaattcatcttttcatgtatttccttataatgaaagcaaataacaaaagcatgttttaggcaaaaaggtgttaaagaaaatataatcattgaacagcaagtgttatttgtttacacaaacactaaaacctcagaataaaaagatagctcatgatgtaggattgtttccaattattggcagaaggacagaaagatcatcatatcagtaacaaagaacaatcatgctgcaaagaacaatcaatggaaatgcaattttcaatgttacaaatcattaagctgaagatatatgagtatcagtttcaaatataacatgtaatcagaatctgctgtaaaaccagataaaaaataactttgaaaaactgtactaaatcaacgagttatttatttactaaaataaaaatctgacttctgggtacagtcattctgaaggctctatcgtagggaatgaaaatgagacttcatctcttaactttagaaatacaaaaatcttcataacaatcttatggggactataattatcatccccatttcacagataagcaaaatgagaaacaaggtattaagcaacttatacaaggtcagcccattagtaagtggtgcagctgggatgtaaactctggcagtttagctcctgagtccagcctcttagcgactacattacacacctctcatctggataaaacataaaactgtagaaaatccaggagtcctttctaaagagagaggttttagctgggttttggaggtacgttgtctttttttttctttttgcctctttctactatatgcccttatttataacctaaaatattagatatgaaattctgccttctgttaagcaaatgacccattatgcctgatgtccataagggccattccatctggaaaccagagctagtcccttaattgttccatgctaatagttaatagaacatttgatagaattccttacatatacctttgttatttagccttatgacatttcattagaattatttagatgactttttcctgtactagaatttgaactcatggaaagtgaggatgttattaataatttgtttctctgttatctagcatagcaattgacacacagctgacactcaacatacatttgttaaatagaaattacatgccacaaagaaagaaagcctgaaagaaacaaccttagcctgcatattaaacgcacagataattgcctgttttacactaaatgaactttttaacaacaatgaaaaaaatttttggacaactttcctgacctctatcctttattcctcatgtaaaataggtcaaaaagtctgaacgatcctttctcagacatgtctcctgaatctggatcatcaccatgccacccggggtaggctctggtcctaaccggcctggactctgagcaacggtgtcctgactgctctcctgacaactgtcactcccaggcccggccactcgccgtctcagcgccccctcgcggcccttctctacccacctcgggacttcccaggcctcctggctgcgccgcagaccctccccgtcccagatcccgccagggcccactcgggctccagccgctgcctgggacagccaaaggccggcccgggcggttcttccccaggtggtccggggcgtcccgggccgcactggcctggcccatgggccccgaagaaggcgctcacccaaggaccactgtccgagcggcttcccccggcccggcctggtgccgcgtccccaccagcccggggtggcaggttctactcgggaagcctgttttatgtcttctttcacgcccatatcacaccgacaagggtgaagctgtggaacttatacctcggctgggccccgccgccaactcctagggcacgggaactgcgcacaggccggggttccgcgaggggcggagcttcccgctctgccctcgggcaggtgagccggagcctggcacgtgggcctgggtgtcctgacagccctggcccccgccgcctctgtaccagggagagcgcctggaaggcgccgctgcctctctctccctacgtgcccacctgcctctaggaactggtgagttacttcagttctatgtgagtctccagtgccacaatttagtgtgtacaccaaacggtgttattgaatagatgaagatgattaccacctggtaatgagtttccttagtcccgttcttatagaacctgaaactcaacgctaaccaccccccccccccgacttagaatcacaaactagatagaatctttctgacaatcgggtgagttgggtttaatatgcaatgaggaaattatactttactccaaaaactagtgcttgttattttcctcacaacaaaactctcagatagacaaagttggcaaccctattccactcagctagtcgataaaagaaccaggatggaactatgatgggaacccacatcttcagcttcctattgcagtgtatgttctattacatatgaaaaagagacaataaagtagaggataagtaggacgctaaagaagtaaggaaaggagagaatccagtgtttgtaaggagctttgttttattttcccaaagcttggagattacttggcaaagtgtgatggtgctacacagcccgtaagaaatttgtaatcacccatctaacaagtacctaggctggatctgcaaactgcgtggaaatttctagcacgtgtgggaagaagcatgatcaacatttcttagaccatttcaggtccggaagtggccctcttgcagtttagcaggacatatattctcaagagattctgagtagccacagaacttacagaagttgtcattatttacctactgctcagaaaaacaggacactgtctgtgggccaatttgctaagaaaaaaatttaaataatatgtaaataaatgtaaataatgtagaagcacaatctgcctttgctttttcttataaatataagaaaatattttcattaaaataaccaaaaaatagacaagatttacccagcacctttagaatgaaagtaacgtggcagtgcttcactgggaaaaagtgaagctgaatgagatgaaatttagaaactgagaaatggtcaggaaaaaacaagaattcaaaaagcaaatagaagtattatttgactgaaaaacctgaggctaaaatatgaaatcaagctaatttctgaggtatctacttattctttgtttcaagacaagtctgactccagtttggggagagtcaaacagaatggaattagctaaatttgcttatttttaaaactcccctcaatttctcccccaaatttgagtttccctttgtacttctcccattatgatgtagaagatttactaaacaaatatcaatttggactaaaatgatattaggttttgatgatctacctatttttagcctaaggactaagtggttttctga

SEQ ID NO: 1879504 - DNA, 4001 bp, Homo sapiens
taattaattaatgattacatataaataatggaaaaagactaattgagcgatagttcagctaaatagccccaacaatgtcaccagcagtgacggtactgctgagcaactgataaacagtaccagccatggagggcagaaacagagccttttaaattcatcttttcatgtatttccttataatgaaagcaaataacaaaagcatgttttaggcaaaaaggtgttaaagaaaatataatcattgaacagcaagtgttatttgtttacacaaacactaaaacctcagaataaaaagatagctcatgatgtaggattgtttccaattattggcagaaggacagaaagatcatcatatcagtaacaaagaacaatcatgctgcaaagaacaatcaatggaaatgcaattttcaatgttacaaatcattaagctgaagatatatgagtatcagtttcaaatataacatgtaatcagaatctgctgtaaaaccagataaaaaataactttgaaaaactgtactaaatcaacgagttatttatttactaaaataaaaatctgacttctgggtacagtcattctgaaggctctatcgtagggaatgaaaatgagacttcatctcttaactttagaaatacaaaaatcttcataacaatcttatggggactataattatcatccccatttcacagataagcaaaatgagaaacaaggtattaagcaacttatacaaggtcagcccattagtaagtggtgcagctgggatgtaaactctggcagtttagctcctgagtccagcctcttagcgactacattacacacctctcatctggataaaacataaaactgtagaaaatccaggagtcctttctaaagagagaggttttagctgggttttggaggtacgttgtctttttttttctttttgcctctttctactatatgcccttatttataacctaaaatattagatatgaaattctgccttctgttaagcaaatgacccattatgcctgatgtccataagggccattccatctggaaaccagagctagtcccttaattgttccatgctaatagttaatagaacatttgatagaattccttacatatacctttgttatttagccttatgacatttcattagaattatttagatgactttttcctgtactagaatttgaactcatggaaagtgaggatgttattaataatttgtttctctgttatctagcatagcaattgacacacagctgacactcaacatacatttgttaaatagaaattacatgccacaaagaaagaaagcctgaaagaaacaaccttagcctgcatattaaacgcacagataattgcctgttttacactaaatgaactttttaacaacaatgaaaaaaatttttggacaactttcctgacctctatcctttattcctcatgtaaaataggtcaaaaagtctgaacgatcctttctcagacatgtctcctgaatctggatcatcaccatgccacccggggtaggctctggtcctaaccggcctggactctgagcaacggtgtcctgactgctctcctgacaactgtcactcccaggcccggccactcgccgtctcagcgccccctcgcggcccttctctacccacctcgggacttcccaggcctcctggctgcgccgcagaccctccccgtcccagatcccgccagggcccactcgggctccagccgctgcctgggacagccaaaggccggcccgggcggttcttccccaggtggtccggggcgtcccgggccgcactggcctggcccatgggccccgaagaaggcgctcacccaaggaccactgtccgagcggcttcccccggcccggcctggtgccgcgtccccaccagcccggggtggcaggttctactcgggaagcctgttttatgtcttctttcacgcccatatcacaccgacaagggtgaagctgtggaacttatacctcggctgggccccgccgccaactcctagggcacgggaactgcgcacaggccggggttccgcgaggggcggagcttcccgctctgccctcgggcaggtgagccggagcctggcacgtgggcctgggtgtcctgacagccctggcccccgccgcctctgtaccagggagagcgcctggaaggcgccgctgcctctctctccctacgtgcccacctgcctctaggaactggtgagttacttcagttctatgtgagtctccagtgccacaatttagtgtgtacaccaaacggtgttattgaatagatgaagatgattaccacctggtaatgagtttccttagtcccgttcttatagaacctgaaactcaacgctaaccaccccccccccccgacttagaatcacaaactagatagaatctttctgacaatcgggtgagttgggtttaatatgcaatgaggaaattatactttactccaaaaactagtgcttgttattttcctcacaacaaaactctcagatagacaaagttggcaaccctattccactcagctagtcgataaaagaaccaggatggaactatgatgggaacccacatcttcagcttcctattgcagtgtatgttctattacatatgaaaaagagacaataaagtagaggataagtaggacgctaaagaagtaaggaaaggagagaatccagtgtttgtaaggagctttgttttattttcccaaagcttggagattacttggcaaagtgtgatggtgctacacagcccgtaagaaatttgtaatcacccatctaacaagtacctaggctggatctgcaaactgcgtggaaatttctagcacgtgtgggaagaagcatgatcaacatttcttagaccatttcaggtccggaagtggccctcttgcagtttagcaggacatatattctcaagagattctgagtagccacagaacttacagaagttgtcattatttacctactgctcagaaaaacaggacactgtctgtgggccaatttgctaagaaaaaaatttaaataatatgtaaataaatgtaaataatgtagaagcacaatctgcctttgctttttcttataaatataagaaaatattttcattaaaataaccaaaaaatagacaagatttacccagcacctttagaatgaaagtaacgtggcagtgcttcactgggaaaaagtgaagctgaatgagatgaaatttagaaactgagaaatggtcaggaaaaaacaagaattcaaaaagcaaatagaagtattatttgactgaaaaacctgaggctaaaatatgaaatcaagctaatttctgaggtatctacttattctttgtttcaagacaagtctgactccagtttggggagagtcaaacagaatggaattagctaaatttgcttatttttaaaactcccctcaatttctcccccaaatttgagtttccctttgtacttctcccattatgatgtagaagatttactaaacaaatatcaatttggactaaaatgatattaggttttgatgatctacctatttttagcctaaggactaagtggttttctgaattcacattttcatcgttttaatgaaaatgaggcaatatgctgaaatggtattttcttagattgtattaaggtttatatacctagatttttcacatacactgtgtcatatacttttcctctaaatccaatatattatgaacacacaggtaacgtttttactgctaacagcatgctgtaggtttaaaaaaattattgtttcttgaccttttacaagttattctaacactaacagcagcatagctataacaggacagaacttgactaaatatattaatatagagttttattatccttgataatttttctcactgcagtgtctagttaatacttaaagggtttttgtatgtttgcacccattcttagagaggacaagagtttgaatttgcatattctcaccgtatgtttctattacaatatcaaagattgaaggctgccttaataaaacattt

SEQ ID NO: 1879505 - DNA, 4001 bp, Homo sapiens
ttgtaagtgttgagtggacacagtcagggagctggggtggctggcatgtgctgagggaggggccttcgcatatgtcacctctgtcatttgacgctaccctaaaatgtggatagttaccccatcttaaagaggaagaaactgaggcacagacaggtattgagcagaagacttttgtcagccatacgtcacccttagcccgcctctgtggtgcgcaggtgggtggtgaccgtgctccacttccagcacacctcacttcactgtttcagggcttttctcgaaagcctttgagtcttgtcagcccccaatggtgcccccagggcaaccttcaaccatggggaataggagttgagtcaacagatagagatcccagcctcccattctttggggggccaattctgaggggctttgaacacggttcacagagagtgccctgtgtgactgatctccagtagcccacaggagcagtgggctcaatgacacatagttgtttgatttttcctacttcccacccctcattccggcttccctggatcacttcccaaattaactacacatatccaagtccatatcatagtctctgcttttagggtagcccaaagtaagataacaggctaaggagcttgtttaatgtcatctatgaggctgcaaagtgtctgagccaggacataaacaaacctagggcttctgcctcccaccaaggttctctgtgccttgtgtgaccttgtctccctggaggggaaatttcccaagagtgctgagttttttgttttttttttttttgagacagagtcttgctctgtcacccaggctggagtgcagtgatgctatcttggctcactgcaagctccgcctcccgtgttcatgccactctcctgcctcagcctcccgagtagctgggactacaggcacctgccaccacgcctgtctaattttttgtatttttagtaggacagggtttcactgtgttagccaggatggtctcaatctcctggcctcgtgatctgcctgctttggcctcccaaagtggtgggattacaggtgtgagccaccgtgcctggctgagtgctgggttttgagccagaccttgaagaaagtaatggatgtcactggcatgggagaaagagacagtgttctgggcagcatgaaagactggatcagaggcacagaggagagacccagaaagctttgaaaaggacagcaagaggcaggctccctggacgttggctgcacagaggtgaagggaggaggtgacagatgagacagcgaccgctccgctcttaccaaagtcacccgcagctcctgagtcatgaaatgacacgacactaacaatatccgggatatgatgaggtggtgcagggcagaaaatggatttgaggaggctgggactcaaaggcagtgatactggctcttgtccttatgaacagttgtccaccaggtcattctgatttcctctgaggcagcgaagggtaccctgacacaagttttgttttaaggcatccttgtttgtgctcctggattgctggaggctccggtctggtaacctgtccgtgagtcatgacagggagcaacactgtattcaagggtggtacatgttaccctagaacactggtacagttacccccgtcttaaagaggaagaaatggaggcaaagataggtatttagcagaagatttttgtgagccacaccttaccttttagctcacctctgtggtgggtaggtgggtgatgacggtgccccacttcaagcacaccccacttcactgtcttggggcttttcaccaaaacgtttgaatcttgtcagcccccaggcctcccagggatgccccagggaaactttcaaccatggggaatgggagttgagtgaatggataaagatcccagcctcctatcccaccaatttcaaagtgtggtcccaggaccaatagaccagcatcatttagaaacttgttaaaaaaaaaaacgttcttggccaggcacggtggcttatgcctggaattccagtgctttgggaggtcgaggtgggaggatcgcttgaatttgagacccatgtgggcaacatagcaagaccctgactctattaaaaagaaaaaggaaaaaaaaaaaggattcttggtccctactgggcacctacggaatcagaaactgtcagggtggcaccctgaactctgatttaacaaggccactctgccatgcttgagcttcggaagcacagctcaaggagctgaacgtctctgctggtgtgttctattttagctgctgtcttcatcctgttgttctgagtcctaaagtactccttcaagccaagctgggaaagaaaacagaagttagttctttgatagcaagttctcattaaaacatagacaaaacatctaactaatagaaaaatgtctaactaatggacaacatctgactaatgtgatttcacagtgcctgttgcagaggagatgctcaatataatgtcaatttcacttttctaagcagggagatcagataaaatgtgagaatatggtaagcacaaatgccaaagaaacaaatatagaattaattattttaaacaataacatgaatttctacaggaagtcaccagtaagacatgagtagaacagacagcatttccctgttgatgtgccctgtgaacagccaggagtgcagacagatggggaagaccgtcattctgtctttgagggtgaacaggttgggctcaaacagggtgtggcagttttcttgtagaggtttatttctcttcctcgagaccagccggccttgctgtctctctctctcaataaatttttttttgtttttttagagacagggtcttgctttgtcacccagggtagagtgcaatgacatgatcgtagctcactgtagcctcaaactcacaggctcaggcaatcttcctgcctcagtctcctaattagctaggactataggtgtgtgccaccatacctggctaattattttattttatttttgtagagatggagtctcactatgttgtcctagcaggtctcaaactcctggcctcaagcaatattcctgccttggcctctcaaagcactgggattaatggattttttaaatggggctggcctagggagaagagttccagggctatgactgttagccaagatgtcagacgtgtaatgggaatgttggccatcactttgggtattctattgttacactgacaagttagtgctatatttgacttgacttccaagtaagtgacttggaaactttaataaattgtgcccttaaggtcagtttttaatatcattattattacatccaatagttaaccttagacacatcaatccaatgttacagatttaacaaaagacaaaggaaccctgttctgtgatctcaattccgtcccaaactatgaggtgcgcgggtggtcagggacaagcttaggtgagtctcttctgctgatgcctcagttttcttttctgtagagagggaattaatgatgccaattatggaatacttattcattccttcataattcataattccttcactatgaataaggcattattgtttacaacagtaaacaaggcagataaggttctccttattgtacagtttgcattctagtggtcactcaagaacatttctgaggaaaataactgaaatgacacttaccaggaagaactccacagctcaggacaccagagacagtttgactcggttaaagcacttgttgctatgtctccctaatttttttctttttttgggtgggaggcgggggcggtggggacagctctgtcactcaggctggagtgcagtggcatgattttggctcacggcagccttgacctgcccgggttcaagtgatcctcccacctcagcctcccaagtagctgggactacaggtgcacaccatcacacctggctaatttttgtattttttgtagagatggggtttcgtcatgcttcccagactggtctcaaactcctgggttcaagtgatccacctgctttggcctcccaaagtgctg

SEQ ID NO: 1879506 - DNA, 4001 bp, Homo sapiens
gcctgggcaacgccttgattgcagccttatgagagaccctgaagcagaggaagctatgcctgtattcctgcccatagaaactgagatcagaagtatgattcaagccactaagtttctagtaatattgctacacagcaaagataatgattatatggaataaacaggaatgaagagtcaagaatgacttcttgaacaactggatagaaggtagaataatttactgaaatggggaggcttgggaaagaattctactcttgagaaatcaagagtagaggtttcaaataagtggttggatatgcacataaggagcgtagtagagaaaggtggttgtcagcagcctatcactggcatttcctttatccagatgtgtaaaatcaatagcgtaattaccagatctcccctgctcaggagtgctgtgtaggctggcctaggacgtgggttcttcttttctgctcctccccactttgctggactttattcccctacacaacgctttggtacctctgctattaccatattctcattctgcctgtctccctttgctcttcatatcctcctgtcctaggtccagctttcgtagcatcttttaccaagatttattccagacaggggatcctttcagatcttcgcattctctcctcatttcccagcctgatcaaaacatgcctttcgatgctcattcaccaaggattctgctaccacatagcaaatatatgctgagaggtggtgctgtgtacggaatatggatttggagaaaggttggaatttgaactgaaaatctactactcatgggctgagaaagacacataacatcttcattttctcatctgaaaaataatgatagcaatgatagcaatgcctacctcctaatgttgtttaaacataaaatcactggagacataaaatgcccagtacagtgcttggcacatagcaggtatggtaaatcatacctattataatcaaactgactttttctaaagtgaaaaaaattatatctggctaacatattaccttatagctcttttagtcccaaatttaaaataaccacattcgatttctctcaatgctctagtctatttttatcagtatttaaatgtgttccagacacatctgtctttaaaaagaattttttttcaaccactccactttcctcactagacagcctcattatttctcccctttccttcagaatcatgcattatgagccttgtctgcactgtcttcattgcctcgtggctacttgttacattctgtacagtgttctgcacctactgtgccacttttttttttgagacggagtctcgctctgttgccaggctagagtgcagtggtgcgatctcggctcattgtaacctccacctccagagtccaagcaatcctcctgcctcagcctcctgagtggctgggactacaggcacgccacaatgcccagctaatttttttgtatttttagtagagacaggatttcaccatgttggccaggatggtctcaatctcttgaccacgtgatgcgcctgcctcagcctcccaaagtgctgacattacaggcttgagccaccgcgcccggcctactgtgccacttttacttccaatgtcaccaaaggcattgttgttactaaacccgatggctatttttcagtccttatcttacctgacctctttgcagcaattaattgtatagaccacacttcattgtggtaacattcgcttctatctgtgtttcccataggtgatcttcattcccatggcttcaatgactgactatccatgggcttatgttttcagtctgactctctcctggactcctgaactgcaaacctagctctcttctggatcccccaagctcttgttactcaatcaaatttactactttcccatgaaactgcttcttccctcattccatctgtatgaatggcactacggagactcagcttcctaagccagagaccctaaagccacacacccccccaccacccactccctttccacttcaaagccctgttgattgttgagctgctgtgttctatagattctgcttccacagcaactgtggaatctcatgactgatctccactctcctggggtgatatggtttggctgtgtccccacccaaatctcatcttgaactgtaactcccacaattcccatgtgtcatgggaggaacctggtgggaagtaattgaataacggggaccgttttctcccctgctgttctcatgatagtgcataagtctcacgagatctgatggttttgaaaacgggaattgccctgcacaagctcattctctcttgcctggccaggtaagaagtgcctttcaccttccaccaggactgtgaggcctccccagccacatggaactgtgagtccgctaaacctatttttcttcccagtctcgtgtgtgtctttatcagcagcgtgaaaacggactaatacatggggccacctcatcactggctggatcactgcacctgcccattccctggtcatcttgctttcaggtttgcccctttccagtcagttctctgcatttaagtgatcctattaaaatacaagtccactcacatactcccctgttttcagccttttcagtgctctctcaccctatgtctgatgtccaaactctttagcatggcatttggcgccctcatcatggggtacttagtgactgcccagcattttattcacatctttccttacccccatactccctatttcagtcacactcaactatttgcagcgaccccatatttcacactcttttgtgacctttcctttcttctcttgtcttgtcttctcttttctttcttttgacggagtctcactcggtcccccaggctggagtgcagtggcgcggtctcggctcactgcaacctccgccccccggattcaagcgattctcctgtctcagcctcccgagtagctgggattacaggcgcctgccaccgtgcccagctaatttttatatgtttagtagagatggggtttcaccatcttggccaggctggtcttgaatccctgacctggtgatccacccgcctcggcctcccaaagtgctgggattacaggcgtgagccaccacgccccgccgactcttgctttattttaagttattttccctgcccagtctcttccccattggcctcataatgtttctggtccttctgaactcagcacagatgctgtcttctctgggactctgctgagcctatgcagctcttctgtgcaccctcgcagcctctcagtaaagcaataacgtacgttgaaattgagtcctccatcatctgcctctcccactagtgtttcctgttccttgaaggaaggtgctgcatcttcttcacaattgtatctccagcctggtgtctggaggcactccggaaatggttgctcaatgaatacacactcagtgtggtaccttttcagttcctggaatatttcaggcctcttctcacttcagaacttctgcacttgatttttccctatgtcagccaagtttttccctgtctttttgtataattggccccttctaattcttcaggattcagctgaaatttcactgtgctggagaaatttactaaccacactatctgctgacctctttcacaacactaagcactggttcttattatcttctatttgtttacttgttaattgtatgacatctcccaatcctcttgctaaaatataacctacataagaatcaaaacagtatctgttttattattcactgtatccacaacagttagaagatggctgacatatgatacttatttaaaaaatccttgatgaataaattaatgaaagcaattgatgttaactagcgaagggaactgtttctaaggaggaatgggagagatttgagcatgttcgtaaagcaaggggaaactttgaaagtgggcaggtgagaatataagttagggccgggtgcggtagctcacgcctgtaatccccatcactttgggaggccgaggcgggcggatcatgaggtcagtagttcgagacca

SEQ ID NO: 1879507 - DNA, 4001 bp, Homo sapiens
tttttcttttccaaaaaaaatcaacttttggcttctttcaacctattctatgctgtggtgtgctagtgagttagctccaaacataaaatcctggcttgttgatttccatagtgtaaacagtcccatcatggttgacttcaagctacttatttgaattggctccaaacataaaacaaaatcctggcttgtttgttgagttccatagtgtaaacagtcccatcgtgggtgacttcaagctacttatttgatgttattgatcatggagttgccaagaggtgtgcacaattggctctcctatgccagtacaggctggctctggtacaccactgcttttattttccatttcgttaatttctgctcttaacattatttctgtccttctattttctgtcttattttgctgtcctttttctaacttcttgaaaagggattttcagctcaagacttttcagactcttctaatacacttacttatggctataaatgtccctgtaagtgctgcttcagtttcatcccacaggtgttgctattgttattttatggttcagttcaaaatattttctcaataccattgactctgtctctgtgttattcaggcttgtttttacagttctttattgatttctatcttaaatgcactgtagtaaaaaatgacaattatttcaattttcaaaatttcttgagttgctttataactaagtatgtggttgactgtggtgatgtgtctgctttcaaaaaactgtacattctgattttggtcgtgttgttctgtacatattaattgcgtcatttttacatcatgttattcacgtttcctatatccttaacttttctcttgctagtcttaacgattagtgagaaagtcctgttaaaattacccaatatgaccaggcattttttttctttgtaattctgtcacttcactttgtttcatatgtatttttcattaggtacttataaattttaaatttaaaacacatttcctttttagactcagaagtcatctaagactctttcctttcattccttttatatcccatcagtcatatttaaaagatatctatatgtaaactgacgtcaatagacatgatgtaaaagaagggggtggctctggtaaagctaaagtaactccactatgagagtgcattaactatgggggaaatactttctatattgcagaacacatatttggtggtacgtagcctcacatcgccacccggaaaagtctgcatatattgaatttggaatggatcaaactgcactgagtgcaaaattgtaaattgcatcttatataaatgttttagaactagatgatggagcagatgggatctattaagagaacggggtgccagatgactgaccataaacatgctttttaataaagactctgctgagagattaactcatatattttctaaaatttttatttcttgttcattttgtttctaagatattcactcacatattaaaaataacaacgtctcaaaacatttgaagcaactctcttcatcccttttaaaaataccttgctgtttcgggggttaaaaaaagccacaagggagattaaaacaatacaaatatttattttcccaactcccctgccatgggttctgggacgtcaccgcctctttctggggcccgtttcatccttttcttttaatccaagaagcgatggtgttgtgcgcctgtagtcccagctacctgggaggcaggctgaggtgggaggatcttttgggtccaggattttgaggctgcagtaagccgtgttctcaccactgcactcgagactgggcggaagagcgagacactgtatcaaaaacaaaacaaaacaaaacgagaaggcatcgcggctctgtaacactccgtccagctctcgcactctcagatgcaaacttccacacaaactcctcggctcgccttgtcccgcgggactagcatatcaagccttccgggacacaccgtgcgatgatatatacgtatatacccctcttgcccttgaaggccggaagtcggtcttacagataaaagcgaaacaggaagtcccgcccctctatggaaagtaaatggtagctcggaagggtcaaaagagtccgcggtttcgccgcgtgagttgctttttgcggctggggaggtctacgcttctagagcttgagccagcggggcgaccctgcagtggcaggactcggcaccgcgccctccaccgccggttggtggcctgcgtgacagtttcctcccgtcgacatcgaaaggaagccggacgtgggcgggcagagaggtcggcttgctgatgggtccgggtggggcgcgcgtggactatgggcccgggaggtcccttactgtccccgagccgcgggttcctcttgtgcaaaacggggtggcactccaatcgcctgcttggtgattgtggcccccacacacctgtttctacagcgcttaggttcgaacagtaaccctgtaaactaggcactgctgtccccgctttactggtgggaaacgggctcggagagaataaatgagctgccctaagcgactgggacagaaccacagttctcagccgggctttctgagcccacgctgccgccccagcagggatcaaatcacacagtgtgagataagcctcaagagcgggtggccttatgctgccactgagaactgattgggttcagttgcctcatcaaaatccctaagcatggttttgttttgtttttgtttttttttttttttttagttttaaaggaagaggagattgacggttttcctctttccttatcttctcttcagattacaaagttcattgttaatctcaaatattattttggccaacagcttcatcgcagtaggaatggcagccccatctatgaaggaaagacaggtctgctggggggcccgggatgagtactggaagtgtttagatgagaacttagaggatgcttctcaatgcaagaagttaagaagctctttcgaatcaagttgtccccaacagtgggtaagtcacactttgatgtgtttctcttccctgttaagatacatcgagcttatactgtgagtggtaggctgacatgaagcgctctctgaggcatgtcaattaacagtttctttgaggcgcagagaaaaccttgcctggtaattcagccttatttgacgcacttacatcagctagatctttggagaatgtcaactgacacattaaagagcatcgaaaaacacaacaaacatatgaacagtaaccaaaaaattccagttcatttcactggtagacttttccaggatcttctgaaggggtagtatttaatcttgggcaggagttggcaaaattattgacctagagctactatcagaaataaagcattcccagttgctcacccaaaaatcctgtaagtcatcatatacccaaaatataaagaaaggagtttggtaagcagaagaaagaaaaggttcatatggtggattctgtctccctgacaggcattcaagcgctgtatcccctgtccttagtataaggggggattggaaagaggactattactgaggttagtaagtggccatgtgtgctaagtgcttgacattttcatcttcaccagtacctgttaagataggtgttgttggctgggtgcggtggctcacgcctgtaatcccagcactttgggaggctgaggcgggcagatcacgaggtcaggagttcaagaccagcctggccaacatagtgaaaccccatctctactaaaaatacaaaaaaaaaaaaaaaaaaatagctgggcatggtggcacatgcctctaatcccagctactcaggaggctgaggcaggagaattgcttgaaccaggacctgggaggtggaggttgtagtgagccaagatcacgccactgcattccagcctgggccacagagcgagacgttgttattctctatctccagaggaggcagctgaagctcagagcattgaagtaactcgcttgttattactcagcaagtggcaaaactgtaattttaaggcaggcct

SEQ ID NO: 1879508 - DNA, 4001 bp, Homo sapiens
tgttgagttccatagtgtaaacagtcccatcgtgggtgacttcaagctacttatttgatgttattgatcatggagttgccaagaggtgtgcacaattggctctcctatgccagtacaggctggctctggtacaccactgcttttattttccatttcgttaatttctgctcttaacattatttctgtccttctattttctgtcttattttgctgtcctttttctaacttcttgaaaagggattttcagctcaagacttttcagactcttctaatacacttacttatggctataaatgtccctgtaagtgctgcttcagtttcatcccacaggtgttgctattgttattttatggttcagttcaaaatattttctcaataccattgactctgtctctgtgttattcaggcttgtttttacagttctttattgatttctatcttaaatgcactgtagtaaaaaatgacaattatttcaattttcaaaatttcttgagttgctttataactaagtatgtggttgactgtggtgatgtgtctgctttcaaaaaactgtacattctgattttggtcgtgttgttctgtacatattaattgcgtcatttttacatcatgttattcacgtttcctatatccttaacttttctcttgctagtcttaacgattagtgagaaagtcctgttaaaattacccaatatgaccaggcattttttttctttgtaattctgtcacttcactttgtttcatatgtatttttcattaggtacttataaattttaaatttaaaacacatttcctttttagactcagaagtcatctaagactctttcctttcattccttttatatcccatcagtcatatttaaaagatatctatatgtaaactgacgtcaatagacatgatgtaaaagaagggggtggctctggtaaagctaaagtaactccactatgagagtgcattaactatgggggaaatactttctatattgcagaacacatatttggtggtacgtagcctcacatcgccacccggaaaagtctgcatatattgaatttggaatggatcaaactgcactgagtgcaaaattgtaaattgcatcttatataaatgttttagaactagatgatggagcagatgggatctattaagagaacggggtgccagatgactgaccataaacatgctttttaataaagactctgctgagagattaactcatatattttctaaaatttttatttcttgttcattttgtttctaagatattcactcacatattaaaaataacaacgtctcaaaacatttgaagcaactctcttcatcccttttaaaaataccttgctgtttcgggggttaaaaaaagccacaagggagattaaaacaatacaaatatttattttcccaactcccctgccatgggttctgggacgtcaccgcctctttctggggcccgtttcatccttttcttttaatccaagaagcgatggtgttgtgcgcctgtagtcccagctacctgggaggcaggctgaggtgggaggatcttttgggtccaggattttgaggctgcagtaagccgtgttctcaccactgcactcgagactgggcggaagagcgagacactgtatcaaaaacaaaacaaaacaaaacgagaaggcatcgcggctctgtaacactccgtccagctctcgcactctcagatgcaaacttccacacaaactcctcggctcgccttgtcccgcgggactagcatatcaagccttccgggacacaccgtgcgatgatatatacgtatatacccctcttgcccttgaaggccggaagtcggtcttacagataaaagcgaaacaggaagtcccgcccctctatggaaagtaaatggtagctcggaagggtcaaaagagtccgcggtttcgccgcgtgagttgctttttgcggctggggaggtctacgcttctagagcttgagccagcggggcgaccctgcagtggcaggactcggcaccgcgccctccaccgccggttggtggcctgcgtgacagtttcctcccgtcgacatcgaaaggaagccggacgtgggcgggcagagaggtcggcttgctgatgggtccgggtggggcgcgcgtggactatgggcccgggaggtcccttactgtccccgagccgcgggttcctcttgtgcaaaacggggtggcactccaatcgcctgcttggtgattgtggcccccacacacctgtttctacagcgcttaggttcgaacagtaaccctgtaaactaggcactgctgtccccgctttactggtgggaaacgggctcggagagaataaatgagctgccctaagcgactgggacagaaccacagttctcagccgggctttctgagcccacgctgccgccccagcagggatcaaatcacacagtgtgagataagcctcaagagcgggtggccttatgctgccactgagaactgattgggttcagttgcctcatcaaaatccctaagcatggttttgttttgtttttgtttttttttttttttttagttttaaaggaagaggagattgacggttttcctctttccttatcttctcttcagattacaaagttcattgttaatctcaaatattattttggccaacagcttcatcgcagtaggaatggcagccccatctatgaaggaaagacaggtctgctggggggcccgggatgagtactggaagtgtttagatgagaacttagaggatgcttctcaatgcaagaagttaagaagctctttcgaatcaagttgtccccaacagtgggtaagtcacactttgatgtgtttctcttccctgttaagatacatcgagcttatactgtgagtggtaggctgacatgaagcgctctctgaggcatgtcaattaacagtttctttgaggcgcagagaaaaccttgcctggtaattcagccttatttgacgcacttacatcagctagatctttggagaatgtcaactgacacattaaagagcatcgaaaaacacaacaaacatatgaacagtaaccaaaaaattccagttcatttcactggtagacttttccaggatcttctgaaggggtagtatttaatcttgggcaggagttggcaaaattattgacctagagctactatcagaaataaagcattcccagttgctcacccaaaaatcctgtaagtcatcatatacccaaaatataaagaaaggagtttggtaagcagaagaaagaaaaggttcatatggtggattctgtctccctgacaggcattcaagcgctgtatcccctgtccttagtataaggggggattggaaagaggactattactgaggttagtaagtggccatgtgtgctaagtgcttgacattttcatcttcaccagtacctgttaagataggtgttgttggctgggtgcggtggctcacgcctgtaatcccagcactttgggaggctgaggcgggcagatcacgaggtcaggagttcaagaccagcctggccaacatagtgaaaccccatctctactaaaaatacaaaaaaaaaaaaaaaaaaatagctgggcatggtggcacatgcctctaatcccagctactcaggaggctgaggcaggagaattgcttgaaccaggacctgggaggtggaggttgtagtgagccaagatcacgccactgcattccagcctgggccacagagcgagacgttgttattctctatctccagaggaggcagctgaagctcagagcattgaagtaactcgcttgttattactcagcaagtggcaaaactgtaattttaaggcaggcctaactggctggtgtgggatttgaacttggatttgcctgtgctttttcactgtcttatgctgctgcaaaatataccatgtagttggaaaacagatacttttagagttgaagtggttttaggggttttgccctctcatacctcaaacctttaaaaggctctgaaggaggctacaagaaggctgtgatgcaggg

SEQ ID NO: 1879509 - DNA, 4001 bp, Homo sapiens
tcctgggctcaagtgattctcctgtctcagcctcccgagtagctgggactataggcgcacaccaccacgcctggctaatttttgtatttttagtagagacagggttttgccatgttggccaggctggtcttgaactcctgacctcaagagatccacctggctcggcctcccaaggtgttgggattacaggcatgagtcaccttaagtgctctttttctgcaactaatttgtgtgagatttcagagaggccctttggccagaaatgtactaatttatccacctaggtgttttctcagattccccagggcaacactgacttaggagcggctcctgccaagcagtgatgtgggctgggcctgtcatggctttgggccctctcagtacagctcatcaagcagtcatcaagtctgtattagtgcctgtaacaagaaggaacccaggtagtaactgaggacccagcagtgaaccaggcatgtgtaatttctgcctttacagggcatgcaagttactggagggggttcagacagagaaaagacaacttcagctattcctgggtgctcttaaatactgatacccagaaaggcataaacctaaatgattactcttctcttactacctcaatatttgagggtaaatgaggaggtttattattgttaattatttaatttcagaaatatataatttatttaattaaaatctatttaatacctaaaatgttacatttatgaaatttactaacaccaagtatgccctcactctggtggaggcaggaaactaaactgcttgccaccgtcatgacatcaggttcacaatgtggtgctactctggtttcctaggagacttagccctggcacaggcacacagctggacacatgcaaataatcgctatcctcgccaggtgttcagctgctcttcctacaagcatctctacagtctcaaaaagtatatattcatgcattcaacaactattttatgaacaataagcaaatgctatattggggtgctctttggatcccacctatttccaaatttccaagactgcattctccccattcattgtcctccaacacagctttcgagaccatgaattggggtcttccgctcataggcatgcccagcacagcataaggtagagagcagaacaggagtcatcagagtggactctgaatcaatcacagagacaacagcaataagccacaaatactcaacaagcagggaaaaggggcaagggagtacagttataaagcgcaaaagttctccaaacattttaaacattttcttctcactcttacgattcccactttctgtgtaggaaaacaaagaaaaagaaatgacttgtatgaggcacatcctccagaatgagttgacccagagtctttatggaatgagaagggagagaattcataattaaataaacagcaaacaaacctcaggacaaagttaccccttatcttacctaaactctacagtattgtaatttactcagtcaatcaataagtattttttagcatctactctataccaggtactattctaagctcaagttttatcatggtgctccagttttctccttgtagtatttacattcaataaacacttatttctaaacctactggcgtgcagagctataatctgtaacctatcgtacacttctgaaaaatattaacagaaccttagttggcaagatcaagaactcattaaaaatggggtttagagaataaaaatttaaaatgatactatgtttgagtaattacacatatatatgtaaaaatatatacacaaaccaaatattcaggaagataccaattctgaaacaagctctgtctatattaaagaactcctccgctggaaatgttttctccgtaatctccttcagatatttagtatatatctgtgatatcatgattttctagggcatattctccaacaaatgtcatgttacataagctatgtgttctttcatgtttagaaactagcccttactgtgaagtataacatcttcttgcactcacatcctcccttgttttatttgtgcaaatctcagcaaaatcttgtgtaactgtattagtcagcttcactgcataacaaacaatcccccaaaatctcagttgttacgtcatcaatgtatttcttgctcatgatacacgtaggctatgagtctgctatggctctgtcccatgtgttttctcatcccaggatgcagctgaaggagcagctcctatctggaaaatgcttttctcttggaacagggcagaagagcaagagaccaagtggaaccacatgatcacatttaaagcttctgctcctaagtggcatataccttgtctactcatacgtcattggccaatgaaaatcacatgagcaagcctgatagggacagggaagtacacttacttataaggggtctaaggcagggatatataacccttttaaaggagaaaggacaaataattgcaaacaatgccgtaatctactacagtaaccacttggcaacttcccaaaatattgaggaacttaagggcacatttttttttctggatctacatttctatccattcattgaagggtagaacacaggcagttcctcaatcctggcatgcataacctacaggaaaggaaagtcatcactgtgaaggatattgaactgagcccaacatctgctaaaagatcacagattttgaaattttaaaaaacaaatgctgaacctcattattacaacactagggttaacaaaggattgccatagtttactcagcattatcctggcaacttcatttcactagtgtccaattttgtttttagtttcctgggattcaaaaccaaaagaagggaaaggagtggcaaacattcatggtaacactcgtataatgctctaaaatttatttaaatagcacttccacattcacagtaattgcagaagtgatgaacacagttaagaaggacatgctctccttggggaattagaagtaggagaggcaggataatatttgcttttatatgagaagtaaaattatattgtagggacctaaatcattgcaggtatctgtttatgacatttgttggaaaaaactgggacaggatactgttttccttcctttaataattttaaatcacctcctacatgacaggcgctgtgagatgaatatctcatacttacatatacacgcgcctattatttccacatctctgatttttccctgtacccagggatttacttctagtcataaaagatggcttaccttagatttcctgccataaagctccttccctttatactaagtcttactttctacagttggcttaagagacacattttataatgagaaagctaaaatggagtctttttaaagacatgcccaagacacacataatagcaagatgactacttcattccttaatttgtggtccattgagatgactgattgacatatagatagtcagacagatcagtagatacataaatagctacatggatgaaagacagatgataaagagagagagagatgaaacacagacgatagagagagatgaacagtttctcacccttggtgtacgaagtgaggaagtcaaggtaaaacaatggcaagcactatgcctcggtcatagtacccacttcaaattggagagcatggtcaagtcaaccttctagaaagaaacaagagccgtgtcaactttgtcattcaaataaatgtccactatgaatactgtgccttcttaaagaacttggagctcaacattttgacatttcatatagtagctagcacattatgaccatgtagtagatgttatagtgaattgtgtcccccaaaattcatatgttgaacccctaaccccactaacctcagaatgggactctatttggagacggggtcttaaagaggtaattaagttcaaatgaggtcattgctgtgagccctaatcctatacgactggtgttttttaaggagaggaaattaggatacagatgcactcagggtgaaatccgtgtaaggtgaactggt

SEQ ID NO: 1879510 - DNA, 4001 bp, Homo sapiens
atgcacacatggtagtgcatggtgaatccacatagcatccatgcacacacacagtacccacacacacacgcggtacatacacatggcacccctgcacatacacagtagacatgcgtaacccagaaagtggttcttgctctctctgcaaccttaagactttggcagtttttgttaactcccacacttggcaggattacatttccttgtggcctcaatgacgtgatagggcagatttattgggcttacagaaaaaaagagagaggagagagagcgagagagcgaacagtaaactctgctgtgcagtcaacctggaccttggttttaagttgcacatcatcagggccaagagagaagatttggcaacatggggtggtttggtgagagtcggcatgtttcactggtaatctgctggagcactaaaatatatacatccaaaggttaccttctttcaattcactgaaaaataaaaggagcttcaaggctggaccaaataacacacataaataactcatgcatgcctgcatgcatagatgcaaacatacatacccaagatgtgtagcaaacaaaacaggcacagtgctttcaggagaaacttgggtgtggaagtaagttctacctttttgctctattttcctcctggagggagagaggaaaagcagctgcctaaatgctcagtcagcccacaagctgtcatgcgtgactatctccagggcagacaggagagcaggaacccctttctgaagctgagttctgatgcagaatgttttcagggcttaagacagcccccacacagctagccaacagaactttctgggctgcggtcagttagctatgtcgcacaggaatggcatctgctttcacttatttcagaactcaagcataagtcctgggagtatttgaccaaaagagcctcccgcttggcgtgcgagggttaggtttccagaagatgtagcacgtacctgcgctttcaactcccagaagccaaagctatggaaagatctcagcgtgttttttttttaattttattttaaaatcataccgttttaaaagttctgcttgttataaatccagcctgaaagcagatgaatgaaacatagacccacacaaaaaaaatctacaagaatagatcttttttttttttaacttggggtttttgaggagggattttagaggagtggcggggaagctactcagtcgagataaactccttaaaagcatgggcaaaattcccttttctgtgaccagtttttttaaaaatgacaaagtcacacaagagaggaaatgaaaagggaaatttttagacttctcatctgtgctgaaagccccgggctgtttcagaacccggtcagggtaaccgtcaggcctgcggtcaccgcgctgcaatcccaggaggccttgcgtcagcggccattatatcaataaggaagtacaatcaccaaaccacaagccggcttcttttctaagcccacatgttgctttagagggttttcaaacaagagactttcctgtttttgaaacctgtgaatccacaggtcttacaggttactcaaattatcttatcacttgcagcatgaatttcaaaactgcttactccagccttcccctcccctggaggaacagacgtccatttacaaaccagaatccttatttacagtgtcccgttgccaattgctgacacagaagggggaaaaaataccagttatacattaagctttaaggttaaagtatctgtgccagacgctgtccaaacaccatctattcactgacctgaaggcaggatgaccacaccggagaaaattctacagaaacagttttgcggtcacagcagtattccttcacagagccaggctatgtttcctgcagatgcatacacatgcttgcaaatgtactgtaagaaatcatcacaattcacaggaaacatatttatcctaagatgtgtagcaaatctgttggaaatttttaagcacagccaaaagacatcccaaaccacctatgaggttgcttcccaggttgctggaaaaatcaacgtaggatagcatcggtagaggacgctaccgcggcgcaggtgaaagatgtaaacagtgcaatctaaatcttcaatgggatgcaagtcagacttatttttctcttgagcaaataaaaagattcagattaaagagtgccttatagaactggtacagagttctacatagaactgatatagagttcatctaataagagtgtcttatagatgagataaatccataaacaaacgtctctctttcctgctcagctcagcagcttgagaaagatgtgccacacctaacaactgcatttgacagccatctcctggtttaacttctaccctggccagcggccacttagcgttgccccagcaatgcctgcagacttcatcacgcgctccctcgctggaagcgtccctcctaaggcagacctgaagttcacagagggcttctggacagtagttcacattctgttttcaatggtggcctaatcagactgagaataaacaacaagtgaactttatcctgcagctacaaccagtgaactctaagcccatttcacagaatgcacacagcaataatggatctagcagacacttatctaatctcacactttccgtctttttgggttataatcaacacttagctcatcaacacacacacacacacacacacgcacatcttccaaaaaagaacctgctctcagtttaagcacactgagattttatttatcttattttatttgtctgcattccaataaaccttctaacattgaaatgttgagacagacactctaaagtcaggatgctgtgatgtttatgtttgagggagggttctttcaaagtagccaaaattgtctctcttaggaaatgtgaagtgtgaatgaagccacaccaaaaagtctcagaagtaaatctctcaaagattatgaccagcctgttgtggaataacgcaatatatccttagaggaaaatacaataaagtaagagaattccaggcttcctacacaggcccagtaggtattttttatcttaataactcgttggtaaatggcctactatgtccataggaaaagcatcctcttcttcaactgtgttttaaaaagaataacttcttctttcctcctttggaaaagccattgctccaaaattcacataaaacaaatacagactggttttctgttcctttcactttctgtccctatcactttaggctgtggtaaccaggacttctaggcctaaatatgcttgcctgattttgcctgagtttgctggagaattgctcaaccaccctctcactttggctgtgtagaccatagctcttgccctccctccaggggagaggcattaactaatgaagaaaacagtgactcccctcttctgccaccactgacactccatacccaggcctgtgccaccaggcctgcttccaggactgtgggctgcctgttccctgctatcctgagccttccagctccagtgccaacaagggcactaggtaatgggtacttctgatgaaggacactgcatgagatcttcccatcacttagagaagtgttccatttggggtcattaccaaccctgtctactcagaccagcaaagcatagagaaaaataggatggataggcaagtataaggcatcaccttatatctgtgtcttaaaaagctctttatattacagaatttctttatttggaacaacaaaatactctgaagggaatctcatgaattttagtttggaacgtttatagaggttgtctggaagaatagtttttgttgatttggttttttaatacaaagaaaaataaaagcttttgtagttattcttgaaggtatgacctccaattacaagcatgagagatattgtaagcaagtccttttcttttcttttttttttttttttaagagacaaggtctcaccatgttgcccaggctggtctcaaactcctgtactcaagcaatctgcccacctcagcctcgcaaagtgctgggattata

SEQ ID NO: 1879511 - DNA, 4001 bp, Homo sapiens
gggtaagtcactaaagcctagggttaggatgaggaccaggggccaccacagaagcctctgctttccatctgggaagttgtttcttctccagagacccaagaacacaatcatttttgtttcttccctgtcattcaacttaggcgacacaagtcctcaaggggctgttctgtaagcacaatgaccacaaatatggatagtatgcagtggtcaaattccaatccattatctgttggccttaagcaagtcacataacctccctgggcctcattatcctcaacagaataatggaaataccaatactgaactcgaagggttccagggaggaacaaatgagcctggtgcctagagagccctccatgaatagtgagtgctcaactcattgccttttctgctcctctactctggctttgccctctctccctttgtcttcatcctgcttttcctattccccctctctcttttctccaagcctgttggggccttgtggacattgcttgtctgaaaccagtatgcaaactggtggctcccaaacctactccctaaaaatgcaaagtcaagtcccatcccagaccactgagtgggaatctgttgcaggaggtctccggagcgcgctctgtagacaagctccccaggtgattctgctatatctagttcaggtgtgggcattagagaaccactagaggagacctcagaatcatccaagctggcgacacctcttccccgtcttccccagcatctcccctgaggcagttccagcacccatctccaacatcacctgccatctcccactcctcccatcagtccttctgggctaggcaaggagcctccgggagagctggcagccccgcctaggaaaaagacaaaggaaaaggaaactgccacccactgcttccagcagcctgagtcactgctgggggtggctcatctgtctcactggggagtaggagcccctcccttttcagagtagatccagagatcgagcccatgcatctgtccaaaggagaacatgatttgaaggaagagaaacttcccactgtcactgtcccttagtccatctccctgggtccctgggtggtttttgctcacagatgctgtcgtaggttgccccagaccttgaggcctagggccaatcctactcctagccaggagcattgtaaggagccctggaccagctcagctgtcccttcatcaaggaaggcttgccctgaccttcgacccaggtaaggggtctcctacctcaccctattatcaagccattgtccagttctctgtattgacgattggtcctgccaagtcctcactcctaattgcctgcacaacatttagcttcccccagaatttgctcttgcctttcctccctctctatgcatcaactggccacccctcagccagtataagggcatctattgactaaacaaactccatgaattaagctctgcttgataagcttgtggtgacccatgagactgggaccacaaagggtttgaccaccactttcatgggcatcagaaatctgtgtgaagctccacattcccacttctctgagctggtaatgccaagtaggcacatgtagaacgttctctagcctggtttcctccttccaagaagatgggtggggttccatgtatgacctgagggattctgggagacatctgagaagctggccctggcatcatcagcaccatggtcttcctagatacattactttccatcttgatccttttaaaaattatcacaaattcaccggctaaatcaacacaaattgcttttcctgcagttctagaagccagaagtttgacgtgaggcttacgggctaacaccaaggtgttcacatgactggttttttatggaggctccagagcacagcctgtttcctgactttcctagctcctagaatccacttgtattctttgactcaggacccttttttcattttcgaagccatcagcatggcatcttctctctctgattctgcctctcgtgttgcatggccttcttctcacactgaattctctattctcttgtgttctcttccaggacccattgtgactacacagagcccgctggaataatccaggataatgtcctcatcccaagatccttcatgattctgcagagtcccttttgccataaaagtgacatttgcaggttctgggaattacgacaaggacattttgtgggggagcatattcagcctaccacagcaagtgccatctattgagaagaaaccatataccagccccggtgtgaagtactcctacccacaccaactccttgcatttctcctaaataaccctataaagaaggtcatattctttcctccaatttacacagagaggttaggtaactaatggaaggaagtggtgaagctgggatttgaacccaactggctcttggtgataccaaaactgtgctcttaaaactaaatgaatctacccctccttagtgctcctctccttccaagctgcagacttgcagatttgggcatttcaagttgtctcctaactaccctgcttcctttccagagtggcagggtatggagctacccttccacccaccaggaaagaagtcaccaaaggagactcggcaattttctcacccaaatcctgctgctcctgaggagcccacctggctctccaagccgtgcctctgctcccaggtcagccttctctcatgtggagacaaggcagaccctgggggaggtttctcaaaggggtaggtgggagaggaaatgtcaggagaggagaccagagctctagagcacccagccacctgcagccagggtggagagactgacctcgattgagtctgtcttatctcgggctgtgctaacctcactctcccttgcatcctgggctcacgagctatttccgtctctggatcagatacgagaccatgatttattgattgtaataaacattgcttaacacgggctttggccacacagctcactcaccatttaaataaatcccagccctaggggctgatggagccctctgtaatatggaatgccaggttagaaggaagcctgatgctgggcagggggaggaggggaaacaggagccacgtgggtgaatagatgaactcatttgcagccagagaattaaggatcatctgttccccccaacccatgctcccttattactctatcagttactctttaaggggctcttgccgagatgctgcttgtgggcagaggctgccagaccccagcacaagccacagtgttctccccagtccctttctggcatctcatgggcatttttttttttatttgagagagccacagtctttgtgttatttcatttcctgctctggggaaatgcagctgtctcgggatgaagcatcagctcctttttacactaaaagaatttccaagcaggtcagacagccctcctccacccattgggctttggggggctacactctgcgggaaactggaggcgtgtctgtgtaaggagggatttccctctgtactgatgagaagataggaagcagaacatgggctgcaaggatggggtaacttttttatgtgctcagctccaagcgaagtgctcaggaaacaatggttgatgatattatagtgatggtaatggtgctggcagtcaaggtcatggagggagtagtgaggatgatgaatgggatgaatggaagactccgagagctgacacttgattttgttcactgctgtgtccccagtggctagaagagtacctggcacataatagaggctccatacatatttgccagatgaaggaagaaattaatgatggtgccgatgcaggtggtatgagtggtgtggagaagacatctatgaaatgttgtcacaaggtcggggggatggaggtacccattattgggctgatgtcatggaagagttcagcgtgatgatgatattgggagtagccacgtgggtggctactcagatggcagagaatatatgctctggggttcctcaagggatgagaaaccatcccagctgctgctgggccaggccttgt

SEQ ID NO: 1879512 - DNA, 4001 bp, Homo sapiens
aagtgaatcaaaattgttggggaaatactttttatgtgttccagaccagttttatctaggataaaagtttccaagtctgtcttattcatgccagtgggatcttctgaggacaagagcaccttggacaggtgggggtaggaggtaactaaaactgacaagcagacatggacaatggataaatacatgggtgagtaacaaacatgagtgcataaaggaagttccaggaagaagaaaatccaaagtccacgtgttccaactgctgaactgaggtctagaaatgtaaagtaacttgtctagggttacatagccaatactaggacccagttagcgagttgacagtgccctattccttctctggcagtatcaggtctcacctccccttgcttgcatggccaagtcttcatttctaggaggaaagagaaatgaaccggactgtaaaaaccattcaacatttttttttttgagatggagttttgatctgtcacccaggctggagtgcagtggcatgatctcggctcactgcagcctctgtctccggggttccagcaattctccagtctcagcctcctgggtagctgggattataggcatgcaccaccacatctggctaatttttgtatttttagtagagacggagtttcaccgccctcaggtgatccacctgccttggcctcccaaagtgttgggattacaggcgtgagccaccacatctggccaagaaatatttattgaggcctcatatgtcttaggaactgtgaggtgctgggcatatagcagtggtgaataacacatggaatttaaattcagcaaggataacagacattaaacaaaacaaatggttaccttgataattacttaagtataatggttacatgtgtcatgaaggagttgttcagatttataaaagcataaaacagggaactaacctcatctgaaagaatccatgagagtttgcctgaaccttgtatggaacatgaaagtccatcagggagagttcctggctgagagagcagcatgtgtgaaggctgggagggaagaacgaacctggcacatatcgggaatagagagaccagggcctgttaagccaaacccagggagaggagcgttgcatggactggacttacgggaacagccaaacaattagaaccttacgggtcaatgttaaggcgttcaactattttttctaagtgtaacaggaagccattgaaggaaggacagcaggcaggataacacaactgcctttgtatttttgaaagatcattttggcagagtggtgtttagcttataggggattgggagttgaagaccagttaagaggttcttacgattagtccaagtgagagatgatggtacctggatgaaggtagaaagaatgaaatggagaaaagtaaatggaagatatagaggagatatcaggtggaattgttaagctcacaatattagctctgatcattctaacaattccctgggtctgggacccatgataacatcttagcagtcaacatcatagcacaattaataaatacagttaggtctaccttactctagggtacagcctgctgcctgaggtattaagtgtttcttctttcttttcttttgtttctttcttttttttaaagcccagcatccatccaggtcattttcagctagcaaaactggatttcctgacagatgcttcaaatatgtggctgacagtgcaggtgttgtctcaacttgcctggatctaaaaccagtgataatttgggcctgtagcaaatatatgtaatcctttcccttgctttccagtactctttgcacactgtcactatgtatggactattttacagacttgtattccttctccccaaggtagaacccagaaagtaaatctcacagtctgttttgcagtcagggtgcgcactgtgacggaggctctaccagtcagagctatgctctggaaaggaacaattggaagagggtctccttgcagaagacattttgctggcaggggtggtggctcccttttgcggctggctgaggaggcaaagatgtgttcctggcatgatgtagcaatggtggagcagtcgctgtggcagtagaacttcctcaccaggctagttttgtggtgtggtttttggacatttcccctatatgcttagcctcaagcctggttctgcggcttttccaagagttctataatctacccaataatattttaataaaccctttttctgtttaatcagtcagagtgagcttttgttgtttgtaattaatatcctgagatggtacaaaactaaatgctattaattacacagtattagcctgctctttaaattctactaaagcaacatcatgaaattggagttcttggaagagtgaccaaagaggaagaaataggtctgatcaaagcttttgttcatagttggcttacatatgggttatgccaaacatttgtcaacatataagagaaatgtatgtccctataacatttcaaatagactctttcatagggccttctcatagatgaatttctgagcccatctgctaaaaattaaactataacaaagtaaaaaatgtgaatgcctctgaattactgagtgaatctttcctgccccatcctttatggtgtgaaagaatctgtaaaatttcccgaggagtccatgagcaggtggaagagtggcctaggtggggaagaaccaaggcataaatgattcttgaagccagtgagagacttgagtcttgccacctccaaccccatggaaggaactccctggagcatcactgactcaggacttctagcctctgctctgacacctccagtgacaaggagggaaccgctctgtagttcagagcaaaattctcctaaagtaacagaagtcactgggaagcacatttcagtccaaccaaggaaatagtttctaagtaagttcattaataataaatctggttgcctcccttgtacagagcactctattgtggacagacttcaagcagaggctgaaagaccatcaggaggtattttagagcagatttccattcaatatgtgcttctgatcccatgattccttttcttatctgagatttttttttctgtttgacttccctttagagcctccatcatttccctctatttatttccctctctctgtaggacaacctccatatttatttccctctgtctgtaggacaacttcactctttcttattgtccaaaccacaggctctgaaagagcagccagggagtaatcgaatatcacaagcctgggggttctggaagtgttagccatgttctgtcccaaggccttcactcaaattctcaggtctgtgtcctcatttgaagactgttctttgtggtttctgaatagctgggatttgacttcaatttaagtgaagtaagccctcttggggttgtagaaagaacgtgagataggatgtgaacatgtggatgctagctttactgacattaaccagctgtgctgtctgagtgaagttcctcagtatctccatgactttatttcttcatctctaatattgaagacttgtaagagttccaaagttaattctagaattatattatgtttgtccgcctgtctatttatgcacttaactatcctaattctttaaaaccccaccttgaaaaaagtggtcactgtcagtccaaccatacaatcttcttccggcccagatgaaggctagcccaagccctaatggaactcttctctccttttagggataatcccagtagctgtctcttcttcaacttcctgcttcagaggattaaggtggcataaaaagtaatcttgtacctttgatcccaagcacagtcaaacttttggaaaacaaaagggtttgccccagttttccgttttttgggtgcctcattccagttactaatgtgatgtgtctaactctttttttgtaccggaaactccagttttgcaggtattgagtgactagcaaggtttccatctcctgaggaagggtagcctgggagaaagaggacacagaagccctttcccaca

SEQ ID NO: 1879513 - DNA, 4001 bp, Homo sapiens
ctgtctctactgccacgagtacttcaaggactgcccctcagagcccccctgctcccagtagcctctgctccagggggtgcgctggctgtcgggggctgggcatgtctcccacaccccctcctaccctctctcctgtacccctttcaatctggacttgcccaggtcttctgcgatcagttaacccattttacctaggaggcccagagatgtgagggctccttcctcaggatgcccagcgaatgaggggtagagccactctggggcccagcctgcctgccgcacccctgtggcctcccttgtggatgggaggaggcgggatctgctctgaggccctcgaggctcagcagagcgtgcaccaatgagaccacgatgggaaagggcctatttaactcctaataaaaaactggcatcagcttggttttgtttggttcttctctgaggacgcgtctcctgagctctttgctcctctctggccttttccactgcgggaaggcagctgagggcaggggcagggtgctccctgagggaagttgcagaccctgcagaaatgcagtggcctccagggtccagcaggagggcgtggggacaaaacaaggacccctgtcctcccttcctctctctctttctttgggatctttgagagaggactgcctgagtttcccctgggactcagtgctcatggttggaggagggtggggccgtgggtgcagtgggggtgtttgttccctgcctcgggctgtgggagcccagagagcagcactaatgggattagggtgtctgaggtgtttctcccagccaggaaggggtgctctgtatggaggggtaagggaataacttgagctagcccctatccctgaagccgcagccccctgagggccttaaccccctacttctaaccctcactgggtttgtagcccaccctgagaggttgacccgaattataactcccctatttcatgccatttcacctctaactctccaccccaacctggattcttcattcctgacactcatcccaactttaaatggcccctcctgataccctctccgaacctgagatctatccgtgagcccccacgcctcactgccactccactccatcactacctcacccaggacctttcccactgacgttcctgaggtggtcccagagcctcctttgggtgtgagcctgttcccctccagatccccccgccccgaccctgagccttacttggcatggcagacagtaccgggcatggggatccccaccccagtttttgtttctgaatctttatttttttaagagacaaggtcctctgtgttgctcaggctggagagcagtggcttgagcatagccaactgcagtctcgaactcctgggctcaaatgatcctcctgtctcagcttcctgactagctgggactacaggctacagccatgctgcccagctaattaaaaaaaaaaattgtttttcctttttatagagacagaagtctctctatgttgcctaggctggtcttgaactcctggcctcaggcgatcctcccatctcccccctagcttttgtgtcaccacatttccagggcaatctcccacctgtcacccaccaccccctgcatctcctttcctaggtccccatgggactactccctgtcccccatgctccaggcacaggctgccccttcctccacctctctaaaactcaggctgagctatgtacactgggtggtgcccatctcatccagtcccctgctagtaaccgctagggcttacccgttacccacgggtgcccacctgggaacaggaggcttggttccacggctgggctggtggagggtgctgtggcacttaccgcatcagcccacagcaggaaggcagtatccgctctcccctgtcccctgctatgggcagggcctggctggggtataaataggtcagacctctgggccgtccccattcttcccctctctacaaccctctctcctcagcgcttcttctttcttggtttggtgagttgtgttggcctgactggcatgcaaggggtgtcagaggccagggctggggaaggagaaggggaggctggtgggggccagatgtgctaaagagatccagatgtgagattctgatgtggaactctgggtggattgtgtgcgtgggtgtgcatggcacacacacacatgcacgtaagacggaggaaaaaacaaacagaaaagtgagcaagtgactgaatttgagctctccaggtgcttctgagatgtgggcttgcacacgctgttgctatagtacgtgttggtatgtatgtgcctgtgggtatctgcactggctcatgtttgctgggttgcgcactcgggagcaggaagcaaaggaaaggcagaaggcaactgtgggcctttgtctggtggtgtgccccatgagcctctgccctgcacgcagcagcccagctcgagaaggtgcatggcctctgcagcttctcttccaacccttgcctctgccacctcactttgcccctccccatgctgagagctaagcggctgtgctggttttttccactgcaggcccctgggcaggcctccagcagccacacccagttctgggagggaaaagaatggcaagggcggggcctttgtggctgagctgtgggagtggatagactgagtgaggggtggaaaaaatgctgttgttgaggcaaggcctgggaggccctgggagtttgctgcccgaatctccagagcttgcgcagcggatcttgcaaatgttcactgcccagagcatgtgttccccactgtgcacaccctcccagccaggtgcgggggcccactgctctgggctcccccagggagggagcagagtctcgccaagtgctcctggagggatgggagtggagcctggcattctgaacacatctctgaggggtgggattaataagacggtctctgtgcctcctgctcccagatcctgactgctgtcatggcgtgccctctggagaaggccctggatgtgatggtgtccaccttccacaagtactcgggcaaagagggtgacaagttcaagctcaacaagtcagaactaaaggagctgctgacccgggagctgcccagcttcttgggggtgagtgggtagtgcctgagtgagtccccacgtggggcatttcccacagaggagggcagcagtcttgctctagagcattagctacagagggcatctatcagtggggtggctgcctggggtggaaacacattgaacaccaccactcactgcctggccccatgctgaaagagggctgagaatgaatgggtcagacactgccaggtgctttgcacaacttaactgaagggaagactaagctcagagtgctaagtaacttcccaaggtggtcagtgtacacaactgccatccggaccgggactgtctgactcttgccatcactccaacagtggacactgtttgagtttctatttggcttgtagatgtgaagacacagatgtggagatgatcacaggcctgcagacgttcccttcaaacaataacaatgtatatttgtatcaaacataacacagtttatatattgttttcatgactattactacctcatgggattattagaacaaccttgggtgaaaatgtagtggtcccgtcatttttccattgcaccaggtactcagacttccttatccaaggagcaccttctccaccctagcttagccttgagggttggagttccaaactggacctcccaaaggagcctccctgaactctggtctgggagtagaaactgggtctggtcctggctccacccactgggcttctgttttctatctgtagcctcttctccctccagaaaaggacagatgaagctgctttccagaagctgatgagcaacttggacagcaacagggacaacgaggtggacttccaagagtactgtgtcttcctgtcctgcatcgccatgatgtgtaacgaattctttgaaggcttcccagataagcagcccaggaagaaatgaaaactcctctgatgtgg

SEQ ID NO: 1879514 - DNA, 4001 bp, Homo sapiens
ggcatccttgccccaacccctgctgttttctgaagcattcctaaggaaccttagagtgtgggagagagaaatagcaggaagtccttaacctagtccaacccttttattttacagttagggaaacctaagctgagagaggagatggaaacctggttgtaggagtgagtggggaagggttcacggtcattctggtaggtaggggtagggccagagcaaggagtcctggtttgtgaaccaccagctggccgtctaggagtttacagaccagcagtggcaatgttgacaaagggcatatcttcctttccccaagaacattggctctggagcaataacccagcaatgggggctttggggtgtccctcttaatccggtagctcagcccattcggatatgccagctggaaagagagagggagaagtcaactgagtacctctctctaacagctcaatccctccccttcagggttaagatcggggctgcagtggttagcatctctgcttcctctagccggctgtgtcattgaacctgtgtgatcagacgcaaaccagatcagtatgacttcaaagcttcatctttgagatggagtcttgctccctcgtccgggctggagtgcaatggcgcaatctcggctcactgcaacctccgcctcccgggttcaagcaattctcctgtctcagtctcccgagcagctgggactataggcgcctgccagcacgcccggctaatttttgtatttttagtaaagactgagtttcaccttgttggtcaagctggtctcgaactcgtgacctcaggtgatccacacgcctctgcctcctaaagtgctgggattacaggcgtgagccaccgcgcacggctaaagcttcagttcttaaccatcaggcgacagtgcgtagtctggtagcaactggaaaagtcctgctgagatttagcctcccatacacacagagtcccaccccggacaggctgtatcaaccccccacggccatatgcccactgctgtttgcgtacaatgaggcgggacctatagactgtatccactgactcatctggagtgattccgcggggcgccaatacaaggaccactgtctccaaacagcagccagccacccctctctcttggtttccttcctttgagtggtgcaaaggcttaagggtgtaacctcagaatggggccctgaatcagctgtgggcgagctcctagagtatcttaattcctgcttcatctctttccattttgcagttgggcaaactgcggctcagaaagataaagaacttctccggagcgaaaaagctgctaagaatgtatccaaaactccgcacggtaaggactgaggacggtcaaaagaccaccaagagttaaaaccatgaagctgcgtagtaccgcggaggctagagagacccggcccaccccttccaacctatgcccctcctcttaacttccgggcggggcatgacttccggttcccgcgcggcgctccaaagctcggggagtggtggtctccctttcctggagtcatttgtgggagttagggtcttatcctgatctttcctcgtcccccgctcccccgtcctccgaggtggcagctgcgtaggtgaacgttccccctgtccccttccttctccttcctaacccgagtacgcttgctcgcggccacagtggctgcctgccccaggagcggggagtccctgcctttggggtagggaaatgactgaaatgtgggacctgcgggctcctcgggctgacttggacctcactgcagctctggaggtggacctcgtcctgggaccctagaagcccatttccgcactcgggctaggccttcggagccgcggcagcatagtgggaggagtcgggctcagctcccccccaccacaaccgggattatttttatcggttgagtcatcgcactacctttcatccttgtggctttgggcaagtccccgccctccgagcctcactttgcttatctgtgaatggaaataacagtgcctaccccatgggctatcgggaggatcagttgtgagggaatgcagtgtggggtgtctggccggcagaattccacaaatggtagcagcggttgatgtcactggaggttcctggggcagtaatttatcaagagtttatgatcctgaactaaggatcatacggaggaggatctgtgtataacgttcggcacaatgttagataggaagtaagggcgcagtgcactggagttattttttcttttttttttttttgagacggagtctcgctctgtcgcccaggccggagttgcagtgccgcgttgtcgcctcactgcaaccttctctgccacatgggttcaagcgattctcctgcctcagccactcgagtaactgggattacagtcgcacatcaccacgcctggctaatgttttgcatttttaatagagacggtttcaccatgttggccagcctggtcttgaactcctgatctcaggtgatccacccgcctcggccttccaaagtgctagaagtataggcatgagccactgtgcctggcctggagttattttttctcactgggtttttgagcaaagaaaaggagttattaactggtgaggataaatttgtgtttggtaagtcgtcttctgaagctgacaggatttataagccgggtaaattgtggtgctggttcatctttgagagccagccttaagaattggcccactgactgctgggcgtggtggctcacatctgtaatcccagcactttgggaggccgaagcgggtggatcacccgaagtcaggagttcgagaccagcctggtcaacatggtgaaaccccatctctactaaaaacataaaaattagccaggtatggtggtgggcacctgtaatcccagttactcgggaggctgaggcagagaattgcttgaacccagaaggaggaaaggttgcagtgaaccgagatcacactactgcactccagcctgagcgacagagtgagacttgtctcaaaaaaaaaaaaaaggaaagaaaaaggcccactgacagtctgttcctagaaacctgggttgtaaagacgttgggtgctgggagctagaagaagtaataaaagggtgttttcctaagtgggttaggggttttcactcagaaaggtttttgggcaggaggggaaagcctgagaagttttcttcctcttgagttgttataaaagtaatacatgtgtgtagttagaaaacaatgcagaaagatgtaaaatgaaaagtgtttcccccttctactgtttctgcccttcagaagtaaatacaattaatttctttgataactttctatctattatttggatatatcaggttttatttatttgtatctgtatttatgtatttttaatttcctcagatcgggggtcatactacacatcgatcgggaccttagtcatgttgtgatatggacagctttcttaccagtactcataagcctgcttcattttttacgtggcggcaccactgagtggttgacggtacttcagtcatttccctgttgatggtcacttaggttgttcccaagattttgctttcccacagtgtttcacccaacctttcttggacgaaatattttagtccaactcaccctaagtgattctgcttttccctattcaccaccctaggttagtaacagcttactttgggggatgagcacaccttattaactgagcaaaaaccaagataatgtgagaagaattggtgtactcccaagaatatccaaggtgctgggtctagaatcaattaaagtctcctaagaaatgggtcagggaacctttagagaagggatgactaggtgctgggtgcacggcagctagtcagcgttagtgattgttggcttctgtcaattgttgctcaggaaacagatttgagagattctctgaggtgggaaggattttaaatgtcagctctcctgctatgtattatatgtctggaagggattagttctttgagggaagagagtattaaagaaaacaatgggccgggcacggtg

SEQ ID NO: 1879515 - DNA, 4001 bp, Homo sapiens
aacttagggtttcctacacttatttcaaagcccttcattatctatatggaaagggggagtctttaaacacaaatatttagatcatattgactgagatttagatataaatgaatgctaataattacttttcgttattttggggtgttaaacatttactgtacaagattgtattcgttttaagtatcttctaacatgagccattttgtaatgattcagttgtttatattcaatttcaagtagaatgctgatcacagcgccaaatgggtatcttctacagaaaaagttattttaataaagaaaaatatagtcagttttaggatttcctgagagattatagaaacaataaaagcattaaaactgttaagtcattaaatacgagtaccttgtattttgaaggctcttaaaatttagtttataaattgcttttacataacatatgcactgaaataccacttaagattagttttgaaaataggtgttcgtttcaaccacatcattaggtattttattcaaagctctttataaaaagagctttactatgttccagtatagtaaacttatccagaaaataagacaaaaatttaacttcatgctatagctgcaaagttttcggaaagcgggatttaaaacttccattgtaactttaactagcggtcatgtcaaatttcacaactaagaacattttaacgcatgtaatactgagcacaacatgggcacgtttttgttgctatgagaaccttctattttgtattagacattgcagccttgacgacgcaatgtttgtgctattttgcgcatgttttcctgcagctattcctctcctctagcaatagtcgaatggctctggtttcctcttgcgcccggcccagtttttccgttttagcttcggttgtcataggctgtgctgtcgctttctctgggaaaggacggtgaagactggacgggagaaaccgggagggcaggcgcggccgttctgcagcagccgggccgcttcccggcgggaggcgggctgcgaatgggaagcgggaggaggaggccgggccgcgggctggttctatcacccccttgggagcccagctcttcacctagctctccggcgcttttcaaaatctgcagttaacaacaaaaatcgagcaacgccacgtcgcacaaacaggacaggagggggcgaggggtgtgtgcgcgcgcgtgctgtccccaaatggatgagaaataagggaaaggaggggttggggaccgtgtgatgaagcaacatgctaggcccgggacaagtccggctccggcctcgggtctggagggacaaggccgggggccgggtggcagacggggcctctggtcttcccccagcgcgagggtcgtggcgcgaaacggggacagggcgcgcgctcggagcctcctccccgccccgccccgcccaagggtcttcctcccccgggattcagagcggcccctcctccaggccaggctcgccgcggggcgctgagcaggccgggacaccgcggccgaggttatcgttaggcatctcccaggcgaccggctccgcagcaagatggcggacgagaaggacagggaaggtaaggtaggggagccggggagccgctgccctcgccgcccgccgcgaccccgggctgcacggggaagcgccgggtggggtgggccctcgtccatctggagttcccacccgcagggaaagggcggcctgaggagggggccacccggcagcagcagtcgccctgcccccgtccccgtagcccgcccggcccgccgctccgccccgccccgccccgcctctctcccccgccccgccccgcctctctcccctcttccctccctcttctctctcccctcctcccgccttcttctttctcctcccgccctcttcaccctcttcccctcctcccgccccgtcctccttccccctccctcggaggccgggccttgcatcctgcgcgggctgcgccggaggcgccggcagggggtgctgataatggcgtcgttgttcacggtcgcggggaagccgccgccgcctccacactctcgcctggggtctcggtgccgcaggcgccacgcccgtagctgtccaggctgtgggccccggggggtggcctgggtgaggaggagttctggccgcctgaatctgacgggatcctctgtttgcgccgaaaccccgcgctggcgcagcctgatggcgttcgcggccaccattttgcctccttaatgaggacgcaggaggacggtctggaggtcacagccgctgcctccgagcttcccggtcctccgaaatgcctgccccgccgccggctagcgccgcgcaattggcctagtgtcttgtcttaaaaaaaaaaaaagacacacacccaaacagcaattttaataacgacgaaaaaccaaaacctggttgagatcttggaaccgctgtgcgccggccgggcctctcccaggggaccacccagccccgcgcggtggccgcctgcagaggcgggactgcgcttcgaggcttaaggtcgccagttcggaggcatcgatgtgttgtctgtgcggagaagccaaaaagtgattacgtttatttgcaagaccgttcatgttgttttcagttcatggtatgattaaaacccgatcctttgttaccatgcccttaggtactaaaaaataattgtgtttgatagttggcagtcacccaaaaatatccaaaaagccatgaaacagtaaaggtaaacaagtaggaagtgaaaataatattcgtcctttgttttctttctggagtgctcaaaacaccctctcaaaccatttttctcagcatagaaccaagtgtggtcaggttaacagctaatatttacaagggaagaaacgaaccctgagatatttagtcacttgttccggtgatcacagaaaatcggcgaagaaacacatgaaactgccaacgatctctctattgataacaaggataccgtgatttttatgtaatattaatctgagaagccaggattattttgtaggtattagctttacgaagatgcccttacatacaaagaaaaggataattttaaaactttcccagaaaaatggatggcttatttttgttctttaccaaaaaaaaaaaaaaaaaagccattaggagataaactagcaaggtaattatggatatttattttcttaaaaaagacttggttaggtcagcatgagaaaaaacgcactggagtatggtacaaatacagtatttctcgttttttaaaaactgagagctttcctgatttttcagcttttgaacaatttttttccatttaaagtaaattcagagaaacaattttgtcgataactcatagaagtaatgactgttaaaagctggatgccattcattcagaatacatatattcaatgccattatgtagataaggcattctacttagaactttgaaagatacgaaaatgaaagacattgtctttgcttccaaggaaggtgagatgagtaagggagatgagaaatttacaaatgggaggaaatagttaactgggctgagtagtctgggtgccaaccactgtgctaggtgtgtatccttgtagtccgtggacagcagcctggacatcactggctgccaccgacctaataatgaatcagtcttcattttaacatgtttgtaggtgatttgtatgtacattaactttcgagaaggccgggcgcggtggctcacgcctgcaatcccagcactttgggaggctgaggcgggcggatcacgaggtcaagagatcgagaccatcctggccaacatggtgaaccccgtctctactaaaaatacaaaaattagctgggcgtggtggcacgccctgtagtcccagctactcaggaggctgagacaggagaattgcttgaaccggggaggcggaggctgcagtgagccaagatcacaccactgcactccagcctggcgacagagtaagactccgtctcaaaaaaaaaaaaaaacaaaaacaaaaaacaaagttcgagaagcactcatgtgctg

SEQ ID NO: 1879516 - DNA, 4001 bp, Homo sapiens
gcaggctttagcaactgcctcctaatccttcctacagctgtaattttgctcttcatgttatttcactcatctcacttatagtgaatttggaaaattaaaaataagtaaaaactatttgaatattttatagatttttttttgctcttgagacggagtctcgcttggttgcctaggctggagtggtgcaaaggtgcgatctcggctcactgcaacctccgcctcccgggttcaagcgattctcctgcctcagcctcctgagtagctgggatgataggtgcttgccaccacgcccagctaaattttgtatttttagtagagacagcatttcaccatgttggtcaggctggtcccgaactcctgacctcaggtgatccacccgcctcggcctcccaaagtgctgggcttacaggcatgagccactgcgcccagcctattttatagattattttcaataaataagtcaaaaaccaaattgtttgacttttcatagtaacactggatttcgaattaaaataacttagtaatattttaaattaaaaacgtattcttttgttcaatctctttagcagttaattatgaacctactgaactgctggaacgtctgttattttggaaataaaggagttttttttttcttcaagccaattggccatatcagagataactgcatttaaataagccttcatcttcccaattatgtgctcctaattactcggggtcactgaaatcccatggcatcttctgaaaagcattttccctgcagtccatcttgttaggtttcctttctgttccgggaagccagtatcttttcctttatcagattccttttttaccaacagcgggaatggtaatggtgaatggatgcagggttttaaaatcagccaactttgttctgacttccgtaggtcagtgactggagtcactgcctaacaacctaaattcccagatttatctcatgaaatgtgatttctcatacaaacaaaagttgtgagaactccatgagcaagaccagctgcttgtggggactgccaaattttaaactgttatttgaacagcaaaaagaccaggcaaacatccgagagacagacctaactgcagataagtcttgtaatcttgttcactatagtcaaaacagaatggattgcttattctgttaccctattggtattgctcacattttaaaatttaggtgctgggctcaagaatgataattttattattaagcttcaagagtcacattgtattgtatgcattgaatatcacgaaatcgaaaacactgaaaagctagcgtttacattcttggatcatacccccaaaggccaaggattcccactggccgcttgcagcagggctgtctcctgtgaaggcaagagacaaacgaggagcgttatgacactttgctcccaggactttggcgcacagttcccatgagtccaggtccgtccagtcaacatcctgaagccaggactggcaggtcctgaccctccctttttgcacccgtaaggggaagggcccgggaatctggaccttgtctagagtcccggcgccagtaccagttcggagggcatcctggaggttgttactaacccgagcctcttccaggcttcccaggcaccagggttgctaacagctccacgggggcgaataattttgtttattttgttaactgtggttatctccaacactcagttcagacctgagccgggcaaagtctcaccttgtctcctggtcacttccctgcttgtttgtttcttcctaactcccaagtgtctttcgcccagttcatccccacctcagcagcccaaggctcggcggggacggtcggggttcgaagcctgcagctaaacttagagggttcaggctttgctgggaggcctccctgtgctcagaagagccgggggtaagctgggcggtcgccttgggtgcagacagaggcgcagggcctcggcctccaagaaaattcccaaaccgagaggctgagcttcgcgtctgtagttactgagcaggagcttctgggcggaacttctaagggccccgcccgccccgtctgccctgaccctcgcccggactcgcctcgcccacgtcccgtttcgcttcgccccagctccgtctcgccccgcccccgtcccgcccggttgcggaggcgcggggcgcccccgggtggccgcgggcagtgctgctcctggccggtggaggcggcggctgcggcagcggaaggggaagcgctgaggcggtggggcccacagccatggcggagcctgtgcaggaggagctctcggtcctggccgcgattttctgcaggccccacgagtgggaggtgctgagccgctcaggtgactacccgcgcgcgggagggacagggcgccctcaggggccacccgcgttcgctttgcgtctcctccccaccacggagcctgggcaccccgcctgggcccacgtatggggaccgggttagttgaatgatggaatgacacgcccggaggccggagtggtgtcgcagcgggcgggagtgtgaggcgaccccagaaacactaagagagcggcgcggcccactggggcctctgccgccggtcccgctcccggagccgggggcccctgcgtgcgcacccccaggccctcccccagcctcccacccctcagatctcaccctataaagaagcctgtgctgacgccccctcgttgttctgtgtccttcctaagcactatgccctaggcccccccgagagcactccccggttctaactctacacgggtatttgtaggtcttaagttgcaggagggcagggtctgtttggtaatgactccaggcacctggtaggtagtaggtaaatgtttgttgactgaactttttcatttatccagtgctcaacctcaactttatctgcattctatttccaagttgattgcttttctgatacttttttttttttaggtggagtctctcttgttgccctggctggagtgcagtggatccatctggactcactgcagcctccgcctcccgagtagctgggatcacaggcgcgtgccaccatgcctggctgaattttatttattttattttatttattttttattttttaagacggagtcttgctttgtcgcctaggctggagtgcagtggcgcgatctcgggtcactgcaacctccgcctcccgggttcacgccattctcctgcctcagcctcccgagtagctgggactacaggcgcccaccaccacgcccggctaattttttgtatttttttttttagtagagacagggtttcaccgtgttagccaggatggtctcgatctccggacctcgtggtccgcccgcctcggcctccgaaagtgctgggattacaggcgtgagccactgcgcccggcctttttttttttttttttttttttttgagacagagtcttgttctgtcccccaggctggagtgcagtggcgcgatctcggctcactgcaagctccacctcctgggttcacaccattctcctgcctcagcctcccgagtagctggcactacaggcgcctgccaccatgactggctaattttttgtatttttagtagagacggggtttcaccatgttggccaggctggtctcaatctcctgacctcgtgatccgcgcgtctcggcctcccaaggtgctgggattacaggcgtgagccacaggtgcctggccttctgatacttttttttaaacaagctcttgagggctttattagtcatttagcccacatttattgaatccctgctgcctacagactttgtcagggtttcagagacaccgctacccatggcctctaggagcttacagtgtagagaggttcttttgactattttttgatgataggtgaaacttactgtccctgtatgtggcttctattgaataaaaaaaaaagaaaaaacactgccatgtatgagaaagtgactcagttttcacttagctttcagatacattatgtacatgtttggggcatgagatttatcgttctaatgttatattg

SEQ ID NO: 1879517 - DNA, 4001 bp, Homo sapiens
gcctaatttttgtatttttagtagagacacagtttcaccatgttggccaggctggtcttaaactcctgacctcaaatgatccacccgcctcggcctcccaaagtggtgggattacaggcgtgagccaccatgcctggccagtctcgcactacttctaccataccatgtactgctctcatgatctaaactcaatgaccagtgttttatttgggaatttattatttttaaaacgttttaatgtttaggtcaaggtaaatttttctaaatcagaagagcaggggctaaccagggtctttctcccacatgcagacaaggagctgaataagtgattcaaagggaagggaagcacagattaatccagtctctgccaccccaaaggtttttaagatccagaggctgcccaggtggtgccttcctaaagctaagttggagggggttgctgcctcttgatattttcagtcaatatcctggataggctgagcgtggtggctcacacctataatcccagcactttgggaggccaaggtgggcagataacctgaggtcaggagttccagaccagcctggccaacgtggtgaaaccccgtctatactaaaaatacaaaaattagccgggtgtggtggcgcatgcctgtaatcccagctactcaggaggccaaggcaggagaatcacttgaacctgggaggcaggttgcagtgagccaagatcgcaccactgcactccactccagcctgggagagagagtgagactccatctccaaaaaaaaaaaaaaatcctggttagagcaggagttaaagcaactgtgtttgggaggaacactagttttgggggtccaggtaggattctgctccgacctgacaggtcactcctgtgaaccttagttgttgtgaaccttagttgtcttgtgtaaaagaagacacagctagatcaggaatggcaagaaagtttcctctacatttgattggtcaaggctgcccagagcactgtcttgaaggatcctgaggctcatgataactggtcctcctccagaggaacctaagactctaaaattcaggttccagaattactggattggccactaacttgctatatgacttggaagtcactcgattacaaaagtcccctcgtggtttaagatgctgcagctgagatgtggtcttgcaacatcaacctcattgagaaagggacctttctcatgaacctccccgacttgatgttacaggaccgatttttctcagataatcattgtgattcacatgggaagaaaaagcaagtgtgtgtctataaaaatgctcttaaatccaggcttatcatttctaccctattctaattccaaactccggacatttaagtggcaggatagggtaatggttaaggaaaactctggagtcagactgcctggatttgaattccagctttgccactttctagctgagtgagctgagcaaattacttaaactgtgcctcagtattctcatctataaaatggggatgattgtacagcaacccttacagggtgttgtagggcttaaatgtgttcgtacatggaaagcacttagaacagtgacagtagttgtgggtggtggtctggcagccctaagctgtggtggaaatgtgcatttaaccaggagtcaggacactaggcttccaacactgcccattggccgtgagaccttaagcaagtcaccttccctcttaggtatcaggttccctgtctggacagtggtggtgatggatgccctggctcacactgctttgtaaactggaaagtgggtggtgaaaggtggtacttaatgagcctaggtcaatggacgagggtcctgggcgggccctcccctccctgagctgtgactgggtccctttcttcttcagcccccaaatcccccggggagaagactcggtatgacacttcgctggggctgctcaccaagaagttcatttacctcctgagcgagtcagaggatggggtcctggacctgaactgggccgctgaggtgctggacgtgcagaagcggcgcatctatgacatcaccaacgtgctggaaggcatccagctcatccgcaagaaggccaagaacaacatccagtgggtgtgagtgcctgggcggccagtggtaccctccaatgggtacttgtgctgtgggcggagccagaggcaatagccagtgggtgtgagtggcaggggcggggctgagagcaacatccaatgggcacaagggctgaggcggaccaagagcaacatccaataggcttattgctgggggtagagccaatgtatggtgaggaagagcgccgtgtacctgctgaagtaatcggagaacgtgatgcggggcagagtggagaatgacatctgggaggtgtaaaggccaaagggaacctcagattcttcctcttgagtcagagatcccaatatccacttcttctagcttagggcagtcccctgggagctaagtagggggatcccggactccttccagatctgagataggagtactccagcctcctctctccatttctacagggtttaaagagctgacctatagcccttggcataaatcctaagagaaaccaggcaggggagggagtcaggactgaggctactccagttggaggaggctggggcatagggatgaacagagtcgagagcccctcagaaatggggttcaggtcttgacttgttttttctcccaagcccaacccccaaacctctggttccaatccctggtagctccctgagagacaggcatgaccactgatttccacaacccagggaagcaccctcatagactattttttgaatgaccttgttctggagtttcacccacagactgacactggggggctgctctgttcccagaggcaggggaatgtttgaagaccccaccagacctgggaagcagcaacagctggggcaggagctgaaggagctgatgaacacggagcaggccttggaccagctcatccagagctgctctctgagcttcaagcacctgactgaggacaaggccaacaagagatatcctccttggttgggggaaggtgtcagggagcaggaacctgttgcatgtttatatctatcctgagttgattcagtaacttaccctaagggtctggcatctgtttcttccttcctgggtggcttttcttctcaagtctatttttaaaattatttatttattttttttagagacaaggactcattccgtcatccaggctgtagtacaatggcatgatcatagctcgctatagcctcgccctcctgggttcaagtgatcctcccaccgcagcctcctgaatagctggaactacagtcatgtgccaccatgcctggctaattctttattttttgtatagacagggtctcgctttgttgcccaggctggtctctaactcttggcttcagtcgatcctcctgcctcagtctcccaaagtgctgagattacaggcatgagtcactgtgcctggcctcaagtttattaaaggtattttttcattattgaaaataagccaagtaaatttctttaaatctggaaaacggagaaaaagaatgatgagctgccaccttaacatagccattgttcttgaactgcacacagaatgtgttttatttcaatatagttgtaatgtagttgtgtgcctgctgaacatagcttttttttttttttttttttttttttttttttttgagacagagtctcactcttgcccaggatggagtgcagtggcacaatctcggctcgctgcaacctccacctcctgggttctagtgactctcctgcctcagcctcctaagtagctgggattacaggtgcccgccaccatgcctggctaattttttttttttttttttgagatggagtcttactattgctgcccaggctggagtgcagtgccatgatcttggctcactgcaacctctgccccctgggttcaagcgattctcctgcctcagccttccaagtagctgagattacaggcgcctgccaccacacccggcta

SEQ ID NO: 1879518 - DNA, 4001 bp, Homo sapiens
ttgccagagctccatgaagtaccctccccaggaaaagaacaaagaagatgggagatgggggtctgattctggccccatttctgatggctgatttgcaatttctactcttgttagcaattggaaaacccatctaagaagttatcgtctctttgcataggtctgcttgtgtgcatctcttcatttcaatggctacgtcacgaatacctgcaagaaactgtaagtgagacttccactctcctcctccttccttatactctgcattttactcatacagactgggctggagtaggatataagtcaagtcacactctggtgtgatccatctgacagggctctctgcagcagaggcaatgagctagaaatgtgtcctccaaagatgggacttccaaattcctaaatcttctcaaaatctatgtcaatcacatattggcatattttctaaactttatatgaacttttttccaacttacattaccacttgagatagcatatgcttttatagaccctttatgccaatggtagtaagaagtcctaatgactttgttaggggtatcctgtatgctactgatactcaggggagggggtatgtctgtgtttcagttatgtagactctttgtaaatttaggaacataaatctaatctcttattcttggtctgagttatcatttaagaactagcaatagccataaaaaagctacgactgtgattgtgttccctgcctttcaaagcaccttcagacatattctttcacatggcacatattctacgctctcgatgatttcatcttacttcttctgcagtgtcaatagcaatcgagtgattgctattttaaagcaaatacatctcttttattatgcaaattacagaaagtagaaacataagaatccaagagaccaaccaacatggttagccttctaattacctcacttagatgaacttcaggaaggtggagctccccagcgtcagcaggaggaagtgagcaggtaaagaggaattatggaaacaacccaaccctcacggaactcagcccactgcatttcgtgctattccacactatcactcctaaatcatttctcatttaaatgtcttcaattaatttagaattttgtattgtattttcttaaagcaagcatagtaaaatataatttgcaatctttttgaagaaagtttaagcttggtcattgcctctctccagagctcttattttgaaaatttcaacaacaacaacagaggaaaaaagcacacattgcccccgtggttttttgttttttgtttttttgagatggagttttgctcttgttgcccaggctggagtgcagtggagcaatctcggctcaccacaacctccgcctcctgggttcaagtgattctcctgcctcagtctcccgagtagctgggattacaggcatgtgccaccactccggccaattttgtatttttagtagggacggggtttctccatgttggtcaggctggtcttgaactcccgacctcaagtgatctgcccgcctcagcctcccaaagtgctgggattacaggcatgagctaccgcgcccggccatgttttttttttttttttttttttaaacctaaccaaaatttgcagaagatgaagattcctccaatatgctgaaccaacttcctcaaagctagtagagagcctgtcaatgaatacatgtatcaattcaaaaataagtgaatgtgaaagccagttggacatatttacagagtcagaccactgctgtgtcctcatttctaagagatttggacaaaagctgatttctcctcaaccctacccttggaacacataccccataagcttgtgagagaataccagtacatcctagaaaagtacctgtgtttatgatgccagagaattcaatacactttattttatctgctgcacaccatttgagttctgtatcgcatttccttccttgcactgcaaagcatgttgggcacttaaaaccactggagctgaattcatcaacatcttcctcctctagatcactcatcttaatctcccaggagactgttaaaaaaagatagaagactggctagttatttgccattgacaagcaaatgtactcattctcatagaacagccgctagaactagatccacccaccccattcacccttccctaatcctcacccctgccttcctcatgtgacactttcaaacgcatccaataacactagagttactataaaaatccctgccattatggagctcattttcagatggaggaagcagaaaaaaacaaagaagaaaaaaatatgatatgtcagatgatgataaatactacggagagagacaaaacaggacaggatgtgcagggtagggataattcacggggttggtcaggaaaggcctcacagaaaaagggacattttttgagtggaggcctgaaaaaggtctacttccaaacacttacacagaaaaatgtggtcttacaagtaaaggtcacgggtggcagaatgcacaggatactcaaagaaggggccctaacaagaaagagccttagcttcttctgcactatctgcctctggggctccataataatgtcctagtgaacagaagtcgactgattccccgcttccattcaagtgttcttgctgccacctgctgtcatgggcaaagactgggcttggctgttccagtaaaagatgtccaggcacagagcagagaatggtggggactatgaataaagaggtggaaatctgtggaaaattaagagcaaggggaaaaaaggagtaaaagccatggtatttccctgaagaattctccttaggctatcaaaaggtagttttgatttgttcacctcccccagaccagggcctcttctgcctctgttagcccctatgggatgagtagtatgtgacaccaaggggacatgcccacccagatcctgtatgccctttccccactttgcctggctaccaagaatcctgggatttcttgctcaaacagactgagatctaacctagcagttgtcagaggtggtgggagtggggagtttaaacttcagcattggcgtgtccacacacatgatcgcgatggccttcacagttgaaggggagtgtggaatggggaaaggagatgggctggagaccaggatccagatttctcagtgctgcaattctctggcatgaaactcttgcgaacattccaaaccttttaggtcattctgaggacacatttgtgtaagtaaaaggatggaaaatattttattattgtttttagcttactgtatttcttttaagtattgtgacatattaccatgggccctgcaaatgtgagggcagctggccctccacccggggtaggagaaggggttgggaaggcagtgctgaggcctgggagctgggtgctgccatgaagagaaggagaagcagagactagagacgcccacatgcctctccaccactacaaccattagagatccagggctaaccaggcttgctttctctggagagtcttgtttgaggaagcacaatccaaatgtaattttaaaaacgcatagattcggccgggcgcagtggctcacacctgtaataccagcactttgggaggcagacgcaggtggatcacgaggtcaggtgatcgagaccatcctggctaacacgttgaaaccccgtctctactaaaaacacaaaaaattagctgggcgtggtggcgggcgcctgtagtcccagctactcgggaggctgaggcaggagaatgacgtgaacctgggaggcagagcttgcagtgagccgagattgcaccactgcactccagcccgggcgacagagcgagactccctctcaaaaaaaaaaaaaaaaaaaaaaagcatacattcaaaagtaattcgtaaaaacttatcactttaaaaagtaattttgaaaattaaaagacaaaataacgaaaatttcaatggttaacgttagagagaccttccaattcataatttctcagcaatatgtctcatatccccttttgtctctttccaaactctt

SEQ ID NO: 1879519 - DNA, 4001 bp, Homo sapiens
agttgcaatcatcccacctttggaccagagtcagccaagtggaagcaagcattatcaagtaagagaatttcagagattcgccaaagtgagaagggacattgcaatatcaagacttactataaaaatgtagtaatcaagacagcatgatattgacacaaaggttaatcgaacaatggaaaagaatggagggtcaagaaatagatcgatacatgaggaattgatttttaatcaaggtgtaaaacaattttcattggagaatagtcttttcaaaaaatggtgccagaacaattggatatccatataccaagtaagtactcctatccacaatattgaaaaagtaactcaaaatgaataatatacctaaatgttaaaccgaaagctatagaacttcaagaagaaaagataaaagaaaatctctgtgatggtattttagaaaaagaattcctaaatacaataccaaagtcacaatccaaaaaacaaaaagtggtacattggattttatgaaaattaaaaacttcccctcttcgaaaaacactattaagaaagtaaaaaagacaagccacagaccaaaagataatgtttgtaaatcacaaacaaagtgacttgcaaattacttatctgataaaggatgtgtatctacaatatgtaaataactctcaagacgtaatttgaaaaaaatcatttaaaaaatggacaaaagatttaagtagacacttcatcagcaaacatgtgtggatagcaaataagcacataaaaagatattcaacatcatttgtcactaggaaaataaaaattaatcacattgagatactactacatacctattaaagtggttacaatttaaaacactgaccaaatattcacaaggacagaaaaactagaatactactacacaataaaagtaataaactattaatacatgcaacatggataagtcacaaaataactatgctgaatgaaaacagctggacaaaaaagagtacacattgtaaagttctattatacaaattctagcaaataaaatccaatccgtaatgacagaaactagattagtagtttcctgaaaatggaagaaggtagggataaaaaggaagaaggcattaaaaagagtcccaagcaatccttggaggttgatgccaatggtcattatctttctggtggtaataatttcatatgtgtaggatacatatgacaaaacttatcaactgtatttgaaaattattgtatgtcaattatatcttaacattgtttaaacattgataggtatttaagaatataagaaaaaggaaaaattcaggaaatagtaaactccaaaaaattcaaaaagtaatacaagaaagaagctattatcacagtacactatttgattcaccaatgaatatttcaataactatggaaatataaatctgaatatttatttaacccaaattatgatagggctttttctagaaaaaggaaaagggagacttggaacacggatgggttggaggaacatctaagagagttaattatcttaatagactataacaagaagtcaaaagataaccataaaactacaaaatcaagaaatatatgatatgcagattatttagagacatagcggtaagaatcagaagcaatgactgaaagagttgaagccatttacttcttgagaggactggggaatagaagtagtaaggaaaaggaccactgattttagcacacactcatatacacacaggcacacacgtacatgtgtatataacctatggtgccatttcatttgacttaacaaatagatcataggcaatgctgcgtgaatatttttctatttctgtataacccagacttcatgattgaatggtaaacatgccttggaagttagagaacacaaattgctctggatacagtttagagatatatctctcctggagccatttgcttacatcccaagggtaataaacagaaacaacttacccctttcttccagagatatttgcttacaatccagagtaattctctcccttctgctgagatttgtttacagagtaaagttttgtctctctttctagtgggagaaggggtacatgtaccagctgcccaatatagcactaagtctcatgatttcagggtttttctcctgtgtgccaaaccctagcacatgcacgtaaacatctgggcctcatcaagttcctttgtggagaattggggcacagataaccttaaaaccacacaagcatattatctcacagtttctatgaatcagaggtttgagtatgggttggttggattctctgctagggtctcaccaggctgaaatcaaatggttacaatttaaaagactgaccaaatcaaatattcacaaggacagaaaaactagaatactactacacaataaaagtaataaactattaatacatgcaacacagatgagtcataaaataactatgctgaatgaaaacagccagaaaaaaagagtatagattgtaaagttctattatacaaattatagcaaataaaatccaatctgtagtgacagaaagtagattagatgtaaggtttcaagatcacttttaagataactggttgttgacagtactgaattccttgcagttgtatgactgagttcttattttcttgttggttgctgaacaagaacctctctcagcttctagagaccactctcaggtctttgccacacagccccctccataagcagttaatgaggtaatttgcttcttaaaggccagcaaggaaaatctccctcatgcttctgatctctttttttaagaagggtccagttccttgtaagtacttgcctgaataagtcaggtccacccagaataatgtctcttttgattaaatcaaactcgactaattttggatgttaattacatctgaaactcatttcatctttgtcttataatgtattctaaccatgggagtgaaatcctttatagtcacagtctcagtcacactaaaggggagaggttgatgcaggctgtgtatactagagtacaaggaattgtgggagccatcttagagttctgggtgccacattctacgattcagcatacctatagacacaggtccaaagaggcaagtacaaggatgctcatcacaaccttgttggtaacataaaaactcattacctcctgatatgttctgaatgtttgtatccccacaaaatttatatattgaaaccgaatgccagtatgatagcattaagagatagacatttgggaggtgaataagtcatgaggccaaagctctcatgaatggggattgtgcccttatagaagcggtttgagggagtttgttctccccttccaccatgtgaggatagagcaagaaggtgtctgccatctttgaagcagagactaggccctcaccagtacccccaatctgttggagcctttatcctggatttcccagcctccagaactataagcaataaatttccattgttataaattacccagtctaaggtatttattatagcagccttaaaggagtaagaaagctgtcatccaaacgtccaaaataagaaacatataaataaaatgagaaatatttttatgttggaacatgacataaaagttcagcaggaaaaataaataggtaggtaaattatatgcatcttaacatgcatatttcttgtttcactgaatatggcagtgaatgaaataataaagttaggggaatttggaggaattatggtggatgggaggcaggactagactgcagctctcatgcaaacagagcagtgtgtggaaactcacatcatgaacttttgctccagaactactgcagggataaaccagaaaagctgagagaactcacagaccctatgaaggaagtagattgctcctgcaggacccaggagacatctcaaatattgtgggtgcccaagctgtggaaataggaaagaggaattgtccatccctgaacacacaccctcactggggaacctgaaggtctagatcatgggaaaagattctggccttacctggacctgagtc

SEQ ID NO: 1879520 - DNA, 4001 bp, Homo sapiens
atatagcaattgaaactgtaggagtaaatgatattataagcagaatatttaatgtaaaaaaaaaaagaaaattttagggacagaaccctgaaggacactagcattcaaggacctgtcagaagaaagagtccccaaagttagacggagaaagagtggctagaaaagtagtgtggtatgtaacaaactctcctctagtgttttggggaagagagagtggtacagaactaaatatttcagaaaggttgaatgataatccaaaccaggaagcctccactggatgtgttactagaaaatagaggcatttcattggagtggtgagagcagagggcttaaagagtgaaggtgaggaagttgagacagaaaatgaagataatgaagaaggaagccaagtttcatggaatggtttttctcaagattgtagggatatgtgcacatttaaatgcagataaaaagtgaaaagagaatgagagagtttgaagatattcttgcgttttgagcaaactgcttaatttttctcctcccaattctttaatctgaaatatggggatataaaacaatgcctacatcatgagatctaattgtataatccatgcagggctttgcatattacctggtatatgctaatcacttaataaatactggctaatattaaatagcagaaagaatagtattggaacaggagtaagggaagagaatgtgaatttggatccatgtctgtgtatagattcagcattgggagatgtacagagtttcaatctcataaccactatctctgtgtcaagaaagaggggtagtggatgcagaagtttctgaagggaattaaaaggattgtatttgtcatatctatatgaagaaggaaggaagggaatagactaaaatttatcatatattttatgagtcatgcattaaaataagtgctttgtttatattatctcatttagttctcaaagtaaagtagttattatttccatttcacaggtacacaagctgaggtttctgtatcaaagtattctgtggtaacaatggactcaaacaatgactcaacatggaataagtttatttcttgctctccaaacagtctaggagagtaacagggctctttctacatagtcactgaagaactcaagtcgataaaatgctctgccactttcaacaatatggcttccaagcttggcacagtcttctccagccaagtggaaactaggaagggtttttttttttttttaatcttcgttgttgtatttggcttatttgtttgttcattggccagaaaaatgatatgggccagacatggaagaaatacccataagttctgttcatattctctgactagaaattagccacatgctacaggtaacggtctctgccagtgtgtttatttgtttgaggaagcttgagagcagggaagaagattaggagtttattttagaaacattgcattaaagtttatatgttcaagtgaaatattacctatagaggtacagcttaagagagaacctcaatggcgttttgaggagaaccctgaggtgtaaagcaaataagaccatccagcactgaaataagtaaggttgtcaaaaaagatattatagtagccatagaattgcaacatttccacagacagcactaagagaatccctacctactacttaaaatttagtaaggataaaatgggaaaataggccccaaaattgttaagcaaatacactaaattacccttccaaaaactacagtaaagaaagaagaagtaagaatgggtaataattgataatactgtgtggttttcttcaatcttattttattttctgtcagtaaaagcatttgctatgcaactaaatgacatgtagtaaatgagacaatattgctcaaacttatgtgggctatttagtaaccaaaaaaaaattattgatgctgctggcaacaagttgataatctatacttactttttctattgtgtgtgaatcatttttctaatacatgttcatgccatatctctgttaactctgtaagcaaaaatgtaaagcaagttaacaaacattccaacaaccaaacccgtagccttaatgggaataatgcacaacccaacaaaatcataacaattcttgtagaacaaactcctccatgaatatcagatatagtaaaaagagcaaaagatctagattcttgctctagccatgtaaacatctgaataatttgagtaaagtcacttttctttgaagggcttccgttcttctatcagtaaaatgactcaagttgaaactagattagattgaatttaccaaacatttattgaacatctattgttaaaccctgtgccaagtactgggggtatagagatatttatgatacaatccctgtgttaagcttttcaacaaaagttatttctttcctgggcatatggataactaaactttcactcttactgtcaaaagataaaaccctattattagttctgctcaatgaaatgtgaatagcatatgtctgtgtagtccacactgagccagtagaagcccctactcactttctactccttctgccatggaaatataagaacagtccttgtattgagaaggtagagcctcaagtttgaggttgcctagatccctgagtcactgaacagacgaacacacagctgtccttgagagttgcccagatctgcgacagattcttgcatcagtgagatgtaaactttttttctgataactagcattaactgcaatagagcctatcacatcttgacaaaagaggctagttaggaggcagacatatgcaaggtggtatgcatttcactaagggaaaaataaagtgcatttagcagagaaaatgaaaagtaatctattatttctaaagatgtcggggaaggtatcataaatttagaatgagtgtggcagtttaacgaagcaactggaatataacattgagacacaagaaagacagtcaaggatggaaccttggggtacactaacatctaagatttagataaaggcaagttaataaagaaaactgaaaagagaagacaaaggagcagaaagaaatggtattctggaaacccagaaaggaaaacattccaagaggagtcagaaattgtctgtaatgtcaattgttgggaagtcatgatctgaaaagagaccattggattcaaaattatgaaaactttaaagatgatatgcagactctagtgaatgggagacaaaaaggtggcaaaatatgcttatagtaaacacacaatagcatttaccaaagtgtgttttggaaaacatttactgcacaaaattctccccaaaaagatggagggagttgactgccgaatacatttgagacatgctgctgcatactatatacctatgagggattttaaaaatctatttgtgatttctcaccttgggagataaggaaaggaaaaacaaaaagtattatttgcttacaaactcacaatgtcaagtcaagaaaacaaagtaacctcctgggacttctccacaagtgttgaccaataaagtttagtttctagtagcactaaattttgtttcactaagaaaaacaaaagcccttgaatgtggacaaattaggctaaattttttaattaggtatgtcttgaaaataaaagaatccataaagtatgttttcccttctcacaaagcacatttgtggtttgctagcctgagcgcaattacaagcttcggccgatttttgcaactttccttttctctaatttgtaaaatggagataagaataacacagatttcaaagagttgttttgaagagtcagtgagagaaaacatgaaagcacttagaatattgcctgacatatagggaatgctcaataaatatgaactatgaccattattaaacttttcatatctccttcagcatcaagctggcacacagcagaacgcaaatcatctgggctccctgatgaagtgttgctattgacccttggcagtcaatgtaccatccatgcataatttacacactaataatcaagagttgacagaggaactattata

SEQ ID NO: 1879521 - DNA, 4001 bp, Homo sapiens
ggtgtcaaactcctggccccaaccactcctcccactttggtctcgcaaaatgctgggattacaagtgtgagccactgcctggcctgtatcttgaattttcacctcctacctgcttgcccctgtatcttgaattttcaatcatttctggatagactcaggttctgatgaaggataaaccaccagccccacaatgacaagtgccatgtactgttgagacccaagaagctgagactcaaataagttaactgccgggcatgatggctcacacctataatcccagcattttgggaggctgaggcaggcagatcgtctggggtcaggagttcgagaccagccaggccaacatggtgaaaccctccctctactaaagtacaaaaattagctgggcatggtggtgcgtgcctgtaatcccagatactcgggaggctgaggcaggagaatggcttgaacccggggggcagaggttgcagtgagctgagatcacgccactgcactccagcctgggcatcagagtgagactctgtctcaaaaaaaaaaaaaaaaaaaagaaagaaaaaaaaaaaggttaactgacttctctcagctcgtatagagtggagcagaaacaaaatccaaaaccagcacctgccaagacccagcagcgtgtatcctcagaccctggtgcaaccatcagaacttcatcacagcaatatctttgtaccaacctgccgagcttctgctgctggaggcattggactatgaaaccacatagaaagagagatcaagcttaaggtgccattctggcaggacaaggctagcattctcccattattttatcaagactgggcaaagggcttggtctctttgaaactgagattcagaagggtgtgatgatggacctcctgcctctaataagaatggacttagtagaagatgggctttcccaagagggttggagtttttgttttgttttgttttgtttgtttttgctttttgagacggagtcttgctctgtcgcccaggctggagtgcagtggcaagatcttggctcattgcaagctccgcctcccgggttcacgccattctcctgcctcagcctcccgagtacctgggactacaggggcccgcccccacgcccggctaattttttttttttcctgtatttttagtagagatagtgtttcaccttgttagccaggatggtctcgatctcctgaccttatgatccgcccacctcggccttccaaagtgctgggattacaggcgtgagccaccgcgcccggcgagggttggggttttgaaggaccattatggaatagaaagaagggagagactgtttctagatcattaaggaagatttaccaaaaaagtttggcacgagggacagcctgggagaagagtgatctggtgtgacaggaaaggtgagaatggaaggagacaggcagagaaggctcagacttgaagttgactgagtgagaccggtgaggagagcagaggggaagccgaggaggacatgggcttggggaggagacttgcatttagggaagagtggagggcatgaaggaaggaggggacagagcaggtcggtaggaggctctggaagaggagtcagggaggccccagaaatgatccatttaccgcttattcggatgggcccgaatgctatccagctgccgccgcgctccaggccctcccgcgttcggatctcccaggagcgatccctcccaggcgagttcttctgactacaagcttgtgggcaacgcaagcacaagggtagcgaagccggccaggcgaggactttgcccaagaccccagggtagccccacctccctccccgccccaagtgagttcaccatccacaagacctaggtcttcaaaatcccgcccagtcttccacaagccccgcccccggtaggactggccagtccccagcaccgcagtcccccaggtcccgcatcagcaccgcttccgtgaagacggcgcagctgggagtccggctacccagcctgcccggcaggaactgctttgcaggcaaggctgcggcggctgcgcaggaggtcccggggctgcccactcactggttggcatgggcgtcttgcccgcgtgtcacacagggtcactcggccgtgcaggtacagtgtatcgctggtcgagaagcggatcaggttgaaggccaaggtcacctccagagaggccccgttggcccgcaggccctggagcagccggttgctgacggggcagctgtggggagaggcagcgtcaggggcccgcggtgccgatggatgaacaccgagcaccgttgcccactttttacgtttgcttgtataggtgcagatgctggtttcatgctgagaactttacatggattgtttcatttcatcctcaccgaacccgtgaagaagacaatacttttgccccccaccaccccttttttaaagatgaggaaactgaggctcaaactgaggttcaaagagcgttgcccaaggttctgcagggagcagcctggccccagcgcccgcccacacccttaatcactgggttctatatcctcctgacaagggaggaatgacaggcgaggacaggtttggccgtggtgtgtttcagagcctggactctggagactgatggtgtgtcctggttgaagtcccctaaactcagagtcttctcttgttctgtcagctgtacagtgggggaaataatacttcatagggttgtttggaggaataaataaggtaataaatgattccctgtgctctgtgaagccttgttactaaaatatgacctagaagtcaggagacccaactccttcccaagaacgttgaggacgaacttgaatttactgtctctgtgttcccaacacttagcaagatctgcaacttattgtgtgaactgagcctcagtttctctataaagtgggaatgaaaatataactatctcggccgggcgcggtggctcacgcctgtaatcccagcactttgggaggctgaggcgggtggatcacctgaggtcaaaagtttgagaccagcctggccaatatggtgaaaccccatatctactaaaaatacaaaaattagccaggtgtgatggccggtgcctgtagtcccagctactccggaggctgagacaggagaattgcttgaacctgggaggcagaggtggcagtgagccgagatcgtgccacttcactccagcctgggtgacagagcgagactccatctcaaaaaaaagaagaaaagaaaatataactatctcatagagtgtgttgtgaggcttaaatgagttaatatatgtgaagtgattcaaactgtgtctggcatagagtcaatgctatgtcagtattagatattattagctactaaatataatgaatgtccaatatatagcatatatatagcactctgaaatgttgtgtctttgttttttagttttatcattgtaggccctcagtaattgagcaaagaataaaagaaatgcatgttatttgttggctgcaagatcttgggcaggctttaatctctgagccttaatttacttatcttcaaaatgggaatgagagcattattcaagaaacattcacccagcacttactttcttccagtgtttgcatgccagggataccaagaagagtgacagaatctgtgctcgagggtataaaagcacacagcacaagccaaatccaggggctggtctggcactcacaggaggttaccaggcctgactgacccttgcctcttgttcacaaagtggtaggtggccttaacagcacctgtcctggagatgttggtgctggcaaagacctcactgaccaccagggcaaatcactgcttattgtcttgaggactacgtagaagggcatgccaagaggaacagttctgttttcaagcagagttaagagctgaaggtctgtgaagatgcccaagatgatgatggtgtccccagtgcccagaacatggatggtgctatatctggagagggacaggagtgaaaccctcatcatgaaatcccagagggagagacattca

SEQ ID NO: 1879522 - DNA, 4001 bp, Homo sapiens
cagagtatcattttcctcacctgtaaaatgagagaagtagcgtttacagtaatacctaccttgcaggtttgtgatagggattcagtaagctaacacatgtcaagtgctgagtgcagtggctggaacagagttcattttccaagaatggtggccaatattgttccccacatgtgtgtctcttggcctctcctcagactcctctctggaaaagcaccctgcacatcctgtccccagtacaactccccaggcaaggagactctgagggtgcttcagaacatcatgtttctggtaggaggtgcccttctctgcctgagagcagccctcagaaatgcattcctcatgctgctgacctgggctggctggttgcagcttggggaaggacttttcattggctaatgttttgaagccaaggacctgcagcctctctccaggtgccaacagagtggtagaggacttttagatttaagtactggagggactattacatcttgttctctgattctaccaaggagagaataagagcagagagggataatgcccaggaggaatttagattcataggttagaaccacatttctcaaagtgagcttcttggagcccttgcaccaagattggataaggtctgtacaaaaagtctctaaggaaagaattaacgccctcacttaccctgattggtcattatacaaggatagtagacaaatggtcagggagagaaaagttgacctctaggacttctgttagcttggatttcccaagggtaagtacttgagaagaactggaaacacctctgagattgaaagggtagattcagaccatgtggaagctggatagacaggtatccagatacaggccaccagcttttccacccctagaaagtagagcttatacacaggcacgagatacacttcacattgtcctctcaagaagttatcttagtggagaagccaagggaacttcagccatctcagcctcgctgtcattttctgtaaaatgacgagcagacaccctcccaactctgctatctgaacaatgaactgctaattcctggcagacaggggccaggctctgcctgggctacagcccccattgctggcatgcactctgatgccatctggaagaagcttgcgcctcatgaagtggctttagctagctccatatttcctccctctgttgctgagcgtcccccatcctttctgttctgccagaaacttagactacttagcccagtccacaagtggcggtgatagaacagctaacagttaatagccaagcagtaggctgaaaattcattatctcatttttcctcaaacaacccagtgaggtgggtactcttatcccggttttgcagagtaagagagagccttagagaggtgagggaggccttaggaacttctcaaaccccagtgctccaggtggacttactctggccttaacaggctcttcggttccatgcatctttgctcattactcccactgccagaatattctccctgccccccacacacctcacctctgtttgaatcctcctcattggttaaagggccagctcaaattctgtctgtccatgaaggtcactgctccgtgatgttcatcagccacacttgctttctcctctgaactgcatgacccttaccacatcctattttgcatcgtggcactctgtgtgcatggctgtacaatcagcctgtaagcacctggattgctgggatcgtgtcctgcgcatctccatatcctcaaaaaaaatcctgtatgtagcacccagggagcctcctgaccaaggcctggaagaagcccttccagcaagacggagagctctacggcaactgttcaagcccgaagtcctcatagctccacatgtaattcattgtaatagcagaagagaagtattcttgaatgcctgggattattcaggagccgggggggacagtccagaattctcatttgtcatccttattcatgcagtaaacctttattgctgagagacagcaaatcagttccctgctccatgtctgtctccagcagaaagtacctccctcacagctccattgtgagggtcaagtgaggcaacagatgaagtggttgtgcacatgtaagatattctttaaaccatgaagacagagcagtcaaggtgcttacaggctgattaggacaaaaacatgtatacaagtttatcgtaatacaaggtagaatgtgggaagggtcatcagggtataggataccataggaaaatagagtttctcacacatggaataggtttggcaggaggagctctagtgcaaaggctttgcaggtcagttagactggcaggaacagagaggatcagtgaggcacaggaaagccttggttctgctccaaagggattttccgctcttctgtatcaggagcatcctcactgctctcctgggatcacgtggtcagtcagttgagtgtttcacatgtacagggcaccccaagtgctggagaggaagaagcccagtctctgccctctagtacttgggatgataactgctgccagggagtatgatcaccacctggtgtcagagctggttgcaagaggcttgaaggctctcaaacttccaagggcttattttctaacagaaagagtggattgtgaacactaacacttattctactatgcagaatgcaataagtggcttaagagagttgaacctgcttctcagaatgttcataggggggtcatttgctggaaggatcaggctggtcttcatacaggaggcaagtctggagctctgaaaaatagcctagggagtggggaggatggtaccctcagaggaaaacctggggagatcaaaggaagtgacccaagggacatgtccccgacaagaataggacctttcttgcagcggagaatagacaataacaacttgtaaaattgctgtttctgtctaagagcctgctaatatcctagagaggattttgcatatgttatctctaatccttaaaaccactcttcaaggtaggcacaacccccactttacagatgaagaaatgaggttaggacaggatttgcccaaagacacaaagccagttgatgggggaatcagaagtcagacccacatttgtttggttccaagagcatgagaaaaactttaagaagtacagacgcttccacacaaaacaaaccaagatggacccagaattgccactgccctgcctgtacaacatgagcaccacccactgcatacctactcccaagccttttcaaatctggtacctactttccactgttccacttcacttggcccaccctgtgccccaccccctacctcctccatcccagtttcacccactcctaaaaatgatctccccaccccaatccccacttttctctagcagaaggcccgagacatgtatgcagaggagcggaagaggcagcagctggagagggaccaggctacagtgacagagcagctgctgcgagaggggctccaagccagtggggacgcccagctccgaaggacacgcttgcacaaactctcggccagacgggaagagcgagtccaaggcttcctgcaggccttggaactcaagcgagctgactggctggcccgtctgggcactgcatcagcctgaatgaggctggccacctgccactttgccctgccctctgcctccagggctccactccccttccttttcttggtgaaaggcacctcctttcctgataatgaatggtgttccctttgcttggctggggagccccccaggccaggtttgctggccatagatacctttgggctgcctgggacaggctcctgaggaggattgagggtgaaagtctcccacgagtacactaaacctaggtctggtcaccaatagggtttggagagcaaagggccacaactcatcagctgcctgtctcttagatgcactttctttttccaccagcacatccttcaacacacagaatttcagggaagagttctccccaaaaccctagctctttacccttccattttagccttccacccagcttccac

SEQ ID NO: 1879523 - DNA, 4001 bp, Homo sapiens
atattattaaataacaatctgaaaggtttttggactctgtaaaacactttatcaatattgaatgttaaaaaccagtggtattcacaagaaaacaactgatatccccaaggaaattcttgaacctgtttgaggtttatcatggtggtctggagtagtggttaagagtctgcagcctgtcccacattaagcaagctgcttaatatgtctgggagtcaatttccttgtttgtaaaattagaataattatagtgcctaacttgtcagattaaatggattaatatgtgtaacactatgtgcaaatactaaaagtacaatgttacatgagatatcataggcagacaatgagaagtttcagaaaacattcattaatatgcatatgtatacactttgtatgcttacgtagaaaatgagtggttttaaaaggacattcattagcatacttttatatgcattttgtagacttgtacagtcagaaatgcagcaaatgtaaaactttaaatctagaagtctgtttccctctaggaacatatatttcaattccttaactatttattgactgatagcgtttgagccacaaggcaaggcatttgcaatatttaggttttggaacccagctctgccactcactagctgggaaatctacaagtcaccttagttgtctgaatgacacttctctcaacaataaaatggccagcaatgcttacttacttcacagagcagtaaggttaaattaacctagcacatgcttgatacagactaggtgtgaaatttcactttgattcctttggctttaaagaatgcataaattagtgtgggtggaggcgggagaagggggggaatgccaagtcccccgttttgttgtgctgggtagacacaatatacctcttcccctttaagtgaaataagtcttcaaatccaattaggatctactctggagtcttagaggaccgttatcttggtttccacattatatgcactgtactgttgttgaagctgtgggtatgtattgggtgcgtcgctgtcgatgaatgctttaaaacagctgtgaattaactgtcacttcttttttttttttttttggcaaactcacaaaatcccagaagtcaggggtctgttgtttgttcattctgcctccttctgagtcattcaggtacagggtgtgtctgccaattgaaactgcacagcggaggaagtttttgagttcacatctgccgggatgggaacgcagtgcgaccagggactgggtggaaacttttacaacagtaatgcaagggcagaagcgtcctgtcctgagcttgtcacgcaggcagatctgaccaagtccgcctctcagcctcacgttcttaagtagcatctaagcaaaagaaaagggtgggcaaagtgctagtaatgagatttgaggcctctgagtcgactcccaagcagaatgtgagagaagggtgccggctcctgctgggcagctgcagttgctccgcagctcctggccgagaatctccccctttggaaattcctgagctgcccaggcgttttgaatctctcaggactcagcagcagcccaccccctcaacgacctctccattggccagaatctgggacacacagcctgactttgtgctcagctgagggaaacccctcgcccaacaccaaaaccggcgctggttcatttctctgtgcactctgggaaagccactgcccctcagaccgcagttgcgagtagcacgaggatctggggtggcggggggagtacaggaacctcccggttcattctccctcccgggctgcttgtctcctccgtacctctcgcagccccttcccagcctctcctccccagagcgccgccgacactcgccgggccgcggctcaggttttctgctgctcgcgcgaaagtggctcggggagctcctggccacaagctcagcacaccgatcctcctagggctgcggggggtgtgggaccagggcggtgcgctacgagactccgggccgtcctctgcctcctcagacttttcgagagaaaagttttcaaagtctctccaccttttttttttttcaggggctcgggagaatcctctccacagccagggatcagcgtctatctgggcgagggcagtgatttatacagtagaatccaggggttaccgggctccgccccttctctctctctctttttttctttcatttgttgtttggggaggaggggttcttttttttttttttttttttttttttgcttctgccccagatctttcctggacagtgcgtctcagcagttcagatccgggggcccccagctgacagagggcgtggggggttaaggcattaacccctcccagcctcttcctgaagaaaccacccagccttggcgcggcgctgggtgacttcgcgtagcaggcagggaactggccgcggcgagcgggactggccattggagtgctccgctgcggagggaggggaccccgactcgagtaagtttgcgagagcactacgcagtcagtcgggggcagcagcaagatgcgaagcgagccgtacagatcccgggctctccgaacgcaacttcgccctgcttgagcgaggtagggggcggcgaatggcgggggtcgcgggcgcggggagcccggttgtggtagggcttaggtgtcagaaacgaatttttaagtcgaacgaggcaaacaaaaacttagaaaacatgcatctccgggcgctgaaaatttgcatctctgggctactaaggagcccatctcgatcagattgttcttgggcacttgtgatttatggagttcagaaaaaaggttaattcccaactgtggaacctacgggtgtaggggcagtgaaaattgcagttggtcggaggaataggagggaaggcgttaaattttggaaatcctatagacaaagaatatggtgggtggtgtggagcgtgggtaatggcttaaattagtactgcccaggagcagggtataaaattagttgggggaaaatgcggagcttcttggcttgagcagcctctgctgttcgcggagttgctgggattgttctcatctctattacctcattttattgcattgctgcattaccttgaaatatttaagcaacttagaagtagacttctgctgaccagtgccgtcttagaaagtttctttgtaactttctagtcctaggagaggagtcaacgtgttgggggactgcagtaaataaaactgcccacgcaaatttagcaatgcaccagggagcagtttaatgtgagtttctgaagagtagttttgcaatcgaaattagaaatgtggtagcatgtattatggctgtcatgagtagtttgatttctctcttttgtgtatgttttggctaaactaaacaaagcaaaaaatatttatgcaatcaactaatgtacgaaacttctgggatttgctgcaatctgttatgaatggttttaactgaatacctttaaatttacttgccctggcttggggtggggggtggggtgggggggcgcggggggaggcggggagaataagaagaagaaagaaaaggcagtcgcttcacggaggcgctaagctttcctgtttacagcaaggcggggcgggcctggctgcccacacctcactgcgccctcggaccctaagcacacctgctcctagagagttattaatagagcccccaaatggcttacgctttcaaatgattttcctgcaaatctgatttcttgcatggcacatggcaattaggaggtggtgctagtatctttgaactggggggctgggggtgggcatgggggacagaggtgtgtgtcttcgccctcagactggcagttgagtcttttccgaggagagacgtgggctggtattgagcgtgcagctaagctggtgactgcttcagagaatctcatggctggaaatccgggggtgagggggtgtggggtggtgagagggcaggagtggagttaaaatggggtgtagttctctaggtttcccattcctcccactccttgttttccttttcatcatct

SEQ ID NO: 1879524 - DNA, 4001 bp, Homo sapiens
agtgctgggattacaggcatgagccactgcccctggccaggaagtttttactcacagttcgtacccagtgcttgatggggagtttgggtttggtagtcacttgatgctccttagtcatacatttagcctctccagcacccagcagcaaggcaggagctgttcaaatggagaataattggcagaagaccaaacagaaacagtcttactctaaaaccctagaggtgagtggtgtggttctcctattggggcttgtcagagactccatacaataccttttccctgtggtattctttttttaatttttttttttagtatttatttatcattcttgggtgtttctcggagaggaggatttggcagggtcataggacaatagtggagggaaggtcagcagataaacatgtgaacaaaggtctctggttttcctaggcagaggaccctgcagccttccacagtgtttgtgtccctgggtacttgagattagggagtggtgatgactcttaacgagcatgctgccttcaagcatctgtttaacaaagcacatcttgcaccgcccttaatccatttaaccctgagtggacacagcacatgtttcagagagcacggggttgggggtaaggttatagattaacagcatcccaaggcagagtaatttttcttagtacagaacaaactggagtctcccacgtccacctccctccacacagacgcagtaacaatctgatctctctctcctttccccacatttccccctctctattccacaaaaccgtcatcatcatcatggcccgctctcaatgagctgttgggcacacctcccagacggggtggcggcggggcagaggggctcctcacttcctagacggggcggccgggcagaggcgcccccccaccttccacacagggcggcggctgggcggaggcaccccccacctcccggacggggcggctggccgggcaggggctgccccccacctcccggacggggcggctggcagggcgggggctgaccccacctcccggatggggtggctggctgggcgggggctgccccccacctcccggacggagtggctgccgggcggagggggcttctcactttccagacggggcggctgccgggcagaggggctcctcacctctcagatggggcggccgggcagagacgctcctcacctcccagacagggtggcagccgggcagagaggctcctcagttcccagacggggtcgcagccgggcagaggcgctccccacatcccagacgatgggcggccgggcagagaggctcctcacttcccagactgggcggctgggcagaggggctcctcacatcccagacgatgggcagccaggcagagacgctcctcacctctcagacagggtggcggccgggcagaggctgcaatctcggcactttgggaggccgaggcaggcggctgggaggtggaggttgtagcgagccgagatcaccccactgcactccagcctgggcaacactgagcactgagtgagcgagactccgtctgcagtcccagcacctcgggaggctgaggcgggcagatcactcacggtcaagagctggagaccagcccgtccaacagggcgaaaccccatctccaccaaaaaatacaaaaaccagtcaggcctggcggcgcgcgcccgcaatcccaggcactgggcaggctgaggcaggagaaaaaggcagggaggttgcagcgagcggagatcatggcggtacagtccagcttcggcaacagagggagaccgtggaaagccggagaaggacagagggagagggagaccgagcagaaagcgggagaaggagagtgagagggaggggggagggggaggggaaagggagagctaaaataccttttccaactagcaatcttatatggtatgctcaaccataaggtccacgtggaaggaaaattttcatcaaagcctagacttgccgtggaggcttttcttgctttgtgccccacttaaaattggcctagatgaaagcagcaggctcacatgttatatgtgttgctttcaaaatccagagaccaaccctgacccagtattgtttttcaccttggaaagatcattctgacatagaaaattcactgatatggcatattctgcatatagcctgccaattctttggtaattccccccaccccaccaaatttgggcgggcttagtgactaagttttcatgaaaagaatatggcagaagtgtgacctctgagactgcatcctaaaaaatgatacagcttcttcctggctttctctttcttaggacttgtgccttcggatcctgatttattaagtgagaagtccactatcctgaagctgctatgctggagagaccatgtgaaaagatcatatagaagtagaaagatgcccaagaagccatatatgcttctttctgtagctgtttcagtctgcccacccagggatcggacatgttagagaaagagtcttaaagattatcccaaccccagccaccatgtgactgcaacctcatgaaaaccccacaccagaacagtggtatcagctcaaactttgcaagggctaggagactgagggcagctgaccagatttatgtgattgagcctaataaactggcctgagtaagcttccctggttgacaatattctgcgagtattatcacacactggatgtcaggaaattaacactgtccacaactcatggaaaggacaactgggagttctgtgtttagagctttcctgaactctgccctatgtaccccttcccttggctgattttaacctgtattcttagctgcaataaaccgtaactttccatgagcactgtgagtttgtcttgtgaattattaaactcacgggtggtcttggggtccccccaagctgacaattaatgtcagagaggaggaggatattgggggaccccaaccttgcaatcggtgtcagaagtgagggtggtcttgtgggctgctcctctaacaatgtatccagcataaccttgatatgaaaatctcacaagagtatcacaagaaaagataattataagccaaccaccctcatgactgtatatgcaacaattctaaacaggatattaacaaacctacatatgaatttgagaggacataaatgttcagatcatagcattgctgagcattctgtatgaatatagacataattcaagaccaagactgatgattgctattgtgagttgaactgtgttccctaaagtggtatgttaaagtcctaatccaaggtacctgtgaatgtgaccttatttggaaatgagatttttgcagatgcaactatttaaaatgcagttatagtggattagggtgggccctaattccaatataactaatatccttataagaagagaagagacacagatgcagaaacacacacagatggaaggcagctgtatgaagacggaggcagagaagggagttatgtggccacaaatcaataaataccaaggattggccaggcatggtgcctcatacctgtaatcccagtactttgggaggctgaggtgggatgattgcttgagcccaggagtttgagaccagcctgggcaaaaaatacagtgaaactccatttctatcaaaaccaaaagcaaacaaacaaaaaacccaaggattgctttctacctgaagctggatgaggcaagagaagatcctcctgcagagtctttggacagagcacagtcctgctgatgccttaattttggacttctcacctctgaaatagagtaatttcttaaaaagccacctaggttgtgacaatttgttatggcaaccctaggaaactgacacaattgtgtcattgtttttttctctctactagttttaaaattgtaagctttttttctatccttttagtggctgctctagaactaacagcaggcttcatgaatgttttctaatcacaaatttgtgtgtttatttcttttaaaagcattaattgcgagcctattatgtgccagaacatattctagatgctgggga

SEQ ID NO: 1879525 - DNA, 4001 bp, Homo sapiens
taagaccttgtgctaaacatgtaggcatgaaataatatgtacataaaacagttctccacttgcagtaatataaaagagccaagaggagttattgacctctagtagataggtccttttctggttagaaataaaatgaacaagaatgctatagagacataattataatcaccccgttcatgccatttttttttctttgtgtgctcctttatactagccagaggaaatgggaagagggatgggtagctcacgtgttagaaataaatttctgaggcatcagtatgttttccatctatgatgcctgtatttctagccagcaaaacagaaatcacccaagattatttcacaaggtttgttaccctcaatttggcaagtttaacttgcaaagagtgaacacatgaaagtttatgaaaaatcatataatcaggactcacaaccgatgcatgttctgcaatgaggaatagagaagtaaagggattattcacaatactttagcccaaaacctactgccgtcttggactccttacataaataaagtgaggctgattctgcgcctgggacagcaaaatgaaaagtagaacaagcagctgtcatatcaaccaaagctgcaaatctgaataattaaccacccccccccccgaaatatcattgtataaaaactagaagcaggaattttttttgattgcctggacagttgataaacaaattaagagctaaggaaattccagtttaggaaaaactggccttaatattctagtaaatgctttgtcagtctgttttgatttggcaacgaagaactcacatcataatgcaagagttcgagctgggtgagccgaagagtgtgcagtcagccatttttcccggacaatatcagctccacttgacacatcctgctgtgagagaaaaattggtggttgagatgaaatagcttcagggtttctgcatatataaatgttaaaatagaaacagcctaaggagaaattatatgttggctataaccttctccttttgagtcagcatctcaagcatttgtgtataacattcctgttcaggatatattaaccactctttttttttttaaattagaaagagtaaatctttaaaaaaaagtctgatcctgttataagtgggtaggaaaaatgcgcctacgtttttaacatgtaaatttgctatgatcacaatcccaacataaggaaagcattatacactcacatcttccactatccttaattagacagctttgggatgtggatgtggaaccccaatgccctctgctgattcagttaggtggttaacatgcagtattggtgaggcagagaacaggagttcaatctctgtaatgggacaactggatttcatgaagttatatttggaaaaaagaccacagttggaacaactttcatgggatacataagactatcaagacacagcttaatgtcaaacgaactctacttttaaaaagggaaagacctaaccaaaatgttcaaaaaagatgaagatatgcaataaagatgtatgaaagcaaacccagctcatcaaacccaattgttagagagaaaataacttaaacttccttgtcctgaggatagaccagcagtcatatcatttccatctaagagaaacaggaagtagttattgctggtacatgtggttcaatgcctacttacgccataccccttttctctccttattattgatgtagaacctcgctggacgaggccctgcagtggcgtgattccctggacaaactcctgcagaacaactgtaagtttccattgtttgtttttttaaataaaggtcaggttagagacagaaacaaaaaacatctttgtattacctgtgttcttcttccccaatgttgacatttcttcaatttttgaaggtgatatcaataagggaagggggctgcaggtatgtgattatccagttcacaagaaaaggagggtctgtggcactatgagggaatgtgaacataaggtgttctgaagactcatgattgcagttgtgttcccatctgtcctgcttacttgcatgagccagaacaagtggcttgacctcctcaacattctcatcagtaaaatagagaaattacatttcctgacttagcctcataataaattgataaagatcagatatagcagcataaagatcgctaacaagtcatgagtagtacatcctggttcaaactattatactgtcaactgctcttgtgacctgacatgggttgttatctcccccagcctccgtttcctcttctggcaccatgccttttacatcttaattcaagaaatgacaaaggtgctgatcagtgcagactcttttccaagctaataccagtgcatcaataagcactaggtgcatttccccaatccaaaatccttactgattcccatggcttacagtaccaagttcaaatttctgatgttcaagatcaccataactatatggccggtctgcaggcaaattgaacagttctctgttccatataggatttctacatataatccccttggctggaatatcttttactcatatctctctctcttgaaattctccctctcctataatagataattcaaataagaaatgcctagtgttccttgaccatccagaacaatttatccaccctctgaaattccaaagtcatttgtctgcacatcttttattctacttaatacttgctgccttatgttctgttcatagttggctcacttctatgataggttataaactcacaaacgggcaagaattagtctttttcatgtagataatttcaaaacaggaagtatatagtatcgggaaaacaaatatttgttgaataattcactctaaaagtatgagtcaatttaaaataccctacctatatttctccatctttataacaagaatggaatatgaaactttgtcacatgctttgcaaagataaggatttacaaaatatttctcacaagaccattatgattaatgggcacagagtagatgacaaagaatatatgttgaattgtatatgaacattccttatgtcttgcttttggtgtcataagcttctgcttacctgcaatagaattaatcttttatttttggagacagaaccccacagtctctaatttggaactttctctagcttattcatttctgattctctctctttttttcttgtgctaaacaaagtaccctgccctgacacatgtaagatgtttggtgaatagttatgtagtgaatgagtgaatgaactaaattcattttgcttcttggacctagaaattccacaaggtcaactagtagaataatatttatgtttattaatggacttattgtcttgccttagtggtttctgggccaatagcagattgacagatgacctattgataaattatgaatactagtactctgagcacaggtatttattgctattgtcaaaaaacctgagagttagcagaactattttcatgttttcaaaacctttaaggagaagaataaatatttatgtgcccatatataatccttttcagtcacactaaatccttagggctacatgtctatatatttcaggcttttaggagacagagagctactagaataagaaagctagggttagatagagttaaagagagttaagctagaggcagttagtgtttgaaggactgaagattttcagcttgcaaacagatgattaccatcgtgttgagattgaggcccaagagcctcacagtaatattttctacttctcagaggggaaaatatacatgcacttgtgtgtgttcatgtatgtatgtgtgtatacacatgtatgtatgtgtatatatataatattcacaatatttcatttaacttatatatgcattttgaaattatatatgtgtatatatgtgtatgtagtatgtatgtgtatgtattcctgtgtgtgtttgcctgtgtgtttatatataagttccacataattatcttcttaagtaattaatatttttaagacctgggcaattaatttccctaaagcaacaaat

SEQ ID NO: 1879526 - DNA, 4001 bp, Homo sapiens
cacccctgccttctctgctcctgcctatgaatacagacacacaggtcctcatcctctgaacaatctgaggttcagcccacgccacccaatacggcagaggagtggttctgctgttgttaaggaataaacattagccgaacaccatggatttgtttcttttctttttttgagatagagtctcgccctgtcacccaggctgtagtacaatggcgcaatctcggctcactgcaacctctgcctcccaggttcaaacgattctcctgcctcagcctcctgagtagctgggattacaggcacctgccaccacgtctagctaatttttgtatttttagtagagatgtagtttcaccatgttggccaggctggtctcgaacccctgacctcatgatccgcctgccttggcctcccaaagtgctgggattacaggcatgagccaccttgcccggcccatttcttttctttttcttctctctttctttttcttttttctttctctctccttccttccttcctttttttctctcctttctttctctcttttttctttttccttttctctctctctccccttccttccttcctctctctttctccttccttccttccttcttctctctctctctttctttcttttttttgacagggtctccctctgtcttccaggctggagtgcagtggcatgatctcggctcactgcaacttttgcctcctaggttcaagtgattcgcctgccttagcctccagagtagctgggactacaagtgagcaccaccatgtctgactaatttttgtatttttaatagagacagggttttgccatgttggccaggctggtctcaaactcctgacctcaagtgatccacccgcctcggcctcccaaagtgctgggactacaggcgtgagccaccgtgcccagccttgtttctctttttgattcttgtcttataacatgggctcctcatcattgctcttcctccctcacccctgccacagacaccaatgaactaaggagtttcaaatcttgcccaggacagctgcagctggagagtaaagaaagggtcgaggctttgggggattttcctcaccctatagtctaattgtggctcagtgaaccttcaacagagatagaggctgtgtgcgaactgaggcctctgcctcaaagcctccgtgtgaaatctcttccggtgagatttcctgctgctctagcatcgggctggggcctccaggaggctgttggggtggacagaaggaattgcagctgtccctgtcagcatcatgaatggccctgatcctgggaggttagagcaggaaggtgccactcccacactggtcaacagctccatggacacctgctgtatgccaggcctgtcctgggcttgggggccacatggatgggttggacatcgcccttttcctcggggagttcacagtctatgggctggtggatgaatcacaaatttagcccagagagtgggcataaatcagcccaggtcccacagccagacagcagacagggttgggacagagcccagggttcctgacactcgggctgcccgaccaggacttactgtgcaggtgccaggccagcaagaggggtcgggagatgttttccagggcaagaccctgatttgtgatacgaagtgtacacggagacagaatcagaaggaaagggactggatccacagaagtgcttgcacctgctggctgctccctgtctccaacgcttatccaattctgtacttgaaaaatggcaccgcatcagttaggacctgcaaacaccaacaaacgggcttaggcaaatttggcaagtcagcggcgcagccgaccgagaactccagagcgagtgctactcagttgccctttgatcctgggttcaggtttgggctccatctctctggcattctctcctttctcctcgactgttgctgtccttgctggcccgtcacaccctcactctgcagcgaccagaaaaaaagagccagtcgcttccgggacgtccctctgaagagagggacaactcctctttcccagaaaccccagcgaacatctcctcgcctttcattggtctgaactgggtcatgtgccatttcctgaaccaatcactttatccagcaagataggctagccccacggcttaggccaatcagaacccggccctggagctgagggtgggtcgttcagggcacgtgttgagaggacagggtagttccctgagggagggtctgtcgatttggtgggaagtgctgacatggaggctggggaggcaaacaaagccctgagatagtcgccatcgccattgcctgagatcattaatatgatccagtcaatcagaactccccccgctgctccagccctgtcttcgtgtcctgccttatggccaagccctctgcttagtggaatggagcccccctcatccatactggctcatgactccattcatttgcccttgctgtgccctccatccgggattctcagcccctaatctctaccctccttatcttttagatcccaggtcaagcttcaccttttgcaattttgaaatgaataatctctgccggggattcccacagcacctcgctcccaccatcatttccaacaccattatggtcagctttccttatggcatccctgcccctactttctacctgctatcggcgcagagcttgccagttccttgaaggtttggctctggataggacttaattaatttctctgttctcagactctgggtactgcctggtttaaagaaagaactcaatatttgttgaattaatgaaaataagtttctgttgaagacatgacttctttgaagttgtttgcattttaacaaatggcaaagcctcaagccatagaaatggagctccagtggtagaatttcaagcaccaataagctggatacagaagctccctttaatgcttgggggaggagatgactgtcttggaaagtggaattttctattcctgccttttcagtgcaaaaaacaatcacgttgtctcctgaaaacaaatgtgtttccctttggctgtctggtgggaggaaacttctctagtcttgtcagctttcctgccctggttctggttgacagaatgttcctcctgatccctgtgagttgtgtgggtgatgccctggttgaccttctcagctctctgaccccccagcccccaagcttgcctgccagtctatctctgcctaggtggggaggccccaacgttagttgggagtttgaagaagccttgttctgcagctcaggcatttccacatcaagcccattgtcttgactgcttctctccagctgacctgaggcacatcctgaccatttgtgccctccttggtcctccagtcaagcccacctcatgccccagctccacatgctatgcatgctctctgccctcaagcttgtcccctccagtctaacccagaatgcccgtcagcagcacaaagctggctgggtccctcccagctggaaacccttcccaggctcccagtgccctcagctcacagcccatgcagaggcacagacatcagccagacacaaaccataaagcatgtgtccctacttttgcacctgcctttctccctgtctagatgccctcccctctctgttgatctggtgagctgttactcatgcctcaagatccagctccaatatacccttcttagtgaagccctccctgcttggcctatttctgtcttggcacatgtcccctcgtctgtctcctccactaaactgtgagcatacctaggtcagaagccagagtgatttttctgtctccagcatcagacagcagaagaggtgtcaatgtgtgtttgtagagggttaaatgaaggatcgaacttgctactgttgcaataacagcaacaattatatcttttattttggagaatatgctgcacaccaggcactgtgctaggcagtttgcctgcatttgtctgctatggcttcacaagcctttctgagtttggtgtgatcattaggtgcattttacagatgagacacagt

SEQ ID NO: 1879527 - DNA, 4001 bp, Homo sapiens
ttctgacttttaattatgattttcttttttatctgatggtgtcattattttcaatcatcaatatgaattatacaactcatgaagatagtctattgcatgaattatacagtgaatgaattgtccaacttgtgaaggtagtaaattgtatgtgtccacatatctattctttcagttgtatttccttcccggtgatccatgagttgttcttttataatttctttgctttatgaagaacttccttctgccatttttcaatgatgtcctcaagatctgctacccaaattcttttactacttctttgatatagaatgtctttgcatcccaaattcttttactacttctttgatatagaatgtctttgcatccccttcattcatgataaaaatttaactggatatagatttcatagttaatagttatcttatttctgcacttaaaaacatcgtgcaatgtttttctagacaccatcatgtcagttgagaagtatgctgtcatttgtattggtaggcaatgcatcatttctctctggctattttcaaggttttgctttgtcttcaatgttcagaaatttcactgtgacatgacttgttgggttttgggggtctttattatatgtagggtttctttgaatttatcctatttacagttcactcagtttcctaactctgtatatttatgtattttaccacatttagaacatttctagtcattatttcattgaatgattttgcagctctattctcacttccctattctttgattttaatgatacaaaagttggatctgtttttctgccccatttatgtaaatactgcaagatatatagatggaccctgacgtcaatgatggtttaatttaacatatttttgactttataactgtgcaaaaaatatatgcattcatttaaaatcaaactttgaaaacctatacaactattgtgtttttcattctcactacagtgtttaataaattacatgagatatttaacactttagtacaaaatagaatatgtgttacttgcttttgcccaactgtaggctaatgtaagtgttctgagcacatttaagctaggctaggctaagctatgatgttctgtaggttaggtgtattatatgccttttttacttataatattttcaatttataacagatttattgagttgtaactccattgtaagtcaagctgcatctgaatttataattttaatggagcttaataaatgttgtaaaaattaacaaaattgatgggggaaaacatttgagttgtgattcaaagtctatttttaaataaaagttgttaatttagtaaactatatatatatatcttaaaattaaccaagaatacattacttgtggtttattagtagggtcataaatggcataataacatataaatataaaatatttactataaaataatgttaaaactaacattagcttaaaatgtgtctaacatattttgagaacatgtataattggaaatatatttattatattatatttgaggtattttgtttagagactatatatcaatagaatacttccacttatgattctttatatcattaccccaatcttgccaaataatttataatattcataataaaatatatttcagataatgattcttggggaactcttaaggaactctaatgatactgctaaaactatccattacaataaaaaactcaaaattatcataaaataatcaatgttccctttatacttttagagtataaactaaaataatggagttattataaaatttagcaaatgaattctcattatttctctgtttgtactatttacattccctactatacagagaatgatacttacagtaggaaatttagatcatatatcctttttattaaaaagcttctaaagctatcccgtttcactgagaatataatacaaatctacctcatgtcttgctcctcttgctgtcaatcactcagctactgaatgtgtctcaacccaaccataaacactcctgtattaggattcttgttagctgctcctagaagattttttcaccagattctgaatgcctatgatgtcacattcagtgtaataataaaatggccctatatcaaagatgcctgccctggatctcttgtctgaaacagcccatcttttaatcttattctgctttctttttcaaaagattataaatgggtaaaaaaagacataaatcctatgacacagcactaaatgtggggaaccaggaagtattatgacaataaaatttgtaattaagatattttatgggcaaagtcctcaattttatgattaacattaactagtatatacatatatatatatgtacctagggcctaccttcatgcaggcagttgactactagagtataacttgaaaaatgctaaaacattttccatttttactacaatgtttgccaagtgcattgttttgttttaaagatatgctttttactttttctgacttcattcagttcacataaagagtatagtctagtcaatattatctcttatcgcccttgagagatactgcaaatggggaaaggggcatttcttcattattgtgtagaattgtgtctagagtggactaaattaattatgtataggctggaaaaggattatgaatattttaaaaccttctttattgttgtgacatatttagaacattgagctgaatgaaagtcattgttaaacacatttgttgagctagtaactgccagaaacaatgtaatatgaataaatatgtacataaatttataagagaaaagtcaattttgggattttgggaatggattaagcaaatatatttgtatagagtagagatgtttgagaggagactgctagatatatagactggagtagtagaggaagtcaaaaaggattgaacataaagaaagaaatataccagtaccagctttcaaatgttctacatagaggactaagtcccaaataaagtaatttaaaataaatttatgagcatatataaatgcttggactaacatcattcatttttgtttcccaaaagctgattcctttattctcagctttattggggttatactgataaatataaattttatacagttaaagtgtataatttgattttttgatacactatatattgtgagtcaccacaatcatcctagttaacatgtttgtcacctcacatgttaaacttttggtgagaagacttaagatctacacttaaccaatttcaaatatacaacacagaatgattacctatagtcaacattctgtatattagatctccagaacttattcatagtgcataactggagaaattctacagcatcaatcataaaaaatatagccatacatatttattttctaggtttgtgtgagcaaagatcaaagataaaagagtagaataattaaaaatctctatcattagtaatcttaggacatagttacactagttaagtattcttattaatacctagttgaatactacctcagtgaaggaaacattaagtgaatatgacacatcaccatagaaaagacctcacagagactaaattatttctttcttatataattattttttcccagatttattgaagtatgattgacaaatgaaaagctgaatatattcaatttgtggtatatttgacattgagtatacatgtatttatcattgctatatctgcctattcaagtgacaatttatcatcatataatgacctgctttgtttcttgagacaagttatcacttaaagtctattttgtatgatataagaataactatccctcttctctttttgtgattattttttatgaaatatctttatcctttctctttcagcctatgtgtgtcccataaatctagaaaatatattgtagataacatacatatatatgtaatatttatatataaaaatttattcagccactctgtttcatttggttggtaagtttaattcatttacatttaaaatttattaaattgatttgatttataatagattaaatggatcacattaa

SEQ ID NO: 1879528 - DNA, 4001 bp, Homo sapiens
ccagtgcacatggtgcccctccagtcagtccagtgactatgcaaacctttcattatattccgtcttcttgaatacctagagtgcttgctattttcttcatggaatactgactgatgctacttgttctcttccatttcagtgcctggatatccctttaaggaaggcttgctctacctttttctccttttaaaaaacaaaaaccaaacaacgataacaacactatttttgggcttaaatcacatgatttaagacctcaaactcaccacaatggaggaaccatatacttgtatgcctcttttctatttaacccgacggatttccagattcactctccaaacacacctttttttattatcctcattcatctttcaaattcccagttatttctattatgtgcttaccaataaagactattgtgaaatgaaggatgaagggtctttggagagatgaggacttgttctccttaatattcttccattcctttgacaacgaaattatcctgaaaatgaactgtcattatgatacctgtggaagcagaaaagtctaaaacaacactcaagatggctgtttgggagaatattcttgataagctatgctagaatataggtcagatcagctatataaatatctaagacaatgctttcaggcactaaatgctactcataaaaaattaagtggaatttagagtggttttaaaatttattacaaatgacaaattgaaaaataagccaaatgggaatatagattttatttctatatttagtgtaggaaagtcataggaatcccttggccagtgattgtggaaaatttagttttggagctgtaagtgttgaaattcccatggtattaaattattttgatgagttcaaaaatatcctaaataattaaaggaaacatgttattaactgtttttaacactactagagtaggtggtttcagataatttttatgctaatggttttctctcctagatctaatttaatggtctggaatgttctccatttgaccacctgtctcgatggaatgaagtcaactagtttgcctactcctgctttttatcttccagtgtagatatgaagaataagaagaagagattttaaaatgtagtgatgattatactaatatatttaagtgtatctccaagtatttttaagtatgtctttggctaaaaatgagaacttgtatttttaattcaatgaaggggtctatactaattagaaaaccattttttggtggggagaaaagagcagttattacacatttgcgcaatttgttatcttctaaataaattcataatcttatgtagcattcatacattattaataaatttcaggacttttcagcaggagtcataaatttttaaaacttattgcataatttaaaaaattaggaggggaaacaaaatttggaatagtgacatattttaagagaaaaatatattctcaaactcttgttatgctgataacaatttgctaattgcaaatcatctctatttattaaagcaatttctctaaggactaatagattacatgttttcaacctcatatattattttaggtgtatgtgaaaatagtgaaactgtatttctttaacaacatattttttctttttcttttttttttttttgggacagagtctcactctgtcgcccaggctggagtgcagtggcatgattttggctcactgcaacctccgcctcctgggttcacgccattctcctgcctcagcctcctgagtagctgggactacaggtgcccgctcccacgcctggctaatttttggttatttttagtagagtcagggtttcaccgtgttagccaggatggtctcgatctcctgacctcgtgatccgcccgcctcagcctcccaaagtgctgggattacaggtgtgagccaccgcgcctggccaacaacatattttttcattcagactttttacttaccaggtggatcttctcctggtttagtgcattctggagattagattatggagactatttctgttcatgaaagtcacactctaaatcacttaagtttctgtggtttccagaagaagttaaacatttacgggaaaaagtcaacatcctcgatagctccagtgtactttggcatttccgtggacatgggaaagagaaacatggttcatagctctctctggcttctgcataatgttacaccaaataccatatgctctgtcggtgacaattttcttcactcattgtgtcttttaactccaaatgttcacattttaataatttgcttgagaagaatgaaaagtgacacacatattacctttaaaaatctatattccttttggatatatctttttgaaaacagaattcatatttagtgctttgggtaaggcaaaattaaattcaaccttttagtttatgttcctgagaaaggtagtttcagaggcatcagagaaacaatgagttcagattacatcatttatttaacatttccaagtgatatgttttcaattaaagttttatcggccatgtattgaatataaattcttctttctattcaatatctattataaaagaatatgatttcaccatggtgtatgcctatgtattcaattaagaaaattgcttagcttaacttcctaaattttccaatcagaaaagttttccaacattgaaattagcctgcatctctgggaaaaggtaagtgccttatggctatagacaccagacaggtgctggagggccgtctcctaaagacactgacaacgttccttttagagagaaagactgaactggcaagggagtattgtcagcagccataaggttttatatccagctgctgtgacttgatactgctgatataactaaatctggagaacatttcttttagtctctccctttcaggcaagggtttttgtcagaaatactattccctgttagagcaaggacactctgttgagatgggggttagacatctaggtactgttcctgttcatctactaactagctacacaattgtgagcacattgcttctttatctgtttctctaagtccttcttcatcaaaataatttgaatttccattttgctggggtgaaacagtaattcctaatatggtgcttcccttccccacatccactggttgtctcagagcctgctcccaagacacatgttgtcttcaactaaccttgcttaggtttgcaggcaggtaattagacaagagcgtcttggcatttcatcttcatcatgtctatctgtttcactagaagaatacagtattgaagattctgtgttattgaagtttggcgggcataatattaattgcattatctgatatataatacaatttttcaaacacataaatattttttgaatacttacaatgggcagttagctagatacccagtgcatgggctagggttattatattaaaataaaggattcaggtcttatttcaaactgcttacagtctacttggagatacaagtcctacagagagaaatacacctaacaacagaaggcttgctttcttacttcatttggctacagctcaatgtcacccccttagagaggctaccattgaccactctaaatcaagtaataccaagacatactctctgtttccttaccctgttttattttttctccatagaatttatcactagttgaccatttatatttttatgtgtgtgttctcaaatttgttagttgcttttctccttcactcaatttaggttgtataaaggtaaaggctttatttggtaattgttagatcactagtgtcagcagtagtaggtggcacaataaatacttgttgaataaagaaaggaatgatgtataaattatatgcccagggagtaataaacacaaaagtggacaattctgataagaaactctcaagaaaatggaattatgatggacacttactcatcttttaagaatgagtgagaaattctagacaagcagggataagggaacattccgaacttgctctctaggctgcttaagcaggacttgagacgaggcagca

SEQ ID NO: 1879529 - DNA, 4001 bp, Homo sapiens
ctttgagtctcacctttccttatttggaaaaatatttccattgaagtgttatggtgaagattcaatacaattaaatgatataacatatgtaaagggcttagcaataacccaatggctaataagcagccaaggagtggtagctctcagtatagtcagcctctaagaagagagcaaatgtttattttcaagaagaattatgcagaaagggccactttcagtctaccatccccccagattccttgaaggcaggatgatgtgagcagcaagggaagaaaggggagtgggcacgaaatactacagaacctgcagggaacgaagtccctctgtctgtgtgtgcctatatcaataacttaaacttacacattcatgagatgcactgtgtttattaggatgtacatgtgtccctaagaatctgagagctcctgagagacagagacggtgtcttactcatctgctctccccaggtcctcgcttactacctggcacttattgggtaataaatgtctgttgaatgcatgaaaaaagaaaggtaggaaaggtgtgaaggagaagatggaggtcatgaccagtagaaatctcagcagttctgcctgggctccatgtcatctccctgctattaggcccatcagaatgtaagcacaaatgcctagagaatgacaagcttctttgggactctgctgactagacatgacataagactggacagctcctggggaacttccaagagctggctccaggcagtgactaatcctaggagctgctggcttggctgcctctctcccttccttatttccaagattggtcacctcctgctctgaaatagcaattgattttcagacatgagttgatagaaccatgattttctaatactgttccaaagaggctaaagtacctctgaggagcagtgcaggctaggatcaaactctccctaccttccactccactccctaccttgcccctccacctctgcccactttctatttcttcaggcacagcagcttctaccttatggattacaaattctgatcatctatggttgcattaggaaaagagtactgctactttcattttcttttctaaccactgccctagaagaataacacctcacattctctggtagactgaagcctgcagctgcaaggatgctcagaaaaccagacttctattcattggccacttgctgcacgctctgtccctcgatccttgcaacgtacctttgaggtaggcacaaaaattcccatttacaagtgagaaaaccaaggcaaaagaggttcagtttatttcaggctcaaatgtgcttccaatagcttatagcctctacagctagtgtttgaacccaggtctgaaacaaataggattgacaaggggagggaaaagaggaacagaaattcttttctataagacaattgtttatgcagccaggatttcttaaaatccagtttgtgcctacggacataatctttgaatttgctttgtttctcgatgaataacttggaagctattcaaataacttggaagcttcctttaaaaggaacatcaggaggtgatttttgactaaccctaggtgtcctttctgagccaaatagattttcaaataagaaaatgagaggacatgagcttgaggaaaatgataggcattccaacctcatccgcttgctgacgacctccacgtgatttcaacaatgatttcaaatatttcactttttaagtcagtgtgacttaagtatgaaattgcctctccctaaagctcccctaaggcctaaacagtcgtcattaccatagctgtgacagggagactgttgaatttataatctattggccattcacagcatagcgtataaacctagctcatgatttctttgcaatagaagtgtactttttcatcacattcccttcacaacttactcaccagatcagactttgagctctcctcctggcttagcctggatcgtttgaaatggtcatccatcctttggccccaatacctaaactaaggtctatgaacaataagatgattttcttcagtgggacttttttgtttaatatattagatttgaccttcagcaaggtcaaagggagtccgaactagtctcaggcttcaacatcgaatacgccgcaggccccttcgccctattcttcatagccgaatacacaaacattattataataaacaccctcaccactacaatcttcctaggaacaacatataacgcactctcccctgaactctacacaacatattttgtcaccaagaccctacttctgacctccctgttcttatgaattcgaacagcatacccccgattccgctacgaccaactcatacacctcctatgaaaaaacttcctaccactcaccctagcattacttatatgatatgtctccatacccattacaatctccagcattccccctcaaacctaagaaatatgtctgataaaagagttactttgatagagtaaataataggagtttaaatccccttatttctaggactatgagaatcgaacccatccctgagaatccaaaattctccgtgccacctatcacaccccatcctaaagtaaggtcagctaaataagctatcgggcccataccccgaaaatgttggttatatccttcccgtactaattaatcccctggcccaacccgtcatctactctaccatctttgcaggcacactcatcacagcgctaagctcgcactgattttttacctgagtaggcctagaaataaacatgctagcttttattccagttctaaccaaaaaaataaaccctcgttccacagaagctgccatcaagtatttcctcacgcaagcaaccgcatccataatccttctaatagctatcctcttcaacaatatactctccggacaatgaaccataaccaataccaccaatcaatactcatcattaataatcataatggctatagcaataaaactaggaatagccccctttcacttctgagtcccagaggttacccaaggcacccctctgacatccggcctgctccttctcacatgacaaaaactagcccccatctcaatcatataccaaatttctccctcattaaacgtaagccttctcctcactctttcaatcttatccatcatggcaggcagttgaggtggattaaaccaaacccaactacgcaaaatcttagcatactcctcaattacccacataggatgaataacagcagttctaccgtacaaccctaacataaccattcttaatttaactatttatattatcctaactactaccgcattcctactactcaacttaaactccagcaccacaaccctactactatctcgcacctgaaacaagctaacatgactaacacccttaattccatccaccctcctctccctaggaggcctgcccccgctaaccggctttttgcccaaatgggccattatcgaagaattcacaaaaaacaatagcctcatcatccccaccatcatagccatcatcaccctccttaacctctacttctacctgcgcctaatctactccacctcaatcacactactccctatatctaacaacgtaaaaataaaatgacagtttgaacacacaaaacccaccccattcctccccacactcatcgcccttaccacactgctcctacctatctccccttttatgctaataatcttatagaaatttaggttaaatacagaccaagagccttcaaagccctcagtaagttgcaatacttaatttctgcaacagctaaggactgcaaaaccccactctgcatcaactgaacgcaaatcagccactttaattaagctaagcccttactagaccaatgggacttaaacccacaaacacttagttaacagctaagcaccctaatcaactggcttcaatctacttctcccgccgccgggaaaaaaggcgggagaagccccggcaggtttgaagctgcttcttcgaatttgcaattcaatatgaaaatcacctcagagctggtaaaaagaggct

SEQ ID NO: 1879530 - DNA, 4001 bp, Homo sapiens
tggtggtaactgtctcctccaggcattttgattgtttaatattataaaaaatgagtacatatttaaaatgacgcatctgcagcatccccaaatttcagaaaccactttaagttttaaaagctcggatttacatgggaaattccaaacatccttcactttttatcacttactaaatctgaagtactcatttcaacttttcttgacgtgttttattttgtactttactcctttctttcattttgtttaaaaatatcaacacactaaagccaaagtattttaaaatgtaagccaagatgaggtgttttgttgttcttactgcaaaaatagtgaaagagaaccatgaaaaatagtataactaggtctctcttgaatcatccttatctatgtgtattttgacaacgcttgcatcttttaatctttgcaaccatatttcaaatgaggaaatgggatctcaggttagtgttcaaggcagaacccgaattacggtattaggattccaggcaggatcctaagaaatgctttcccatcccccagcaccgacgttttacaatgtcttctctgaaaaacagatttaaaggggagactaagaaatcccggccgggcgcagtggctcacgcttgtaatcccaacactttggaagcccgaggcgggcggataccctaaggtcaggagttcgagaccagcctggctaacatggtgaaaccccgtgtctactaaaaatacagaaaattagccgggtgtggtggccggcgcctgtaatcccagctactcgggaggctgaggcgggagaatcgcttgaacccgggaggcggaggttgcagtgagccgagatcgtgctattgcactccagcttgtgcaacaagagcgaaactatgtctcaaaaaaaaaaaaaaaaaaaagtaagaaaaaaagaaaaagaaatcccttaagaggaaagttacatattataattattcacaaaggaaacaacccaaagcaaaagaaatctgagagccgctccggcctgcgagagacctggttatgcctgttcccttttcatcaattataccccaccccttttaaatgtttcttcatcatcaaaatcctaaatctgatcatttcctgagttaatctgaaggaggcctccagcgctgtgcacactcccagcaaaacacaaggattttagggcacactaagagccacagagagcaccgctcccgccccacaggtacaggaccccaaaggcacttagatctcccgtttccgccaccgacttgttgctccttcccaaatacctgtttatctccacccttatccccatcgccatttccccccttagctcctgaagcgattaaccagcaacagtgagaaacaatgagagagagagagagtagaggtaagccagaggaaacgaatgtctgcgtggcaaggtttccttaggcagtttgtcaggcactgctgaaggcagcctggaaggaagccggaccctgaggccggggagagagggccttgtgtttggagcccgatgcactgattggccgcggccggggaaaaacccggatgagctgggcagcagtgttggcagtcgcggctgcgagatttgggcacttttgggggtgccggtggcccgggccgatggcgcaaggttgggcaggattctctgaggaggaactgaggagactaaagcagactaaaggttacaagatgggtttacagtggtttaattcttgggtcttaaggggaagaggcggggatgcagctttggcggggaaagggggcgtggaagcggctacgtttgtgttagcggaaggcgctgtaagtacgtggactggattagggggtttcagaggaggacttactgggagtcacgacgggaggggcaagccagaggactgggatcttcttttagaaaaaacggtccaggaatccactgtagggatttgactcttgtgaaaggaatgggacttgggagaggaagtgagcctacagccggggtgtctcccttagggaagattgctgcaggaatcaacggttggaaggttagggtcagggtaagggaaggaggaggggcgcacaccgtattagaattgtgatgaatttatagaagcagatggttggaaaaaaggagcacaggcgtctgaataaaggcaaaaattcggtacttttcacaattcatctggagtgttgcattcacttctggttgccagatgatttttgcagtacttcccaatttttgagaatcagcaaaccaaaagggtctttgagagggtagatgtgaagactttatatgtttatatacatacagtcttactgactttggagtaagctaaccttgtgcttctctctctggctttatagagtaatcattgaatgggcttgtacaatttttttgttgttgtggaaggaattaagtttgctgattgttggtggaaaacttagtaatattaattgcactttgcttgtggttgaaatttcgcagtgatctgtatggttatcgtggtagtacacacaatttctgtaagaagtgtacatcactcttggtaccttaattcaaatactttattttggtagcaaatgaagtaaaccttttgttagcgtttgtggggaaattggatgttgctctggtagcttgtgcatttttagcataaatatgagaataatctagggcagacaagtgggaaaagaagtaaattagtaagatagggccaatgtagattatatcgactggggacattttgactggtccaggggactttaaaaactctatcataaaggttaggctaagctatgtagttaactgactctgtgttgcttgatatactcaaattcttttgctttgtgttttcaacatccattcacatactttgatatacagggtacaagtgccctggcctctggtctgactccagtagactcatgaggagacaaaccacaaagttatgtgatagtagatattgcaagaacttgcttcagagacaagaggaacctcactctgccggggattggatggagcttgggaagatttcacaaagtttgtgtgttagcagaggcgcattttccagggtaaagatgacttaatataaaaatctaaattaaacaacatattcattatgtagaagtatattttgaaatatctttgcaaccgggggtagatagaggatggtgaggacctgaacttcaaggcccactgtagtgtggaaaccaaatcgctagtccgtgaccacctcgaggacggaaaatatcttaacctccttgtatacccgtagctaaacacagtgattggcatatagaacttccagctcttcctctaaatcttttctccttggattccttatttgtaaaattagaggatttggccctttaattttaaagccatttctagctgttctctatctttaaaaatttattgaataatttaggaagatggagttggttgccaggaaaaataaggacagtagtactctggagacccctgtatgggcattgaggaacatagtcaagaaagttgttaatagtcttgtttataatattaagaagttggaaacaaccaaagtgtccattaacaagggaatggataaataaattgtggtatactcatctagcgggctactgtacagctggtgggaatatattagtattaactgtagccacatgcattaaaatgtttgttaatacagtatatgtagttacacttggcccttgaacaacacaagtttgaactgtgatggttcacttatacacaaatgtgcatttaaaaaatacagtatttgggggatgcaaaacctgagtatatggagggccaacttttggtgtatgtggtcttcacagcgccaactgtgggacttgagtatgcacagattttggtatacatggggatcctggaaccaattatcctcatataccaaggatcagctagctgtatatataatatatacagtcacgcactcaataacagtatttcagttagcagcggaccacatatatggtgatggtctggtaatattataataccctgtttttac

SEQ ID NO: 1879531 - DNA, 4001 bp, Homo sapiens
aaagaaaaacttgaaaatgcagcaaaagctctaacttcaaaaaaagcaccagttccagtttgttttatcagtaagttctaatacatcataaagaacagataattcctggattatttaaacattcggccagtacaaactatgaaaaacttcccaatacacttcactgacaaatttaattctgatactaaagtatactaaatactaaacaatagtaaaaataaaatacatattgggttattcttaaaatccaaagtcaaatattagcaagtctaattaagaatgcttttgacagcaagtaacagaaaccctgactccaattatctttaaaaatgagggtatttctgaactcaacagaaatctagaagtaggataagttttaggatgggttgtggtttaattacgttattaagaacccaggggaggggggccaagttggccaattagaagcagcagctgtctgtggcactcagggagaggaagaaaggagcaagtgaatatagcaccttcaactgaaatatccaggcactcacactgggactgatcacagaaacaactcgacccatggagaagagagaaaagcaaggtggggcaatagcccacctgggagcaacatgaagccaagagaactcccacccccagccaagggaagcagtgagtgagtgtgcaaccccaggaaaccacgcttctcccacggatctttgcaacccacagatcaggagatcagtgcacccacaccaccttgtgcacccacatcaccagggtcttgggtcccacacacagaggtgtgttgagtctcagcagagcagctgctcaggcatgcatagagatccaggaactttacatattccggccccaggatccccaacagaggtgtctgtaactcaggcaaggtgggaggtctgtacatacccctaggaagggggctgaatccagggagccaagcagcatcaatctgtgggtcccacttccacaacacctcacaaaataagacctactggcttggaatatagcctacctgtgatgggacagagtccccagtgggaggggtgggctgccatctctactgtttggttgactcagccatttcagtctatgggcttcggagaatccatatggttcaaacaaggaagggtcttcccagaacactacagcggcattgcctgaacgtggccaggttgcttctttaagtggggccccaatccattcctcttcactgggagggacctcccaaccggggcctccagccatctctgcctgtattccacaaacggatcctgatctctttctggaatagcatgcccgaggggaggcgaggagggaaggaggaggggaggggaggaggggaggaaaggagggccaccaagctggctgtttgaatgactcagccattccaaccagtgggctttagagagtccaagccaacaagggcagaagcagtttcccagcacaacaaggctgttctattgaggcatggccagatggcttctttaagtgggaccctgatccacttttccttgacgggtagatcatgccagctggggtatccagccacccccgcccatgttctgtggccaacagacttctaatttttccctgggacagagtgcccagaggggaaggcgggccaccaacttggctgttgggcacctcagccagttcagcctgtgggcctcggagagcccaaaccaacaaggggctgatgggatccccaacacagcacaactgctctatcaaaaacagcccaactgcttctttaagtggatccctgatcccgttcctcctgactaggtgagatgtcccaactggggtctccagccaccccctacatactgtgtgctcatgctggcaacaggacagtaccgccctgggatggagcttccaggggaaggggcaggctgccatctttgctgtttcatagcattcactgctgatacctccaagtacaggaaaaactgaggcaaccagggtgtagagtggacccccagctaactgcagcatctgtaaggaagagtaaacagactgctaaaagaaaaagatgaaaaaacaaaacaatccatgaaagcgccatccaaaggtcagcaacctcaaagatcgaagatagataagcccacaaaaatgagaaagaatcaacgcaaaaatcttgaaaattcaaaaacccagagagccccttttcctccaaatgatcacaacacctctccagcaagggctcagaactaggctgagcccaagatgacagaagtaagcttcagaatgtggacaaaagccaattttgctgagctaaaggtgtatgtcctaaccaaaggcaaagaagctaagaatcatgataaaacaatgcaggagctgacagccaaaacagccagtatagaaaggaccataaccgacctcacagagctgaaaaacatactacaagtactcgcaatgtaatcccaagtattaatagcagaatagaccaagcagagcaaagaatcccagagcttgcagactatctctctgaaataggacaggtagacaggaatagagaaaaaagaatgaaaatgaatgaataaaacctctgagaaatatgggtttatgtaaaaggaccaaacctacaactgattggggtacctgaaagagacaggaagaatagaaccaagttggaaaacatacttcaggatatcatccaggagaatgaccccaacctagcaagataggccaacattcaaattcaggaacaagagaaccccagtaagataactattcaagaaaatcatccctaagatatgtatcagcagattctccaaagtcaaaatgaaagaaaaaatgttggctgggcacagtggctcatgcctgtaatcccagcactttgggaggccaaggtgggtggattacttgaggtcaggagttcaagaccagcctggccaacgtggtgaaaccctgtctctactaaaaatacaaaaattagccaggtgtggtggcacatacctttagtcccagctactcaggctactcaagaggctgaggcaggagatttgcttgaacccaggagacagaggttgcattgagctgagatcgtgccactgcactccagcctgggtgacacagtgaaactccatctgaaaaaaaaaagaaaaaagaaaaaaatgttaaggacagccagaaagaaagaccaggtcacctacaaagggaaggccatcggacaagcattgggcctctgagtggaaaccctacaagccagaaaagattgggggccagtattcaatattcctaaagaaaagaatttccaacccagaatttcatatgcaaactaagtttcataagcaaaggagaaataagatccttttcagacaaacaaatgctgaggaaattcatcactaccagacctgccttacaagagctcctgaaggaagcactaaatatagaaaggaaaaaccattaccactacaaaaacacactgacataccaatgatacaatgaagtatccacataaacctgcaaaataaccagccagcatcatgatgacaggatcaaatccacacataaaaatgctaatcttaaatgaaaatgtgctaaatgcctcccaaaaaaagatacagaataacaagctagataaagagccaagacccattagtatgctatcttcaagagacgcatctcacgtgcaaagacacacataggctcaaaataaagggatagaggaaaatttaccaagcaaatggaaaacagaaaaaaacaggtgcaatcctagtttataacaaaacagactttaaatcaacaaaaatcaaaaaagataaagaaggccactacataacagtaaagggttcatttcaacaagaagagctaactaacctaagtatatatacacccaatacaggagcacccagaaaaagaaagtacttagagaccttcaaagagacttagactcacacacaataatggtgggagactttatcaccccactgacaatattaggcagatcattgagacagaaaattatcaaagacattcaagacctcaactcagct

SEQ ID NO: 1879532 - DNA, 4001 bp, Homo sapiens
gaggctgaggtgggaagattgcttgagccttggattttgagaccagcctgggcaacatagtgagaccctggctctaccaaaaaaaaaaaaaaaaaaaaaaaaagctaggcatggtggtgtgcccctatagtcccagctactcaggaagctaaggtgggaggatcacctgagtccaggaatttggggctgcagtgtgctgtgattgcgccactgcactccagcctgagcaacagaacaagaccctgtctcttaaaaaaaaaaatgatgattgagtttgataatcaggaaacttaaccaaatcttatatgtaagcaaataaatatgtttttatttgtttgttttattttgagacagggtctcactctgtcacctaggctggagtgcagtggcatgattttacctcattgcaacccagcctcccaggctcaggtgatcctcccacctcagcctcccaagtagctgggtctacaggcatgtgccacgatgctcagctaatttttgtatgttttgtaaacacaggttttcaccattttgtccaggctggtcttgaactcctgaactcaagtgatccacccaccttgacttcccacagggctgggattataggcatgagccaccacacctggccaaaataagttttattagaaataactcactttgggaggctgaggagggcagatcacttgaggttaggagttcaagagcagcctggccaacatggggaaactccatctcaaataaaatacaaaaattagctaggcatgggtggcatgcaaaaaaaaaaaaaaaaagaactaatgcatgtgaaattcaaatattagtaagtattcaaaataagatatgaaagtaagaatacaaaatagggtgatatcactggttgatatgattagtgagatgaacattattaaggcaaattcttccgataattattgttatacaacatgattaatatatattcagtctgaaagagtcatatatacaaatatgaaataaacacctcaaatgagaagaagagagaaaacatggagaatgaagaaagttgggtgtattcttttcagtcttcccctcccatatctccgtctgaggccagcatggctaatattgagaaagagtaaggcaaatgagtaattattgtgctctgtcttttactgttattgaaggtcactgtttaacactccctcgccattcccctaaccactcccctttgccttaaattcattaagctgtattctttgtatttcctgataacagctgacaaggacccactctcatctgtaatgacaggtgagggtattgatgataagtagagttaataaagcttctccagtgatttagaattataacgctctgagtattatcatcaggggaatagatgaaaaagcccatttcattttgtgcagtgtccttcaaactgctggttatgaaatcattttagagggtctgtgaaatcactgtggaatacgatgaaacgtaatagaaagtatcagcagacactgtgggagatcggtcagagcggtggggaaaaactatagggaaaggacgcaaaccttctgaaaggtcagaaggttctgcagagccccaggggagaatagctgaaggcagctgttctgtaaccctgaggcattgggcaaggagtaggtacaaggcagtgtaggggaatttatcttaaacaaacttgtttacttatgttgaccaggaactgacctttgatcatccgtggggacggtccccctgaaaggggaacaataaatgttaattacctaagaggtttttaaatttctttctccagaaagaaaaatttcaagcgtctgaatcccattcagtattctctaaaataaaatcaagtttgtcctgaaagatggtttaaaaactgaaaatctattttctttgattacctcataaataacaagagtttcatatcagctctcctgtctcttcctcctccactcttttcccctctttcacattgtgccaatcacacaggtggatgctcagtatcaccccacagcacaagataaataagcttggaaggtttcctagcaacatattgttctgggaacctgctctgtttccctgaacaagatgaagccaaatatcctagaatctcagccagatgggaaaggattagcttattgagagtgttattgccttttttaaaaaaatgtttcactttgaaatgaacctcttaatataagtagcaaaagtgacttttaaaaggacatgtaaaaatatccctttaaaaggacatttttttctcttacatgtaaaaaaaaattgataatagtttgaagtttaaaaatatggtttcagaattctctaggcacaagcttccagtatgtaattcagtcactggtgagtggatccattttagaaccatgtagaaaatacttccacatggaactaattctcagcctggtgtccagtggtatggtattcctgctgtaaaaatactgaaatacttccgatctggtgggaaaatggctcctggagtaggctctctcctcacaatacctttagctgctccccttggcccttgtttctgctcctagggaaacattggagacaccttgttactgcttaaaaccctgaagcttcccctttttctatagctccagggctattttagtgctagtgatttgcaacttcatcttcagagtctatttttggttttctcagtgtatgattaatgtatatagagaaaataaaagaaattgagactgctatcaaagccaagaaaaataatgttgtcgttttgttaacacatgattgtgtatatttcccttgtttatctaatgatctgtgaggctacacagttggcaggtggtgctttcctttctattgcactctagttggtcacagtatacttgttagaggtctctggagatggagtaataaaggattcgtgtttctcataacaatattcagcagtggctttgcaattcagttacaccctggaaaatgtcctcactccttgtttggctggggagacattcccccatcagccagatgaatattctcataatgtggttgttgactggtttctatcatctatcaggtttggactgagtttgtgaaacttcccaattgtggtgagaagcagataattctagtacttcatagtgttcctggataagaagaacaaagtaattagaataagatggggaatgacacctggagtctttgttttttatgtaacaaattatctggccagatgccagagaattagtactgtcctcattttaatgaaaataaggaaattgtgagataattttatattcatgctagatgctttccattctcttttgctctctcactcatatgtatatgttttctaaataccatattttaaactcaacaaggaacaatctgttgagggcctagtatgagccaaatactgctaggtattatggcagatactgagggcaacacatcatccttgccttctcagagtacgcaagaagtttgcaacatagcacgtttgtaatcttaaaccaaacaaaaacattaaggaaaggtgttgctgtgtaaaggaatcataggctaggcacagtggctcaggcctgtaatcccaatgctttgggaggctgaggaaggaggatcgcttcagcccaggagtttgagaccagcctaggcaacatagccagaccccatctctacaaaagttaaaataaaataatataagtaagggaattctataactttgattgtccaaagaaaggctaaaagtagatttaatatgtattatggaacagaataagttctaatacgttaattttgattgaatacttattttaaaaaaaattttaaaaatgtccataaaccaggcattgttttagatacctctctgttaactcatttaattctcctgacaccattatgaggtagaaattttgtttacctgctattttatagatgaagaaactgaggctaagagagtttttttgtttgtttgttttaaaagacagggtctcattctgttgcccaggctggagtaagtggcc

SEQ ID NO: 1879533 - DNA, 4001 bp, Homo sapiens
tgtaaaacatcaaaaacaacaaatgcagtaacagaatgcctataaaactataaatgttttctggaaatgtagtctttttgcttttcttgggataatcctgtggttcttcagcagtgattggtgtgagttctacagaaccgctgctatgtgcatggagacccagaagagatttttgagcaagaaggtgtcagccattcaatgtttattgggtctaccaggtgcttggtgctggcctggagggcctaggatgacaaaattactgtccttgagaagctcacagtttatttaatgtgaggcacatacaagtaaccaagcaaatacaacataagagccagactggaattatttatagtgtgatgtgggaccctggggtggggaataaaaaagggtatcaaaaggagcaggatcaaaaggagcaggatctggagctggacccaaacagcttaagatatccacttaagaaagatcactccagcacctgtggggtacatggctgggatagagaagaaactctggccagagaaaccattcaggaggtttttgcgagttaggatgataaagggatctaaaatatagggcagattctacggagactgaagaagaatgggtgaaatatttggaggcaaaattacttgtgcttggtaaattgttagaaagtggcaaaggagtcaagaataattcccaggtttgtggtctggggattaggcagataaaagaggtgagggcactaagaggaaggctgggacctttagtgccatctccaccatcagtctccattccttcaaacggatagttgacattttctcaatgttttgtacatttccaggcaaaataaaccttcaggaccaccttccaatgggattaccatgtcaaagcccctcctatatcatatggaatctagaccatcactgtgtgtgtgtcaagggggtagggacaatgaccagcattataatctatggacaaagttgggcttggttgcagaatatatttaagtttggtattctttgtatttttaaaaatttgtttactttttaagaatttgagacagggtttctgcatgttgcccaggctggcaactcctggcctcaagcaatcctcccgcctcagcctcccaagaagctggaatcacaggtgcgagccaccccacacaactaaatttggaattatgaatatggctgaggtccagaaatatttaaatttggcatgatgactaagagtttgttataggagctcaatcatttgataaatattgaacatttcctatgtgtcagattgtttttcccactagggatgcagaggagaacaagacagaataggttcttgtcctcatagagtgtgggagacaggcagaagacatataatttcaggtaggtataagtatcataaagaaaaaataaagcaaaacaagagagtgctgggaaaggccagggagcagagaggatgacagagctgtcttagggtgttcaagacctctttgaaaagctgatatttgagcagaagaccacagcaaggaaaagtggcagagactgctagctgcctacgcatgaaatgatgggggaaggagcaatacagaaggcatgtaacatttgagagtctattaggcatcccaagggaggtgctgcggaggcggatgcatggaggcggatgcggaggcggatgcatggaggcggatgcatggaggcagatggatgcacacgtctagagtttaaaaggagatctgaggcggagatacgaacttgggagctgttagtccagttccaggttccaattcaacgtacttttatcagagctcactgtgcgccagggacttgctaggagataaatggggtttatctcaccggagataaatgtggttgcacagcagatggacacaccagccaatgtggtaaataaacccttgggtccagctacgttctgcgcgctctctgccagcacagaggagcagcgagtcagggtacggagcgggtagcgttggggaagaggtggccgcgaagcgagacaggccagcggaacggaaaacggaagcacgagacgggggcgtgacgcaccgggcgcatcacaaagaacggcgagagggcggtggcgccgggggcacggctgggcggctccgcccagaagagggccgagaggcggggcggtgcccccaccgcaggcccgcggcgccctctgcaggccacaggcagcgactcaccagttgcctcatctttcctctcctccctcttggggctttcctcaggccacattttttgtgtgtctgggcagtctctcagcctccgactcccgtccctttcttccacttccaggccgggcgtgttagtgtcttcgcgggaaaactgccaataaagtttttcttcttctcgctcccaagatccccgcctccccttaagcaccgcgagatctgacggcgcggctaccatggcggcggcatttgaagcctcgggagccttagcagcagtggcgactgctatgccggctgagcatgtggccgtgcaggtcccggccccagagccaacacccgggcctgtgaggatcctgcggaccgctcaggatctcagcagcccgcggacccgcacgggggatgtgctgttggcggagccggccgacttcgagtcactgctgctttcgcggccggtgctggaggggctgcgggcggccggcttcgagaggccctcgccggtgcagctcaaggccatcccgttggggcgctgcgggctcggtgagagcgggggcccgggataggtcggggggtggggtgggagaagggggaccgacgggcggcggcggccaggcccgcgccgcagctcaggaagagccctcggtcggcccccggagcagggccctgccgggggctaggcgctacgctcagttaacttatttgtaaaactaacgtgcactattgaacttgaggatagttaagacctttttttaagcactgacaaatggttctaagtttgagaagataaacggtaaacgttcagggactaggcgtgttctcatacgtttttgagaatcaactaaaaatgaaggtgccaactaggggaatctcaggagacccttctagttctctgattccatgttagcccctaagttgcttcagtgagtactggctagtgataattgtttttttccttcgcagatttaattgttcaagctaaatctggcaccgggaaaacctgtgtgttctccaccatagctttggactctcttgttcttgaaaacttaagtacccaggtgagttagctgagaggaccagaggaggatgtgttttgtggactttaccacaggtcagatgaaataccagtagctcctcagagctggaagtgaatttgatgaatgattgagttaagtggtggtggtggcgaaatttggaattttctatgcgtaccttatttaaatagaataaagctaccatatatgtcaattttgtcactacttggtaatacagacagggattcttcttttacttactgactagattaatgtgagacttaacatttgacttgattcatggtaatgtagtgctctggctattgttggtaactgcagagtttgttttttttttttgagacggtgtcgctttgtcacctaggctggagtgcagtggcggatcattgctcactgcaaccttgaacttctgggctccagtgatcctcccacccatcttcctaagtatttgggactacaggtgtgtgccaccacacctggctagttcttgtattttttgtagagatggggtctccagtgttgcacagaccagccttgaactcctgggttcaagcaatcctcccacctttgcctcccaaagtactgggattacaggcatgagccaccacagccggtatgcaggtggttcttaaagctctgtaaatgtatcatattgatctcccatcttccaggttgtcttagagtgtttctaagattgccttacccaaattagcaggaaatttgagtttggggatcatttctccaacaaaggtttgttgagtccgtattacgtataa

SEQ ID NO: 1879534 - DNA, 4001 bp, Homo sapiens
gcaagttagcatcagggttgggacttgggcccaggcttaaggaaggctagttttagttgcacctttttgtttccctttagtgataacagtaaagcctttttagaagaaagggcaggttgtttgatttgaaggacagcaagcaaggtgggcgctggggccttctagggaaggaaagcaggtgaagttccccgagtcaagggaagacaggcaagggagacaggcacctggtaatggtgggcaagtgagcctgagggtttagccagaggcgtgggcttcctggtaagagaaaggaggctaccagtacacagcaattcagctttttctgttgagggcctcacgtgcacaggctttgtgtttcccacttgccgtactttatctcacgccagtcttacgacacaagcattctaagtcacatttagcatatgagtcaatagaggatcaggaaagttaaacatttgccaagatctcacagttgctcagcggcagagctgggatttgaacccacgtcagtgtgactccaaagttcctgctaagggaaggaaacagttgctaaggtgtaagcagaggaaacagttgcttagggccaggactcctaggccccagtagccctgactcagtgtggttgccagagctttctgccagcagtttcccaggcgagggcccctggagctcacaagcccatggccaggcctgcttgggaaccctttgtcacattagcttgcattgccaactctccccagcagtgccctccccacttgcaccagccaaggaatgagtcaaggttgccaatgtgttcttggctgcctggaagcatccatgtggatttcggcatctcctgggccaccttctcgtgacgaacaccagcctgcagatcaccgctataagagttctagagggagggcttgggcggagggagggctccacaggacctggctgtgggccaaatgctcgtttgtggctgggcatttcctcccaacaaataaacagacaatcattatttttctctggccaaatggaagctggcctcagcgtgcgcagcacaagagcaataataggggcttatcgacagacagggagcgcttaataggccacagaccgatgaggatcgagatggatggaggctgcgctatcgatcgccagaacccctccggctctcccagagggactccctgccccctgttctctctcgtgggcacgcgattagctggactgtggggagggctgtgcccttctacccaaattccaaggggaaggagcatatttgtaattgggagaaacataacagactatcaaaagtacatgacctcagctacaaaacttgggtacataagccatggttctattttccttctacaccagtgcaaaaatagcagatttttcatcaagatagaaagcaagactaccataaaagtagtccccctattcttatccctttatagccagagtcaaatagtgggaaggaaattccctctggtcaggttgagctcagggtccttgaagcccctattaccagaagctggggcaaaagaagagaggtaaccactggccgcacccgtctgtggcctgtggcctgtggcctgtggccagagcacggaatgacaatgcaccaggaacagaggccagcccagccctgtggatctaggtccaccggacccctgagggtcagtgacagccttaaagttgtgggagacgtatgagtgatccatagcattgatgagattggcagaggagtgggcacacatgaagtacctggatcttgtgcaccatcccccctttcctggtgtggacgtggggggctcctttttgtgcttgtcagcacagctgtgagaagaggtccctgcatctcacttgccctcaccttctttcggcctccagtgccagtgagcagccccatgccctgtttcttgaatgcaggagcacgttgtgctgaactgataagcctgcagagcccaccaggccctgacctccagcccctcctggggaggcaactctagccccactcattcacaatacccatcacatgtaaagggactggccttgcaagagcagctcctccctgccagtgtgacctcatctagagtgcatcaggatgccccatgagcggcccaggcctcattgtcactgtggacaggatgggcagggtggcctgcaggtagtgctcctgcctaaggaactgcctagtggctttgatgatgctgaggattaattggtctccactcaggcctccttgagggaatcacaagccgggttttagcagggctttctggagtcttcagaagagagtcactggataattggggggtgcctagaaatggtcccagggtgaagtgaagaagctggaattagcctgaagatggggaggtggcagggtgctgaatagatgagggttttccagagtatggatggctgccattggccagaagcatcttctgccaggaaagccttgagtttgacaataaactttggaagccagggattcctgagggagatgtttgcttctaggtggggtcaatgaggtgacttgctgtcaccctttgggagccacctttacctaggtgagagcaccattgcactagaactatgcgtgtgcgggcctggtggcctggggcatagacaggataacctctcaaggcttctgtcagtctacgagtgagctttcctgctcggctcaggggtcaggtggcagctgcgggagtggtccctggtaacagatatgagggttgccacacagtatggggtcagcgtgtggcagctgcaggagctgggaaagccagaaagacaagcccagggcctttcccagggagaataggaggaatcaggccaaagcatgaagctaggcacatgctgcacaacatctccagctgaactgaggatccagagacaggaagccaggctaattagggggccaggatgtgccgggattggagctgactgtagaagaggctagttttgctgaaggcctcctgggggtagcaggataaagtagaggaacgagcccaaccttaggagctgggaggcctgagctctcacccagcccagccacttcatagttccgtggctctgggcatgctacttctccttcgtgagcctcagtttcttagctacaaagtaaggagaaatactatattgttgaggggaatgtaaagcctatagcaccgtgtccgttattcaggaagcactcaacagaggacaagatgctgaggtcaagacaccctctcttccatcacggtcttctctgacctcaaacataccacttcccagtgtactgggtcagcgcctgcatccagatgtccctggtgcagaagcagattggctgggccatcacacacccagagggagccgtgaggccagaaaggtagacgggaaaggtactctggtgctaacttgagttgggtagatgtgggaaaggagacctgactcacagcatctgagttggtggaataaagcgatgctgtattagcgacccaagtctggccttgtgctgggatttttttttcccctgatgaaggaaatgtttattagatttagatctatccagctggactctgttagctaatcctgattttgttgtcagcactcacagtgccaccatctaacatgtgtctcctctccatcaagcctgggtggggtgggatcccctccggagtggtgtgtgagcctccccagagcttacccagctgggcgcctgttccctgatgagaacccacgtggcattgacctgtcttctttatggttcactctgtggctggtggcattggatttgcatcaaggtggtctcgaggatggtcttctgaaagttcttagggtgtcttgggtcctggaagatgggtgacatatggatctatttctttcttatggttataggccctttcagcacaacctctgtggccttcaaagcttttgccttggtttcagttttgggaagggctagggcttccttcttgctttgagcaccatattgacagaaaggagtgtctgagtctatctgacagcctggtata

SEQ ID NO: 1879535 - DNA, 4001 bp, Homo sapiens
gcattttgtacagcaaaagcaccaacacaaagcacaaaaatatgaccaaacgtggcactaaccaggcagcaaaaaggacacttgctgaaaatataaaactagaaacaagaaggcagaatgtgctcttgtttgacctcagccaggaacgtccatgactcaaactcttcacctgtttttgcaagtgcatttctgcaaacaatggcaaaagtgccataagcattgattttggggttacaaattttagggaataagcaaattcataaatatggagtctgtaaataatgaggagcaactatattgctatttacacaccaaacactgtactaagaactgaagataagtctgctaagcaaaacacacattgttccttccctcacggaatatactaagtcaaactcctgtgtatactgtattttgaatcagtctgcttttttcaaattctcccccagctaccctaattcttatgacctatatttgccatttgggcaattacttattaaatgatttacttctaatcttgcccccttctattcattctctaactatgggcagaccaattcccttaaacatgaactgaattgtgccatggtctgctttttgtcctttaatgatttgctcctcaaatatttactgtgactgcagagtcctgttgatctctgcagcctcatcttgaaccacagtctcctttcactcatgctcccactacatgggcatcctttcaggttcttgtgtgtgcaaaggcctttcctgcctctcagcctttgcacatgttgttccatagggctgtgcctagagtactccataaatttgtttgtcctccgatctaatataagctctatccccttagaaaaacctccccccgaacaccaaggcctgccttgttattctctatacaaacacaccttgtttgtttcttttattacacacttaatattttataacatacttacgtttaatattttctttatggtttactgtgtcatccctcactagacttttaattccaggagagtagagaccatgttagttttgtttaccacttttttctcagtatccagtacagtgcctggtacacaataagcatgtaattaatatttagtaaatgaatgaattcatgaattattaaataatttccttagagtatcaaagagtccccatataccagcttgtcagctaaagtagaaaagctccaatattgtcttcatccagttttcttttgctgtttctagtaattctagagaactttattccagttcttattctggatttataatttagcattttcattaggtctaggagtccactctaataagcagaaccgtagcaacctattttcttatcaggttcccagattcactgcgcaaccatgggctttataaagtattcttgaggctctcctagtcagtcagtgccattgaaggctattctcagacaaccccacatccttgcacagtcagcaatatagctggcttacattaagcccttttaccggtgagtgagcagtcatgtggaccaaatctttcgaggaatcacctgaacctaagttgccctttcaatcacttgtagctcaggccattggcctcgaaatactctgagctgcacaaaagagaactggtaacaatagccagaaagttcagaaagtcctgtttggacccagtatatgaaagaactttttaatagtcatctgactgaagacaaatggactgcttgagtaggtagtaaaccccagtccttaaaggggttggaaagccattgtctggaatgctggagagaatattattgtagttgatcagctgacggtcttagagtttttcaggctgtgacctgtggaccaactgcatcaaaatcatctggagatgcttgcagggcagtgggattagttgtggtggccctagcatgcttgttgaaaaccatttcttactttacaccccagccttagatatagatggtatgggggatgcagcatggagaatctctgagctttagaattctgacacagatagtctctaaggtggttttatgccttcatattttggtcttgtgatctcataattatctatttattagtcaacaaatgtttttgaaaactatcagtcaatgttattggctttggagattttgatgaattaatttcatgtgtcaattggctaggctatggtacccgactacttactgaaatactaatctaagtattctcgtgaaagtattttgtatatgtagttgatatctatgttcagtttacttcaagtaaaggagattatacttgataatttcgtttatcagttgacaatgttaagagcaaaaacaggtttcccagagaagaaattctgcttcaaaactacagcttgaaacttctacttgagttttcattctgttaatttgtcccacagatttctaatttgccagtcttcaccattgcatgagctaattccttaaaataaaactcacatatatatatatatatataataagtatattttacatatgtatgtggtatatatgatggtatatgatagatattatatatgtttatgtatgtgtatgcacacacacacacacctacacacacattcacgtatttctctggagaaccttaactaatcaacagatatagcagagaacaaaactaaatcacctgatctcatttcaggttccacagagtgctgagtattattttttcagtctttttacatttattaaaactgttgagatccagcatatggtctatcttgatgaaaatatcatgtacacctgaaaaatgtatattctacagttgtagtttaaggtggttgaaagtatggtttggatcactatgtctttactgatttttgtctaagcattctataaatttttggaagatgggtgctaaaatctcctgctatgattgcagaattgtctgtttcttttaattctgtaaatgtttgctttatttggttgtagcttattattaggcacatgccacattgatgattgttatgtcttcttgataagatgatccatttatcattttgaagtgtccttctttaatgttactttctatcttgaaagcttattttatctgatatgaaaatatccctggccaccttattttttagtttgcctagtatatatatttccattaatttacttttatctgttcatttatttttaaagtgcatctcttgtaggcagcatgtagttgagtcttgcttttaaatttattcttacaatctgactttttttggagtgtttagttcattaatgtttaatgtaattattgatatttttggattttcatctgccattttattggatttttttgcacactttgttgttcctttatttctcctttcctgtctccttttagactaaatactttttacaattctactttattaaattactttttttgcatttttagtggttattctaaggactgcaatatacatccttcacttttcatagtcaacaaggagttaatattataccaattcatgtaaaatatgaaactttgtaagtgtataggcccatttatctccctcaacctcaatgaggtcttttaggctatagttgtcatatgtattaagtccacatagaccctataagacaatgttacaagtttcctttaaatagtcctatgtattttataaaaatttagagaaaactagtattttatatatattcagatatatgctatttccaatgttctgcattccttcctaagaatctgagctcttatctggtatcattttctttcaggatgaggagcatttattatttgtagtgtgaatctgctggtgatgagttctcacttttagaaaatctgaaaattctttaattttgcctcattcttttatttatttatttattttacatatatatatttattatactttaagttctagggtacatgtgcacaatgtgcaggtttgttacatatgtatccatgtgacatgttggtgtgctgcacccattaacttggcatttacattaggtatatctcctaatgctatccctcccgc

SEQ ID NO: 1879536 - DNA, 4001 bp, Homo sapiens
tcatggaatgcatagccttgattttactaaagcgtaaatcattggtaaggtattggggagggcagggagctgtgtgcaaataaagaagaccatgcacaggcagggttccactgatgaggagaaatgggcaagaaacaggagaatggaaccttcctctctcttcctctgtcttccttgcaatttagctgagggccaaatctgtaccttgcagccagcgcagctgcagaacagggcaaggaggtatctcaggtctcctagagggatccttggaatgcacggagcagctcacttctcgctcataaccctccaagagctcccctgtgagcccggctaatgcccacaggaccccaggccatcttccctccacattcccgctcctatcccttccccacctctcactccacaccagccacattgggttccatcctgtccttgaaaatgcccagtatgctcctgtcctggcacctgtgtcctcctggtccctatccctggaatgttcttccttccttcagagatctaagtggctcaaactgcattctatctggccctccctgcccaccctatctcccttccatcctaccactttctatgcccctctcttgctcattttttccatagcccttgccaccacctgatgtacatatatttacctacttactgtcagtcttcctccactagaatatgcacacgtgatagagggaacatcgtgctgtgctcctcatggccatattcctggcctcccagcagccttggcctgtattagctggtcagtgacctatcatcagataaaggaagctgctgtgccacaccaggtgctagaggagctctgcagctgctggagggcccctgcactggggctagtgtcctgagggtcaggggaggggcggctgggctttagatcccttcctgccttgggcacagggaagaccccaaccctacctggaagggctgctgtccagcaggccccacaccgcctcagcaggccccacacggccccacacctcccagaattgcttacctcaggctggggagggagtggccttgggttcacctgttttctggctcttcctggcagcctctgccgctccagcctgggtggtggggagtcagagggtccatctaggcagtgcattttctgtttcctgcagctgccgcaaaaaatcaccacaaactcagaggtttaaaataacacagtattattcttacagtcctggaggtcagaagtccaaaataaggctaatggggctaaaatcaaggtatcagcggggctggttccttccaaagtgtggggaagacaatccatggcctgccttggcccctcctccatctccaaagcacagccctccagtctctgcaagcgcatcacttcagtctgtgcttcccggatcttcctgccttctcctctgactcttgactcctgggtccctctgatgagaacctttgtgattacctggggcccatttagataagccaggctaatcacctcaagatccttaaccgcatggacaaagtccctcttgatatatgttaacactcctagtgccagggattagggcataaacatatttgggggctgttatttagcctccctcaagcaggaagggggcagccctgctccccaaccactgtcaggatgttactggaaagaagtcctgatccagaccctaagacagggctcttggagctcacacaagaaagaatttggggcaagttcacagagtaaattgaaagcaagtttatttaaaaagtaaaggaataggccaggtgcagtagctcacgcctgatcccagcactttgggaggccgaggtggatcaccagaggtcaggagtttgagaccagcctggccaacatggtgaaaacccatctctactaaaaatacaaaaattagccaggcatggtggctcatacctgtagtcccagttactcgggaggctgaggcaggagaatcgcttaaacccaggaggcagaggtcacagtgagccgagatcacaccactgcactccaacctaggcaatagagtgagactgtctcaaaaaaaaaaaaaaagtgaaggaataaaagggtggctactccataggcagaaccgccccgagggctgctactggctatttttatttcttgatcatatgctaaacaagaggtggattattcatgagttttctgggaaatggggcagagatttccctaggaaccgagagctcctccccattttagacatacatggtaacttctgggcatttgtaaactgtcatgcactgatgggagtgtcttcagcatgctaacgcattctaatcagcatataatcagcagtgagggtaaccagaggtcacttttgtcaccatcttggttctggcaagtttgggccagcttctttaccacatcctgttttatcagtggggtctttgtgacctgcatcttgtgacctcctgtctcatcctgtgactgagaatgcctaacctcctggggatgctgccccagcagctctcagcctcatttcacccagcccctattcaagatggagtcactctggttccaacgcctttgacaatgacgtgccaggcacctgccccaccctgctgaggtgggaccttgcctcccagagtccttctatcagctcctcctcaaccccagcttcagatcccccaacacccaaccccaggctttcccacagttccaggacagctgcagcccctggttacacctttttgctaaggctgaaccagggctgggcagtctcaggaactggcgtctctgaggccgggatggtggcacctccttcaactttgcggggaggggtacagagacaaggcagggatgagagcgggataggttaatgtctcaaggtcagtttcacacttttttcttctgttcttttgcctcctgcttcctctcttccccagaaaacaccctggcttttctccctctagttctccatcctcccctaccttagctagtgacactcagtgcatccagcactttccatagtcagtgcatggagaagggcattcacggagtctatgctggggctctcgctccccccaccccaccccacacatgggaatcacattctgaatgatgttcgatgggaaaagaggccaagcacatggacactgccccacctcagcccagggtgaccacaagagctgcagagccagaagggccactcccagtgccaccatcatccctgatggctgtgagactcacccccacagagactcagttttctcttctataaaatggagatcatccctttcaggatgaccgtccctacctgtggtccccaaactactgtcataactcacaaaatatccatgatatggaagaatcgttgtaacagcagaacaaggaagaaacagagatcatggctgcaagaaccttagactgcatgggcacctggggccagaggtcaggggaacctacagcatccaagaccaagccttaaccagggaaagcaccaactttcacaatggttttatacgctggaacagcccccaggccccttccattgtcccccctcaggccccagcacaccccacagggccaaagaagaggtcctctaaccgcccaaggggttcaccttgcctcctgcctaaacagagccaatttatcaagacaggggaattgcaacagagaaagagtaattcacgcagaaccagctgtgcgggagatcagagttttaatattactcaaatcagtcttctggaaaactcagggatcagagtttttaaggataatttggtgagtcaggggccagtgaatcaggagtactgattggttggccaggggatgaaatcatagggagtcaaagctgttctcttctgctgagtcagttcctgggtgggggccccagaactggttggcaggtccaggtggggccatccagttgttagaaatgtaaaaacctgaaaagacatctcaaaaggcagatcttgggttcacaatagtgatgttaccttcaagagtaactggggaagttgcaaatcttacgacctctggaata

SEQ ID NO: 1879537 - DNA, 4001 bp, Homo sapiens
tattaccataatgtacccgattatcagattcaagaagaaaaacaataggatcatgtcaataaatgcaaaaagcacttattaaacttcagcatttattaataatgaggattcgtaggaaacagccaaagaaggaaactttttaaactattaatagtacttatacagaaaacgtttccttaagtaagagagagaaaaaaatcttaagagtttatagagtttacagtttccaacccactgataaattcaattacagtgagcattcatttaattgctaaaaaaagaaagcagctgaccagtaaagcctagctaccaatacgctgcaacagacatcacaattaacggaaaattttggaagcataagaaggatactggcaggtcaaggacactagctggtcgccatttctattcaatgttaaactagaagtcatggtctagacaatggaatactatgcagctgttaaaaagacaacacataataaacaaaaaggcaaatgaggttaggaggtggaggcatgaggggactaacgcaggtgtccagcgtcccttggccctgccacgctttttttttttaatttccacctgacaaactgccgtttatcctttaaataccttggcagccatcacatcctgccccttcgtcttttgcacttcctttgtacctcgtgcatacttctataagcaaatgtatccgacggttttacaagaatttgcttgcctaccagtgtacttaacccatggctagcacagaataggactggaaagaaatgctgcacagacagcacttttctctgaaggctctagggctccccaagcccccgcattaaactggtttgggcaaaacgacaggcattgctgagagccgccaggccgcccgccagctgcgggtcccctgtaggcagagccctgggtcacacgcggacgcggtcccgatgtttcttctcaggccctcagcccggcccacttcctctttcctcactttaaggcgcagacagcggtccctctcaaaacaaaacgtacaccaaaacaccattttttttttaaacaggaagtccagaggcccgggtccagggcatccagccccggatctcgaacgccctcctcgcccctcgccccgcgtagcccggctgcgctccccgctccccgcccggcgtccacctctcgagcctgacagccccgccgcccgcgcaggcgccccgccccggcccggcccgccccggccccgccgccagcgcttccatccccgccccggcgggtccaagccggtgccgggcgcccaggggttgccgcgctgggcgggagggcagcgcctgagagggcggtggggtggcggggttcctgcgcgcggcccgccatggaggtggaggaggcgttccaggcggtgggggagatgggcatctaccagatgtacttgtgcttcctgctggccgtgctgctgcaggtaagtccccgcggccccgcagccgcatttccctcttcagggccgcccggcgcagggctaggcgtccgctcccagaccgccggggccggggccgaggccgaggctctgcaaacaccgaggtgtggcgagcgtcggggtggggcaggggcgaggcgccgcgcggtggcctgggcccggccggcagcgtcaaggtcgccggccggcctcagagcctcttgggttctgctgggccctccaccccgccaccttgagtggtggaaggagcgtgttgggggaggtttctcagccgctatgctggttaaggagggatgcaaaattgtgttacctgccctacgctgttgcctataacacgctgcaaatatgaagggaattgttaccctacctgtggcactgtcaccttggaatctaggacacagtcttgataatctgcagacaaaaggttgtgtctaggatcgcctccctctgcgccgggtgtcctctgcctcttttcctgggcttgagggggcttactcttctaggggctttcaaagcataggatttatttccctctggtttaagttctgctggctcattcggccctgcgccagccttgggctgagactcccgtgagccgaatagtgccatctaccatgtgtggttatcaaatggaatcacttcttcattataaagaattctcagaacctacttgtacaccccagcctcaaaatatcgattccatatgcgaaaggtcactacagattaactgcgccaggcaaggattagtccttcaccaacttaaatggctcatttgacattagtcgcttctctcaatatgccagaggcatttcattcacaaatcctttcttagtatttgctgtgagccagccattttactctttccttcagtcatcaggtttaatacgggctaggatgtgctgaacatagggatgccatggtggacaaatcattgactgccctcaggagcttgcattccagtggctgcgggtggggcaggcagacagttaagtaatttagttagcatgtgatgatagttattctgcaggaagtacagagtggtcatggatatagccaccagtccacaagttgcttaaagcttgcataagacagtggctcaacaggaagatgggggaaggtaggggttgacttattgattaaaatgtttggaagttcagttgatttcatcatcagccagaaacggttcaaatgatggagtcagttctttttctagccgaacagttctcagctcacgaatatgtggtattctgaagttcttttaagctcgttgttttagctttaaacaagctttccccagggagaaaaaacgttcaagctaaatgataagagtatttaataccgagaaagaagaattgcaaccatgatgcctgatctttatttataacagtttctttgagaaaaccctttttttctgttccagccatgaattccaggaacatacatcctttcttgaacaatcccagctccccatccctctatccctacccttcacttcctgttatcattttcttatttgcctagccaagtatccactaacttggagtaagtttgtcttcagtagagtgaggttctaaaaaggccagtgttctcggtttaggacctgttaagtttctctaacttacttttatttatggttgacccagttagttagagtttgctatcaaaaagttccaagcccatgcctatgaccgttcactaaaccttggatgatttatggtcagtatttgcggtacaaggaccaggtcttagagtgttggggatgagtgactgattgtttatcttatagatgtgggtgggaagatgccctgtagctgtgcttataccagtggaggagatgccagcctaggcaaaagtgaatccttcacatgctacgtgtttttaaggactcagttaccccattgagatacatgatccagggggttgtagagccacccagagctaccctgggtatgagagtggatatccccaaagacctctctaccaagtctgttgttggagatgttttgtattacggcagctggtctgtggagtgggagtactgtggagtcccattgctcagttgtatcacaggtgatttcatcattcttggggatgaggttttgcttcccccagcagagtaagaagccctttttacacagttgccttaaatgaaagggggtttttctgcttttaaaatcaaaggagttttcgtaccattgcccaaggaaggggcagaccaacaacacagcaacaaggccagagagagggagcctctgcttcagtgggagccttctccccatctgcgatttgataatgattaaccccagctgagaggcacaaaaccagaaggacagaggtggaaattttacaggccttttaacattttccttcttctgggaccattattattatttttaaaaatgattttccctttaccccaaacacatctatgttcaaactaagaggacaaaaccacatagcaaagccaattctaaagggtttttggttaactgttttcttgaattattggtaccatcatgtagatcatcaaaagttacttcactatcca

SEQ ID NO: 1879538 - DNA, 4001 bp, Homo sapiens
gcactcgtgatgagtgaggggactggcatctcattgtctggatgctgtgattggctgagtttcgggtctctgatgctttttgagaggcctgagagtcctttcctgaggaaggaactcagataaaacaaatgtaagtttgttttatagaatggcttgacctcaggagtttgaaaccagcctgggcaatatggtgaaaccctgtctctaccaaaatacaaaaagaaaaagagggttgcttccaagatggctgaataggaacagctccggtctacagcttcaagtgagatagacgcagaagacaggtgatttctgcatttccaactgaggtacctggttcatctcactgggactcgttggacagtggatgcagcccacggaggatgagccaaagcagggtggggtgtcgcctcacccgggaagtgcaaggggttgggggatttctttttcctagccaagggaagctgtgagtgactgtacctcgagaagcagtacacccctgcccaaatactgtgcttttttccactgtctttgcaaccgacagaccaggagattccctcttgtgcctggctcggcaggtcccatgcccatggagccttgcctgctgctagcacagcagtctgagatcaacctgtgacactggagcatggcagggggagggggttctgccactgctgaggcttgagtatgtggttctatggtcacagtgtaaataaagtggtagggaagctcgaactgggtagagcccactgcagctcagcaaggcctactgcctctagattccacctctgggggcagggcatatctgaataaaaggcagcagacagcttctgcagacttaaacgtccctgcctgacagcagggactgctgtcataatcattatgattatgaatcataatcatgaagacaatctgtattccagaatagtaagggaacctattccatcagggagccaactgaaaacatcaaatcccagttcacaccccagggtgtggtgtcatgcacctgtagtcccagctacttgggaggattagtaaggaggtttgcttgaattcgtgaggtcaaggcagaagtaaaccctgatcatgccactgtactccaacctgggcgacagtgagaccttgtctcagaaacaaacaaacaaacaaaaaaccccacaaaaccaaacaacaacaaattgtcacctcattctgaaatgacagtggcaaacatcactttgctatttgaaaattaaaagaagccgggcgcggtggctcacgcctgtaatcccagcactttgggaggccgaggtgggcggatcacaaggtcaggagatcgagaccatcctggctaacagagtgaaaccccatctctactaaaaatacaaaaaattagccggacgtggtggcaggtgcctgtaatcccagctactggggaggctgaggcaggagaatggcgtgaacccgggaggcggagcttgcagtgagccgagatagccccactgcactccagcctgagcgaagagcgcgagactccgtctcaaaacaaaaaaaaagaaaattaaaagaaaaacactccctcttgctatcaacctgccctcttgctctaacttgtctgacccatggtttaaaatgcccaaaagctgatgtactcaaattatagtacacttacctgttctgcaccagcatttacttttgtctggaggagatcaccatgcatggtcctatacatgtctaatggcatggaatgatgaagggtagtgtcttttaggatagttggatacatatatatatatatatatatatatatatatatatatatgcggaatgctacatcacaagaataagaatgtgaaaagaaccagtttcttttgtaatcctaaacgttctagtctgagaattaaaagccattgttcgaagaagggtgcccagggtccagctggtcgccgaaagcttgctccgcaatacaggctaaggaccagcttctttggaagagaacagatgagggaagcaggagagaaaaaagggagaggcagacgtcacttccccttgccggctccggcagcgggttggtcggctgagcggcagaaaggcagacggggactgggaaaggcgctgtcggtgacatcacggatagggcgacttctatgtagatgagccagcgcaggggctgctgcttcgccacatgctgcttcgccacgaaggagttcccgtgccgtgggagcgggttcaggaccgctggtcggacctgagagtcccagctgtgtgtcagggctaggagggctgggggggaggggggtgtgcgcggggcaagtgaccgtgcgtgtaaagggtgaagcgtgtgaggctgccggcggggcggaggtgcaataactcatacttacctggcaggagagataccctggtcacgaaggtggtttttccagagcgagtcttatccattgcactccggatctgctgacccctgcagtttccccaaatgtgggaaacttgactgtataatttgtggcagtggtagactgcattcgcgctttcccctgtatttttgtcgttttaaaaataggttttgtttgctgcagaaacgcatactgggcgtcagcgtaagctgagaatcaggtctttgttcccatctgtaacttcactgaaactaaaaatttgggacatcgtggttctcacgtttgtaatcccagcaatctatgaggtacgtcgataggttatgtttatgttaatatcgctcgacctcaggcgtgtgtgggcaaatatagtgaacccgtctctactaatctcttatctttttttgttgttgttctatagaaataaaactaagcttttcttttccctatgggattaacagcaaacagtccgctggagtgtatggcgcgatctcgccttactgcaacctttgcctcctgcgttcaagctattctccttcctcaaccagagaatactcagcctcccgagtaactggcattacaggctcaggcaaccaaaaaattaggtccggctaattttttgaatttttagtagagacatggtttcaccgggccgggcgcactggctcgcgcctgtaatcccagcactttgggaggcggaagcgggtggatcatgaggtcaggaggtcaagaccatcctggctaacacagtgaaaccccatctctaataaaaatacaaaaaaaaaaaattagccgggtgtggtggcacgtgcctgtagtcccagctactcaggaggctgaggcaagagaatcgcttgaacccgggaggcagaggttgcagtgagctgagatcgcaccactgcactccagcctgggcgacagagtgagactccgtctcaaaaaaaaaaaaaaaaaaaaagagtgacagggtttcaccatgttggccaccctggtcttgaactcctgacctcaagttttccgcctgcctcgcggcctcccaaaatgttgggattacaggcctgagccaccgcacctggcctgtttacagactttacagacacattttgtttacaagctttacaggtacagttcaattgcgattagtgtatattatgtttggcccaagacaagtgtcttttttttttttccagtgtggcccaaggaagccaaaatttagacaaccctgctctagagggtttgattcatggttccactgggttatgcttattgcctataattccatttgatattttccaaatttgattttttaaaaagcgttttcctgaagcaccctaaagctttcctaataatatgagaacttaaaccagattggatgtgacaaaaccctgctggaatcctgcaacttctaaccttaatgttagatcaagaagcaaaacacccaccagtccaagggtcagggaagctgaagatcatgcctgagctgtaacaacgcccttcccagtatacaaaagagtgtaacagccactcgaattctatcttccaagtgtctcctgttgcccaggctaacctagagctatctaaagatggcaaatctgggaaatgtgcattcagcttggcaaaactgatacatta

SEQ ID NO: 1879539 - DNA, 4001 bp, Homo sapiens
gtatattttaagcaaatatagtattaaatcttaaatactgtttggttaacctacttttttttggaacattatattatgaaaaactttccatatttttgactcttctattttatctgatttaatgattatagcattctactatctgatgtatcataattttatttaactacttccttattattggattgtatttccagatttttgctactataaataatgctatggtgatcattcttgtatgtaaaccttttttgtactcctctgacttttttctttagaatgaaaacatacttgctaagtcaaagtgtatgttttctcaaaacttctaaattgaggtatagcatatatacaacaaagtgaataaatctcaagtgtactgcgatttgaattctacaagtgtatagacaatgggtacaaccaccacccagatcaatggattaaacattttccagaatgcttttcatgcctcttcccagtcaatagctatcccctgttcttgaacttcatataaatggaatcatagagtgtgtattctttggtttctggcttccttcactcaacataatgtctgtgagattcatccatgctgtggagtatagcagtaattcattctttttattgcttcatagtatcctttaaaaaaaaaactacaatttattgatttatttttttctgatagacatttaggctattctgaataaagctgttatgtatattcttatacatgtcttttggatgacatatttatacttcaaaaaatataaactaggagaggcataactaaatcatagagtaaggcatactttcagctttaaatgcagagtaaacatttttaaagttttattttgcttttggagagggggcctacttttaaattgatctccaaaacagctgtaccaatttgaactccaactatccaatgtcatgagtgtacccttccccttcccgccttaccaccagctagtgggcattttcattcttcttaatctttgccagtgtgagaaacaaaatggtatctcattgtttatattgtgtttgatgaccaagaaaatgttaaaaaattcttgctatgttaccagatattcttgtttcttcttttgtaaattgcccatatacatcattgccctatttgctattagctttaagataaggcaaaaagcttaaatataatccatatagtatgtatagatccattggcattgtaagaaaaattcattggtatttataaccaaaaaatatttacattctttccataagttgacatcctgctctatatatttcagaacgaagttaacatttacagaacaccaattactgagcacatttactctttaaaacagccctatttatttcattcttacaatttcatttaacttcagaggtagcatttagttttcatgaaaaactctaaaggtatttaatattctgcctatttttacaagtgcagaaatcaaagctcacggggctcagggtcacaaatgattaagtggtgggactgggatttaaacccaagacacctcaagtcaaaagtaaattatttttctcttttctgtagatgccattgcctaggtcagtgctctggcctatcatctgaatgtttgtatcctcctaaaatgtatatgttgaaatcctcaccgccataggtgatgctgttaggaactgggggcccttgggaggtgactgagtctcgtgaaggcaggccatcatgaatgatcagtgtccttatgagagctgccccccaaatttccctcacctcttccactatgtgaggacacagcaagaaggcaccatttttgaacaaggaagttagcccttaccagacaccaaatctgctagcaccttgatcttgggcttcccagactccagaaatgtgagaaataacatttctattacttgtaagtcactcaggtatggtattttgttacagctacccgaacagactaagataagcagtgattctctttttttttcccccacatttcaaaccctaagagggcatctgaattctagaaccccatccttaactcccttccattctcaacacacatctaccattccactaccaaagtccaaagagtatcaggatctctgggctatcaagaagatggagaatatgaaaaaaatccatgttagctcatttattttagaaacttttctttgtgtgtggtgtgttttaaaatctgagtaatggtttaataaatccagaagtagaataagtagaagcagaagtgaatctaggatcttttcctcttgataagttactccttttggggtctgaagcttacataattttagaggctttttaaaagaaaaagatgacaagaatatttatacaaaattaggtttgagtgttgatttaaagtgagaaaagaaattgctatcaattacacattttaaaaatatttaactgccacaagaatcacaaaattaaaaatatatatatatacatggtacttaattgccctgacacccctatataattatgccttcattttttggctctatatattcttgggtcacgacttcatataacaaagatttttgtagtattttctatcaagagggtacatataaagatagattagtctttccagtagcatggttgatcaaatttgtttttcattaagaatttggaaaagtttctgtgagcttcataactcattatttgtactatcacataaatgcttgggatcacagttttaggaaatttccatcaaatttttgtcatatgtgaactctaagatttcagagtatctctaatttgttttcgttgttgttactgttcaatgactaatctttttttctctttgaatttaatgaatttacataaaaaaattaggtagtcattttgcatttaaggaataaaaatctttaaaaaaatacaaagaatggaaggattttagccaagtttacacttctttttgctataatttgtaacaattcagctcatcataacttaatgcaatgtgcaaatgcagcacgtattacgatcacttaactaaatttaaggaagtacattgttaatagtggccctcagaggaaatagatttatcttcttgtaaaaactccatggtatataaacattacataataatgctacttaaccacctcttgtctcaagaatcattacccggcgaggtgcggtggctcatgcctgtaatcccagcactttgggaggctgaggcgggcagatcacgaggtcaggagttcgagaccagcctgaccaacatggtgaaaccccgtctctactaaaaatacaaaaattagccaagtgtggttgcgggtgcctgtaatcccagctacttgggaggttgaggcaggagaatcacttgaacccgggaggtggaggttgcagccgagatccagcctgggcaacagagcaagactctggtctcaaaaaagaaaaaaacaaaaacaaaacaaaaaaaccacaaatgctttaatagttttaaagcaaaagctgttagagtctagatagctaaaactatacttgtgagttcaagcttacagataagtagctcttaataaaatatattttgatatatgtagttctttttttttttttttttttttttttgagacagtctcgccctgtcacccaggctggagtgcagtgacatgatctcggctcactgcaagctccgcctcctgggttcacacccattctcccgcctcagcctcccaagtagctgggactacgggcgcccgccaccacacccagttaatttttttgtatttttaggagagacagggtttcactgtgttagccaggatggcctcgatctcctaaccttgtgatccgcctgcctcagccttccaaagtgctgggattacaggtgtgagccaccgtgcccagcaagtagttcttttaagtagttcttaataaaatatccttcctccccatgcccctaccctaaatcttatattgttcttataaaactttggtcaagagtaaaaatatatccaggcagatgtatatgtcatacaatagcaagaacagt

SEQ ID NO: 1879540 - DNA, 4001 bp, Homo sapiens
gaaatttacactagtggacacatgatggtagatgctatagatacaggaacccatgcaaattccaactttgagaaactagtaacctatttcgaaattataccttctcctgttcttcatgggcaaagatgatccaagcatggaggacatgacatttaagccttcttcccagtgtaagggatgtgccttcagctaaatttttctctcagtcaacatttatgggcacctactgtgtgttaggcactgtactatgggctgagtattcaaagaaaaactaggcacaggtgaatcgtaaatggagagctacgggtctagtggggctgaaggcactttctcaaggaactcatggcactgaaatagctgctgcttgagaagtatggcctaagctccatgggagtgagaagggatgaattcttcctggggccaggaagggaggatgaaatcaggaaaggcctcccagaggagcagatgtttgaaggatggacaaatccagatggacaatagagtatgtattctaggctggagggtattaaccaaagcatggaaccccctcagttctttgggaggagaacagtctcctctgctctcactgtagctggtggcttgattgctgaccaaggtcagggtgacacctttggccaaagaatggggcatttgcttctaagtcagccaagggctctttctgtctgaaaatagctgcctgaattcatttccccaattagtcccagaggccaaagataggagcaggctttctccaccagcagggcagaaactgcagctagaaagccggccctgcagcatgaggaacccctggggagctggcaggagaccttgaggtctgaccggctgtgtttggatggaccctctctagctctttccccgtcatgtgactgaaaaccttatcataatgaaagctgtaaaaatgccaaactttaaccttattaaagtcacactgttctggtcttggcaaccataataggattttacaactcaacctctctgactagagtccttgaacagcccagggtctgtcagggtccgtgatgggtgacttaatgccttcagggactggtgcccacccacattcccaccctccctgtgtccatccaccacccgtgctcaccgtggccttccatatggcctcctgttttgttactcatagaaatggagaaatttccactaccatggaccccaggaaaaacatatgagcataccctacagcacttaccagctgacatggtattttcctccggattaatgaagcacagtggaattttagcagttgctgtaatgattaatatgtcaaatccatattgcaggagagggaaacaggaaagcgatgtgagaacctaggaggggggaggaaaaacaatgggaagggaagagaggtagcaaagccaaagaaggacagggaaggaagagaagaacaagggaaggacagggcaaagtggggagagaggaacacggactcccacaggggttggatcaaacaggctcgagcacatttagggacttcctcctgccacattggtaggaaggtgggtcaagtcagttcctgaggagaggtctcccaggagcagttattagcataaggttctacatgtcgggaggtcatggaccttgaagatttgaggaaaggtatggggtttatccctagaaaaaaaatacacataaaggggtttactaagcccctaaacctccatgagaaaacacaaaaatgaaaaaaccctgggttcagctgacggtgtttctggagctgggactgtgtcatccctgtcagcatcccctctccatgtgatgcctttcagaaacaagtttggaaagatgacaatggcgtcagccacaatacacattctgtttgctgagcctctgtcttgccctgtgagcgcccaccctctcctccccacctgcaggcccaccgccatgcagctcccaggatgaggtcatgcttactcacagggtcccttcctccaactctaggcagtccagtgcccctacatgaagtggtgtccatgctgtgcgtgaacatgctccgcagtcttgagaccattacacggctggacaaaggaatgcctggccaagccaccaatgggaaatactttgcaatgcaaatgagtcctccaaagccaagcattcccctctcctgctaattacttttacctggttgcattagaaatcctggccaacatggtgaaaccccgtctcttctaaaagtacaaaaattagtcaggcatagtggcacacgcctgtagtcccagctactcgggaggctgaggcaggagaatcacttgaacccaggaggcagaggttgcagtgagccaagatcgcgccattgcactgcagcctggtgacagagtgagactccatctcaaaaaaaaaaaaagaatggcttcatattctgtatagtcaggagctggctcaatgttaatgtcattgtctctcctgaaatcacctgtcagtgcaagagacctctgaatttcctttcttatttcttgatctaagcatgtatatagtgtcatgggccaggttaattaaagctcactgaatatcacatactatcctctgaacaatcatacgtgttgcttctttaaaagcaggaaagaaaaaatcaggttctatatggcctaccaagcttaaatcgtctctgtgatgggaactgtacaaaagtcaacaggtcaacaacaaacactagtttacatactcagtaggtgaaagagtgagccaattcatagatttcatttctgattgtattttttaacattttattttcaaagaattataaatccacagaaggttgctaaaaggtggaaacaactcaaatgtccatcgatggataaatggataaatgtggtacagtggtccccccttatcctggggggatacattccaggatcccccagtggatacctgaaactgtggatagtaccgaacccaactgctgtcagtgggaacacatttctgttcacatattccacctacaatttaacgccttttccagcttaactaaacacttaccagtattgtggtcgtaacttgcggtttgaggtgtgacagcaaaactagcacgaatttcttttttcccttcacaatttcacagatagaagattcattcctaactatagatcttagcagcctcagcatatcattttttttctttcctgaagccgagaattttcaccttttcacttaaaggaagcactttatggtttctctttggtatatttgagttgccagcatcactacacttgtgctttggggccattattaagtaaaataagggttacttgaacacaagcactgcgatactggggcagacaacctggcaacaaagatggctattaagtcactactgggtggagagtgtagacagagtggacacgatgggcaaagggagggttcatgcccttagcaggattcagcaagattttattatacctctcagaactactcacagttcaaaaggtatgaattgtttatttctggaatttttcatttaatatttttgtattgctgttgactgtgggtaattgaaactaaggaaagtaaaattgtggataagcagggatgggctactatacatacagataatggaatagtattcagccttaaaaaggaaggaaattctgatatgtttctatgacatggatgaaccctgaagacactatgctaagagaaataagccagttacacaaagataaaaactctgtgattccacttagatgaggcacttatacgagtagtcaaattcaaagagacgaaaatttgaatggtgtctgtcaggggctgggaggtgaggggaatgaggagttgtttcattggtatgaactttcagtatgggaagatataaaaagtcctctggagatggatggtggtgtttgttgcataataatgtgaatatatttaaagccaacaaactgcgcctgtaaaaatagttacaatggtacattttatgttatgtatattttaccacaatcaaaaattgacaagaaagtcccacagacact

SEQ ID NO: 1879541 - DNA, 4001 bp, Homo sapiens
cacccattaggatgtttccttaaggatgtcaacatatctagatgaccaattttagttattactttcaatgcagcagataggtattttggcattgcttagtttttaaaacagccttattaaggtataatttagatgtcatagaattcacctatttaaagtgtacaattcaaagagtctagtaaatttaatcaattgtgcacccattaccacaatccagttttagaacaattccaacatatactttgcatttgaccagctccatactgaacaaatttattggataattaacctgtgcattttaagccatctaaatctaggacccagcctagacattattttgaataaatcaagctttaaggaaaaacaaactctaaactttactcaaaatagagatccataaagcacattctcccaaggtctctccgggggtctgtaggctaattaacaatataaatttaaaatataaattaagaataaaaattaatacacatacaccaatacatgtgtatattttgaaaagtgtatgttgtataattcattattatttatttcaataggcataagtttttttttaagagacaaagtttcactctgtcaccaaggctagagtgcagtggcacaatcacagctcactgtagcctcaaacttgtgggctcaagccatcctcccacctcagcctcctgagtagctaggaccgcaggtgcccaccaccatactcaacgggcataaaaattaattttaaaaatgtttccagttatgaccatctttcgtccaatctcaaacttatttttttcaatcttgtaaatatgatgaggtggaataagttgtccagggacttaacattttgatctagtatatttttaatttatggaagaaatattcctcctgtctgtgatttggctgtgcacacttttgtgaggttggactggagataccgacttgggtacttgcagaggaggagcttcttccttaacgggatatttaagaggccccgattttgccttgtttcgaaaattattcaagaaataattaattaccatgcccctctttctgcaaatcctgtattcatggtatactacctccaatacagcatctattaaacatgtacaaatacatcatttgcaagaataacaatcttggaataatgaaaatgcttctacctatttgttgttcctgtcttatctctaagttcatctaagtttcggaagggtagttatgtataaaggaacttcactttggaaattccatttttctctagtcctagagagttactgctaactccattcattttgacatttaaatactattttatattgttatttaagtgttcaacatgtactagttcagtctcctcaaaatactgagtaagttccttgtgcttagaatagttgtttcaaactttgtgtgtgtgaatgaatgaattttacatttctcaagcacctagtccacaacgggcacaaaaaagctatttagtaagtactgtttaattaataaatgatacctcaggtttgtctcccttcctccggatccccataacatgtacatttatcacatcgcccagatttcctagacattacagattttctgttctacggcccccataagaacagtgcaggtgccacaccatatgtctgggacatatggtcctcaatagctgcaatatgaaactatttctattgcaataaatctaatatctattcctctctgtttactaatagttttgattacaacttcaaattttaaaaatcgaggatgaagttaaatagaagggaactgtcccctttcttctatttaacctcgtcttcgatttttaaaattacaaaagcataatagtaaaaaaaagtttgacaatacaaaatgataaagtaaaattcgccttcaccaaaagtcatctatttccccttctgtggtttccacgttgcggctggtaactcggggcttccacgctgggcgagcctagagaacatccagtacacacaggaagcagcagcgcgggccaaatggcgctgagacctgcgcacctgtccacggaccgcccactcgccaactctgaccttgggtgagtctctcaaacttgagtctcggaatcttccacaaaatgctacccatctcaccaggtcgagtgaggagggtcgtgttatgtgtaagcactttgtgaaatctaaagcacgaggcaaacgtaaagcattgtagggggtcctagagaagtctttgtgcctgcctatcagagccgtttcagttccccgcagcagcttccaaggacctcccaccatgcccgccgcttcggctcctgcactgcaaatctcgcggctcggcctgcagcggcggcttcccctggcctcccaccccagcgactgagcgcggagcccagcgcgcacgagcgccagcctggctcagagacacccacgaagccagggcctttcagcgcctgctaactggcgctacccctagggccgcctctcggttttaaacgtaaacaagagttgcccttccgtcttccaagacctgcaaatcgaagcttcttttcctccagaagccccgccaccttctaagcttctccccagcctcagccacgccccagcctgcaaaagccgggtcctttacgccccctggctccgtatttgatttcggcgcgcgccatacctgagggcagctgtgattggttggaggtgagcgaagttcctatatgattggctgatagcggctaggacgggtgaaggccaagggcggagaattatgggagggattaagactgcaagagctgagtgatggttggttcctgaacaaagagggcggagtaaaaggcggaagcagaattgggggcggggctttgtggaacttgggggacccagcgaaatggaagaagttaggtgtccagagcacggtaaggggctagggtctcagcgtcccggggcctgttgatttagcgtggcgtaatcgttgttcactttcttctctcttcagggactttctgctttcttaagaccggcgtccgcgatggcccgaataaaggaaagagcttctacgtgtgccgggcagacacgtgcagcttcgtgcgggccaccgagtaggtctggagctgggccccactccctgtggctgcccggggcctcccgagaggagcttcccgctccccgctgtcgggcgtcacagggccgaggagtggtggggccctagtttgcggtgtcaggaccctttaagcaattggtgatcccagggcagcgtggcgtgttcggaagacgcccagctaattctggctgtgtgacccgaggctggttacccccctctctgggccgatggttcccctacctgtaaaattgaggatccggtgttttccagctctgggtttctattcacttgacaggccttaaccactcccttctcctgcccagacagtccctccccctttaaaggagtaaggacacacagcagacatagtggaaaataatttgtccctgttttgcactagttttaggcccgacggttttttttaaatgtttgagcttaaaacactctagtgattagttgttagccttcttatttttaagtaggattctctgcatctaaatggtgaaattgataattcaaagaaattagcgctggaagaaacaacggagggcctggcgcggtgtgtgacgcctgtaatcccagcactttgggaggcgaaggcgagcgaatcgcttgagcccaggggttcgaaaccagcctgggcaacatggtgaaatcccgtctctacgaaaaattaaaaaaaattgtctaggcatggtatcacacgcctgtagtcccagctactcgtgaggctgaggtgggaggagagagtcagaaatgttaagcatcttctctaaagtgaggaaagttaatagtttgtcaagtgttaatgttttcacagtaccaagtgtctacattttctatgtgaattttaaaactatcatcacatcattaaacatctcctgctctctattcagcaaaacttggtagagaaaagttatttttctccgtgt

SEQ ID NO: 1879542 - DNA, 4001 bp, Homo sapiens
tgtcagaaagctaatcttgctaattgctagggtcatgtaatctcattaataaaatatatgtaaaacactgtactataatgctttgctctatgtatgagtaaaacatgtagggcatttattaaactgcattttacaaggcataacatatatcccccttcccctggcaaggtttgtttccagggtctcagtaatatcacattctttgggttctacaacacctcttggctcctttatttccatcatctggctactttcactccacaaactctatctgatggtctcaaggatttccttggtttcaattaccatctgtttggtagttcaaatctcttctgagctccagacccatgtatctatttaatgggcatcacattttggaagtactacaagcacctcaaatttaacagccaaaaccaaactgatcagctttgttgaagactataacttgatttcctagttttttttttgccttcatccctttcctgctcacttctaaattacaccaattatacttgaacttcaccagtactttgtatacctacaagattatcctatatggttttaatttactgttttgtcttaccctggtagatttcagctcctttataggcatctcttatctcctacctctccttggtaattttcagtagctggatgaattataaacaaaacacataaaggaattgtcatgaatttcttccagttatatttttactgaaacactcgttatctgtctgggagatttttaggtgaattaacagaagcagaaaaactgtattaaactttctcataaccccaaacaaaacaatttcttccatcaggtataaccttcctgcagccttccctagactaggttgaaacaccacagtcataaccactcctccttaaaacttgcggtgcttgcttctttaacacctattaagtgtacatcatttatttatccgctactctattagactgtacacaacttgaagacaagatatgtctttctctgtaccttcagtgcccagcacattacggtagggttcaacaaagtttacaggacgaatgaaataaggccacataagtccagtgcggtggcacatgcctgtaatcccagcactttaggaggccgaggcagatggcttggcttgagctcaggagtttgagagagcctgggcaacatggtgaaaccctgtctccaccaaaatacaaaaattagccgggcgtggtggcgcacccttgtggtcccagctactcaggaggctgaggcaggagaatagcttgagtctgggaggtggaggttgcagtgagccgagatcgcgccattgcactccagcctgggcgagagtgagaccttgtctcaaagaaaaaaaagggaaatgaggccacacatgtctaaaaagaccacttatattaccctctaagagaactgggagtttctaaacaaactttttaaaggttgccttcacatagctaagatcagaaatgcagcctacttgactttcttccagtctaaagcgttgctactaataacccccaaggaaattctccttccaggaaggctgagcagacaagggatccagggaaaaacactaaagccccaccccgctcctgtccccacctgctcggcaagaactgcagtccgcccgatagcggctgcgctgcgcagcctggaggcccaagccgcgcccagcaagcaggagtcgcgagactgggattggctctctgaacagacgtcattccaaacaagacggctccgcccttctcaagatggcgctgcactcaatgcggaaagcgcgtgagcgctggagcttcatccgggcacttcataagggatccgcagctgctcccgctctccaggtaaccaaagacggcccttccctccgcggcttcccatcccgcgaggttcttctcatcccactgccctctatttatttctctcctcccgcttcttagggaaagtacatgccttccctcgcctaaggtctactcgtctatgactgtcggcctgctcagagcgtagtgacgttgcaaggatacgtgatgacgtaaaggtttcttggtggaaaaagcgcgccgctttctgacctcttgccgccacctccagttctgggagcggagcgccgccgctgttgccgggcaacgcggtgagcctaccccgcgtgtgatgttttcagagacgggttgttttagagactgctcttcttgtggtcttattactgtttttaccctccttaccctaacaacacgctaaggggctatcggagagagtagagaagttttgttaggcattgggcagcttgggtcggggcagcaggttggcagtgtggtacttgagcaagtgtcagtgcatcttccattctggttgctcctggtggctccacagcactgctctatctagcaggctgtgaaagagtgaccgcaagctgctacagagtttgtcctgtcctgcgcttgacaacactgctgttaccattaatctcgtcgtacggagaccatgtcgcggcctggtcttattgggaattgtcttaaatatttggaattttaccctcatagcaaaaaagtcagggggaggggataccctttcagttattcaggattttaccaaacgtcttccaagtacagtctcagtggcaagcactttgacatactttatctacgggagatatattctgggaactagagagaaaggagagaatgtgattttattaggtaatttcccggcatcatttgcatatgtattgccataatgagtaggtgtgaggatgtcgcacctattgtaactgttgtgttgaaaacagcgctagacaggaaggtagcctagaggtcaagggtttggtctgccacttgacagctgtgtgacaagtcacaatctctctgggacttttcttctttttttgctcatattgagtggaggaagagagctggactgattgacacgttaatgttctttcaacctctggaaaatctatagttccatgattatgaagccaaaacaaagccaatgagagtaattatgaaaaccaaaatttaagttcaacttatttttctagtcatgtcataaattttttgaacttccgttttttattaatgtgagcctcacaaaattcttataagctaatatattaatatataccggaaagctgcttgtcagcaaacaactattcaaatgtcaccttaaatttcagcagcaatgttaggtaagacaattcaaaattagataaatttatcaaaaattcctctccttgaaatttgagggtttgattctgcagaactagaatgagatgattatttataatttatagcacattaacacctatgctatcaaagtagctaagccgtagacccaaacttccccttattccaaactaaagaattgaagatgtcttgagaatagagaatcaaagagagagagaaaaaaaagacaaactgcagcctgctaatgactgcccagggaagtttaagacactaagtcattataaatgctaaagaaaaaatttcttaaacctctactattgtttcagtggcatttatgaatagggctattaaagttaattattaatctagattgtttcaagatgtagaatttccagtaccgatgaatgtttctaaacctttaatttagctttgagtagaataagtattaaatgtgagagtatttttttaaagtataaatctacatataatttcagtcattgaaaatgatggtttgaaagattaatgtggttttttgaaagactgagaaaagatacaaaattgtgttcatagtgttattacgatgttatgtttatatataagtgtttatataaacgtatacatagaaaaaaagcctggaagggaacaaacatttttaacttttttattttgctttggccttcctaaatagtgggttaaaagttatttgtttccttttatagcattacatatttttcacatgtctaaattgaagacacacactttttaataaccagaaaaacgttttgaaatcataaatctttatacagatctttagtcattaa

SEQ ID NO: 1879543 - DNA, 4001 bp, Homo sapiens
gcatggagaatttaagcaacttccccaaggtcattcaaggtcatttaattagtaatagtgtcgctgggattgaacctgtctctgtctgtttccaaacagtcagcttcctccagccagaagctgctatgaagttatccaggcagagtctggcgagaggagaggccagcttctcctaggctttaataatagcagcagcaataacaacaacatgcaacgaagactcatgatgtgccaggcagtattccaaacacttgacgtggattctcctctttaggtgcttatatgtattttttaatccccattttttagatagaaacactgagcttcagaaagatgcagtaattttcccagcatcttgcagctaggaagtgatgggttgagattttctcttggcaacaatttccactggagggtcagagcccagggctaggattgggtctcttctgttcctcaggaaggcagagcctcccaggccatccctgtgccaagcactgctgttaaatgcccaataaccggccaggtgcctcctccctccctggtcttcagagctgctgggtcagggacctggctgatttcccagtagtagagcctcaagggtgggtcatgagagggtataagtcacacacagtatgattctcaaagtggctttggcctgtgtgtgactgacttcaaacagccatgggaggagagggtgggagtgaggaggagagtgggagtgagggttaggagtgggagtgcggaggggctggtgcctagaacgcaggtctcctttgggctggaggcgcaggcttatgtttggtctgtggtggcaacatgcccctcacagtggtgcccgtcaccccaggttcttcagggttccggtctcttgggggtgttgggggggcagctaatctattgcctgcacactctccctcttggtaggaagtgtgcatcgtgacaggggccttctagagccaaggtcttaccccaaagatgaggaggcacaggggtgaaaacgctagaacaatggattcatcttcctgggggtccctgcagggaccaggctcacaaaagaccccagggaacctgggtagctctttcaagggtgtcctgctccctcctgggtccctcaggtcctcccatcagtgcctttgccctacgctgctgcgtttcctgtgccctgaaacacacagggctaccttcctgagcgcccaggcctccctgctgttcacccgcttggactggctgtgtccacagctgtcaaccctctgtggcagtggattatattcaatttagcacttgattaagccctgatatttgcttttccttaaattgctttaacttttccaactgatttcaatcccctttccccgagtctgctctggtacccccctgcttgactgcaggccacactttttggccctctcctatgtacccaccctgagttgctcaggcacagaggatccaggttaaacacatggatgttggctccaaggatatctctcccctgcctcagctctgtaccagatgctgccttggccccaggatgagggaagccatgggagaagctggtggagtgtctccgatgcttcctctgaggcaggttggggcaggccgggctgtgacaacaactgtgtccgcaactggtgggtttttggtctcactgacttcaagaatgaagccgcggacccttgcggtgaatgttacagctcttaaggtggcgcgtctggagtttgttccttctgatgttcagatgtgttcggagtttcttccttctggtgggttcgtggcctcgctggttcaggagtgaagctgcagaccttcacggtgagtgttacagctcttaaggcagcacgtctggagttgttcgttcctcccggtgggctcgtggtctcgctggctcaggagtgaacctgcagaccttcgtggtgagtgttacagctcataaaaccagtgtggacccaaaaagtaagcagtagcaagatttattacaaagagcaaaagaacaaagcttccacagtgtggaaggggacccgagcgggttgccactgctggctcgggcagcctgcttttattctcttatctggccccacccacatcctgctgattggtagagccgagtggtctgttttgacagggcactgattggtgcatttacaatccctgagctagacataaaggttctccacgtccccaccagattagctagatacagagtgtccacacaaaggttctccaaggccccaccagagtagctagatacagagtgtcgatcggtgcattcacaaaccctgagctagacacaggatgctgattggtgtatttacaatccctgagctagacataaaggttctcctcctccccaccagactcaggagcccagctggctacacccagtgggtcccacaccggggctgcaggtggagctgcctgccagtcccgcaccatgcgctcgcactcctcagcccttgggtggtcgatgggactgggcgccatggagcagggggcggcgctcgtgggggaggctcgggctgcacaggaacccacggaggtgggggaaggctcaggcatggagggctgcaggtcccgagccctgccccacggtgggctggcactgctgggggacccagtacaccctccacagccgctggcccgggtgctaagcccctcattgcccggggccggcagggccggcctgctgctccgagtgcggggcccgccaagcccatgcccacccggaactccagctggcccgcaagcgccacgcgcagcccgggttctcgctcgcgcctctccttccacacctccctgcaagctgagggagccggctccggccttggccagcccagaaaggggctcccacagtgcagcggtgggctgaagggctcctcaagtgccgccaaagtgggaatccaggcagaggaggcgccgagagcaagcgagcgagggctgtgaggactgccagcacgctgtcacctctcacaaccacaaccaccttgagattgcaggggctcgcaacaacaaaggcgtgttcctcacctgctgacagctgtcctgagccacagggggctttgcttgtgtcttctccatccaggactcaggctggtggggcagccactaccttgaatgttgttggccaccctggtgcggctagttccagcacctctgggatcagcaatcaaatacctgctccaccccgcttgcacatccctctagcttacaagtgcctggaggagaaccgccctaatgaccaccccaacacgtggaatctaacaaacgtgaagcagaagctgttccggcccaagcctagtctgctccctcttgaccagtagtggcaacttccacccacaggctcaggcctggggtcctccctgttccttctttccctcctctccatgaagccccgtgggggagctgactgggtgcttcccatcactgctgcttggtcttttgcacgggtgcccatggcactttctgctgtgcttcatgattccaggctcctggctagttagttgctgattccccatggagcagccaaaaggatcctttccatgcatccactaaaaaaaacaaaaaaaaaaaaagcttgttttttgtttattttgtttgttttgagacggagtctcactctttcacccagggtggagtgcaatggcgtgatctcagctcactgcaacctccactgcccgggttcaagcgattctcctgcctccgcctcccgagtagctaggtgcccaccaccatgccagtctaatttttgtatttttagtagagacgaggtttcatcatgttggccaggctggtcttgaaggcctgacctcaagtgatccacccacctcagcctcccaaagtactgggattacaagcgtgagccactgcacctggcctaaaaaaaaatgtttttattgaaacatagttcctataacataaaattgaccttttttttttttttttggagatggagtcttgctctgtcgcccaggcaggagtgcagtagctccatctcagctcactgcaacctc

SEQ ID NO: 1879544 - DNA, 4001 bp, Homo sapiens
cggtactggtggcagtatagattggtacaaccactttgaaaacatttctgctttatctttgaaagctgaacagcccccatagcctctgatgccgcagtgctaatcctaggttcaaattagagtccagcgcatgcacagaaggtgaacaagaatgctcctactagccttattagtaattactaggggcagattcaggttttatggggtatgagcttatataattggaaaagaggaggcttttaaagaaaaagattcagaatgatgaatacaaattaggttcaaaagtgactaatttttataatggcaaaagaaattacaacaattagaaatgtcacaaaacccaggaaaagagttctgttataggtatgtgacctacgaacttgggaagtctgatacatttagtctgtgtggttcccatcaataaagaaaatacttaaagtgcatttataatcctatccgctacagtattgaatacattcctgacaggagaaaacttccttttgactaggcagtaagaaataaatgttctgttactacacgtaacaacttggatgaaccaaaaaaacaaatgttgagtgataaaaagcgaattccaggctatatgtatttttataaagctcaaaaagaagaaaaatacaccaatacacaggaatgcatccaaatatgataaaaccactaaaaatggcaaagagggacaaaactgaagatagtggtggtgagctaagaggccaggagtagaatcctggagatgcatagatacatgctaaatactgataacgtggtggagtgatagtttcattagcatactttaaattttacatatttggtaaatatgctcttttgaatgcatcgactattacactgaaaatatttttaaatacttaaggcacctgaatataagctggcttccctccttcctctcccgtgctgtctcctctcccccatcacttctcaactacaagctgcttgggacacgtggctccagaggttggcaaaacagggaaatgtcagcccacaaggaacaagaaccgtgacttgtgttattttcttgttggtgttggggtggggggaggggtgcggtggtgcaggaaatattatccagcttatcatatatgccacatcaagctgactccgtttaaattttgagtggctctactagctaaagccagaaaagggtttttgggcccaacgggcagaagtgcccctcccttttacactcacacttcccactttctaagggtgccaggcccccgcgccgccctcctgcttctttccggacggtccaactcttttccaccagtcccagcccattcgattacgtaaattcttccaagaggattcccaaacgtgcccctccgtccagaactcgcccagcccggaccagttccgagatttaccaccagcccagagctgggcgggggcgtggaaaacgcgaggagccttcccgcccctctccttctccctccctccctcccaagccactgccggctcccagccgagctccgcccccgcggtggccccgcctccccgccgcccggaaagcgggctgcggccccctcccaaaacccggggaagtggattctactctacgctccgctccgctccgctccgcaccaccaaccccgggccgcagtcctgacgagcgggtcagggcttgtcgggcggaagcctggcctggagcctggaagggggagacggcccgagcgggagcgggagcggacgcggcctcagtcctgcgcgggtgagcgtgccccggaagcttgggcccctggccgccctggtgccccttctccgggacctggggcgctaggccgcggcggcagaactggtgcccctgcgcggccttcctcccatccttacagttccccgtgtcccaggcctctacccggaaccggagccccgcccgtctcctagcagctccgtgacgtgaagcgcctcggggtgcggtgccgccgggcgtgggtgggaggcaacgcccgaggggagggcccgccagtgcacgggggtgcggggcgcgttggcgagaattggaggccgcgccgccgccagccgtccgccgtcccgcccagcaggagcacgttccctttcgccattggaagactgagttccaagctttttcctgctcacctagagccgtccctgccccgcccgccaccccctgtacattttcggagatttaggatagtaattctagaccctcggttgcatttctgttggaatttttctggaagttggaatctggcagtttaaacaaagaatttttttaagaaaaatatttattagtatatttgatagtccccagattaggttaaaagccttattcccaataactgtaattttgcaaagacatgtttttggtgtaaaaaggtatagatatgggttgatgaaaagaatcaaactctgaaaaatatttgaagagatttattttgagccagattcaagtgaccatggccagtgacagtcctcaggaggtcctgagaacatgtgcccaaggaaattggggtacagcttggttttatctattttaggaaggcgtgagacatcaaatacatttaagaaatacattggtttagtttagaaaggcggggcaactcaatcggtaaatgtaaacgttatctggttgaggttatctaaagacctgggatccataaaaaggaatgttcaggctagagataaaggattgtggagaccaagttttattgtgcagaggaagctcttagatagactttagagagagcaggttgtaaattgttttatattggacttaaaagggtgcctggctcttagttgattatctcctggatctgggaaggaaggagggaaaacaaggggagatgggaattctcaccaaatgcagatttttcctgcaagagactttgcaggggagttttaaggtacgacaaggaaatatattttggggtaaaacatttttattttcttccttgttaggccagagtcagattggaaagtaagtcacgatatacagggttaaataaaacccatctgatgagaatttatggtttgtagggcatgactctccagaccccttagaaaggaatttgggtaagataaaaaattagagcttagtcctcgtatggttgagagcttgtgctctggatccacagtgccagggttgtaacacttaagaattgtgtgagcttggacaaaccacttaatttcttttctttttttttttttttgagacggagtcttgctctgttgcccaggctggagtgcagtggcgcgatctgggctcactgcaagctccgcttcccgggttcacgccattctcctgcctcagcctcccgagtagctgggactacaggcgcctgccgccaacgcccggctaattttttttgttttgttttgttttaatagagacggggtttcaccgtgttagccaggatggtcttgatctcctgacctcgtgatccgcccgcctcggcctcccaaagtgctaggattacaggcgtgagccactgcgcccagcccaaaccacttaatttctaagtggctcagtttcttctgagtgtatataatgtgttttatacacacacacacgttttttcattatgctatgttatgtatattactatattattttttcattatgctatactatgtatattagtcttgtgtatattactctatgtaatatacctagtatagcataatgaaaaaatatctgtatatatatatattaggcaatgctaactgctttacatggttgtgaagattaggtgaagcactgtgcttggcatataataaacactaagtgttacttatgaaaatagcattttctctatgatttgtggctttgattttaaagattctaattgtgaagtatttctcctgttttcttttttgatgctataatagaaggatttaccccagaatttctataatatctgatacttcaaagtgcaaataatcagtaaacggaaatagaccatgtgtacaaggctatgttgagcagtgtgcagtgttacaacactgctatg

SEQ ID NO: 1879545 - DNA, 4001 bp, Homo sapiens
cgagggacttgtctatcctgaagcatgttctgtctgcaaataggttattcagataccctcacgtaacactcgtaacactcgctgtgtgcctggcacccccaagcagctctgtagctgatttatactgcacctcaggctgtgagatagggactcttgttaatgtctgacttacaggtgaggtcactggccccaggtcccaggtcccacggccctgagttgtgaagccagagtctgtgtggccacaatgctaccttgcggctgcgtgcaatggccactcccctgcccttcccctcccctcccctcctgggaggtcatataaaggaagattccacccaggtagccatgtatggtcatccagaagtgtccaacatcagctcagccaccacacctggccacacttgagtcaggggcacagggctgtctggggagattggagattgagcatgtggagatgtgttcaagccctggcttagccctgtaatggctgtgtgacctcaggcgagccacttaacctctctgggctgccctgtcctcctgggtcctgcttcccacccagtgccatgagatgttcaagtagataagaatgcattttacaaaactgagagagattattgtgagcccgtgggcatcactgtcaacatgaggatctcctcctgtccttgagcaatccctgggctcagcaagaagctctttcctcccctggcacagtttttcctgaactagatctcccagcaggcacataagcgacagctaagattgacttgatgttgtcaatattcctcccactgtttgccatctcagcatccctggggaacctggggactcagcaagaaaaatccctggctgactctgagagctccgattctcaccaggccctcgggtttcgtaaaaatttggaatgccatagctgggtctgccgttggactttatccagcccaattcctttactgagtgatggggaaactgagtcctgagggtgtgaacagcagcagaggactattcacaacagctgttaatagtcccataatctgtaactgcaaatagtcccatcatctgtaacttcccatctgttaatagtcccatcatctgtaactgcaggactattaacagctgtaacctgcagttacagatgatgggaagaaaatgcaacacaactgacctcacaaagagggaggcagagtccatgcagagctcttgcttcaggaatggttgcagcagctccagccttcacatctcaggctcaattccagagtgaaagattcagtgtctttgtccttccatctccagcagttttgctgcatctcattggctcttactgggctatgtgacctccctgaaccaaaagattctgggtcacctgagtctaccatgcctgcactcatcagatgcacctgggaggttgtttaaaacacagatttcttagctctgccttagagattctctttaggtctgggctggggattggaaacccaggggaattagtcactggttcccatttgggctttccaaaacaacagcaagcaagtcattgccagcttgctgtgtggcctggagcaagtcactctcccttctctgggctccaggtgcctcccctgcacaatctttagagttaactgtatgagctaaaggatttctttccagtgctccaattttgttcccccagtctatgcctatgaagtactttatagatgaggaaattgaggcccaaagtgagaggcagaggtggagtcccagtccaggtgtatctggctccaaagacgggtattgctcccccaactaggccaccccccagggcttctcagtttcctgccttcccacccctgccctgtgccatccattagggtcactctgtgacatcatctctcccaatcagaaaggcccttaccctgggttcgacccagtcacggccagtgagacctccagctcccagtaccagtcattttaacagctgaggctccgggtgctttgctctggttcctgctggcctatgtggagtctgtgactatccctcacacacccatgggtaaatgtcaccttcccagcgggtgggtggacaatggacatttgtgccatgtggggccctgcctgaggccaacaaccagggagccaggtgggaagaagggggcacgtaaggccagggctgggggaggctgtgtgagtgggaagtggatgaggtaagacctcagttctcatgccagtcccacctatcagcaagcatcatatgctcttgcccatccgtagaccagaggtgaggtttgggtcacctagtcccgggtagtgctcacattctgggttcccactggggttggtgtaaggattagaataattactaggtgtaaagctgagaacagggcggggcagacagcaggcacctaccaaatgcttgtggtggttgttagtctagactctaggaaggagattggctctgagcagcgtgttcacctctgttgtcatgtgtcaggccctgggtgagagaggctgagtgatcagctcatgttcacatggttgggaaagcagagccaggcttcaaatctccatctgccccgaggcctgggctctcagagtccccttagtgatgcccactgacctgaatcactggatccactgctcccaggggggcactggccactgtcctctggggaaggatcagctggaagcaggctgccctctctgactcacagcatgtggactctgcccatgtgtcaccctggaccaggcctctgtcacccctgacctcagccctacagctgcctcttctctggcctccgtgcctccatctcctcttggtgatctgaccaagtcacttccatgatccctactggcccgagaatgaagtccacacccctcatcctggcatccaaagctgtggtcactctcgacctgacatctctggcattgtggaggccacagccccatgcatcactttggtccagcctcactggaccatcccccaccactcctggcttttgtgcgtgctgcttcctccacctgggatgcccttttctatcttcaatgccagggaaactcctactcatccctcaaagcccaattaagattttacatctccttctctaacagccccagggctgactacctgccccatgtccccttctctcccactcataggttcctcatgccctaaccctgagtggctgtcattgtccatttacaagtctgccaccctggagactatcagggctgcaatggccaaagccacatccacatagtgcatgccaggagggttttgtcacatttgttactgggacccgttgcccttgtacatattgtcgtttaagatttcttcccactcgttcccagagctctaggtctagtgtgccttcttctgggaaccacgggttatggaaaacaacagtttgcattatgtcccttaattgggcctctgagaccaaggctccgctagctttaagcagctgtttcaatacttttatatactgttgctgttgagctgataactgttttcccatgatgaaaccctagcttgaaaatcccctcgaacttggaaatccaagtaataggaacccaacgggcaccaattacttactgtgcagtcacctcactttcgtttccgagggttccactgcagtccattgcagccttcctcacacagggcccacctgccgggtctgtcccacagaccctggccaagagaggaaatcagtactcagacactgatgtatgtagtgtaagagcagctaggtgactgcctggctctagtggccagagaacagccccgagaagctggagctgcttgcttttattcagtgcaggcacaatgctgaaaacctggagccaacacaacctgtaggtaattaacatttattgttcccctttcagggaacctcacgcatttggatgatcaaaggtcagttcctggtcaacataagtaaacaagcctgtttaagacaaattcccccacattcccttgtacctactgctgcctcagggttatagaacagctgccttcagctattctaccccaa

SEQ ID NO: 1879546 - DNA, 4001 bp, Homo sapiens
ttcccacagtaaccatctgcgtggccttggggtgggcagggtggggttcagactgaagtcagggacagagcagcaggcatcttggatgtcagagccatgtttttcaggccgggacctgagcaaaccaaaggaaccctcctaattcttcccttttgatggtctcagtccaagaaaaaaaaaaaaggaatcttaaaaggtagcttcttaaggagagccaggactgaaacacatcttacgcagacctgtcggcacagataaactccaggaagcatgggggaggcctcccccatatcacctctcccagcagactccctggactcagagaggcctttgcagaacctctgaggggcacccaggccttcagagagagtgcacagtcctcacaattaggagactccgttcgatttggatccttggacgggccaaggactgctttccttaaatgaagaagtaaaggatccagcagtgcaagaggtatctggaggcttggagggaggctctttccttccttgagcctcagtttcccaatggggctggactagataacctcagatcttcttgagctttgaccttctcaaagcctggaagggaccctgtcctctcttccttctccagagggggcagaggagtgcctcagtcactgaatactctttctcgtgttctggcccctgggctgggtgagggagtgatcggtctgtcctgtgggaaggtgagagagggccggtctcatcctcatccttctctatgtgctcttgctaccctggacagagaaacacaaacaggtgacacaggaatggagataaaagcccagcctcctcccctctgcccattggtggttctaggttttttaaggactgtgataagtgtttggccttttcagtgtacacagacctgtgtgcctcctggggaccaaagttcagagcacacaagcacagtggaccctcatcagacttccacatggcctctgataacttgattgattggctgatttcttcattcctcaacatgtgtttctttcagcagaaatggctgctgagtgcttgggatgggggtggggcagcaggagaggttgacccatgcatctttgttcatgcccccaggttgcacttgcatgatatggcaggggtctgggacaagggaacacttactcataactcaaggtagaagggatgagtcaatggggagccacaaagcaagcatgctcttcattgaaggctttaatgttcctttgacagtgtaggagtgagctaaagaagctcttagtttgctttctcatgtgagccgatggtctgtttgtgagatgagaggttagaccagaccgtctctctgatcccttctacctgtgacatggtcagctgctggggtgagaggggggtgcataccaggacatacctctgcctcctcaagagagctccattgctccagctccctgccagggcactactcttcctcctggggaggatctttgtgggagtcagctcgacttagggagctgcaccgcctcctggggagttttcccagcatcctaagatcaggtctgttttgcatctctccccactgctcctgttgcccttgttcttagtctggaatccccaggtctggacactcgttctcacctgccttgtcctttccctgtgtctccttccttaccctcctgttcctttcacaaagtagcagggatgccctcagtcagtgacttttatgctctgcctcatgctttgacgcccatgtctttatcagcttcctagcataaccagaggagtcagaaggacaggacgcctcagtgccattttacagatgataaaagtgagggtctaagagattggccatttttccaaggccccctgcagtaagacagagggagtgatgaggctcagattcagggctcttgaggccaagcacctgtctatcagccctcctttcactggctaccttttttgccactgcccagcctttctgcagatgtccctaaggtagaggtgttggaacgggagctggcctggctgaaggagcatctgtcccagctggagtcccctgtggtgttttgtcacaatgacctgctctgcaagaatatcatctatgacagcatcaaaggtatggcttctctggccctggggcagcagcagggttttggttggttggttagctggcttcacggagctgttcttccggctggcacttggacaagcaaaagttagaccttgatttaggtcttaagttaatttgtaggagggaagggggaaaggaaataaaaaattcccactttgaaaagtctgtgccaagggccagtctcagtggctcatgcctataatcccagcagtttgggaggccaaggcatgtggattgcttaagcccaggaattcaagaccagcccaggcaatgtggtgagaccctgtctctacaaaaaaaatacacaaaacttttcctggtatggtggtacatgctatagtcctagctcctcgggaggctgaggcaggagaatcacttgagcctgggaggtggaggctgcagtgagccatgatggagccactacactccagcctgggcaacagagcaagaccctatttaaaaaaaaaaaaaaagtctggccaggcgcggtggctcatgcctgtaatcccagcactttgggaggctaaggcgggtggatcatgaggtcaggagttcaagaccagcctggccaacatggcgaaaccccatctctactaaaaatacaaaaattagctgggcatggtggtgtgcgcctgtaatcctagctactcaggaggctgaggcaggagaatcgcttgaaccagggaggcagaggttgcagtgagccgagatcatgccactgtactccagcctgggcgacagagcgagactctgtctcaaaaaaaaaaaagacaaaaacaaacaaacaaaaatctgtgccaagaaagagagagaacgaacacatcctggtgttgctgatgagggcatcaccccagggcgtattaatacttagctttattcctgatccttagccatgctgaggacagctgtctttagatgaggagagcctgaagatccagctgtgtgagagggacactgggagctgggaagggcagatggatggatggatggatggatggatggatggatggatggatgaatggaagtagcttggaagactgctgcagtgatgggattgggcagggttgctgcagaggccggcatcactcagtgggtgcatcccagaggtctgtggaagcttgaccaggctctgttgccagatctcctgggccaactctcatcgattctcctctacttcataggtcacgtgcggttcattgactatgaatatgctggctacaactaccaagcttttgacattggcaaccatttcaatgagtttgcaggtgagaggggcatttctacagtcatgtgctttgtagcggtgtttcagtcaatgactgaccgcatgtagatggtggtcctatgagattactgtatatttacggtaataggtaccatatttttactgtaccttttctatgtttagacatgtttagatacgtaaatacttagcattgtgttacagttacccacagtattcagtatagtaacatgctgtacaggtttgtagctcaggagcaacaggctataccatgcagcctaggtgtgtagtaggctatcccatctaggtttgtgtaagtacactgatgatcacacaaaatcacccgatggtgcatttctcagaaggtatccctgtcattaggcaatacaggactatatttgaccaacgttcaaagcaccctctttaggatggggaccagggccagggtatggggaaggccagaggtggttctatacttagagggtagaggctagatagctcttgtcctccaaaatatcacagcttaaggggttaaggcacagcctgcttttagagagttccaagtctcattggaggaaacaggactcacatacacagagcagacctctcctagcccatatggcactttggtaactcagcttggtacatg

SEQ ID NO: 1879547 - DNA, 4001 bp, Homo sapiens
tctgaattctgctattcattatactaacacctctgcttaactttgccacctgtaaattatatagcatgttttatttgccttttaccaatttgctaatagaagtaccatatgggaccccactgagtactcatgccctgtctccgcaacagtggtaatcaacattttttgctcaagtgtttgtaatccagaaacccctaaatgaactgacatttgcctttctcctccataaagctctcaaaattttctttctgaaatctaatcatggtgatatacaaacaagcatcctcctcttgaggtcctatctcatgagagaagtaagctttacacagtggaaacaactgtcaaccacccaagacttaaatatccattctgtgtatgtctttttttttttttttttttttgagatgcattcttactctgtcgcccaggctggagtgcagtggtgtgatctcagctcactgcaatctacacctcccgggttcaagtgactctcctgcctcagcctcccgagtagctgggattacaggtgcacaccaccatgcccagctaatttttgtacttttagtagagacagggtttcgccatgttagccaggctggtctcaaactcctgacctcaggtgatctgcccgcctcggcctcccaagtgctgggattacaggtgtgagccactgcgcccggcccattctgtgtatgtgtgaatgcctgctctgtgcaaagcactgtgggaagggaggtagcacactgagaaacacggtctgtaccccacctcaagagctgaaggtctacttgaaacgatgaaaaatgcacaggaaaaaaattacaatagaaagtaaaatgcgataaatgccatagatggatttgaggtaagtcatttaaaagctacaaaacaggaaaagttactgccaactagagatgttcaggatagatttcagggaggacgaggcattgttctagagcagaggttgacaaactacagcccaatggccaaaaccatcacattgccagtgttcgtacagctcgcaagctaataatgatttctacattttaaatttttttttgaaaaaatcaaaagaattctatttcatgatacatgaaaattatctgaaattccaattctagtgcccataaataaagttctattggaacacaaccacactccttcacgtacatattgtctgtggttgctttcctgcggcaacagcagagatgagttgttgccacagaccgtgtgacctacaaagtctaaaatatttactctctggtccctggcagaaaaagtttgccaactgctgttcttgagtctggaccttgaaggataggtaggacctggacatgcaaagttgaggaaagagcattccaggaagaactggtggaacttaagagagggaggcaggaaagtgtgggcatgttagggaacaggagttgaggatacaatcctgtgttaccctagtttataaaacaaaatataagtgtaagaaatgcagaggcagaggagaaggaaatatgaatattaatgaaaaggggggttgaaaatttgaaaaatagaggagaaagggagctaagtaaatattcggggaatgtaaaataaatgtaaacaaagaagatgggatgaggcctgagagtggaaaggggtggggggagaagaaaggcaggcaacgaatatgaatactaaggaaggcaagaaaatgggaccatgttgggaacagagggaagtcaagaatggagagaagtgcctggcgtgtgtccagcaccttcctgcgcctcgcgctcctgagggtggggactgtgtcacgctgcacgtctctgtacccccgcagcccctcgcgcgcgtgctgaatgagtatgcttcgccacgacagcgcaggttcacccggtgcgcttggggaagataaccaacacttacgggactctgaccgtgtgccaggcacggcgggccgcctgaacccacttcctcaatcagcctcaaccgcgagcccgaggccgctcacggaggtgtgaccggggcactcgggccatgacttccctctgatcctcggttcccagtgggaaggagaatgacttgtagggtcgttgtgaacaataagtcggggacagcgcgagcagggtttggcacgaactgagctctcggtgactggtggtcgttagtcttctgactgacccccaggcccctcagggagtgaacggtccaaggcgggagtcgcgggccgccccgccaaggagcacttgcaccggctatcagggcagcctcctcgtggcgtggcgcccgcctccctaagctgagccccgggcgtccctaacccgccttccggagggcgcgaggcggggctcgccgcacaaaggaagcgcgcggcccgtgtccgccccgcccctcccgcggccccgcccctccccgccccgctccctcgccccgcccccggcggaggcggccgcgggagccgtcccagactcgccgcattgtctccgcggcggctgcagccctcgagcgcccgccgcgcgcgcgcgcgcaaccccggccgccgcccgcgctcccgccccggcctcgcgcccccgtcccggcctcgcgccccggccgccctttgttgacgccggccaggccggtgcggtcggatgcgccgcggcagccccgggccccggctcggaggctcccggcggagaggaggcggcccgcccgggcccgggaccccgcgcgagtcggcgcccggccgaggggctgcgtaggccccgcccggccaggcccagccgggccctggacaggtcagtgccggggcgggggaggggttctcgccagtagggaggccgggggccgcgctcgccgcactggaagtcgggcaccgccctcggtgcccctaacggcccgggcctacgcggctgccaggccgtgccagtcgcggctctcgtccgcgcggcgcctgggaggtgccctgctccccagcctcgctcgcctggggaccctgcgcgcccgtcgcccctggaagccgtgtcacctcggcgcgccgcagcttccgcgtccccaggccccgcacaccccaccccagccccaacctaggaccggcctccccgccgctgcgacttccctgggacggacggtgcgttcggggacgagactgctggcatctgccgtactttattggtggtggactccctatcttggaggcgcctgcggcttcgctggagagttttgtttttaatctagttcagtctcacgaggtttttaattggatggaaagggacaagctgttctgtgtcttttcttccatttttagaagagcgttttctctccttcctatgccaaatgaaggtagactatatttgttgcttctttacattaaaatcgggatttgtgagattctgtatttaaactgaagtccacagacagggaaataattggcccaaggtcaggttgcaaaccagtggcgacgctaccatctgaactaagccctgggccccgtgtcggataccagtcagtgccctgctactgcccacccacccgtcttccataacctgaactgatctcacccacatactttcggttctgaacaactttcctttccttcctactccatacctacgatatgtaccttcatgtgctgtgtacggaacacactcttttcatctttttcttcccttacaaatcaatgacagccttcccctcggatatctcccgtgtttgatctttaatcccctctccattagcatattgggcccagaggatcccttgcaaaataagctacctacctaaatccatcatatgtccctgatttttctaggacagccccaatttaaactattccatcccattgtccatcagcctgagtatctccatttttggtttaaaaaataatgtcactttgtaccacagcctactgacctggccttttccagccatttggctctggagcataactgggtaatccaattatcattcacctgggatttttcttccccgcctgagtcaacccaaatgttggaactgccaggatttctaggtcagcatgaaca

SEQ ID NO: 1879548 - DNA, 4001 bp, Homo sapiens
tatggccggatgcagacgccggtcttgctaaacaggtgtaccagatgccacaaaatcctttagttgatgagaagggaagccacgtgggctggtaagggcttagtggccctgccctggctcttagtggactttgctcccaacctgggaatgtggaaagcaatgttatcagttgtagtagggagttggccagaggccaactgtgggtttgcccagttcttaccctttcgtttttgctatgaccccccccttgactggccctcatcagtgtaaggagtgatcttctatccttgcttatctgcctagtagtcaagttggcatttgttaagagagcagaagagccataccttgaattgtccccattttcattatgatggtgtggcatttttattcacataccttactggcccatctcattggtagagagttatggagtgatgcacttctttacttccctatcctccacttcaggaggctctctgggccattaactaagacataaaacaatgacagtcacaccagagaagacagtgaataaccttgtctattaggaagaatgccatttgtgaatgatgaacttaatgtgggaaaagactgcctgaaccagtagacctgtggttttgtagctgtttggagtatttcttggaaattgagcctcaggaaggcaagtgagactagaatctaggctgcctatctctgagctggtcatctcattgaattaatggtggcagtcattggttacctgaacattttaggactcctgtccacacgtggtattccaaaagtgttatcctgacgttggtaagagcttgttagagtttgtccaccgaggtcttgaagcatatgagatatgaaaataaattgctcagtactactctcaagatgttttgtggttacccggagtagctatccaccaggtatcaggaaacatctttgagttcctggttttattattagccatatcatagtgtttcagaactttagcatcacctggggactcaaagaaaacacctagataccttagaggttgtgacttagttggtctggggtaaatcctgtgccagaaccctgacctagactcagtgactgcagcagaacccaggctttctggttcttctgaatagttccctccccacccagggacatccttttttttcctatttgtaggtttgttttgttttttttgttggtttggttggttggtgtttttgttttgttttgttttgttttgttttgttttgttttggagatggagtctcgctctgtcgcccaggctggagtgcagtggcgcgatctcggctcactgcaatctctgtctcccgggttgaagcggttctcctgcctcagcctcctgagtagctaggattacaggtgtgtgccaccacgcccagctgatttttgtatttttagtagagacggggttgcaccatgttggtcaggatggtcttgaattcctgacctcgtgatccacccacctcggcctcccaaagtgctgggattacaggcatgagccactgcgcctggccctttgtttttttgagatgaggtctcactacattgctcaagctggtctcaacctcctgagctcaagcagccctcccacctcagccttccaaagtgctgggattacaggcacaagccatcacacccagccagggacaccttatttcttaagtagctggtctcattttgtaggtaatgctggaggatggaagaagcaaagggtttggcttcgtctgcttctcatctcctgaagaagcaaccaaagcagtcactgagatgaatggacgcattgtgggctccaagccactatatgttgccctggcccagaggaaggaagagagaaaggctcacctgaccaaccagtatatgcaacgagtggctggaatgagagcacttcctgccaatgccatcttaaatcagttccagcctgcagcgggtggctactttgtgccagcagtcccacaggtgggtgtgctgtttggtcacagctcttgggaacctgccggctggcagtattctgcagtggttggggagagggatttttcgttattagagttctagaatgtcacaataaggacccttcaagtaaaaatgaaggacttacccatggtcacaaacacacacccacagtggcagtggtagcataaaacagtccccattagctgacccctcagctcttgaatagaaagaacatttaaataattagcttaggtcctggttagtgagatgagatgagatacttctctaggatgggttcagtccttaagggggtgtttgggtattcttctgtcttacaggctcagggaaggcctccatattatacacctaaccagttagcacagatgaggcctaatccacgctggcagcaaggtgggagacctcaaggtaggtggtggggaacagtaattgacagcccaggatatacctgtcctggtctcccctgcctttccttcttccccactctgaggcacagcctaggttctggtccacatcacttctcaatgatgtgcaatttttctcttcaccaggcttccaaggaatgccaagtgctatacgccagtctgggcctcgtccaactcttcgccatctggctccaactggtaatgctccggcctctcgtggcctccctactaccactcagagagtcggtgagcaaactggcctttagaagtgtggcctggggaggagggagtcaggatgactaggctctgtcctgggttggtcagtttgttgggctcgaatttatcgagtcctggttctgtaatcttagctgtgtgcttaggtggccacttcaggagcagagaaacagtatgagttctaggtgtgtcagttgcttttaacattctttgctcatcggtgacctatgtgaaaaaggttagttgtagaagtttgctagctggatgaccacagaggcagcttgttcttttgggtggggtgaggaatacaaggaaacagtgtatacagaatatgtcttgtattccaagatgtggaaagagttgtatgttatcctttggctcatcctcgaaagtagtagtggccccctgtgcaatgtgttgcgtaaacgtgctttgaaatttctccttccgtgggacgtggccagttggacatctgccgccaacactgatgtgcatttgctggtctgttgtagggtctgagtgcccggaccgcttggctatggactttggtggggctggtgccgcccagcaagggctgactgacagctgccagtctggaggtggtattggatgcacacagaagggggaaagatgggatttgacgggtctttgcccagactgatgggctttaattgtatttgttctttccctaaggcgttcccacagctgtgcagaacttagcgccacgcgctgctgttgctgctgctgctccccgggctgttgccccctacaaatacgcctccagtgtccgcagccctcatcctgccatacagcctctgcaggtgaggttcaccagacagaatgcttaaaaggatttcccccatttccacttgatgtaaaagaagctgtgcttttgattccttcaacaggtattaaatgcctgctctgtgttatgacgctatgttctgattcactgtccctgcccttcaggggctcactagtgggaaagaaggggcttaaaagtgctctgcctgatgccagttcactcagaaatgcctcagagcgggcagccagtgcttcctcttctgtttgtacgaaataatgtgctcattcagctgtttgagcctccaggtcacttccgcatccaatgacctattggatccttggctgctctgcaagatgattggtacattaatgcaggaaataacttcaacttacagatcggatgttcagcttcaaagatgtaaagtgtgtgtaggaggtgaaggggttgaacctagagcttagattttctaagctgtaacttgctgtctctagacctgtgctctagatgcaactagtttgtttcagagcctaatagcaatttgctgtggaggtgtcacccta

SEQ ID NO: 1879549 - DNA, 4001 bp, Homo sapiens
gaatctgcaaaggtcatttagcccagcgcttcttagtccataaggttcaagcattttacctgggaactttgttagggaggagattttttttttgagatggagtctcgctctgtcacccaggctggactgcagtggcatgatcttggctcactgcaagctccacctcctgggttcacaccattctcctgcctcagcctcctgagtagctgggactacaggtgcctgccaccacgcccagctattttttttttgtattttttagtagagatggggtttcaccatgttagccaggatggtcttgatctcctgacctcatgatctgcccgcctcggcctccaaaagtgctgggattacaggtgtgagccactgcgcccggctgagaggagattcttattcaggaggtcagggtggggcctcagcgtctttaacaagctcccaggtgatgctgctgctgctgatctggggaccacactttgaagagcaagaatttactctatgtcaaggtaggctacatttcagtgaccatcacagtcaagtgaatgtccatcctgatacagagaagcaaattctcttcttcaacagctttcttaccttgtagaagctcttactcagcaagcacaaatccctttagtttcatgcccattttttcaagttcttctctcagcagagatggagatgcaaagtagccctctcccatatcataatccttagttatttaaagactactaagtcagatctatttttaaaagcaccacttctctctctgttcttatgcctgtgttacccaggttggttagtaggaatgaaactcctggggcactcttggctgaggacttggcactggaaacattcatgatctgcttatgcagctggaatctcctcacatgcccatatactattctttctcagttctctacagtaaaggaatggcaaagttataaaagtcaaaatctgaagaggagtgaaaacctccacttaacctttagtatcatcactcctcttctcagaactcgatcaagatgttattcacaggtaacagtgacctggtttggattttctctttcctccctggctctacatgtctcatggtcaaaagaacttggaagcaaagacttagccatctaccatggccaagcaaaggaacctgcataacccccaataggcctgggcacagtggctcacgcctgtaatcgcagcactttgggagaccgaggcgggcagatcacgaggtcaggagatcaagaccatcctggctaacacagtgaaaccccatctgtactaaaaaatacaaaaaaattagacaggcatgttgacgggtgcctgtagtcccagctactcgggaggctgaggcaggagaatggcatgaacccgggaggcggagcttgcagtgagctgagatcacggagccagactccgtctcaaaaaaaaaaaaaattaataacccccaacctgaatgagagtccacaggttggatctgaagtacccaatagtccgtgttcgagggttctatccccctgagctctctgctttctttctgccccagaaaggactgctgtcaggtctttgcacgtttgtgtgactttaagtcaacatgtttcctctctccaggacacttgtattttaaaacctttctctccagtatggaatgaaatttgtcctttgttaaagaagctaatggtcccaggtgacaggttattttatgtattatacctgcctaggatggcacagtagacattgcctactagaaagaaggtactgccacttacaggttcacagtgatatccggggtggaagggaggactcttccaggagaaagcaaggcatccaggaggagaccaccaagagggcctgtgtcctttgcaggtttctgggggtgcagagttattcagaagtctgctgttaccctgaccccatcctcagcagaacttcctccatcatttcagaaggtaaaatgaggcaactagagcaaaggatgagatggcaacttctgttttgctttttttttttttttttttttttctgacaggcagtgtgtagggagctctgtatggggagtatgactcaccagtattggtcatgactctgggcccaggattcacaagtgttccaaaattagcaactggccgtggtgtacacccacagagcagttagacatttcccattgaaaacactcaatgggaaagctacaaggataaagggaaggttaaaagagctgtagattattacagctcttctagttagcctacggaatatcttcctctctgcttgtccatttatatttctcattctctttctggagaacacattcctctttgcttcagcatttagtacttgttcattcatccatttaggaattttttttaattgaacatcttccctgtgtctagcaccgttctgggtgtgagggaggcatcagaaataaagcagtccttagtctcctggagttcatggttcagtgggccaaccttgggcaagtgacctaatctcttaaaatttcctcatttgtgaaataggcataataggccaggagcggtggctcacgcctgtaatctcagcactttgggaggccaaggcaggtggatcacctgagctcaggagttcgagactagcctggccaacatggtgaaaccctgtctctacgaaaaatacaaaaattagccagatgtggtggcacgcacctgttaatcccagctacttgggaggctgaggcaggagacttgcttgaacccgggaggcagaggttgcagtgagccgagattgagccattgtactccagcttgggcaacaagagcaaaactctgtctcaaaaaaaaaaaaaaaaaaaaagaaagaaagaacgaaaaaaaagaaatagacataataatgtacctgattcattgtatatatacaatgtatatatagcactcatcagagtgcctgatgcttagccgacatttaatcaatgtaagttgttagcttctgttgagaaactggtgtgggactaagatgattgttgtcctgatttgcctgttggtgtcatagtcagatcttcaccctgggaacttagggcctcaacagtaccatggctgggaacttagctacagtggggagggacccagagatgctgagcttagtatatgcctccactccattggtcaaactcgctcaatctaaaaggagctgggtaatcagtgagtgcttggtggtggtaataaagaatctgtctacggtgtaattcaattttgtagtcgttatcttttccattttagtgtagggacccacccaatcagacagctgcacaatgaaaataaaggctgggaatgccagggtgtgtcactggttgtagtcccacgctagcaaggggaaagtcaggttgcaaaaccagcgctgcctgccttcagtggagaaaccatgtaacctcccaggcctgcagcttccctaggcctcagttccttccctgggcatcctccttggtgaggtttctggatccctgcaggcactggtagtttttggtttgggtgctcatataaaactccttacaagtctgttaacacaatcttatcttactgtcattatttgcatgttagttccttaataggtcctatttctttctgtcttcctgatgacccttccaagagctcctttaggtttggaaaaggcagagtagatcctctggccttccccaatgaggacctgggtgggtggtggtggtagtagggggtcggtagacaaagccatctttaaggaggtgccttctgcatcaccctccattgtgagattccaggcaggtgccttaaaatagctctgccactagctgatcactcaatcccatttacaagggcaaaccttcttctgtcagggagaaaaggtttaaacatacagagggaggtaactgttgcagtaagtagccttaaagcaagcagaggggcgctaaatcatctctaaacttccaggtctatgattctaagatcttaattatcctaactgggaaggagagaagaaaagaaaaaaaaaataggtgg

SEQ ID NO: 1879550 - DNA, 4001 bp, Homo sapiens
aggcgggggaggtccaggaatctgcattttcaataagcaccccagaggatgctgatgcaggtgatccagtaaccacgctttcagaaattctgctgttgagaactaaaaatgtgattgttatcctctgctcagtaggggaaacagaggtgtaaaataaaataactgagttcttgctctcttggtgttgacaaactttcagctgtgagtggtgtggacactaaatgcaataggaatacaaagaagggaggcatcacttctggctggattgtcaagcttcataaaagatagggggtttgaagaaaagaaatttcaaaaagatgaaaaaaaaatgggccgggcgcggtggctcacgcctgtaatcccagcgctttgggaggcggaggtggccgaatcacgaggtcaggagttcgagacaagcctgggcaacatggtgaaaccccgtcgctactaaaaatacaaaaaattagccgggcgtggtggcaggtgcctgtaatcccagctactcgggaggctgaggcaggagaatcgcttgaacccgggaggcggagcatgcagtgagccgagattgtgccaccattgcactccagcctgggtgacagagcaagactccgtctcaaaaaagaaaaaaaaaagtggattatttcaagatgttggaacagcaaagactaagtgttgaggatgcataacttcttttaggggatcagtatgtggaatgatgtgcctgaactaaaaagagtttttgtgggcacatgtaggaatttacacttggaaagacaggagtcagatcgcagagagtcttgaatttggactctattctgcaggtattgggtggttcctcaaacacgcaggtaagataaaagtgatcttaaaagattgatgtggcagtgagtttgaaagccgtgaactacgtttggcggtctttgtacacattgggagaaacgccaattgtgaaagtagatttaacatgatctggagcttgactatgtgagaaagcgaaaagtgtcagaaacgctgctgaggtttgaacctccttgactgggaggattatgtacaatttcaccgcccagcaaatctgaaggaggaaatgttttgaggatagtatgtttggttctaggtctagaattcaacttcctgccaaatttggaatcttctgtacatatgcatcaggtggcttcgtttaaatatacgacaattacttttattatgttgaaaggaaaaggtctggagctcgagggaggggattacagatttgggtccattggcgcaaagggaggctgactgttcagattaataattattaacggccaccgtatggaaagcactgcacgaaaaactaagatgaccagtcctcgtccttaagaaattcaaaatctagacggaatctccaagaaagagattccggtaagagtacatggcaagcctccatatccacacaccactgaccaatgaatttgtactcttctcgttggagtagttgagggcctttggctcaaggaggggtgaaaattagcaggatactaaattgggaatgagaaatctctttttagagggcgtggacttgcagaactctttgaagcagcagatgctagactgcccaaaccccacgcgagagtagctctctggagttgcggagtccgaacctcccaagagctacaaatttattccgcaactaccaattttgcggtttggggccagtaaggcgccaagacccgcccaggtgtccagacctcgcaacgattggacgagctcaccttctcgccttccccgggcccctcgcccgtcaatcacactgcttgctcgccacctgacctctgctgcgccccctttcagtggtgtaacacctggcgctctttcgcgccccagccctccggcgccccaccaatcgcttcagttcttcattggccagcagagaggtgagggaagggaaggggcgctctattttgctctctgaacgcaccctctcaagtttcccagtcttctcgtagacggtcaggagagcaatgacagcctggagcagtcgcgcgtgagcgcaaaaatgcccgctggtggaggagcgcttcccctccctcccaagcgatttgccgcatttgttctgacgcaggggcaccccgctcgccgtcttcacttacgattggctgtggccgaagcccgtcacacagcccgccccactcctctgcctcaagaggccgcacctcacgccgtcgctgccgcttagccgtgtgattggctaagagggctggcatgctttcccgccccctcccccgccgccgcaccaagaggcgggcgggaccccgcggaagttgtcagtcaaactcctccttcccaccccttgcgaggcccctccccgggccgcgcgccctggcgcgcgcacacgcgcacacactccccagtcgcctgtaccaaccaccttctcaagttgtagcggtcgctcgcctggggttctccgtgggcggccgacgggcgcgtgggggagggggttcgggccgcccagcgcggcaaggagcgagtgtgtgcacgcagagggccggggctacggggcagcgccccgggcgatgaggggccggcgttgaccgggaagagcgggcaccgcggcagtggctccgaggggacccgcgatggcagcgccctgagaggaggctccaggcagggcgggctgcgctggcagcggccgctgaggtgctggccggccggctggctggcgacgggggcagaagcgacgagaggcgcgctcggcacccgcacccccgtgcccccgcctcagttgtctaaacttcgggctctcttccacccgctctgcgcgcccagagtcaacaacttcttcacccccctccgcccccgcccttccctccgtcagccccgggagctcgccgcgcgccggggaccaggaacctccagcgctgagatgtggccgtgaggcgttggcgggcggcgaggagaagctcggcggcgtcccggggccggagggccgtggggccggggcgcaggggcgcgagcaccccgcgcctctcccccgcctcctcctgccgtctccgccgctgcccgtgccttgcaagcagcagccggagctgccaagcgtcagggccgcggagatgtcgtcgtcgtcgccgccggcgggggctgccagcgccgccatctcggcctcggagaaagtggacggcttcacccggaaatcggtccgcaaggcgcagaggcagaagcgctcccagggctcgtcgcagtttcgcagccagggcagccaggcagagctgcacccgctgccccagctcaaaggtaacctccgagggcgcagccccagcagcgagcgcaggggctggcaacgcttgcctctgcgccagcagagccatttcctgctgggtttctcctgctcagttgggactggtagtgtgtgagccgagttccccacaatgccttggcgtcacctcacgccctcctccttattcaaacaggttttctgtgaagtcttggctgtttccttctaattcccacctgaactctttccatcctaggggaggccaacacccttccccacctgcgcgcttgcttaacctgcacttcctatcttgcgtcccgtgaagtagagtccttcactcctcttccaggtttgccctttcccggtcttgctttaacaaccgcacgaaccttccccgaccttcactttcccgagtgtcagctcctctgttcggccacttttagctagtcctttacttttacagttataaagccgtctgcacccaccttcttctcaacttcacttcccattgattgcccctaagagtcatcagaccaggaatccgaatgcaaacaacggttaagagttagctggcctttggatgtatttataaagaaaaagcctaaaatttgaccagtgtagtatcttattcacaggatcgttagctttaaatggtatcctttagctcaaggaatagatttaaaatattctgttgtctgagccgatacacatggtctatttggaaatacgaaggagtaggtagtgttgcttt

SEQ ID NO: 1879551 - DNA, 4001 bp, Homo sapiens
ctcaaacttgataagatttataaacaatgatccatgaagtactaactgatgtgttcctgtaaatagaaccatcataaatttagaaataatttttataagtgagaatatatcacaaatgttgaagttttttcttcataaagttttttttttccaaatttaacagactattttgactttggaaaaatctatacaataagaatataattttcctttgtttgaaccttgtattttctgcatccagaagctctcaaattctgtgctatgtaaaaaataccacttaatagagaaactagttaacttgtatgtaaatctatagccataggatattaatagtgaaaaacggactattgccttccacaattccatcaatattcaaaagtatatactaacgcttcaatttaactgactaaagactcttgcatatatttatgtcatccaattatggggagaaccaatattactccttgtttgactgacttagtttctcagtattaaattcattttatggatggaatagaaacaaaatattcttaaactttttagaaactggaaattcgaagaattgctaagtacaatgtttaaaaaggttttgctttctaaaaatcaactgtccggttagctatacttttagcatatgacaccaaatcttcttgttgcccgacttacttatatcttcctctagactgtgagctccctgagtgggaaattatgtcttttcatatttaaatacttagtgcttaagaagcagaaagcactcagtaaattcttgttgagtgaatttgactagcaaatcactacaaaaggtgaattataatcagcagtattttgaaatgaatcaaataaggctctctactcttatcctttctcctacaatctctattatataaccaataggcatggtctgtttttgtctatatggtgtgtgtgtgtgtgtgtgtgtgtgtgtgtgtgtgtgtgtgtgtgatgtgaatgtttcaatgcacccttatagtcttggagcagaaagatttaagggacagccatgattttcaccaaaagaagtgttttcacataatttagatgtccattaaacactttccctggtaacgatacatgattccgattcctttgtgttagatgtgcaatttcatacaattagaagagagaaaagatgaacatactgtcatttttttaaagagagtgttgccatgagatggagtaaacatcagatgactggaaataaatgctctattggggggaggttcagtagtacaacccaggcactgactggggagatctggattctagtcccacgctcctctgacttgctgtgagagctagactagcctctgggtgcctgtttttttcttcatctgtaaaatgaagatgcttcatgacctttaagattctttctaattctatgctttgaataacttctaaataacagaatacttgaattgccaaaatttaggccttaagcctttttttttctttgctctattgtgccttcagtaaatcattatgatgcaaacgtgagtttttcagaatttccatttttcagatgggagtctgagccgcctgactttgagtcatgtgatagattgcctaacctcatcttaggcagctagctcctttggaggaggaaaacaagctagactcctcaggacaaaagagcttattctacatcactgtgatgctggctcaatctgttattcactaatatttttagatcaaattgagtaatttcactgttcagattttcctcctgcctgtcttatatgcaaacaaaccaatatttttttggaacaaatgcaatgtaaaaatcactgttcatgcttcctggtattccaaactccttccataattccttttaccctccccaagtagctcccaacttttgttccctttccaatattagagcattctcctggattcttgatgtttacctacctcttttctaccctgaacgctggatctccactccttccatcagcattttaaaggctttgagatacagaccccctagataaaacacaaggatatcaaacattgcaaaatgacatagctacttttaaaactttcttctctaaaggaaaattaaaaacttgtcttctttgagcagtatatactacctgatttataactatcatctaacaccattacatatcatactttaatttttaagataaacaataaatacaagtcagaattatattagaaacaaaaaggattaaaggagtaccaaattgaaagcaaagatttggtcttggtacaggctctgccacttgaaccaagcaatctctaagagccatcccctcagaaagtctgtgattctgtgacttactacatctgtgtctacccatggatgatagaatcctccagaatcacaatacaaatccaggtgactcttctgttaaagaaagggaggaaggaaactaatgtttttgagagcagaatgcaccccatatctggtgttgatcatgatacagaattatctcatttatgtgtttgttttgtcttgttttttgtgatgtcccacaagctgcagtgcagtggcacgatcttggctcactgcaacccctgcctcctggattcaagcgattctcctgcctcagcctcccatgtagctggaattacaggtacatgccaccacgcccggctaatttttgtatttttagtggaggtggggtttcgccgtgttgatcaggctggtcttgaacgcctgacctcaagtgatctgccctccttggtctcccaaagtgctgggattacaggtgtgagccactgcacccggcctcattagttttttaagaactttagcagataagcctgtttcctgcgtgatgtcatagaaatatcttcaagatgaattgtttttacaaatggtaagatacatatgagcatccatggcataatctcattaatgaaaaaaaaagtaggtcttgcatatgcctagaaaattctggaaagctacacaagaaactattaatagtagttaactctgataaatattattgggggttaggaataaagagaagatttttactttttcattttatattcttttgcactttttagaaaaacccagggcaggcactaaccttgttcttatatctgctttaggagaaaagaaacaagaggaggctttgaagatctaagaaaatcagtatttgtagtgtaacttattgtattgttttcttcatctgtgatgagaatgatattaaagtataagaaaagacatttgcctaactatagataaactcataacgttttcttttacaggaataagtggggagatactaagttgtctttgctctgcctttggaatgtaactttcaattttttggttaatgtagctcagacataaatgaaagtgggtgaaataaagacttgtgtgtgcaatgtgatgcaattacaatcatacttcacttaatgacagggttatgttctgagaaatgcattattagacaactttgtcatgaagtatcctagagtgtgtttacacaaacctagatggtatagcttactacacacctaggctatgtggtatagcttattgcttctagtctacaaacctgcatggcatgttactgtatttcttctgaaaaggagtttagataacctctaaacaaggtatctgattcagatataatcacaattgtgaggtgacattattacagaattttaccgttctctggaaaatagctgatatgcacgtatacagggaacttggaagtattagttgccaagatctaactagggcaaggctggagttactgatggtcttcctcaccacagataactttcttttagtaatgagattttccaagtttttacaagaaagagggaaaatgtgtttacactgagaactataatgtatgaaaagtttagcagtaggttatctaatcctttccactcattatactagtaagaaaacagactcagagaagacagataacttgctagagatcacacagctagttactaggaaaaccaggacttggtctaggtctctggccctg

SEQ ID NO: 1879552 - DNA, 4001 bp, Homo sapiens
taggcatgcaccatcacgcccagctaattttgtatttttagtggagacgggttttaccatgttggtcagactggtcttgaactgacctcaggtgatccacccacctcggcgtctcaaagtgctgggattacagcatgagccgctgcgcctggcctgcatgcttttttctgaccatacagggaggccaagtgcagtcccacagccagaattctctgtcttaaatctacttctagcatttttattttttatttatctttttctgtctctcatggttgagtgcctgatactcttattaaatttaattaattaattaatttttttgagacagtgtcccactctgtcacccaggctggagtgtactggcatggtctcagttcaccgcagcctccacttcccagtcttaagtgatcctcccacctcagcctcctgagttgctgggactacaggcacgcaccaccgtgcctagctaatttttgtattttttgtagagacggtttcgctatgttgcccaggctaatctcgaactcttagggtcaagtgatgtgcctgccttagcttcccaaagtgctgggattacaggcgtgagccatcgcacccagcctcacgttttatttttctcatttagtacgataccaaaagcatttctctataccattaaaaaatttttttaagtttatgcagccatttaaagtggctgcataaactctcatttagatgtttatttgaacatttagtttaaaattcctttccctttttaacttttcattttgaaataacttcttatttacaaaagagttgtagaaatattacaaagaactcccatatgtccccttcagctagcttattgtgatgtctgtcagatttctcaacttcaaagttactctgttcccctctgttaataattagtgaggaaatagtttaaaactattttatatcttattttttatttatttatttataagagatagggtcttgctctgtcactcaggctggagtgcggtggcatgatcttagctcattgcagcctctaactcctgggctcaagtaatcctccctcctcagcctcccaagtagctgggactacaggcacatgccactatgcccagctaatcttaaaattttttctagaggtggaattttgctgtgttgcccaggctggtcttgaactcttggcctcatgtgatcctcctaccttggcctcccaaagtgctagtattacaggcatgggctactgtgcctggcctatatcccatttctttttcttttcttgagatagagtcttgttttcttgttcaggctggagtgcagtggcacgatcttggctcactgcagcctccgcctgccgagttcaagcaattcttctgcctcagccacacaagtagctgagattacaggtgggtgccaccatgcctggctaatttttgtatttttagtaatatggggtttccccatgttggccaggctggtctcgaactcctgacctcaaatgatccgcctgcctcggcctcccaaagtgctgggattacaggtgtaagccattgtttctggccctgtatcccatttcttgtaaaacttgtatgcattaattttagcatccattgatgtttcttgggtgaattattactataatggttcctaaatggtgattttctaattacattattccttctattttcatcagctgtcgtttcactctgagagctttctccccctttattagattcttatttaatggattataatctgttattatcagtctttatcttgatgctgaattgctccagatctgaccagtgggagctcctcaggctgattcctttttccttttgacctgtcctcactctgagcattttcccattttcaggcacaacaaggtggcccagacttaccttacgccttctctgccccagccttggagtcagccattcttccaaggagacctgcttccttttttttttttaagcaattgtttattacactcctgctatatgctataagatgatgagcaaaaccagacacaatttcagccctggaaggagaaaagggaggtcgatattaatcaagtaataacattaatgggggcatttctcaagtgagagaagtgcactaaggaaagaaatgtgattctatggtagggtaataaaagatccttgactggggaggggcagcataccagtaattaactgatctgaagaatcagtagaaattaacttggtaaaaagtgaaagtggatggctgagtgggaccagcattcagaaggcaggtgcctgcagagaaagccatcagttttaacaagaaatgctgtatcagagatgaaactaaacctattcctcatcttttcttcttgcttcaaacataactttgaaaaatcatttatgctgtctttagcctcatcccttccccaaacttcacattgttctgggttttaggtgtctcaaaaattttttttttctcccggaagacccatgactcctcttgaatattaagtgcctttttctatctgtgtcctaaaccttttttaaaaaaataatttcaacttttattttcaattcagtgatacatgttcaggtttgttacatgggtattgtgtgatgctgagatttggagtatgattgatcctgtcacccatgtactcagcatagtacccaacagttcatttttcaacccttgcgccttcacccctcatccccatctagtagtctccagtgtctgttattgccatctgtgtgtccgtaagtacccaatgtttagctgccacttacaagtaagaacatgtggtatttggttttctgttcctgcgttaatttgcttaggatgatggcctccagcagcaaccatgttgctgcaaagacctgaattcattctttttttatggctgcaccctgcttcttgttagtggagaatagtatttcaaaaccaagatctacggaggttatcgtgagctgaaatcgcaccattgcactccagcctgggcaacaagagcgaaactccttctcagaaaacaaaaacaaaaacaaaaacaccatcaaaatctaggtactagatatgcttcatgctgttgagatatgaccactgccagggtctttctgtgggcagagctaaagagttatatgttgggggggtgggcacagtggcgcacgcctgtaatcccagcactttgggaggccaaggcaggaggatcatttgagtctaggagtttgataccaacctgggccacatagcaagaccctgttgccacaaaaagttaaaaaaattttagtagctgggcgtggtgacacgtgcctatggtcctacctacttgggaagctgagatgggaggatcacttgagcccaggaggtcgaggttgcagtgaggtatgatcacgccactgcactctggtctgaatgacagaaactgtttaaaaaaaattatatgtgtgtatacacacaaatgtacacacactatcctcactatatttatttttatgtctttgtatatataacacacatatatacacatatgtatacacacatatgtacatatacacacacacacatatatatttctgtattattgttcgttttgagacagagtctctctttgtcgcccaggctggagtgcagttgcatgttctcagctcactgcagccttcactgcctaggctcaagtgctcctcccactgcagactcctgagtaactgggactacaggcacatgccaccaggcctagctaatttttaaattttttgtagagacaattatttttcttttttttttttttttttgagacagattctcactctgtcacccaggctggagtgcagtgccatgatctgggctcactgcaacctctgcctccccagttcaagtgattctcctgcctcagcctcccaagtagctgggattacaggtgtccactaccacgcccagctatcgagacaattttttgtaaagactatattgcccaggctggtctcaaactcttgggctcaagtgatccttattccttggcctcccaaagt

SEQ ID NO: 1879553 - DNA, 4001 bp, Homo sapiens
ttacctaagactactttaaattaaaaaaagaaagggagagggcaaaggaaaacaagcagctcccaaagtagcaggttgtgacccaggagcttgagtgcttagagctgaatttaatccacacccaggtcaaatataattctccaacttggaagtggtccaggacacccgagctaacattttttacctttgccaaagagcctggggcagtttggtgacaagcaatcacaacctcacttctatttctcaactgaaagaaagaccagaatcatctcacaggtgctttcccccatggcagggcactggtttaagctcaaggactaagaaagtttgcttccccttgattcatcattgcctcttgcatcacttattctctggagatatattcaaaggtctatttaagttggagagttgggtcatacaattttaggtggaaagactgaatcacagctttactccatgtgtcagccttgaccacttgattatatactgtgcttggacgtcacttcatctctcaaagccttagctgtgggaaaagcctgggtgattgctctgtgtattagaaactgaaaccccaccactaaatgctgaaaagtggtccaggcaaaaggtgctgtggaaatctgaaagccattatcttttccacacttcctctctcttcaccctcattttgtttgggaatgcacatgaacacccgtgaacaaaaataaaccaacccacccttgactgattgttctgtcttttgagttatcaaacttgagtgcttctggctcccagatatgctgaagtagagactgctgggaaggcagccacaaattagagttgatcttccagtatcttctacctgtaaggaatggttcaggaaattataattaatgagtcctgccccaaagttgaaatcatatttggatttcagaaataataagaaagcatataagaatcctggtgtcttttcttagctcaaccatgtccatccatactttctggcccttttaaaccagttactctatacccagtccatatacattttgactgtctgccctcaggaactgtctcaactcagggcatctttaaggaaggcagaaccaccttaggaggtagagggtgaaacgtggcaactcttccataggcgaatcaatatagcagacatgctcaaggtaggaggttttgctagggcttaaatcaggctgtcaactcaaacacaatgggctttgttactcctgtgtaaagaggaaatggagcagtttttggcctcctcagactgtattgtagggtatacaggatggcaattccaggcacaatcttcaggagacacaaatctgcttttagctattcagtgttccccagcaagttaattagctgtttctgaaatgcatggaaatattcagcattttcatagtgaagccaatctcccagatttaagctttgggggtgggaatgagtatgtgaggaagagggtctgtcagggaaacagaatagagcccttttggtgagagattccaacacctgtgacttatcttagaaattacacatgcactgtaattccaagactttttttttttttaattggtttgagcactcgagcaggagggcttgctgagacctctcactattttaggcgtggggagttacctctgggttcaaaagtctttgggtgggaagcacagaggaactgcgaaatgcctccctcagaaatgtccaattgctcaaggggagaagcagggagtggggtcaggtagcagccaggaaggttgcaggggccacgggcacatcctctccctgagtggtaaggtggcaagtgggtttggggaccattgctttgacaacttgtcaagggtgcggagagggctgtcccagcaaggtgaagaggtctgtaggaaaggagtctccccagagacctcctaaggaccagaagagcgcgcaccccgccaagtgacagaacgtgccccctctgtgtccgctcccttcccccgcggccaatcaccgggcagaggcgtctcacgccagcaggtcctccctggctcctctccttactcgtccgggcggaccaagcctcagcaggagccccgcctgtctccaggcagtttgagcccccgagcgctcgcccagcctgtcagtaaccgccgtttgcgttttcttcctttctttctttcttttttttcctcctcttttcttttccccttctgcctttgtcccgcttagtaactgggctctgaccaatcgccgccttaccggccggcgccggctgtctcctgattggcccgcttggggcgcgcagccgtctcccgctccttcgcaggagcaaggcagacaaaagacgcaggctccaggctccggcaaccggcctcagccaatcaccacccaccttgcctctcttccctcgccccactccctcctcgcctggctcgcgtgctcccggcactgactcctggagtgcggccagcgcccggatcgtaccattctgattgaggctgggggagagcgcggatggctgattggggagccgaagcctagagagcggtggggagacgtgaaagtcgagatggagagcagctttttgaacatgttctcaggcacttgacagaatcccggtacatcgaggcgggacggcgtggaaggggcggtggtgatgcctgctgtcccccctcccggcgcggttgggtggcgcctcagcgggtgggcagcatggggcggggagggtgtcccctccgcgccgttaaaatgaaactctagtggctggagtccgggcagagcttgagggcagttggtgcggtcgggttggttcttacaccccggcgggagcgcccagacaagccgagctgactggacttctccggccggccccattcccgaggctgcggcagcttcggttccgagaccgaccggagaggagcccgagtcccggcctctgggggattcgctctctgcagaccagtgggaccccgaaacttgaacgcaatctccagcccccttttttgccttcctttgtcacttgcccgggtttctcccaacgtgttcttttttttcctcttcattctccctccttcgaaggacacaaaagtggcttccgcggaaagatttggaggcggtgggagcttttctccccggagagcgactgtgtagaaaggatttttgggaagccgctttttaacacctctgctctccgtcccccaagcctctgtgtaatcctctgaggagaaaagcccatagcttgaaagttcgggggcattttgttgtgttctgtaggagagagggggaggaccctgttcgggtagtttggccggactggtactggccgttggaaaacccgaagtacatttccgtgtggaacttttgcagatatatatttttagatttttaaataccagataaaaaatatatgccttctatatatctcctggcgacctgcccctgacagcgcgatgtacaatacggtgtggagtatggaccgcgatgacgcagactggagggaggtgatgatgccctattcgacagaactgatattttatattgaaatggatcctccaggtacttgggagaaaaaaaaaaagaatctcgtgatgggtctgatttgtatttaccaagagcttgctgatgttttcagggcagaagtattcctgggtgcgctaggttcgggatgaggagatttgcagttacagctgcggtaaaactgcttctggtttacacgtttaaagtttgcagttaggaccctgatcctattgtcctgcgaaggtgggggtgggggctggaagtgggggtgggaggagagacccctttttaaaattatcattattttttactttgcctttgcgtgtcgttcaggtttttcttgtgcccgccactttattttatttttttctttttcaattaaagactcttctacctgcaaaggatgttttatatcccggggttaaaaccagtctttcactttgggcgaattcttgaaagcttgtcctttcatacatttgtctaatttggttcgttgtgttttaccccggttaact

SEQ ID NO: 1879554 - DNA, 4001 bp, Homo sapiens
tgaaacttctcaaagtcaatatatttactttctgaccaccattctctctgtaataggactcttgttaaccctattttctcaaaatagtccatgaccttgtctcacttcccatattctcagaactcttggccaccttgtataattttgatagtgtaactacataatttaacatcaaaattagatatttttatgctgggactgtaggtgaaacagaaattgtctaaggaatatcaagacttagggtggaactaaatgttgagcaccttatccttcttaaaacttatttttttcttggtttctaatgtatgttaccctgttttttgcacttttaaccaattacacactcaaatcctctttactggctttgttttttctttacttcctacctatcaaatgcaggtattatatttgtgattttctcccagatttatatatctagacttgaatgctttctcgaatatatttccaactatcctctagccatatttctgttatgtctcccagacattgcaagttacatgtagatagatagatacagaatcataatatataacatttatgtaatgcttacttatgcctcacatatactgacttattttattttcacatctctattattatacctattttacagaagctgaggcacaaagaggcttaagttacactttcaaggtcacaaagatagctaatggaattgccaagatttgtcccttagtactggagaacttcccaggagctttccatctgctgggtccaggtgccacttctcagagtcagacagatcttccatattcgctttctttcttgcaccaagtcacagaacctcagccagaacttccttctccttatgctagctgccaccgctacatagctccactcctacacccctttccccacccccaactcaccctggatggcgaaggaggcacaatttctcctgtgagctcttccatgctctccagtacaaacaagcacaaacataatctgggggaaggaagtggtgcaaattataacaagagattgcaaaaataaacacttggggaaatacaattattcaaagtttcaacactcatgatctgccctataatttttacatgtcttctgatacagtaactaacgagaagtctagtagaaattagcactttttttttttttgagatgggggtttccctctatcacccaggctggacagcagtgttatgatcagggctcactgcagccttgacctccctggctcaagctatcctcccacctcagcttcctgaatagctgagactgcaggtgtgcgccaccatgcctggctaatttttaaattttttgtagagacagtcttatcatgttgtgcaagctggtctcaaactcctgggctcaagtgaccctcctgcctcgaactcagtggagagattacaggtgtaagccactgcacccagcctgaattataaattttaaatggatgatttacaaaatagcacaaggcaatttctggagatatggatatatttaatggatatatttaacctttggttatggcgatggcatcatgggcgcatgcatatgtcttaactcatgatgatgtataccttaaatgtgtgccattttttatatcaatcatacctcagtaaaactaaaaaataaaatgggtgatttgtccctcaataaagctgccctaaaaagtaaaagtacacaatcttcatgatactgatctaagtttctcacattcttcataattcagagtctgcccttttttcctgaaagcagctgttgttgttgatgtttatccacgttacttgaatggatcactactcgtttattttaaaatgatgattgagcatctaatatgtgccaggccacgttctagatatggaggaagagtgtagcgatgaactgcagagcgttcaggaagttaccgtttcatcgcggaagacataagctaaagaagtaaacaaaggaaacacaagtgttccctgcctgtggggaaaggaagggccctgctgcccacctgcagccgaccctctgttcagccaattcaccttctaagcgtcattttcttcatctgtgacgtggcaatcattatctttgttttgcttgccacacaggattttttaaaagaatcaagtgaaataagtgctgtgaaaagtcctcaaactgtaagaaatatgaaatttaacgttaaaagaaggtttgtgtatattcaaggaaaagaaatcttatgtttaaatggaaaatgtaaacagacacatgaaatgtccatgaatctggggaagagtttcctcagtcacattcctccaacacttgtgtgcatttttagtacagtaacgatgcttaagattgtgtaactgaatatcgcatcagaacaatcaaggttacccttcaaagcagttatagaattatcttctcctaactaaatataggtaccttaacaaacagaagggcttccccatgagccaaatgaaatggcctttatatttgagatactcgcttacttaaaaaataaaaaaggaagcaatttgctaaatttgcagcttttccttcctagaactttgagttaaaatacttgcaaggaaagatttttcacatgatgtatatttagaaataagaaaaagaattaagtaaaaggtaaatttgttattggtgaaaggagagggtttgcatagagttttatattctatctcttgggtatgtttaatcttctgaattttaaaaacgattaccttgtatctaccttttctctttcttgattcctttatttaacctttgaatttagtaaaaagtagtctctgttttattatagttataaagattaaagctgatctttacattttccttttttaaattcaaaactttggtcatttttcttttttaataaagatggttatataaaattgatccacctacaaatgatgtaggaatttcagggtcttattgagattagtctctatttattaattataaggtgcattaattacactctaaatgataattagcctattcgctaatctattgcttattttctattggtttcatacttggctttctgcaactggtatttaagttagaaattttgtttgaaaactaactttagtagtgaaatttcctacattactagacattaacaaaatatcataaactgggtggtttataaacaacagaaatttatctctcacagttctggaggctaggaagtttaaagatcaaggaaccagcagatttggtgcctagtgaggatcatgctcctagactaccatctttttgctatgactgcatagtggaagcagggaggggtctctctggggtctctcctttataagggcactaatcccattcacgagggcagaaaggacttaggctctatctcctaatgtcctcactttggggttaggagttcaacatatgaattttggggggaaacaaacattgagattatagcagtattattatacattcaatttgttatttgctgattttgctccaagcagcttcctcaccatcaaatcactagctatgcatccatcatcattgctcctccatgtctcctatttaacttctcttctttgaaattctcttccactttccatcttacctcttcaatgccactttgtctggatctctgactcctcttcttccctgacttagaaatttggatgttcttaatcatatccacggcttgtctctgtttttttttttttttcacctatatttttttctttagtgatcccttttatttcctagcaccatttcttaaattatttcattttacatgtaattcattcattttacatgtaatttatcagtactagaaactgtaaaccgtcattgatatgtatgtaaacactaaatctataatctgtagtcccatcctctcttcaaactctgatttcacacttccacttgagatgtccttttggagaggctgaaatcttcaatctcattttcgcaaacctaacccatagtctttcttctcctcaaacttggcttttttttttttttttttttttttttgg

SEQ ID NO: 1879555 - DNA, 4001 bp, Homo sapiens
gggtttcccgaatacagcacactgatgggtcttgactctttatccaatttgccagtctgtgtcttttaattggagcatttagtccatttacatttaaagttaatattgttatgtgtgaatttgatcctgtcattatgaagttagctggtgattttgctcattagttgatgcagtttcttcctagtctcgatggtctttacattttggcatgattttgcagtggctggtactggttgctcctttccttgtttagtgcttccttcaggagctcttttagggcaggcctggtggtgacaaagtctctcagcatttgcttgtctgtaaggtattttatttctccttcacttatggatcttagtttggctggatatgaaattctgggttgaaaattattttctttaagaatgttgaatattggcccccactctcttctggcttgtagagtttctgctgagagatccgctcttagtctgatgggcttccctttgtgggtaacccgacctttctctctggctgcccttaagattttttacttcattgcaactttggtgaatctgacaattatgtgtcttggagttgctcttctcaaggagtatctttgtggcattctctgtatttcctgaatctgaacgttggcctgccttgctagattggggaagttctcctggataatatcctgcagagtgttttccaacttggttccattctccccgtcactttcaggtgcaccaatcagacacagatttggtattttcacatagtcccatatttcttggaggctttgtttgtttctttttattcttttttctctaaacttcccttctcacttcatttcattcatttcatcttccatcactgataccctttcttccagttgatcgcatcggctcctgaggcttctgcattcttcacgtagttctcgagccttggctttcagctccatcagctcctttaagcacttctctatattggttattctagttatacattcgtctaaatttttttcaaatttttcaacttctttgcctttggttcgaatttccttctgtagctcggagtagtttgatcgtctgaagccttcttctctcaactcatcaaagtcattctccatccagctttgttccgttgctggtgaggaactgcgttcctttggaggaggagaggcgctctgctttttagagtttccattttttctgctctgttttttcctcatctttgtggttttatgtacttttggtctttggtgatggtgatgtacagatgggtttttggtgtggatgtcctttctgtttgttagttttcctttcaacagacaggatcctcagctgcaggtctgttgctagaggttcactccagaccctgtttgcctggctatcagcagcggggtctgcagaaccgtggattttcatgaactgcaaatgctgctgtctgatcgttcctctggaagttttgtctcagaggagtacccagccgtgtgaggtgtcagtctgcccctactggggggtgcctcccagttaggctgctcagggatcaggggtcagggaccctctagaggaggcagtctgcctgttctcagatctccagctccgtgctggaggagccaagatggccgaataggaacagctctggtctacagctcccagcgtgagtgacgcagaagatgggtgatttctgcatttccatctgaggtaccgggttcatctcactggggagtgccagacagtgggcgcaggacagtgggtgcagcgcaccgtgcatgagccaaagcagcgcgaggcattgcctcactcgggacgtgcaagaggtcagggagttccctttcctggtcaaggaaaggggtgacagcacctggaaaatcgggtcactcccacccgaatactgcgcttttctgacgggcttaggaaacggcgcaccaggagaattatatcccgcacctggctaggagagtcctatgctcacggagtctcgctgattgctagcacagcagtctgagagcaaactgcaaggcggcagcgaggctgggggaggggcgcccgccattgctgaggctcgcttacgtaaacaaagcagccaggaaactcgaactgggtggagcccagcacagctcaaggaggcctgcctgcctctgtaggctccacctctgggggcaggccacagacaaacaaaaagacagcagtaacctttgcagacttaaatgtccctgtctgacagctttgaagagagcagtggttctatttttttttcaatcattgactttcattttcatttttctgtggtatcgttttgcatagtatttttttttgtaaaatactcaaatatgtctatcttttccttcataattaatgcttctgtgctttttgtaaaaaaaaaaactgtacatactttgagtccataaactaatctgctgtgttttgctttgtgcattttatttcctaatctatttgggttttatttctgtatttggtgctaggtagagacccagcttggtttgttccatatggatgacccattgatccaggaccattcatttatagttcaaattttcatctgatctacgatattgtttttaatatgtattgcgtctattcccaggctctttgttgtgatccatcggtctagctatacaaatccacagcaatgtaaactaaattgttttaattactataacattacagtaagtcttgctatctaaaactctgttgctgcttttcttggccttctgcactcctatataaacgttctgattaaattatcaacttttacatgcataaacacacatagacacagacacttccaatgggtttttagtgaattacatagattttaataatgaatcttcgatctatgtctatgatagatttttccatttacttaacaccctgatttgtctcaacaatgttttatagttttgcgttttgaagtcttgcacttttgattacatttatttataggtatctgatatttgatactatcataattggtatcacaataaaattttattttctaattgtttactgttagtatatagatatacaattgatttttaagtattgactttgtatcaataaatgcctttttgaattttatataattttttaattgatatattacaactgtacattttttggttgtatatgtgatgttttgatatatgtatagaatgtataatgatctaatcagggtaattaagatatacattacctcaaacatttatcttttttaaaaaatttgttataattttttgtgttttttaacttttaagttgatggatagatgtgcaagtttgttacataagtaaacctgtgtcatgagggtttgctgcacagattattttgtcactcagatatgaagcctagtacccattagttatttttcccgatttccattctcccactttttactctcccataggccccagtgtgtgttgttcccctctgtgtgaccatgtgttatcatttagctcccacttataagtgagaacatgcaatatttggttttctgttcctactttagtttgctaaggaaaatggtctccagctccatccatgtccctgcaaaatacatgatcttattctttttatggctgcatagtattccatggtatatgtgtatcaaatttgctttatccactctatcattgatgggcatttagtttgattccatgtctctgctttttgaacagtgctgcaatgaacacatgcatgcatgtgtctttataacagaatgatttatattcctttgaatatatacccagtaatgggattgctggatcaaatgacatttctgtctttaggtttttgaggaattgccacactgtcttccaaaatggttgaactaatttatactcccaccaacagtgtatactcatttctttttctccacaaccttgccattatctattttttgacattttaatgatagccattctgactggtgtgagatggtgtctcattgtggttttgacttgcatttctctaatgattagtgatgctgagcttttt

SEQ ID NO: 1879556 - DNA, 4001 bp, Homo sapiens
gccccttacgaaagacagatttacaagagaaaggtatacaaatgtattaatgtaagttttatgtggatggaagcctttggaaacgaagacccaaagaaagagagaagcttgtttatttttatgcttgggttgatgaagagtggatagtcatggagaaatatgattggaggacaaaaaggtgtgatctgatggtaacaaccttgggggaacttagcaagacctccttgttcagattcttcctggcctctgtgtctttgaggataaggatgttcctttcctctaggtatagagatggcacctttttttttttttgagactgagtctctttctgtcacccaggctggagtgcagtggtgtgatctcagctcacttcaacctctgcctcccgggttcaagtgattctcctgcctcagcctcccaagtagctgggactacaggtgtgtgccaccacgcctggctaattttttgtgtttttagtagagacaggggtttcaccttgttagccaggatggtctcgatctcctgacctcatgatctgcccacctcggcctcccaaagcgctgggattacaggcatgagccactgcacccggcctgaaggcacctcttgaatgaggatcttgtggtctctttcaggtggtcagaaaattctgtctaggtttgatagtctgctttaggggagaagggcaagaggaggtcagagagtgtccttactgcttctgctgttttctaaaatgccaaggggccatattttggagcagcctgtcctgaactccaacagcaaaggtagaacagggcagagtgatagcctggtcaggaagtgaatgaatgggactcacagccacactgattgtctctagtgacaccaagagctcaggtgaggctaaatcagccaggaacccccaggggcccaaagaggatggtcaggagtaggaggaagacatcacaagtcatagaaaagagataggagggccgttttctctgcatatgccagttataacagttgaatttgcactccccagtactcctagagactctaacattgtgagaaagccaattctttcagaatgtggaagactcgtcagttggacctgccaaatccacctgtatactttgctatagtatcagaaatgattcttttttattttctctctccccaaggaccaagatggatttccagcctggatgttttggcggggattctacccagcggtggggggaagaaccacgtgcccttccaaccttgcgtcagcaatcccatgaggcccgccatgagtcactgccagtggcccagactcagttgtgtggagtctcacaccctggggcgaaactagctaagttcatgggtctttcctgtctgtgttctcagtgactcacccgaaacagataataacagtgaggttgggcacaccatgtgactggtgccagccagaacaggtcatgctgttaacccttggatcccaggccaccaactgctgactcccaggccctgggacaggcccatgacacacttgagtggtatctccttcctatctctctgggatacttggtcaaggtttcagttttggaaatatgaccttcccttgtaaaggatctcaaacttggggtggttactgatagagactgcatcaataactattacccaggaggggcccattgtcctaaaacaccaccagagcacaagtgaggagttttcattcatcaaattgggtgttcttcaaagtttgccaaggtgcagatcctgacccctttcctggttctttccatcagttgggtgattcccaaagtctggggaaagaaagagaaaggaggaatttaagaatggaacagatgatttctcccacctcagacaagcagactgtgagctcaccgtgtatcttaagtatttgtgggcagggtcccaggcaggactgtaacatgtcagcatatgacttaaaggcttggtgacagaacaaggatccacccagctcagctgccctgccagggtgttctcattgcctcgccagcttcagatcactccccagggatgctgcattcattatgaaaacctctggtcaaggttgaaagcctgcaggatatgtactatgacctcataattcacatgggatagtccagaggtctctaagactctccaaaatattattatgatgcaacctttaccccataatatgtgacagagcataactcaaaatttaagtgatcctttgctgacccttaatgaggttaaagtgaaaaaacaaaacaaacaaacaaacaaaagacaagatgagctgagatgctgaggctgggcagtgatctgagtgctgagggttgctgattcttcaagatacacattgctccaggtcatggggcagggtgtatatgtacatatgtgtgtgagtgtgagagagtgggggactgggtaggagactggagtagggagagggatgggacatgttgctatggagagagagcagtgaaacaggcagtacgaaagaatacgatcatgtcagacagtcgaggatctgggtctcagccctgacattcactacccaggtggctttgacaattcatgagtcttctctctttcacctgtaaagtggggtaacaaaggtagatttgttaagtgaggagataatatgtgtaattgcctaggagagttctagtcacatagcagatcatcagtggaggtccactccaatgatgactgacaactagctgagaagtgaatgagcaagccaggccagaaaattttatgaacagtgaaaactgcagcccaaagttctgtgtatttctcaacaggaaaacagctgtatcctattttatggtgtacaaatactttcacttatgtcacctcattcttcctctcagaaaccctctaaggaatttattgtagtgatgaggaaactgaggcccaagaccacacagtcggcaaggctggaactggaccctaagtcctatgcatctttatgctaccccatgagggagcagctgcaagtcatgaacacacgtccatcatgcagcatcatgggtgtggcacccaaaggatgagctggaaaatgaaacattataaagattttgtgttaactgcagaaactctagaaaccaggcattgattcctccactccagaaatatttattgaggatctacaatgtgctgggcactgatcccaatgctgaggatatgtcaatgaaccaactaaacaaagcccggattcctaagagacaacagtaaacaataagcatagtaagtgagtaaagtgtgtcgtattttagagggtgttaagtgctttgggaagaggaaggagtagagcagagtaagaaggatctggattgcaggccacaggatggttgcaatttaaagtaagttaatccaagtcaaccagactagggaaaagatttaagttgggggtcaagggagtgaggagtgaatacccagaagcagagtgttccaggcagaaaggaaagtcagagtcaagtcctaaggcaggcagatgcctggcatatttggggaaacttcaacacccagagcacagtgctggcaccatgaagattgatggattgattatgatggtggatcaccagcccacaagctcagttttatggtttctagaaagtctattcaagactacaaggcccttccactgatacactcacaaatctgagcctcttgggccagtacattgaatgagatagtatcgttttagtaaggattcttttctctatcaagggaatcttttcaatagtgaattgtgttcttgtacttaaaatatttcatctctaaaggttccattgatgtctgactctgcagaaatgacttggtggtatagacaggaccctgatatagggatctctattgatgacacttgacctgctgctgtttagttatatgttccataaaggcagcccgtaggtcccatctctttactcaggcactgaagtgttccctgcatctggcgcctcttgtccctacatccttacctcctctgctgtcttttacacatccctcactataagtcaagc

SEQ ID NO: 1879557 - DNA, 4001 bp, Homo sapiens
gctcatggtatggagtggagagagatgatgctaaaaaggtaggcagtggccacaccacgaatgatcttgtggggtatgttaacaaacctggactttctcttggcctcagaaggatctagaaggggtgtaatattttcagattgttaactataactctctgacccccttgagtgaaggagacattattatcagctacaagagtgacaaaatgaggacctgagaatcaagatggtgatagacggtatggtttctattgagatatacaggcagacatgacagacgatgtgggggtgactcccaagtgtctggctggggttaatctgttgatgacaatactctcctcacccacccccacccccgacccatccaagtagataatatggaaagaaaagcaaaatggaaagggaaggtgatggattcaaccttggatgtgttgaatatgcttccgggttatctaggtgaagatttccagcagaacgttaacatgaagccaagagggaggaagtctggataggaggctgaaatttgaatctacaaaatattagcgatactaggaattctgagtgaacagccagtttttgtgaggttttgtttgttttacttaagccattctaataggtgggttgtggtagctcattgtgatttaaatgtttattttcctaatgtctaatgatgtttaggatctttttttgtttgtttaagatcttttaaaataattatttgctatttgtgtatcttctttggtgtctattcaaatcttttgcccatttttaaacaacgaactgttttattattgctttctgagtgctccttatatattctccatacaagtccttcatcagatacatgctttgtaaatattttcagtatgtggcttcaagtcttttgaagagcataaatttttactttgttgaagtccaatttatcaatttttttcatcacgcttttggtttaagaaatatttgcctaaataaggtcacgaatatttcctcctatgttttcttctggtataggtttaggttttccatttacatctacgatccattttgagttttttggggtgtgtatgtggtgtgaggaatagatcaacgtaatgagaggggataaaacacagccacgaagagtttatagataggaagtgcaaaaaggtggatggaacctgggaatgaaaaaaagccaaggttcaaggaagcggagttgggcattgtcggggaggcaacaggaaaattctgagtaaccaacactgcctgctaagaaaagcaatgacagctgtcttttttaacttggatgaggtcaccttgggaagagcattttcagtcaaaacaaatcttccctatttctaattacatgtaaccaacagctttataagaattcccccggcagaaacacttgagaggtctgaaatccctgagcactattaaaggtcacttctttaggtacaggaaggtctgggattcctgacactgagggtgactgaaacatccttggggcactccaggcataaggtcttggggacaaacccaaggagtcattgccttgttgggaaatcagaagcacactcactgctgggtttgccaatctcacgcttcaccaggaagacacctagttgaactacaggaggatgagaagactggaattaaaatctgtgcactcggccaaatccggggacaaatcaggaaaatccttcccagccctccctgtttctggagaggaggagtagggcgcagggcccctcccgactctcttccacgtggctcctctcgagcgaagagctactgcacttacccaggcttaggaagcgggtgtttaagccatgggttagagggctcgtgagcacgcccgatcctttccctgaggctatgaaacggtggctccacggactcctctcggccgactgacctttcgccgccctgccccagcagccggcgggtttcttcagtggagccgggctctggtctccgcagcccagtagcccgctagcccggccccctcccgctagtcgtaaagtgcagtaaaggcaccagcattttgcggcaccgtaggtgaggccggcggcgtgggccttttctctgcacggagccggcgcttttgcagttgcttctgcggaaaggtggtagttaagaatttgtaaaggccagagaactacctacgattctctcagcgggtaattggctgctcctaggtttgtgtaacaagaggcaaaactggtagggttgtttaaaacctcttatcccagttcttaagcgtgacataaggttcccaaacccctccttgtgacttgcctcttctcttgtgctactttggttgtcatcgtgttcatcactagattttagatgtcctcggtgttactgacggtttttctgtccacttcgtcttgcagtctctcttctcctcaagtttgaaatgctttatctcatcgggttgggcctgggagatgccaaggacatcacagtcaagggcctggaagttgttagacgctgcagtcgagtgtatctggaagcctacacctcagtcctaactgtagggaaggaagccttggtaggtgctgagcgttccccagcctcctgggaagaaagctatctaacatctgattttcatacactaagctgaacagaattttcaggtctgcttgtttaaaccctttgaaacgcatcccttgttcattaatgatctgaggagcagaagaatggaaattttacaccaaccaagtgacttggaaaatgaaagggtgctttgtcctattttacaagtctaattttgtggctttctccagtaaataggaaagctattttatactcctgggggatagttatcaaaaccccttatttcatgaggtagtcaagaaaccctttctgagttgagtgctaatgaggagctgacacagccttaatgagttggttatatatattcaaaaaccaagctgaaagcttccccctttgaagtgtgtccatagggaatggcgattgcctttttgtatcctatccagagagatcttatcttaaatagactatctcccaataaggcttatactgatacacttgtatatattgagtgagcctggacttaatatataaaaatgtatgagtatacacttacatgagtatacactaagtaaccaaagtatttgttagtatattatacatttatagttggccctcataagggcccagtaaatttgggggaagggtcaacttcaggttcattgtcaaactctaagtagaatgtaaatcaaaggattaatacatatgttatgggaggagggagcagatttattgtcatgtcttccaaacaaaaaatagacttaaaatttttaggcctcagattactttaaaatcttatagaaggaattaagaactgctacttgaattggccatgcatttaaataaaagttgtgtgtaaagaccaactttgatatatacatatatgtggagagagagagaaaataagtcttgctctgttgcccaggctggggtgcaatggtatgatcatggctcactgcagcctcagcctcctgggctcaagtatcctcccacctcaacctctcgagtagctgagactacaggtgggtgccatcatgcccagctaattttttgtattttttgtagagacagggttttgccacattgcccaggctggtcacaagttcctggactctagtgatctgcccacctcggcctcctaaagtgctgggattgtataggcacaagcaaccacacccagcctaaggccagctttgatttaaaaaacatttttttttctcattttttcactcttaggatagaaccaaaatatctaagctcgaaatgatggaaatgtgcgtctctaatcagtgattaaggaaaagtaaaaggaacttaacaccttcaagaaaagacagacaaataacaaaacagcagtttgatagaatgagatatcaggggatggcatagaggaaagtttggttatagttttatctttgttacatgttaatgtgaccttggacaagtcctttaactttagtg

SEQ ID NO: 1879558 - DNA, 4001 bp, Homo sapiens
aaatagaagtagatatgaaaatccatgtatcttctgctaagatggatattaagtagatttgcaataatttaaaacaatgccattcttctaagatttgtgttttggaagatctaattatatttcacagaagaatgttatgttaacatgtaaaaggtttattgtattttaaaataaattaataaatattttgaaataactcgttttaaatttttcatagagtaaatattgatacttttaacacatatatgtcctcaataatttttaagcatttaaaatgttcctgggatttaaaaaatttgaggactgcttccctaatgcatgtctcagttattacataccacatggccttataaatatgtttatgtgcctgtctctgtaatcctgcacttagatccttgaatactgagctgtctttaattattcagtgttcaaggaggttttacagggaaggaaaatatgagtgttccctttgtcatttaatgttcaatatattgaaactcacatctaaaagataaaactatgaaaactcatttttttaaagattcaaatatcagttattttgactaatttctctcaaataatgtacatggcaattataaatttctaaacaatttaaacaacaataaaggtatacacaaatgcaataatacaaaatttataacattaacatttaacttcttgtctaaaagaatcaactccatagacttactttaattattccttatttctataccagattttgtacattctcaaattactttaatgcttattttgatattttcccgtggtttcagaaagtattatattgatttcgttctggaatgttattgatctttctagattcccttcttctcagaacagcagatgttacagaatcaaggttatcaaacagttactgaagatcttctctcaggccccggtacaagggaattaaaccacagtgtcatataatttggctgagtccttttcaacaataatgttttccttgttttatattttaatgccccctctttctcacatgtatttttatctccataaattattatctttccaataaatcaagttttaaatagcctgccatacttaacacattgaatcgtctttgcaatgcagtaacctggttcaatattattaactcttcattattatttttattgtaattcaaaagatccaaccagtattttcatctcctaggaaataaaggagtgaagctgcactctaactctcatcgttagttctttgactaactgatcgaaattttgaaatagtgtggagcattctttccactgagattttatgtgtagccacatatgttataaatagctggagctggtttaaatatggttcttatgagtgactatcgctgttcaccattccttcctattcttggtatgtggctacattttccagaatgacttgagtttacccagataaacttggtaaaccaggatacaataaatgtaaaaatcccaaatgatatgccaacagtttgtttattaacatctgtaaaaactgtatacctcttaccgttttgcaaccttcttttttattttaattacctttgaaacactgtcttcacttgaattccaggataacactttgatggctcttcctgatcacctttcttcacctcctctgtcagttctttcctcttcatgtcctcaatctgtgcattcgcatatccagtgttcatgtgcatatgtgtacacacacacataaatgttaatgactaatacatttctgtcatcagcccagccttcccagaactctagcctcatatagccactgcccactctatatgtcttcttgaatgcctaatagacaactcacatttaatatgcttagctctgtgcttctggtctttatcactaaacctgcttctcttccaaattctgtaaatgccaactccattcctgcagttctttaagtgacaattttggcactacctttgacattttttctcagactccatagcagtctttcagaaaatcttgttcatgttaacttggaaatatatgcagaatctgattccttctcaagctcacatgatttctctcctggattattgcagtggactcccacattgtgatctcactgctactgttgccccacctgcaatccattgtccccatagctgcaaatggctgtttatttcacccggggaaaagccaaactctctccactggcaaaacaaacaaacaacaacaaaaaacaaaacctctacacaattctatttcctggaaatatctgacctcatctccaacattctttattctttatactaccctttacccaaagaaactcctggttctctttctcttcttcacagcttctctctggcatttattgcctaccttcctcatttatttctttctgtagtactcagcaccattgagatacaagattttgcttatttattcatttttttccctccactagaatgccagctctagtgatcgcccaaagtagacacttaataaataaaggttgaaggactggattaaataaaacatatatcaaatctgaatatcaataagaatttttggttttttataaatctaatgtgttccaattaactgtattattgctatgatttttactacatggtcaaactatttcaacctggctatctggaacctctttactatttatttatttatttattatattttattttgagacggagtttcactctgtcacccaggctggagtgccatggcgccatcttagtttactgcaaccaccacctcccaggctcaagtgattctcctgcctcagcctcccaagtagctgggactacaagtgtgcaccgccacacccaactacgttttgtatttttagtaaagacagggtttcaccatgttggccaagctggtctcgagctcctgacctcaagtgatctgcccgcctaggacccccaaagcgttgggattataggcatgagccaccatgcctggcccaggaacttctttagattttggtttttttctttataactgcctctgttacccttgaaagtattcctgtggcaaaagtaaaatttccgggcccattctatttttctcctgatgtaaggtgtggaattagctacacagaaaaccaaacagtcctgattttctgtagtggagagcagtatgagagactaaaatctttatcctaggggtttcctgaaaattggaaatgggtgaagttctaatactactgctatttctactattggagagctttagtagtgccaagctttaaataatatattattttaaggtcctaatgtcacactggtgtttctaatttaaccaattagattaccatgttctacttttctttatatgtaatttcattgtctttttcttactttggccatttttgtatctccagaatctagtccagtggcaaataaatagtaaatgctcagtaattgtttgacaagtcaattatttttatatagaatagtaagataagatgggaagttttaaggaccagtgtgatttaagtcaagtattcacattaatgtaatgtgtcactaatataagtccatttcttgggctagtttgggagggctcatgagaaagctagttgagaagcacaagtatttcctgacatttcttcttatctagtgtgctacaacatgtgttattttctccttacaatagaaatggggcctctaacagaacagattctatgtggtgcatatttatccacttgtattaaaatttcactcaatatcacctttttctctaaggaattcaaagtgctttacacagattaggaatggtgacaagtcacttgtgaagtaaataataatgctttgaaataacatagcacttatcatcagtggagcccaaagcacttcaaatgatttatctcatttatcttcacaatgttcctgtgagaaaagacaagtattatctccactttgaagataagaaaccgtcacaaactggtcatgaagtaagtcaggggcaatgatagacaatgagtgaaagatggtgcatatggga
